United States Patent Application Publication US 2011/0183924 A1 - sequence listing, part 58

SEQ ID NO: 186769 - DNA, 796 bp, Homo sapiens
gattgaatatagaatgtggcaaaattatcccaccatattacaaatgtacgaaacaagctcactgatgggcataggagtaaaggtgctgacctaagtaactttgacaatgagtggaatctatgagactaaaggctgaaagaagcacacagaagcactgcactgtggctgataaagttgctgcccaacaggtatgtggattaatgattctgaaacccctatacatgtatactagaattgaacaaaaactaaattaatttaatgtatatgcatgtagaattacaaatatattttcttgctctgtcagcagagggggcctagaagcaatgatattctgggagcagagagcctacctagcccccagattttggtttctgataattattctctaataaaatgaaccaaggttctttggagaagcgactgattgtagaatgaggacaggaaatattcgagatgaacttggagtaatttgtgctgcaagaaaataagaaagtgccaaaaagtagttgaaaaccccacaatgatggggtataccaaagaacgtaggaagtaactgaaagggttcccagtgaaagaagcattggattataaacatatgaaataaaaattcacaaactcatactgatatagaaaattatggaatacaaactatccatctgggaacagatatacacaatggaatattaaaatgaagtcctgtaacttgtagcaacataaatggaactggaagtcattatgttaagtgaaataagccaggtacaaacaaatatggcacgttctcattcatatgtggaag

SEQ ID NO: 186770 - DNA, 729 bp, Homo sapiens
ggtgtctagaggtctcgattgcattgtcttccaactgaaagggactttagcaattacgtaatccaaatacctgcccccatgcaagaatccttctattacatctctgacaaatcacatagtctccacttggatacaaggtctgacagggacctcattactttgctataatgtctactttattactggacagctttaactgttagaaaatgcttttctaaactaaaacaaaagctatcaccagcctcacaccccaactataactttcacataccggttttgattctgttctccaggacaataaaatctacttcccaaggatgatggaattttcatgcaaaattgttagacaaagcatttctttacataaacatttgttgtagatcagcatcatgatgttgttatgagccaaacagtggccttattttacaaaatcctgtcttatatcagtacttgcttgtacctatattcattcataaatatttgtgctgacctcattgtataaacttaacaggctgaataaattatgttgttcaaaattcgcttctgctatctttgcctctcacccctacttccacttccagaccatcttgaagtaatgacgcagtcaagaataaaaactaacaagttaatattagttaagcacttctaaaaacactcttactcggccaggcacagtggctcacgactgtaatcccagcactttgggaggccgaggcaggtggatcgcaa

SEQ ID NO: 186771 - DNA, 392 bp, Homo sapiens
ctggtgtaagtccaagagtccaaaagctgaagaacttggagtctgatgttcaagtgcaggaagcattcagcacgggaggagaaagatggaagctggaaaattcagcaagtctgctcttccactttcttctgcctgctttattctagccgtgttggtagctgattaggtgatgcccacccagatttagggtaggtctgcctcttccagtccactgactcaaatgttaatctcctttggcaacaccctcacggatacacccacgatcaatactttgcatccttcaatccaatcaagttgacactcaatattaaccattacactgatcattattgaaatgaggtgaataatctgtgggcacacattgcattaagcagacaatgtcttttaagtta

SEQ ID NO: 186772 - DNA, 222 bp, Homo sapiens
caagctcttgttgagaaaatccctgttgaaacttctcagtgtcaaaagcccaggtatcacaggatagagtagcaatcagcaaccaaaccatgactgtatgtggagatgacatattcagccccagataatgtattcacatgagtgaagggtggagtcattgcctgtcagattctacagtcatttggattagagagggcaatacagagttaggtgctactgaat

SEQ ID NO: 186773 - DNA, 219 bp, Homo sapiens
cccaaagtgttgggattacaggcataagccaccacgcccagcctaataattgttttaagccacagaattttgggataatttgttactaagaatagaaaatgaataccccaggcatcattatgcttatgttatgatttggcttgttttataacttttcctatgggaacacataatcagaatattctaatatagtatatggggaatagtttctcatcctga

SEQ ID NO: 186774 - DNA, 439 bp, Homo sapiens
acaaaggccatgatgagagtcaatggagatgatgacagtgttgcggccttgagcttcctctatgattactacatgggtcccaaggagaagcggatattgtcctccagcactgggggcaggaatgaccaaggaaagaggtactaccatggcatggaatatgagacggacctcactccccttgaaagccccacacacctcatgaaattcctgacagagaacgtgtctggaaccccagagtacccagatttgctcaagaagaataacctgatgagcttggagggggccttgcccacccctggcaaggcagctcccctccctgcaggccccagcaagctggaggccggctctgtggacagctacctgttacccaccactgatatgtatgataatggctccctcaactccttgtttgagagcattcatggggtgccgcccacac

SEQ ID NO: 186775 - DNA, 418 bp, Homo sapiens
tagccggaccgaacctttaatgcctgcttaggaactagaggctgaatagcgggaggtagacagagaggaagagtgatccgctaccagtcccatctgtctctgggaatgcctcagggtgttgaggatttgtgggggcagaggctgggcagctagtggacagtttggtgggcatagggaccccactcatgtaggatctcacgagggtggcatttaagtggcttggaaggagcactggagtaggagtcaggtggtaagtccgagtcctggccttcccaccttcctttctccaggcctgttttctcatctgtttaatggggaaaacatccttgccctatcatctctttaggaaggtatcagcggcaggtggatctgtgcgggaaagctctgtggaagtggggagctcagggagggagagaaa

SEQ ID NO: 186776 - DNA, 133 bp, Homo sapiens
gagaaggagggacaagagctagtaatttatgggatctagagaagggaggggggtcaagatggagacccacacccaggttctgactttagagatgaggcctctttgtcatctgcaggatgaagaactcacatct

SEQ ID NO: 186777 - DNA, 357 bp, Homo sapiens
agtgagccctgagtcaggtctggaaaattacaaatcatcccctcaaaaaaaaaaaagcaaacattgatccaactttcaactcttccatgttcttaaaaagccaacaatatcaccagtgaaatcagcgaccggtacaggaagagggaagagcttcatcgttacagtaactctagaagtcatggtagaatctactccaactgtaagaaaagtctttgcttttgaaatgctatactttccacaaaggctggctctcaaggataggtactgtcagggactggttttacaaggatgaaatagctccaagaaaaagataaaatttaatcagctcagcttttacattcccgatagtagacacta

SEQ ID NO: 186778 - DNA, 561 bp, Homo sapiens
ggagcctttatcatggttttcagaggaagtgataggcaaggtaaggtaagcaaacagcaggcttcggagtgtgtagtttgaattattctgatgggctaggatacaagagtggtctctagttgtctggtacctggccctggggtgatttagggcaggggaaagaaaatatcccagactgcaggagcctgctgaaaggaagcaggtgggggcatggaatagggaatggtttggtttgcatatcaaaggcagacttgcaggccagttgtttactttctctaggaattagccctgggagagagttatttggatggatatatttgcctatctgagtggctaaaataaaaaaatagtgactatgtagcaggaagagccacagacaaaactcctcagacaccgagttaaagaaggaaggggtttattcggctgggagcatcggcaagactcctgtctcaagagctgagctacctgagtgagcagttcctgtcctgttaagggctcacaactctaagggggtctgcatgagagggtcctgactgattgagcaagcagggggtacgtgac

SEQ ID NO: 186779 - DNA, 591 bp, Homo sapiens
cccggggaaggcatcagggactccctttgccctcccactgacctccctgcaaacctcccccaaaccaaggggcatcctcagctggccagaccctgggggaagggagagagccgaggatcaccggcacctgtggctgggttacccctgccatggaccactgggtgatcaagaagtcattccaaaatgtgaagcgttctgaagatatgcacatagcgtaagaacctggtgtaatgtgctggtcaaggcggtctcagagaggagatgacgtttgagctgacacctgagggatgagaagaaagcagccattcccagggcccaggggaggcatcccaggaagccggatcagcatgagcaaaagccctgaggcctggcacaagttggtctgcttgagaagcaggagagagccctgagcatccggagtgcagcaagcgagatgagcaagtcaagatgcagaaggactctctggcttctccaaggtcacacggctgttaggagcagagcagcgtcctggtgcccaagccctgaggtccccagcacactgcctctgcaatggccacaactgtccaaagactaagctgactctcatacctg

SEQ ID NO: 186780 - DNA, 221 bp, Homo sapiens
atcagctcggtccgggattggagagagaagggggagtggagagagaaggcctaagtttgcagaataaaatgtgtgagtcctgtataccatgacagggaattaaaactaggtgtagagatattaacttgagaaaaaataggtggatctatgacttgagggacttgaacatttagaggacatgacacattgcacactggctgcattcattctcctctccatct

SEQ ID NO: 186781 - DNA, 338 bp, Homo sapiens
gccaggatgtgggtgtaggagaccgtggttgcctgcagggaagccgcaaggatcacctgggctgcctgagtccgcatttctatggtagtggtgctggagcaagagagccctagcgggggtgggatatcacagaagtggttgaggacatcggggctgcggagcctcaggctggagttgagagccgtggacacaaaggaggctgggaagctgctgagctgggcgctgatggccaggtgcaggcagagccagctgcatggagtccatgatgggctgggtagtgcagcaggtggcagatgaccgggtgccagtcacagtccatgttggccgggaggatgcac

SEQ ID NO: 186782 - DNA, 380 bp, Homo sapiens
ggcgggtatcatatatagatatggtaaacaaagggataattcatatcttgccctggatggtgcatgatggcacaagatttcatcactactcagaacagcatgcaatttcaaacttacaaattatttctggaattttccatttaatatttttggactgtagttgactgtgggtaactgaaattgcagaaggcaaagccttgtgtaagggaaaaccgttgtagttgtcactgaattctaacaacttactgacctgaagacagccaaaatcacctgggatatgagaaaattttctcaaagaaacacatatatcaatctatattctgatgtttgtttgtttgttgagatggagtctgtcacccatgctggagtgcagtggcaca

SEQ ID NO: 186783 - DNA, 316 bp, Homo sapiens
cccgcttcggccctccaaagtgttgggattacaggcgtgagccaccgcgcctggctggctaatggattaattctaactttgacatagaattaacatttctgttatttgaacaaggaaggactcttaatctggtttattctagatctgtgatcctgtggtcatttagtaggtgtggagaactattaaccgtttttgagcagtgtgattatgagttaaatgataccagatgattggaaatggttaaatgtcagatgcttaaatggagtcagatggtaggagctagccacaatgtaaaacacaaattggagatgaagag

SEQ ID NO: 186784 - DNA, 332 bp, Homo sapiens
ccgcctcagcttcctaaagtgttgggattataggtgtgagccactgtgccaagccaggattgtcttaataagtgagaacacatctgtaaaaaacctactgtatattgaaaatatgtttttaaggtcacattaatatatattgaccttcacatcctacaaacaagttacaccttctttatagatgtttcacgcacccttaaaaaattgacatagtactcagccacaggacaaaaaaatcaggctccttaatgtcttcaagttagtatgaactaaaatcttcatccactcttaagagaaagtaataaaagtgtaaatgctatgtcttgattggg

SEQ ID NO: 186785 - DNA, 320 bp, Homo sapiens
taaaaagtacagccaccccaaaagggcctctgaggactagatcatgcagtcactgtgtatggggggatggtatgtttattgcatctccaccagcacccccagatccatggttaagagagctgaccggagcaggaacaggagactttgtcaccctctgactcctggtggccaggggcacagtgaaaagggtaggcagcttgcaggaagcaagccttatttgggcttttttttcccagcatgttgcttttgaaaactccagccagtcctctctttgcaccacagtgcagggcttccaaaatgactacacattgaaactgtgt

SEQ ID NO: 186786 - DNA, 335 bp, Homo sapiens
gacccccattgtgtgcggtgactcttttctgtgactcttaagtgtgttgcaggcctgactgtgtgtccctgactgtagcggtgtgggggcttgtgtgggactgtgatgtgtgtagggtctcctgacatgtctctctctgtttggcctggggtgggggtggggacttgtttgatctgtttggtgtctctgacaggctatgagcccactgtgtgtgagtatgcagtgacatgtgttgtgtgtgttggacacctgtctgaacaagggggcccctcttgtttactgcaaagtggcgcccagcacagcgcctggaagtcggcaggtgctcggtcttcact

SEQ ID NO: 186787 - DNA, 649 bp, Homo sapiens
ccaacgcgtgggatagacgcagagaaatctgaaccttcatgcattactggtgggactgtaaaatgctgtagcaattttggaaaaacagtttagcagtttctttaaaagtttaggccaggcgcggtggctcacgcctgtaatcccagcactttgggaggctggggcgggctgatcacctgaggtcgggagttcgagaccagcaaggcaaatctatcatagtcagatatttcaatatgctactctcaataactgataaaacaagcagacagaaaatcagcaaggacatagtatacatacatacacagaatatcaataatatcaacaaaatacatagaaaaatacatagaaaaatacatagaaaaacacatagaaaaatacatagaaaaatacgtagaaaaacaataatatcaacaaaattgacctgatttataaaatattgtacacaacaaaattcacattcttctcaagtgcacacaaactcttcccgaaaattgaagagagaatttttcccaattcactcattctatgaggacagcattaccttgatagcaaaactagacaaagacattacaagaaaagaaaatttcatgccaatatccttcacgaacagggatgcagaaattcccaaaaaaactttagcaaactgaag

SEQ ID NO: 186788 - DNA, 380 bp, Homo sapiens
caaattcatatggacttacgaagaaacccaataaccaaaacattcttgaaaaaggacaaaagttaggagatccaatttcaaaacgtaatacaaagctatagtaatcagaatagcatggtgttggcataaggatagacatattaaccaatggaatagagtcgtaaatcctaaaataaatctctacctctataaccaattgttttttgacaagggtatcaagtccattcaatggggaaggaatcatctcttcaacaaatggtgcttggacaacaggatatccacatgcaaaagaattaagttgcacccctacttcacaccatatacaaaaaaattaactgacaataaatcaacaatctacatataagagctaaaaccataac

SEQ ID NO: 186789 - DNA, 433 bp, Homo sapiens
ataggcttgacctgtacttctagggacctgtggtgggcagttgggttgtccactcttctcctctggctctgacacctggaatagagacacatggccttatttgtcactgacacctttcccttctccttcttttacactctggagcctccattgttgagggcgaggaaacaagattggagttagagggcttactatgctgggtgtgactttcatcctctgtctgttgggtctacctggtcaagcccaggcaacttctgaagatccatttgatgtaccagatatgcacatatacttgcaacaccctatcttatgcttcaggcttctcctctgctgtcctccacccctgctctactgtctctgccttgccatctgtctctacttctctttctggctcagtttctcactcagccaggcagaggggaatatcaaccaa

SEQ ID NO: 186790 - DNA, 265 bp, Homo sapiens
tgtggtaacaatttaactgtgatctagaggaacagaaggagtgattcaaaaggaaaaccttgtaggcagatgactgtgagcacaacagccccgggcagggggaaagctcaacctacacactcccagaaagctgatgtgtctggagctaggcaggatgtagccaggtgtgaacttgcagagcatgataagaagtgtgaattttattccatttgcaataaaaggccattagagtgtttcaagtgagacgtgatgaatacattttaaa

SEQ ID NO: 186791 - DNA, 174 bp, Homo sapiens
aaagaatattaacaaatcacaggatctaggatcacaggaaacttacatggctctcctgtttaatcttcaaacttccttctaaagctgttaggatgttaggaggggcacaggaaggggggcactctaactgtatcctgatcctgcattagcatttcagaggccgttggttccatc

SEQ ID NO: 186792 - DNA, 376 bp, Homo sapiens
gtcacatcccagtgaaggtcaccagcaaactgtccctcctgtctcttgccctcccaagatgagaacacaatggacacaaaatcaatttcacgggtgccacagaatgaaaaatatcagatggcaccttaagataggcattatttcatgaggcaaatacaggtatgtactatggactggatcatgagatgtatttttactgctgtaagagacaaatgattaaaaagtagacaagcacactagactatgtgactcacagcaatgaccaacaatcttacaagtacatgtgaagcagcaatgctgcagggactatcccaagccttgctgaaaaaggatgttcctgcagctccctgaaagtcaggtcctgctggagattaaa

SEQ ID NO: 186793 - DNA, 260 bp, Homo sapiens
acctcttcaagatgctttactgagaaggaaaggcaagagtagtagctcttctttccctccccactttcttgctcaatggatgggtgggtgagaaccaaacatgttttgcatgttctcactgaagaagagttactttggggaggggctaatgatatagaagagagacagaaaatacagcctagacatggaggaaggacgggaagagaaacagacagggtggagtggagaaagcgcagctgagacagttcacgttggaataa

SEQ ID NO: 186794 - DNA, 390 bp, Homo sapiens
agccctcacttgacaactgaacctgccagagccttgatcttggattttccagcctccagaactgtaggaaaataaaattttgtataaacacctgctctcaagtattctgttacagcagcccaaatgaactgaaacaccatccttgcattagccttcctcaaagccatggatcttaggtgatatcaagttcacatgaagacaagagacatatgacatcaattagaagggaataagaaaaagggacaggccatcagcaaggggcacctctgtctggccacacaggattgcacacagaattgaccacacccttggaaattgtcatctctgggaaatggaggctcccagaggctaaaggaatggtctatagtcacataccctaagtggctgagc

SEQ ID NO: 186795 - DNA, 393 bp, Homo sapiens
tcgcagttacgggcacagataagttactctctgaacctcagctatctatagaaaatggggataataattcctgcctaattcaaatcaagaggttataggtagatcaaatgaatatttactaaagtgcttaactacatgtaaaatagtatacaaatgaagatgttactaataacaaagatcagaacactaaaagatcactgatacatgaaaaaactcaaagttatatgaaacttcctagaatactatttgaattcatgagacaaaaaactcaattacagtagttgtatctggagcttatgttattgccaaatattcaacagaatacttagtaggggtctattatgtgcaggcaaggtattaaatgctagaaacgcaaagatgtggcatcaaaac

SEQ ID NO: 186796 - DNA, 705 bp, Homo sapiens
atctggcctcagctgaccctggcttgtggttttcaagaacttaggaaaagaaaacccagcttggggagctgggcagagagcaggagtcccagcctggtggggctgcattagagtcaggtccctgcaatcccaccagggattccacgggtgctctcctgctgtcctctaatgcccaggagctcatggcggggtctgctttacttctaaggagactgaggcagaactgcaagcatctgccctatttgatgcacagagagagtgcaacttactggacttattgcaggagtcgcatccaacaagagagcggtttgccaccaaaacaaagctgcgcgcggctgagggcaggaaggcgctgagaccgagaagaagggacgtcccggagaaagtgcgcccagctgatcttagaaaccagagtcctccgggacttcgccgagattttctgtagggcgttttaatctgttttcctactgcgtgccggcgtcgcagcgcgtgcggctcagggcttggtgactccggcttagcccggcggtcgcggcgaggttcctggcgcagccgcttggaacttcgcattagaatcgggaccgcgcaaatgccctggctgaagtgtcaccctattcaagaaacactgctgtcaggaacaaaatggggtccccggtgctccgaagtatcttctgaaattttcttaaaacaacttacaaaaaatgt

SEQ ID NO: 186797 - DNA, 291 bp, Homo sapiens
ctgagctttaccaggcaagaactcagtagaggactgtgttgtccccagggacatggcctcgggctgccagaagccatattaaagtttggtcaagtctctttggaatggaatgttcttgctgagagtccttgcgtttctcaggacatacgacattttgtttattcattcatgagttgctggacatttgggttggttctcctttttgctattacgaataatattgctgtaaacatttgtgtatagggttttgggtgaacatgttttcagttgtctcaaatagatatcttggag

SEQ ID NO: 186798 - DNA, 287 bp, Homo sapiens
  misc_feature (17)..(18): n is a, c, g, or t
gtggtgatctagaggannccacaagctgactcttcccaaataaattactttcctgaaaacaaagtttacaaagtaaaattcttctctataatcaacatcctatatagaaaatttaaagtaatctttaaaaagctattcataacaaataatgaagtacataaatactatcttgtggttttaaatatctaacattagtttaatatattacagtaaatttcttggtaatgcagtgaattaaaagtagaaaactgggccaggcgtggtggctcacgcctgtaagcctagca

SEQ ID NO: 186799 - DNA, 846 bp, Homo sapiens
cacatatacccacagacacacacagactgactaccaactgagagggcctaggagcaacctaatagcaacaaacacatttaatgattcaaaatatcactctccactaaaaggaaccagagctccttagaacaatgcgagggcttggacaggaaagtttaagaggagcttggaatatcttcttgaggtgctcaatgaatgacagagacatgtcaaaataatacaggggccagagtgaaagactgaggcaggctacatttgagaaaattagaatatcaaactaaataatgataataatggataacggtagcaggcaaactctaacatgccccccgatgtttcccaccgcttggtatgcatgcccttggtaaaggtgatgtgatgccattttcctaattaggttaagactgcaacttccatcttgctaacagactctattgccttcttggtttgcacgctttgatgaaacaagcagtcatactgtagatgtccccatggcacagacctggcggtgacccagtcaacaaacaactaagaattgaggctcagtccaacagcccttgaagaaaagaattccaccaccaccaacaacaataagcttggaagtggctttttctcgaaataaaaccttcaaatgagacctcagccctagacaccaccttgattatggccttgtgagagagattctaaagcagaaggcccaggtcagctgtgcccagactcctgattgaaagaaactgtgaggtactggccagacgaagtggttcacacctgtaatcccagcactttgggaggccgacgtgggtggatcgcctgaggtcaggagttcgagaccagcctggtcaacat

SEQ ID NO: 186800 - DNA, 396 bp, Homo sapiens
agtacaaaatcttgaaaaaaagtcagagtatggatacctttcaaagacatagtgaaaacatcaacccaatgatgaaatttatctggagtctccacttaaaattttttaaaaaatacatggaacttgatggttgggtgcagtggctcacacctgtaatcccagcattttgggagactgaggcaagaaaatcgcttgaggccaggagttcgagaccagccttaccaacatactgagactccccccccatctctaaacatatttaaaaagtaaaaaaatttaaaatgaaaaagaaatggaacttggtataagtgcccaagaaggttgttttgatgtctactgaagctgaacatatgcctaccctatgatcttacaattccattcttggttatacattct

SEQ ID NO: 186801 - DNA, 188 bp, Homo sapiens
ataagaaggaaagagaatagaactggtttatataaacagagcacaggtgattctgtagggccagaagcaattggtcttggacaacacacacacatacacatacacacacacacacacacacacacacactcactatgcaaatagctgcagtaaccacttcataaggtattccatggccaggcgcggtg

SEQ ID NO: 186802 - DNA, 395 bp, Homo sapiens
acaaccagtgtgaatgtacttaatgccactgaccagcacatttaaatatggttaagatggtaaatgctacgtcatgtatattttaccagaactctacaaaataaaagaaagcccaatagaggtgtcatcatacttgatactgaaattgaactccttccccctaagattaagaacaaggtgagaacatcactctcaccatttctatctatcattgtactggaaatcttagccagtgcaataagaaaaataaataagtcataaacatcaaaaaggaagaagtaaactctctttattcacagatgtacacataaaaagtcccaagaaatttattttttaaagttactagaactaacaaatttaacaatgtcacaagatacaaatacataaaaatcaac

SEQ ID NO: 186803 - DNA, 402 bp, Homo sapiens
gactgcaatgaggcaagattgctccactgcgctccagcctgggtgacacagcgagaccttgtctccaaaataaaaaacaaaaacaaaacaagaaacaatactttttgagtacccatcaggtgatatattctactaggtgccttatgcatattaatcaccaaatctctatgaggaggttttattaacatcatcattccatttctgcagatgaggaaatgcatctctcaccaggggtaacacagctacaaagtggtccaggcaggattcaaagctgagtggtctggtcctgagtttgtgatctaaacccataggctgcgcttcttccttgggtggacattgactgtaaagttacctgcatgtggatttcataggagaggaagaaggaagaaatgccagtaaaag

SEQ ID NO: 186804 - DNA, 399 bp, Homo sapiens
gtggtacgtactgttgatcactaaatggaaaagaggattttaaaaaattattgagcagttctgggccttaggatatgtttctcttgttatgcttggtcttcatttgttccatgccagtaatggaaaataaagtaaacatctgcagaagctaaaatcaaaactactccaataggtgaataaatatttcttcagaaattgaagtgtaaattttcattcttattatacacggcttctccaggaaataggagtgtccaatttgggacaacatgaaaatatcattcttcattttcattaatttactttttactagtctgttaactacacctattccatttgcctctaaacatgcactgtgtattttaagaataaataatgcttaggacaaataattactagctg

SEQ ID NO: 186805 - DNA, 172 bp, Homo sapiens
ccaggagactgccaggcctgtggtggggcccgggagcttcacaggaagctgacacaggctcttacccaactcagcttcctgccccacagtgccaacggcggctggagctccaacggctgccgcctgaccccccaagtgacctcatgaccccacaccccttatctcatctcac

SEQ ID NO: 186806 - DNA, 457 bp, Homo sapiens
ccagttcatcctgcacatgcatgctagtgtcaacaaacaacttgtcttttctagaatacaccatgttttttcaaacctccattactattccttgtccccctacagaatcagtcttcaacaactagttcaaatgtcactaccgctgtagggcattctctgaccctctcagagagcatcgttgccccttccttcatcatcccatgacacttcttgcatgccttcgacatagtgcatttctcatcatgtgtaagtctatgttattcatatgtccaccttcttccaccagaaggtgagttctgtgaggacagggactgcattttattcatttcactcatccttgcatctaggctagcactcagtgtgctccttaaaaagttagaaaaaatgagatacagagaaaaaagatgaaggatgctaaagtcagagaaattaagagatttgctcaagatcacccaaa

SEQ ID NO: 186807 - DNA, 174 bp, Homo sapiens
ctcccgagtgtctgctcactccccttccaccctcagctctaccctcagctccaccctcagcggatgataatctcaagacacgtgccgagtgtctgctccatccccttccaccctcagcggatgataatctcaagacaccttccgagcgtcagctcactccccttccaccctcag

SEQ ID NO: 186808 - DNA, 230 bp, Homo sapiens
gcctggagaagaaccttgggacttctttagaagttccttttagagatgattggtgtgatgatatttctcgtatttctcgctactccattggcctccctgggagggcgaaatacactttggctagccctaaatgaggagaaaaccgaattcatctaagtgctactcaccgtatctttaaaaagttgaaccccaagttaatcctaattaatgcccagagatttttcatgtgg

SEQ ID NO: 186809 - DNA, 395 bp, Homo sapiens
acgttgacacttcaggaataatatttcaaggaaacagtgggtaatgttgctgaacgatcaacaataatacctaatacatcgctttatcatccagacaggaggtacagtggtacaatcatagctcaccgcagcctcaaacctctgagctaaggcaattctcccgcctcagtctcccaaactgctgggaccagaggcgtaaaccaccactcccagctcaatatctatatataatttacaggcaatattttaactgatgtacatgtaataactcaatcttaaaacaaacttacgtgcttaccaataaggaagctgaggcaacaaagtcacaaagctaataatcagtgaagccaggttttaaaactgattcaagagtcaagacagagcttttcttttac

SEQ ID NO: 186810 - DNA, 759 bp, Homo sapiens
cagtactgagggaggccgaggcgggcggatcacctgaggtcaggagttcgagaccagcctggccaacatggagaaacctcatctctactaaaaatataaaaattagcctggcgtggtggcgggcgcagatgacttatgcgaagccggccacaacaaggcactccccacccactcagctgcttgtccggggaccacacagcccactcgctgcccactgatggcaaaagtcggtgcctctcagaagcctcttccggtgatgggtccttgctgctgaccccactagagctcacacagggcaggggcccagaacctggggaaactagccctagagatcctttaaaatccagcctgtgttttcttagaaggggctcaggccttcccctgaagctgccttactcgctgaggagacgacgactggacccaacgccgcctcagagttttgttttgctgaagacctgcggtttccaaactgatgaataaccagaaggactggttaaatgcggattcctgggccccatcccagagttcttgacttggtaggtccaggctggggcccagtagtttgcaattctagcaacagttcccaggcaacccggaagccgtacgtccagggaccagagtttaagaaccgccgcctaggaccaaaacaaggccggtttgggttggtagctgggcaggtagacagactcttcagatcagctttgccttagcttttttttccaggattccaaataattaaacatttctaaaattgttcgt

SEQ ID NO: 186811 - DNA, 239 bp, Homo sapiens
cattgtaattgaccagataccagctccaagctgggtcagttagatacctaagtctatgctcaaaatgaaacttttgtacactactgttgggagtgtcaactacactttggaaaactggcagtatctctaaatacacatatacctaatgacccagaaattctactcctaagtgtaaaccaaaataattaattgcatatgttcttaaaagacaaacaaagtttagagctgcattttacata

SEQ ID NO: 186812 - DNA, 656 bp, Homo sapiens
acacgttacgcagtgtcttgatgatgattctagagaaacaaagtcagcagatttgaaaataacatagcattagaacttcctgttagcttatgataaaataccagggttttaaaagtcacctaagttactttcatacatgagataatatttggctatattttgttacataataaattaaagctgaatatgaaaattgttataaattgtatctagaataaggtgatatgtataaagaagagtatatataccataattgacaggcagtgtccacttagaaaagatcttacacagtatttaaaacataatttaacaaaaagttgcttgatatttggtgagaaacagtaaagaggataaacttggaatgattttcttctttctgtgtaacacagatcaaatttatatcttagaactcattttgtttctcttctttacctatgaatttgttacggaaaatagggttaagtaaagatgctcgttggagagaaaaaaaaaaacacaactcgatgtaaaaggagaaggctaatttttatatcgtgtgttacaaaatttgcctgcatttcttctaaggatacagttttattttcattgttgttttctgaatgactcgaaatttaaaaatgagatattttatgatacaaaaaataaagttaacagag

SEQ ID NO: 186813 - DNA, 330 bp, Homo sapiens
attcacactattgttcattcaacagatgtttgttgagtgtctactgtgtcccaggcactattttgagccttagagataagcagtaagtaaaacagacagaaagttgaatatatttccccatctaagcacaagagctcatgctctgatttctattaattttaactggtaataaaataactctggataatatgacatgataaacttatcaagagtgtgcttgcctttctattgcaattttcatgactatcattttggggctttagacattatgtaaacctgttccatttaaaaaataaatttatggaacataataatccagttttggttatg

SEQ ID NO: 186814 - DNA, 184 bp, Homo sapiens
cccttccctcaaaagtcccttacagaaaaaaaaaagaaaaaaagtctctcccagagattctgatatttatgcttatcttctagcccaagtcaaaacaactgaagagtaaaagatctgaataagcaaatcttaaagaaggggccatttgatgagcttaaaaaaggaaagttcccagaaatagtag

SEQ ID NO: 186815 - DNA, 630 bp, Homo sapiens
gcatgtaccaccacaccggctaattttgtattttagtagagacggggtttcaccatgtttgccaggttggtctcgaactcccgacctcaggtgatccatccacctcggcctcccaaagttctggtattaaaggcatgagccaccgcgcccagccagttcattaatttttaaaataactctgaggtaggcactattatcctcactttatatttgaggaaaccctcaaagagactaagtaaataacttaaagtctttcaactagtacgtggcagaattataattaaaaacctgtttttgccactattgcatattgttagaaggctgtttcttcttgaggctgagctaagagaacatatatccatcctacgtaacttacagttcccattgtctgttcatttgcctatattctactcacatttcctgctttccattcttacttatttctgtccaactagaccaagaacataatattctataccctgtctcccaaacttctaagtcatggatttgttttaacctcctgctatgctcatttagctaggtatcatttatgaatattttcttctcattttcgtacccattctcaagtctaattcattgatgactcagtcacgtcagtagtttctccat

SEQ ID NO: 186816 - DNA, 404 bp, Homo sapiens
gcaggagaatcgcttgaacctgggaggtggaggttgcagtgagccaaaatcgtgccattgcactccagcctgggcaacagagtgagactctgtctcaaacaaacaaacaaaacccaaatttagctgggcatggtggtacatgcctgtggtcccagctactcaggaggctgaagtgagaggattgcttgagcccagaaggttgaggctacagtaagccatgatcaagtcactgcactccagcctgggtgacagagcaggaggactctgtttcaaaaaaagaaaggaagaaagaaaaagaaaaaggggccgggcgcggtggctcacacgtataatcccagcactttgggaggccaaggcaggcagatcacctgaggtcaggagttcgagaccagcctggccaacat

SEQ ID NO: 186817 - DNA, 322 bp, Homo sapiens
tagtattacattccttctcctccttttcatcgcatccagaaatatcaagcttgatatttctggacaaatacttttttagatatgacacaaaaagcaaaatccataattaaatgaacacatatatcagacttcatcaaaatgaaaaacttcttctctttaaaatatattaagaaaacaaaaggtcaagccacaaactgggaaaaaaaatccttccaaaaagcataataaaggaataatatccagaatctattaaaaaaaaaaactcttaaaactcaagaaataagaataaaaactatctaatttttaattctttttttttttt

SEQ ID NO: 186818 - DNA, 111 bp, Homo sapiens
ctccaacacctaatagtatatggcatgtgactgcatgtaaaaaaacaaaagtgtgtccaactggttaactgacttctcaatactcaaataaacattcatgagtgattaata

SEQ ID NO: 186819 - DNA, 335 bp, Homo sapiens
tatggtcacgccactgtactctagcctgtgtgacagagcaaaattctatcttaagaaaaacaaattctggtgaataagtctcttttaactaatcctgtctaaaatggatgatggctaataaaacaatatggcgtggctggaactctagctctagggtggtctccaaagaggacactcaagcattctctgagcagcacggggctgtgtcctggtagcagcctgaaggggtgacagtggagcacagtgtttattttcatttctcaattttgacatatttactggaaaaattaatccctagccacctcacatgacagtacagtgatcgtttttttttt

SEQ ID NO: 186820 - DNA, 440 bp, Homo sapiens
ggagccccggctcactttcagttccttgacatgaataagctctttgatgataccaaaataaaaatagtcttttataaataagtcagcaaagcctggcgatctgtgaaggcagacttccaaacatccaagcgaagtttgttgttcctttttccctttcttctttcaaaaacagttatttgtcaatttaacctccttgatccatggaaaatgacagaggcgtgcagattcagaaagggaagacaataagagcaggtgaagttgaagataggagattgatgccagggaactaaataaccagaaaagacatgtgaaatagagaaccgaatggagagcacaaagaaaatggtaaccaattttctctgaaagtgaaaggtaaagaaagctgaagatgaaactacctatttatttttaatagctgcatcaagagattgcttaggtgg

SEQ ID NO: 186821 - DNA, 671 bp, Homo sapiens
aaagttacaaaaatacaattagtgaacaatctaaaatgatatataattaagtgtgctatagactggaagtgttctaaaagcagtttctcaatatcaacccaatattttataaaagaatgtggagctgtgcccagctgacccatcgaccaaagtgaggagttacattctcaaagcaccgttgttagaagtgaggaaacagcatcttataaacatgcatgtactatcctaaagtctagatttttaaactgagtttccaatatgtatatacagccataagttttaaatgcttcttagtttccagggttttcaccttctttttcttctcctcttccattaatgtgtgcaaatgatttattcctttcaaaaactgattccaaggctggttttcccatgctaaaacagaaatgactcttatgaatttctcagggcaaatgggtgggaaaatcagatagaaccatagctttctgagggcaaattttctaaacctttatgtaaaatactattggatttattctttcatgggtatgtgtatttgtcttatgtatataggttggttccgtaacactttagagaccaagagttggcaaactgccctgctggtcaaatccagctcgctgctagtttttgtgtggcttgtgagctaagagtggttgttacatgttttaatagtt

SEQ ID NO: 186822 - DNA, 549 bp, Homo sapiens
aacattactttctagttatttcttctattgactcttcttcccctaaaaccttcaaatgttagaactgtctgccagtggaagtagaaattgatatgaccattgtgaaaaacacttgatgaaatgtaaggttttttttgttgttttttgagactgggtctcactctgtcacccaggctggtatgatctcagctcactgcaacctctgcctcccaggttccagagattctctcacctcagtctccccagtagctgggactacgggcacatgctaccacacctggctagtttttgtatattttggtagagacggggtttcactatgttgcccaggctggtctcaaagtcctggcctcaagcagtcttcctgcctcggcttcccaaagtgctgggattacaggcatcagttatcactcctgtgcctgacctgtcttgattgtttaaatttttataaatgtttgtctacaaaaggagtaatgttctccacaaagtctacttagataatgtgcttgttaatgtttgtattatcagtctgcttccctttttatttaa

SEQ ID NO: 186823 - DNA, 393 bp, Homo sapiens
aaaatatcagtcaactaagagaatctgcacaactccaaataagagaaatatccaaaagaaaggatctagggcactctttccttaccctttcatttgcattggtttaaattgggggaaactcaaaaagtgaaggctcttttctttagcacagacattcagaaagggatcggggtgaatagtccttagagaatatgtgggaagataaagagccgactctagcattaaaatgtgggtggagcagcgtattttctttttaaaagcagagaaaattttcttatttttccttcagtgttttaatcacaggcaatcctagatagcaactgtattagtcagctcaggctgccaagacagaataccacagtctgggtggctttatcaacagaaatttacttt

SEQ ID NO: 186824 - DNA, 579 bp, Homo sapiens
tgatgcagaatgggaagatgagaggaagtggggtgagtagccacactagttactcttcagaaatagccacactacctaagcagaacaggttggattaaggtctgcacatgagccaaagctgagaattcattgcctttgttggctcatgtcacttctttaattaatgtcactttctctggtttaatatcagagcaagtgacaagagtgcttctggatgaattgtgttttccgaggactgtatggcacactctcctgcagtctgacagagggacgtgccagttttacttggcagttacaatgcaccagctttagttttagtagtttaatttgtggcagttatatgttttgaatacgttgaagtattcacaacggtctcatggaatctgttccatagataaagtttacacagtgaaaaagcaaaagcaacggctataaggcgattaggaaaagcttctcttggccacagctggtcttacaggcattcctgtaaattttagagcatttagaagatatgatcaataaaattggatgttgtgtgtgtaagtatgtttaccctccaattaaagtaacgttttttaa

SEQ ID NO: 186825 - DNA, 440 bp, Homo sapiens
tctctctcccagaaaaggggggatgcacttggcccctcaactccaagttggtggtgcgatgatttttccatattctcccttaacaggctgtgagggagtctgggccaggcactaggccatgagcagggcagactggggtaaacccttagcgagcctctctccagccacgaggaaacctggagtgtgtgcgtgcctgtgtgctgctggtgtgtgtgtgtgaatgcacacgtgtgtgcatgcactgtgagctggtgtgtgcatgtgcactggtgtgtgcgtttgtgtgtgtgtgtgtgtgtgcatgtgtgtgctgggtgcacacatgcatatgtctctgtgtatacatgtgtatgtgtgccagtgggtgcatgtgtttgtacagtgtgcgtgtgtgtgtgtgtttgtgcacatgagctgctgcacacatataagccttgtga

SEQ ID NO: 186826 - DNA, 604 bp, Homo sapiens
ctgttttggtgttttatatatgtgtttcatttaatcttcatgccaaccctgtgggtaatgattgtttttatccccactttacataagaggaaactgaggcacaaagagtataacttgctcaaagtgacacaattaatggtggacttaggattcaaaatcaagaattctgcttccatactctgcttcttaaatattgtatctataataaattatagtggcaagggagaaagaaaattagtgcctaaaataaagttctgagaaacttaattaaaatatagactcctcaatttctattttaaatctataggattttagagccaaaattttactcatttaaagacaaaattcttttaactggcgctacaacttaaagacaaattccatgttcatagaggtttgaggagatagaatgacttaccaaatgcctgatccatgccagcgcctaggtgggtgaactagtgggagccataggcgaacaccgaagtcctggctgttaaaaggggcatctgtagatgtttagggtcagagtctggcactgagtcttctctctgcttgctcctagtagcccctttaccttcctaacagttcccagagaccttttctt

SEQ ID NO: 186827 - DNA, 753 bp, Homo sapiens
atgtcgatcactgtactcgaagggccaaacaataatcctgtatcataatcagtacaatcaatgacaatgattgacatggagaatggccttggcgtccatgccaccatcagggtgagaatgggctgacctcctgagcacctgctcagccgcatgccctgtgcagagcactccatgggcacctggtaacacctacccctgtcaagtgccttgcacattaatcctctgatccaactctatttgtccagtgaacccagtacagtagaggccagcaaactttattcatgatgagccagagatatttttttgccattgagggccagctaactacccagctctctgccatatgggaaaaacagccatagacaacatgtaaatgaatgggcatggttgtgtgccaataaaactttatttgcaaaaacaagcagtgggctggatttggcctaggggccatagttttcaagctcctgcggtagacaaactggaagcagtgaacaggctgttggtctgcatttacgtatttaagtatttaaggtaaatattgaagctatggccagccaggcacagcggctcacacctgtaatcccagcactttgggaggccaaggcaggtgggtcatctgaggtcaggagtttgagaccagcctggccaacacagtgaaaccccatttctactaaaaacacaaaaatcagccgggtgtggtggcctgcgcctgtagtcccagatagttgggaggccaagtcaagagaatcgctt

SEQ ID NO: 186828 - DNA, 309 bp, Homo sapiens
aaaaaaaacacaaaaaaacaaaaaaactaggtggtcattgggggtttgaccaatagtaatacaacaaaaataatgagaatcagataaagaaaaatatcagatttcacactaatccagagggccttagactacaaaaaaaattgaaactgaaaataaaactggatttttacattcttcaagggaatacagggaagatgaaaccaggctaaaaaatggttaagcagggagtaggtagtcaggaaacagaggcaagtatagatgacttaagaagcccagtcatgaagggaaagagaaaaacagaatgacaat

SEQ ID NO: 186829 - DNA, 280 bp, Homo sapiens
gctgggaggggaagggaagtcgagatgcccaagcgggagctctactgagtcacctgcaactgcccgtgcccgaacacagatgcctcgatctccccataaccgggcaatggacccctgctcttgggagctactaggggcctgaaacaataagacgaataataacatttattgatggctccctataagctgtgctaaactttcacatgtattttctcatttctatcctgcaaggcagatactgtcatagacacacctgcacacacacccatgttcagaccag

SEQ ID NO: 186830 - DNA, 563 bp, Homo sapiens
tcttacgatcctttggcatttgtaatcattacataacaaatatcttgccagttaacgttgttattacttctttcccccttcatttattttgcctttttcgtgttgctaaagtgaatcagcctctctggactgccagttcctgatgtttcacctagagatgctaagttgctcaagtggttgctttctaaggacccagctgactgacatttcattttacccaagttaacaaacttacaatgtttgtaaaacattttattttacaaaatgaattataatatgtagacaatatgtttacagatttattcaagttaggaatttcattcatccacctcaatgttaattggtttgattttttaattaaaatagtatattataatagcaatatatttttttaaatgaacctcagaatccatcctcaagggagaaagattaccactaatgttcttttactacgtggataattcatcttaaacatggagtctgagtaatagtgtctgggtggggagctctgtttagggtttaggagtcaaatatttgagattcttacggatgcttgtgttcct

SEQ ID NO: 186831 - DNA, 363 bp, Homo sapiens
aagcacgtattgtaaaatatttgctaaattttgtgtctagtttctttcacacatggattttcaggtgttccagcattatttgttgaaaagactatcctttccccattgaattgtctttgttcctttgtcaatattcagttgaatatatttgtgtgcatctgtttctgagccctcattctgttccattgacctacttgcctgttcttccaccaacaccagaagctagtgattaccaaaagtcttgaagtcaggtaatgtcagttctctcatggttcttctacagtatctccttgcctattctaggtcttttagctttccatgtaagctttagaatcagtttttcaatgtgtaaaaattggcttg

SEQ ID NO: 186832 - DNA, 371 bp, Homo sapiens
tgctgggattacaggcgtgaaccaccgctcctggcctgcttaccattttgaagcatggaatatgaaaaacacatgttcttgagggtcaagatttaataaaattaacaagttttactgtatcaagaatttgtaatttaaaggatggagaaatagaatattgctctttatgataggcgctgaaagcaatttgtagtctttttttcagcgtatcttggacaattctatccacccagtaacaataataagaaataaagatactattaaaaaagatcaaacgtatttgaaaaaataacccattatttttgaaattaggatctcggtggaaactcaggggagaggtaaaacatcctggtacgttctacttcattgta

SEQ ID NO: 186833 - DNA, 217 bp, Homo sapiens
aattctgagaaattatgtatacagcagttggaaagctctctattctgagtgtacttcaagacaataacatcatcaagttttaaacacctgtaaacacatataaatacacacactttcttctgtcaggcaaaaaatgctataatcccttatatccataattactgtttgcttacagatcccttcaactaattccctcttttcctcagaaccctcccaa

SEQ ID NO: 186834 - DNA, 562 bp, Homo sapiens
ttattattattatttttcttcaatacggagtttcactgttgttgcccaggctggagtgcaatgacatgatctcggctcactgcaacctctgtctcctgggttcaagcgattctcctgcctcagcctcctgattagctgggactacgggcacccgccaccatgcccggctaattgttttgtattttcagtagagatggggtttctccatgttggccaggctgatcttcaactcctggcctcaggtgatccccccaacttggcctcccacagtgttgggattacacgcgtgagccagtgcgcccggcctgacccatggattattaagtatgtggttttattttgaagtgtttgcagattgttttgttaatgatttctagtttaataccattgtgattggagaacaaactgcatatgatttcatttcttttaaatttgttaagatttatgtgtcaggttatgttctcagtgaacattctgtatgtgcttaaaaagtatatgtatggtctgtatatgtatggtctgtatatacatatatgtatacatatatgtgtaaaaagtatat

SEQ ID NO: 186835 - DNA, 340 bp, Homo sapiens
tggacagatcgcttgatgcccggagtttgagaccagccttgccaacatggtgaaaccccatatctactcaaaacacaacaacaacaacaaagaggctggagttgtagatccagctccgttatttccattcttctttggtaaaatgagatgtctgataatacctattttattcgttcagagcattgttacattaaatgaaacaaatgtgagagcaccttgtaaagtatgaactgagttttaaaggtgaagtggcatttatgggaggattgatttgattgtgcaggccttttgtaaaaagcaagttcctaataatttatgatttatggaagactttgaaatg

SEQ ID NO: 186836 - DNA, 356 bp, Homo sapiens
tagtccaggtctcctccagtccttagtcactcggacacagagaacacttctgagagagacatttcttattcctgcccaagtggttccaataggaccagaggctcactttcccacttctagaaagcccaagactcattttggagcaagtgcaacttggagcataggaatctctttgtgatggtccatctgcctaagacacaacacctagccatcccctctttgactcctgctgcttcaccagtgccctaacacagaaagcagacacaaggtcccaatgtatctcccctggtcactttctttctttctctcctcattctcttgcatttctctcctctcattcaagtcaaaagaagctc

SEQ ID NO: 186837 - DNA, 452 bp, Homo sapiens
tggaaataaggagctggttagaaggctgcgattttcacctggcaagaggtcagggtggcagaggagacagagcaaatggacagtatgtctatgtcagtgaaggtgcggtgaccggtgccactcacacgtaaggaatgcttatcctggagggctgggagtgatccagtgtcatctcgatgcaaagccccttgcacagcacatccattgtggcactctgttaatagtggctgtcattgcataaagagatggccaaggagatgaaccacatgaaaaatgagcctccttctccccaaatcctcaagtcctggtcagtttactctaaatcaaagtttccagtcgtcatgatgagtatgatcatcatcattattatttttaggcaacagaacccatttctaaattgaaatatgcttcagttgactcaggggtgaggttcctggaactccctcttggtg

SEQ ID NO: 186838 - DNA, 260 bp, Homo sapiens
aagatccagtgtatatatcaacagcctctgatctcctagttatcctgtttttttgagaagagctaagaggaaaaggaataagggtaagccagcatctagtatgaggaatgctttgttattcccataatatagataaggaaactgaagtttagttattgaaccaggagcacctaagagctaagaagcaaagctgaaattgaaactgagacctatctgctgaggtgagcagctccgcaagttagctccattcagaaagctgc

SEQ ID NO: 186839 - DNA, 163 bp, Homo sapiens
tcattctgcctcagggttttgaggtattcaatgctttctggcttctaggcactgttcaatagtgcagtaccattctaatttttgatctttgtacatatttcttctctgaatctcttaggaccacctttttatcactagtattcagaatctgaagataatctgt

SEQ ID NO: 186840 - DNA, 470 bp, Homo sapiens
tatttttgtagagacggggtttcaccaggttggccaggatggtcttgatctcttcaccttgtgatctgctcgcatcggcctcccaaaatgctgggattacaggcgtgagccatgtgcccagccctccctgcttttctttgctctcactcttggcaacctcacttaacacctatggcttaaactatcatctccatgtggatgaagccaatcttgacttcactcctctgagctccaactcaacctgcccagttgcacacaatacaaacttaagtcatcaccatatctccaactggcaaatctcatttccctagatctgtagaaacttgaggaattaggaaagagattagcttcagagagtataagtctaagagaaacatacaatggttcaaagcaatgatgtcaccaagaagagagagaaaggaaacgaagctagtagaactagacatctttaatcaggctgaaggtattca

SEQ ID NO: 186841 - DNA, 337 bp, Homo sapiens
gcaggtcaaagtaaaaatgaaaatttatgcttttacatgtcccaagctcagtattctgtacatttctctaaacacacacacacacacacacacacacacacacacacacacacacacgtttttttttgtagagatggagtttcaccatgttggccaggctagtcataactcctagcctcaagtgatccgcctgcctcagcctcccaaagtgctgggattaccggcatgagccaccgcgcctagccatattctgtacatttcttaaaagtttagaagtatgaacaacatttgacattcatttgaaaaatctgtccaggccgcctgcagcaccacgcat

SEQ ID NO: 186842 - DNA, 351 bp, Homo sapiens
tgttaacccacttgggcagcacgactttaattagtaaaattagccctgttgtttggccaactttcgtctcataaactctgcaaggcagaaacataaccaatcatatgttttaagatgctacctaattatataaaagcactcatcaaactttacccagaagtgtttaaaaatcaaaacataccattaatcctgaagacaaaaatatttgaggttaccttattttttaagattatgtgctcatttactacatgaggaaaaagggcttttgatagtcaaccgccttcttttaatttaattaccagaaaatgcaaactgttttcaggtttacctgaatgttatcagtttgagtgg

SEQ ID NO: 186843 - DNA, 447 bp, Homo sapiens
ttctcctgctgaaagtagtaaatataactgaaaattttaagatcttcaaacattagttacctaatatgctttggcagtagagaacaataaagtctcatttgagatgtgggtactaggtgatctgcttggctttttcattgtttaggggatatcaacatgtaagcattgaggtgtgtaaaatttaggtatttgtcattgcttgttaaaaactttgagatcactttgaaataattatatctgggaatattgtgtgtataaaggcaagggttataatgaaaaaacagttggcaagatttataaaatacagaagtaaggattgattgttgggagaaggggatgggttaaaaactttgagatcactttgaaataattgtatctgggaatgtgtgtgtaaaggcaagggttcctgtgatatatataatgactaaacagttggcaatcaagctt

SEQ ID NO: 186844 - DNA, 601 bp, Homo sapiens
ctatattaccaagacatccttgccacttttatgtcaaatatgtacaagaagaattttctgttgagatgagcaaatgactaatacatttgtaatgtaaaccaccaactagtttacagttacaaggtaattttttaatttcagcttttcttaaaccgaggcgcacctgttttcccacgtgcctatatcattattttccttccacaggcaaagttacaggaaaaataaacattcatataagccatcactataggttcaattcagtcatcttacaatgtaaaggaatagatgttcctctttgccactgatccagtcatatatacagtatatcaatagctatatatctctatctacctgtatcttagcgccctctggcgtttgtcaaaaagaagaggttttcttataggcatgacatttttcagctgtctctcatcacttcaactgaagtttccatatcaaaaaataataagtttaatgacataggaataacaatagagctttactctgaagtatcaagccaaagtaaaaactaggggtgttgtgctttgcaaatataacttaaactggatcaaagatcaactcattaaaaattctaaaattttaa

SEQ ID NO: 186845 - DNA, 516 bp, Homo sapiens
tcctggtttggaagttttcttcactgactataaaactatacaagagaacaaacttactcagaattatcccaattagattgttgttttagcagtcactcactacagggcaagatatagtccaccatggctagtaatgaaaccagctgcatcaccagcttatttctggctgcagagaaaaaaatcaaaaacattagctgagtttgggtttctgagttccccaagaatgatggcagtctcctggactcttctcatacctccttctaaaaactatacacagcaacaagaagaacaaatagaaatacccatgctctgtacctacagagtaagtaggagacagaagagagctaccaacacaaacgtatgagaaagtagggaggtaaacactgaagaacagcaggataagcgctggagctgaccctagtgtggggattatagcaagagcttcacagaggagttaagaggtcagagaactctcagtggctgtaggactcagataacagcagccaggatttctcc

SEQ ID NO: 186846 - DNA, 177 bp, Homo sapiens
gcctgtacgagctttaaatgagttctttgtggacttcggaaagtgcttacattctcagcagttcctgtaatcctgtaaccaaagaagcgttgttgatggccaaggcttattcttcctacaaatatgattgagttctgacacctggtataatgttttctttaaaatgagagccaatgt

SEQ ID NO: 186847 - DNA, 577 bp, Homo sapiens
tttcccatatatctggcatggggcctctcctgaagcctcagtagatgagcccgtcttccagtctggtgctgtttttgggacaaataggagattgaccccaggccgttccacctaccccaggggcttccaccaaccccaaagtcttcccaaggccttggagagccctctttcgaaagcatctcctgttctgggtaatgacaataataaaatcatagcagctgtcaattgcgagcacttgtcatgtacaaagactgtgccccatcggcgcatgacttcatttcacctgtcaacacccctgtgagatggttactgttgttattcccattttatagaggaggaagctgtggcttggagggctaggcatttgcccaaggtcgaccagcttgaatcactggcagagccagggttaactttcagggccccacccatcaccacggtgtggcactgcctctacttcctatccccctccagagagaggcttatgtgaaccgagtattaactctgagccataaccaggagcctgctatgggttctgagcttttataggatgtggtggaaatagcagggctctggtact

SEQ ID NO: 186848 - DNA, 300 bp, Homo sapiens
gctctcccctttcagaagcagaagcttgtgacttggcacctgtttccggaacccactatggcccaaccttctcagaagattttgcaccttgagccaaagaggatgcagggctcttgggacccaagagcctgagtagggcttctgccctccctctccggcctgaagtttcccattcatcagctggaaccttcacacctgcccagaggactgctgactcgcactgacggtggccacaaggtgacagcttgtgtcctgtgggggtagatggtgataaccatctggtaaccaagcagatgaagt

SEQ ID NO: 186849 - DNA, 386 bp, Homo sapiens
gtgacctgtctagggcacagacctgagaccaggcagctcagggtcagcctctggctttactctctgggaaatggggcactcacacctatgccaagagctccagaaagacctgacttgggccaggcagcaaggggagatgcagagcactggccaggcctggtgcggcctggccccagctgtctgggggataggacagggctccagcggcagacagcctcttagcaggtgcgtactcagccgtgggctaaactcattcctggcctgaggggattcatgggtcctcatggtctaccacatgggcccatggagtcggcacagaggggaaagtcctcctttctggcctggtgctattacccctggaactatagagaaacagagtaacacag

SEQ ID NO: 186850 - DNA, 331 bp, Homo sapiens
ttagacgccttcactggcttcagtatccacacgacacaccctcccagttcatttgaggtgctactcataagacaccttctttgtgaggccttcctgaccaccctggctaaaatcacacttcctcccctgtcttttgttgtcacattaccatctttgtttcttgatggtattcatttctcctgattttatattatatagattttgtttattgccatatccttactgacttttgatggcagaaaatctgattggattattgctccattctcagcatctgtttattccacacactaagtactcaatagatatttgtttaatgaatgagaaatga

SEQ ID NO: 186851 - DNA, 530 bp, Homo sapiens
cgtggggtactctgcgtgtgtgttgggagagtatatgttaggggggtgtatgtgtgtatgtgtatatgtatatacatatatgtgttagggttgtgtgtgtgtgtatatattaggtgggtatattatgattatagatgtgtataaatgtgtattcgtggtgtgtgtgagttaggtgagtgtgagtatatgtatatacatatgtgtgctagggttgtgtgtgtgtatatatgtgtgtgtaccaccgcttgagatgatcatcctattcatggtcagtaatgttgccactatcattaagtatgaataatattgtgtggtttatacaatgttttcacctgaatcatgtcatcaaagccatctgattccatgaaataggatagatatgaataaataggtaaatgcatagaatataagtttaaataattcattgacactcagagaatccaaatgcatgcagctggttagaagctgtgtccagatgccaaacaaacctcctaacactgaactccacagaaggcagtccaaggtgcacc

SEQ ID NO: 186852 - DNA, 143 bp, Homo sapiens
caagacatgagttattgacacactttaaagtgtaaaggcagggaaggtgagaaggaaaaacacaaagaaaattgagaattaggaagaaaactagaagaacatgatgacctggaattcaaatgaaaagcagaaagggtgatcag

SEQ ID NO: 186853 - DNA, 317 bp, Homo sapiens
  misc_feature (259)..(259): n is a, c, g, or t
  misc_feature (299)..(299): n is a, c, g, or t
  misc_feature (307)..(307): n is a, c, g, or t
taaacatcctggtatgtctttagcacagcccaattatacctacaggataaattcctaaacatggaattatcaaagggtatgtgtgcattttagattttcatcagtaactaccaaagagattgaatagttgacatcaaatgtatgtatttagaaacgctcccctggtattcatgaaaaatatatttcctctaaaactctgttgcagggtaagacttggtttgactctaataaactgtgagtggctgggcccccaggcttngaaccagaatcctttctcagacccacgtttcggccttctntcctaatncccggtgtcg

SEQ ID NO: 186854 - DNA, 145 bp, Homo sapiens
tcccacctgtgaggctatggtctgccaaggagagttcagcgggctggatcagagagagcagagccatgctggcaagtcggagtctttgtggaaagcagccaaggtcacagctggaaataaaactgtgtattccaaatcagagggg

SEQ ID NO: 186855 - DNA, 328 bp, Homo sapiens
acagaagaggcattgcagcatttggctggcttgccctaacccattcctccacatgaaaacatagtgttcctcccctctgaagaatgcagccctcaccgtacaattgaacctgctggtgcattgatcttggacttcccagcctccagaactatatgatataaatttctgtttttggtaaattacccagcctgtggtattctattatagcagcacaaagaaactaagacaattgtaaactcagcacatccagcactcagctgatatacttctctccctcaatcaaaattttctccctctagtattctctatggcagtcaggggttctacc

SEQ ID NO: 186856 - DNA, 405 bp, Homo sapiens
ccatggagtgcttagctgaggtcctctgaggtgcagagtagagacagtcatcattgcagtgagccatccagcccacctctccacatgctctcgggagaatggctggccaggatctgactattctagttctgcaatgctggagtatacacttgtacaactccaaggacactaatttggcattatatatcaaaattataaatgcacctatccttttcagtctatatctagaaatttatcctacagatacgttggtatatgtaaaataacatatgtaaggttatttattataaaactctttgtaatagcaaagaacataaatagcctaaaagtctgtcatccataagagactgggccaggtgcggtggttcacacctgtaatcccaaatatttggggggccaaggtgg

SEQ ID NO: 186857 - DNA, 496 bp, Homo sapiens
aaacataatcccactaaaaagtgaacaagtgacatgaaaaaacatttctcaaaagaagatacacaaatagccaagaaacatgtgaaaaatgtgcaacatcactaatcatcagagaaattcaaattaaaaccacaatgagatacaaccttaccccagccagaatggccattattaaaaagtcaaaaaacaatagatgttggtgtggatatggcgaaaaaggaacacttatatgctgctggtgggaatgtaaattagtacaacctctataaaaacagtacggagatttaccaaagtgatctatttctttttttaaaaatgtatttatcttaagaaaaacagcctgggcaacatggcgaaaccccatctctacaaaaaaatacaaaatttagccaaatgtggcgcgcgcactacctcacttcgatatagaaatatcattcaatatgatttccagaaggacaagtttcctggagaatacaggcatgaggacaatgcacaa

SEQ ID NO: 186858 - DNA, 635 bp, Homo sapiens
aaacataatcccactaaaaagtgaacaagtgacatgaaaaaacatttctcaaaagaagatacacaaatagccaagaaacatgtgaaaaatgtgcaacatcactaatcatcagagaaattcaaattaaaaccacaatgagatacaaccttaccccagccagaatggccattattaaaaagtcaaaaaacaatagatgttggtgtggatatggcgaaaaaggaacacttatatgctgctggtgggaatgtaaattagtacaacctctataaaaacagtacggagatttaccaaagtgatctatttctttttttaaaaatgtatttatcttaagaaaaacagcctgggcaacatggcgaaaccccatctctacaaaaaaatacaaaatttagccaaatgtggtagtgcgcgcgcatagggagtgctgagggggtgtgtgcacaggcctgggagaagggctgattttacccacagaccccaggctgttctgacctgaaacgaagatttccgaccatgcaggggtgaggcaaataaaggggtgcgacagatgagaacatttaagtacttggggagccaggagagtatgcttggttactaggagaaacaaactggctcagtatccagtatcagagtacaag

SEQ ID NO: 186859 - DNA, 115 bp, Homo sapiens
gtcttatgatcttcacaggagggtcagaaagcccttcctaggttttatgacctacttaaagtgatggtcagaaagttctccatgcacattctgtttctcaaattccctcagctta

SEQ ID NO: 186860 - DNA, 238 bp, Homo sapiens
gcaaggcagaacacactagctggcagaaggcaacatctttgaatgtcagtctgtaagttttagtcttgcattattatgattcataatacagaactaaaactcatgaaataagtggccttccatacaaaaaagtgttctaaactcaagttgaaaatttatgagctcaaaaattcccatttcacacatctgcaagaaccccaccacagccaaagcaccaggtgacataaactctaaaacc

SEQ ID NO: 186861 - DNA, 480 bp, Homo sapiens
cgattgtgaaataggtaggtgaagagaaagacaaaggggtagaaaagttatttaaagaaatattagcagaaaaatttccaaattgggagacaaatataaatatccaggtacaggaaggtcaaaattgtccaatgaaattcaatctaaacaagactacaccaggacatttgataaccaaaccgtcaaaaatcaaggacaaagagaggatcctgaaagcagcaaaagaaaataaaaaaatctcacataataaagttccaataaggttagtagcagatttcttggcagaccttacatgccaggagcgagtgggatgatatattatatttaaaatgctggaggaaaaaaacctgtcaagcccaaatactacaccctgcaaagctatccttcagaaatgaaggagagataaagacattccaagacaaacaaaagctgagggagttcaccatcacctacctatttcacaatcggggtaccgagctc

SEQ ID NO: 186862 - DNA, 590 bp, Homo sapiens
ctgcatacacaaatttgaactacattttgtagttttattatttgtattaatattgaaaattttcttaatactgttataaggttttcagtaaagcaaatgagttagtatgtataatctgttaggtatcaagattactaaaaagagcacagctcagcaaaattggcatacaagggacacaccttaatgaattaaaagccacctatgacaaacccacagccaacttaatactggatggggaaaagctgaaagcattcttcctgagaacgggagcaaaacaaggatgcccactctcaccacccttcttcatcatagtactggaagtcttggccagagcaatcagacaagagaaagaaataaagggcatccaaatcagtgaagaggaagtcaaactgtccctgactgctgacgatatgattgtttaccttgaaaatcctaaggacgcctctagaaagctcctagaacagataagagaattcagcaaagtttgcagatacaagattaatatattcaaatcagtagctcttttatacaccaacagtgaccaagcagataatcaaatcaagaactcaacccttttacaatagctgcaa

SEQ ID NO: 186863 - DNA, 704 bp, Homo sapiens
gaggacgggcaccaaatctgcattgtccattgctatttcccaggttgagttgctgaagcggcttcattgtctggggacatacccaaggttcgtcatcgcgtgacgagaagattaaggacacagacgcaaacacggagcgggtcaagtagcggaaagtttaataggcaggaaagaagagaacagctcaccggtagagagccgtcaatggtgtgccagataagaagctatgcactgaaaagatggagaggagcggcgagattctgcatcttagcttgcctaggtggggagcaggaaaaaggaggaagactgaagcacaaagcttctctcgtctgtgtcaccctctgcaaggagtttgcagttggactggaaaacccacatttcccactgagtgctttaccactctcagtggaacttaggttctgatactgagaacaaaggagagaatggacaatgaagggatcactagcagttttcattacaaatagtatcttgaaaaaaccttaacaataaggtgaggtgtggtggctcatgcctgtaatatcagcactttgggagaccgaggtgggcagattgcttgagcccaggagttccagaccagcctgggcaacatggcgaaaccctgtctctacaaaaatatacaaaaaattagccagcatggtgggacgtgcttgtagtcccagccactcaggacactgaggtgagag

SEQ ID NO: 186864 - DNA, 476 bp, Homo sapiens
ttccatcttcagtgtcatcttatgaatgctatatggccattattacttccatattccaagcaggaaaaaggaggaagactgaagcacaaagcttctctcgtctgtgtcaccctctgcaaggagtttgcagttggactggaaaacccacatttcccactgagtgctttaccactctcagtggaacttaggttctgatactgagaacaaaggagagaatggacaatgaagggatcactagcagttttcattacaaatagtatcttgaaaaaaccttaacaataaggtgaggtgtggtggctcatgcctgtaatatcagcactttgggagaccgaggtgggcagattgcttgagcccaggagttccagaccagcctgggcaacatggcgaaaccctgtctctacaaaaatatacaaaaaattagccagcatggtgggacgtgcttgtagtcccagccactcaggacactgaggtgagag

SEQ ID NO: 186865 - DNA, 692 bp, Homo sapiens
  misc_feature (453)..(453): n is a, c, g, or t
gaccaggtagactacccagtagactatccaggtagacctaactagaagtgtgaaaacgtaggcttggattaaggcgacagcgatttctaggatagtcagtagaattagaaccaggtagacctaactacagcccaacctactagccctacctactaaccctacctgggttaggtctacctggccaggtagacctaacccaggagacctacccaggtagacaccttgacctaacgtctttacgtgggtacttgcgcttactttgtagccttcatcagggtttgctgaagatggcggtatataggctgagcaagaggtggtgaggttgatcggggtttatcgattacagaacaggctcctctagagggatatgaagcaccgccaggtcctttgagttttaagctgtggctcgtagtgttctggcgagcagttttgttgatttaactgttgaggttnagggctaagcatagtggggtatctaatcccagttggggtcttagctattgtgtgtccagatgttaggtctacctggggtagacctaacaataacaaagcacgaggctacagagatctgttttgaagcattctggaaataacaaatttagatgtatttataaaatccaaggttaggtctacctccaggtagacctaccccaggtagacctaactagaagtgtgaaacgtaggctggatta

SEQ ID NO: 186866 - DNA, 631 bp, Homo sapiens
  misc_feature (392)..(392): n is a, c, g, or t
atcatagcaggatcccctcgacgtgattcaggaccctgtacaactaagcactctactctcagtatactagataaatccaccttcgacccttaagtttcataagggctatcagtagttttctgggtgtataaaatgtagcccatttcttgccacctcataccttgacctaacgtctttacgtgggtacttgcgcttactttgtagccttcatcagggtttgctgaagatggcggtatataggctgagcaagaggtggtgaggttgatcggggtttatcgattacagaacaggctcctctagagggatatgaagcaccgccaggtcctttgagttttaagctgtggctcgtagtgttctggcgagcagttttgttgatttaactgttgaggttnagggctaagcatagtggggtatctaatcccagttggggtcttagctattgtgtgtccagatgttaggtctacctggggtagacctaacaataacaaagcacgaggctacagagatctgttttgaagcattctggaaataacaaatttagatgtatttataaaatccaaggttaggtctacctccaggtagacctaccccaggtagacctaactagaagtgtgaaacgtaggctggatta

SEQ ID NO: 186867 - DNA, 507 bp, Homo sapiens
tccaccctggggcacgtctgggctacggcacctagggggagtactgtggcacccatcagagccatcagcgtgacatctgcctgtggtcttgacaatgtgatgcgatggcggttgtcagcttcccattggctggccccagtgaccctttctagagggttcagaaactcctaagggtcttccagagttgggtcattgcgcattgacaagtgcagcgccatcacatacccttctctctagtgcccactcagtcaccttaaccgaaacttccctgagccgagcatggtgctgggtgctgggctgatgcagggaagttctacccggtcctgccctgaagaaagtgaccctgtgtgcatgcatgagagtgagcagtcagttcaatactaggcctcctatctccagagtacacaagaggactggattagccgggcatggtggtgcacgactgtagtcctggctacttgggggactgaggctggaggattgcttgaggtcaacccaggaggttga

SEQ ID NO: 186868 - DNA, 552 bp, Homo sapiens
cttgtgttttcttcccagcccaagattcagaatccactggccttgagttcgccctgtcctggggacagtgggacctgtcacctgctggccaaggtagggctccaactttgtgaaaagtacatgcggcaggtctgacccttaaacaactcttctgacgtgtggaatgcagggctgggtgggagcagccggcacacctgtcattcactgtttagccactgaagggcagtgttgctccacaggaaggggccaggcagatgtgcgccatcactgtggctcccaggtcggaatgaggatattttagctagtcccaagtggctgggactgcaggaatgcatccctgcgcccagctaatttttaaattattttgtagagacggagtattactgtgttgcctaggctgatctgaaactcctaggctcaagagatcttcctacctcagcctcccaaggtatcgtgattgcaggcgtgagccaccgtgcctggccacaatgtgttgtttcattgctactgggctctactgatgttaataataaattgcttcagagctttaca

SEQ ID NO: 186869 - DNA, 344 bp, Homo sapiens
tcacatttttagatgatttggtcccattgttcctttgtatttgttctgcctaattctgctcctactgtgagtctgcccaagcatctcacccttatatgaatattcaatgttgttgcttcaggctttctatttaggtggatacctaccaaatttaggcctccagtcttgagtttttatttttatttccattccttattggcagaatccacttatgactaaaatatctgattaaagcagcctgcattaaatctgttgtattactgctgacttcacctgggtgctctcatattcatgcatctggatactccttttaaatcacacttttgatttagtttcagctttta

SEQ ID NO: 186870 - DNA, 198 bp, Homo sapiens
cctcatttgcacactaacatctacagtgtccagatctacatttatagagaatacacacctagtgcagcctattaaatgtttcacctagaaatgatgtccagggcaccccactcagactgaccaccaaaggccctcagcaaaatggccaagtaggtatagtttgcctttggtgcctactcatagcccccatctttgcct

SEQ ID NO: 186871 - DNA, 171 bp, Homo sapiens
ttagccttgtaaacctttaaggccaagaagaaaaatcagctggagagctcagtagctcaatgaagctgttttcatcaaatgtcgtaatgttcacacacatatttagccacaaacagtaacccaactgtattgccagaagtacccccctactttttataggtgcttaaataa

SEQ ID NO: 186872 - DNA, 323 bp, Homo sapiens
gcagtggtttgtccattctcaccgtttgtgatcaacattttactggaggttctagccagagaaattaggcaagaaaatgaaatacaaggcatccaaatgggaaaagaagaaatagaactctctgttcacagatgatatgatcttgtggataaggagtgcactaattgattattaaagctagtaaaccagttcagcaaggatatgggatataagaataatatacagaaaccaattatatttatatacactagcaatgaacaatccaaaaacgaaattcaaaacattttatcatagtttcaaaaagaatagaatacttagtaata

SEQ ID NO: 186873 - DNA, 800 bp, Homo sapiens
cacctgcctcggcctcccagagtgctgggattagaggcatgagccatcgcgcctggcctagattatggaatttttgtattaccatgtatgttgccgtgtaattttgttttgaaccttttttatttttcttttaattcctttgagacaggatcttgttctgttacccaggctcactgcaacaaggtgattttcccgcctcagcctccagagtagctggactacaggccggtgccaccacacccagataatattttgtattttttgtagaaatggggttttgttttgttgcccaggctggtcttgagctcctgggctcaagcgatccaccctcctcagcctcccaaaatactgggattacaggcataagccactgcacccggccttgagcattgttttttgaaggaaattttatatgattaccacataaaaaaggaatactaaaaatctaacattatttgatatctcactgtctttgaaaacttaaggaacatggacccatacaaggcagccaaatattggccggtaactcctttacaactgggctgcagcatattttattaccttctcctgacaatttcttatctggctgcttatcatttccagaacataccatccttttgcatgcctttacgccagtggcaaacatggttgtttgcctcctcataaccattctctctatcctgcttgctaatgagaccccagtactgttgatcttttccacacagctgtgagtttaggggtgggtaagccctccctacccgtggaggctgatcttcaccagactaccagacaaagagatg

SEQ ID NO: 186874 - DNA, 540 bp, Homo sapiens
tcgtggcgtggagatccgaaatgcctagcagtgacttgagcacgcttcaaaagcagaaggcgccgggcagtcccagtcactgtgctggctggaggaagccacataaaagtgtgacatcctggcatcgtacaagcatcacaaggcttttgatgtttgcttctcttccccatggaaaatcatgtacaaattcttgcttggagacatatgattaaatatcctgctatccttaataccatgagacttaagaatattggtcataccacacacctccagctgctggcatcagtatcagtcctacattctccaggcttcaaccatgtgcagctgccaagcagggctcggcgcatggcaggcaggtgtgggtcaggcattttcgcagcacgtggaaaaaacagacaggacgcttaatattaatttttaaattgtcgcatgacagcattgtacaacttcaaatagaaagctctctccagatacactaaaactcaaaacaccgatataggtcattgctttgtgaactatagcatgtatatataaactatg

SEQ ID NO: 186875 - DNA, 208 bp, Homo sapiens
tctagctgtgggaagaaaactcaaaggttttttctttttattgaggttgtattatatttacaaattagtatagggagaactgacatcattgtgatgttgtatcttcttatacaagaacatggtatgtctttttacttgtttaaatctcttgtggttttttgggagtgtttttatgactctcctcatagagttccttattgagtttatg

SEQ ID NO: 186876 - DNA, 284 bp, Homo sapiens
ccctggtctgagtccctcatttaagtggtgagaaacttaagaagctttaggttcaggattcttgaatttggtattcttactatacaatagaaagtttattggtagcaaataggcttaaaattggaatgatttcatttaggtcacaggtgaacctacttttaaaaaagtaagagtgatttgtggaaatattccatctgagtcactgtgccctaaacattattttgtaataaaaatacttaaaagaaactttatttgggaattggcaaattacagggggctgcaga

SEQ ID NO: 186877 - DNA, 506 bp, Homo sapiens
ccccatcccatctgcatagcatgcctgagtgagactccctgatgactctcaagggttggggaggaagggacagccctggctacgtggcctgagattcgtgggctgccaggggacatggactggttggattgacaagggccctggttcccccaccacagtggatggcaactccctacaggcggcacgtgtggtatgtggtttgtggtatgcagtgtgtggtgtgcggtgtctggtgcgtgcctgtggaagctgctgtcaccatgatgagcaggttttcccatccctcgggtgtctttcctgaaagtagtctgtgttctgagaaccagcacaaggaaagaaagtgcttgaatctcttcctggcagtagaggcccgtgggttagtgtcagaggaactcaggctcaccaggccctagggagtgtcattgctgtgggggtcaaagtgcttgtggggatcccccaggactttgaggcgcacattccctttctgttgcggatgatggagttag

SEQ ID NO: 186878 - DNA, 528 bp, Homo sapiens
ccatttgtctaattttgctttggttctctgtgcttttgaggtcttacacaaaaactctttgctgagaccaatatcctggagcattggcctaatgttttcttctagtagtttcatagtttcagtattagagttaagcctttaatccattttgatatgatttgatttttgtgtatggtgagagatagcagactagtttcaatcttctgcatatgtttacccaattttcccagaaccactcattgaagactgtcttttccccattgtatgttcttggcacctttgttgaagatgaattggctcaaaatgtgtgaatctatatctgggtccactactttgttccattggtctatgtatctgtttttatgccagtatcatgctgatttggttactatagctttgtagcaaattttaaagtcaggtattgtgatgcctttggttttgttctttcggctaaggattactttagctatttgaggtctttcgtggttctaaataaatttaggattttatctaattctgtgatgaatg

SEQ ID NO: 186879 - DNA, 514 bp, Homo sapiens
tgcaaccaactcccagatcaggaatcagaatccctccctccctcttgttcttcaggagtggtgagacttggcttctggtctcccagccacagttattgctcacctgaacttactttctcagcggtcacacttcatgtggaagagagtaggccacaggattgtgccttgtggtctgactccaagtgactctaaccatgaggtttccaccacttcctttgagagcattcctagtccaagtaggcctgagcattaggaaatattgacactgcagcattttcttgttgcttttagttatatcatcattgatcaccttaatggtatttttgtttgtgtgtatagtatccctgcttttcataatactgagaagaggatattttgatttgtgttcccaaagtaaagcatgaatggggagggatggccacagagaaaatgagcatttgaaattttgggcattaatacttggaattacggatatgtaggtacaaaatttatgtgctccttctcaagtgtaagt

SEQ ID NO: 186880 - DNA, 152 bp, Homo sapiens
gtaaaaccaccataggaatatacttgtcaatagactgccaggagaaaataccatcaaaaatacgtttgaatgtgaagttagcacaagcttggtgaatcatttgacctgccaggaccgagtcagatgtggaactgaatgaattcacaatggta

SEQ ID NO: 186881 - DNA, 434 bp, Homo sapiens
accattcagtagagtatagcgtgagacacatttgtatagtttcaaattcaatagagtatagcgtgagacacatttgtagagtttcaaattttctagtagccatagtacaaagaaacacatgaaatgtgttttaatatattttatttaacccaatttatcccgaatatgttcatttaaacacttaacataaattaccaggggccgggcgtggtggttcatgcctgtaatcccagcactttgggaggccgaggtgggtggatcatgaggtcaggagatggagaccatcctggccaacacgatgcccccgtctgtactaaaaatacaaaaaaattagccaggcgtggtggcgggtgcctgtagtcccaactactcgggaggctgaggcaggagaatggtgtaaacccaagaggcggagcttgcagtgagcagagacc

SEQ ID NO: 186882 - DNA, 653 bp, Homo sapiens
ccctcccttccttccttccttcctcccttcctccttccttccctccctccattctttcctttcttcctttcttcttttctttttctttgtctctcatgcctctcttttcctttctttatgggctacgggtgtaaatagaccacactgcactgaaatctacattacttaccaaaacctctggagctgcttctgtcttgtaggcagggagctcgtcctgtagcccttaggtcctcccagcctcctcctcctctgatttgtgggtgccactggggcagctgctgagtctcagtggttcctagtcatcaccaagttctgcccacctagatggtttgcacctgtccttaccagaaccctgcactgtctagatgactgaggctgcttctgcctaactgatctgctatctgtgttccgggggcaccccagggttagaggtaaatggcacaggcattgaaatctccaactgctctgactccaggttggtgcacttcaatgccaagtactaaccacacaataacaggatgccaccaaaaccttggtatggggctgctgcatcctaattaaaaaaaagtaatagatgttattttttagaacagttctaggtttacagaaaaatggagtggatagtacagagagttctcctaggctcccctgtc

SEQ ID NO: 186883 - DNA, 599 bp, Homo sapiens
gggtacctcacgtcgtgacgggtctttttctttgtctctcatgcctctctttttctttcctttttgttctactttttaaaaaagaccacactgcactgaaatctacattacttaccaaaacctctggagctgcttctgtcttgtaggcagggagctcgtcctgtagcccttaggtcctcccagcctcctcctcctctgatttgtgggtgccactggggcagctgctgagtctcagtggttcctagtcatcaccaagttctgcccacctagatggtttgcacctgtccttaccagaaccctgcactgtctagatgactgaggctgcttctgcctaactgatctgctatctgtgttccgggggcaccccagggttagaggtaaatggcacaggcattgaaatctccaactgctctgactccaggttggtgcacttcaatgccaagtactaaccacacaataacaggatgccaccaaaaccttggtatggggctgctgcatcctaattaaaaaaaagtaatagatgttattttttagaacagttctaggtttacagaaaaatggagtggatagtacagagagttctcctaggctcccctgtc

SEQ ID NO: 186884 - DNA, 636 bp, Homo sapiens
ccctcccttccttccttccttcctcccttcctccttccttccctccctccattctttcctttcttcctttcttcttttctttttctttgtctctcatgcctctcttttcctttctttatgggctacgggtgtaaatagaccacactgcactgaaatctacattacttaccaaaacctctggagctgcttctgtcttgtaggcagggagctcgtcctgtagcccttaggtcctcccagcctcctcctcctctgatttgtgggtgccactggggcagctgctgagtctcagtggttcctagtcatcaccaagttctgcccacctagatggtttgcacctgtccttaccagaaccctgcactgtctagatgactgaggctgcttctgcctaactgatctgctatctgtgttccgggggcaccccagggttagaggtaaatggcacaggcattgaaatctccaactgctctgactccaggttggtgcacttcaatgccaagtactaaccacacaataacaggatgccaccaaaaccttggtatggggctgctgcatcctaattaaaaaaaagtaatagatgttattttttagaacagttctaggtttaccactgtctaaaagtcacaaaacaatatctaa

SEQ ID NO: 186885 - DNA, 1363 bp, Homo sapiens
cccggcgccgcggaccgagagtctagccgccgccccagcccagcccgcgcggctgccgccaccggcacggccaggccagcatggtggaccacttacttccagtggacgagaacttctcgtcgccaaaatgcccagttgggtatctgggtgataggctggttggccggcgggcatatcacatgctgccctcacccgtctctgaagatgacagcgatgcctccagcccctgctcctgttccagtcccgactctcaagccctctgctcctgctatggtggaggcctgggcaccgagagccaggacagcatcttggacttcctattgtcccaggccacgctgggcagtggcgggggcagcggcagtagcattggggccagcagtggccccgtggcctgggggccctggcgaagggcagcggcccctgtgaagggggagcatttctgcttgcccgagtttcctttgggtgatcctgatgacgtcccacggcccttccagcctaccctggaggagattgaagagtttctggaggagaacatggagcctggagtcaaggaggtccctgagggcaacagcaaggacttggatgcctgcagccagctctcagctgggccacacaagagccacctccatcctgggtccagcgggagagagcgctgttcccctccaccaggtggtgccagtgcaggaggtgcccagggcccaggtgggggccccacgcctgatggccccatcccagtgttgctgcagatccagcccgtgcctgtgaagcaggaatcgggcacagggcctgcctcccctgggcaagccccagagaatgtcaaggttgcccagctcctggtcaacatccaggggcagaccttcgcactcgtgccccaggtggtaccctcctccaacttgaacctgccctccaagtttgtgcgcattgcccctgtgcccattgccgccaagcctgttggatcgggacccctggggcctggccctgccggtctcctcatgggccagaagttccccaagaacccagccgcagaactcatcaaaatgcacaaatgtactttccctggctgcagcaagatgtacaccaaaagcagccacctcaaggcccacctgcgccggcacacgggtgagaagcccttcgcctgcacctggccaggctgcggctggaggttctcgcgctctgacgagctgtcgcggcacaggcgctcgcactcaggtgtgaagccgtaccagtgtcctgtgtgcgagaagaagttcgcgcggagcgaccacctctccaagcacatcaaggtgcaccgcttcccgcggagcagccgctccgtgcgttccgtgaactgaaagcgccctgaaccccagcctgtccgtcaccc

SEQ ID NO: 186886 - DNA, 380 bp, Homo sapiens
accaaaatgtatacaacaaaaagatgactgattatttctcaagcaaaagatatttcactgtttaccaaactccaaaagatctgtacagagccttacagcacactctgaaaaccactgatctatggacaggcccctctacttaattaagtcagaaaagtggaagcattctagagtcatctacacttggattcagaccccggctccaccagttgttgagctgtaaaactggactgtttccagcctcaactggcttttgtctagattgagatgggtaatttatgtgtatcatggatggtacatattccagaatatttaagttttcagctgagacctgatttaattgccaagtcatcaattagtcacagactcagaatttgtag

SEQ ID NO: 186887 - DNA, 179 bp, Homo sapiens
taccatccccattttgcagatgaaaccagtgaggcagctgtgttgtagtagaacccaggaaagtgcttttaccactatacaacagctgcctgtcggttaagagagtaatactgccctttattataacacttggggtaagatagaaattgtagaattaatgtaagttaagttgtcttatg

SEQ ID NO: 186888 - DNA, 423 bp, Homo sapiens
aaatagtgattttgaaatgctcttaaagtctggttgctgaggctaagtcatattatgaggtaaaaacagaaagcaacatgagggaatagatttgcagtttcaccagcgtgcaaataattcattaacactcgctacagttgtgaccttatgactttattttcacagaattcagttctcaaaaggttctaataaccttacagaagaccattcctacaattcaaatatgctaccaccaagtgacactgccactgctaccaggtgacacttgattgattgattaaagacagagatcagttgataaaggcaaggcttctctgcagttcaaactgcactctgtgcaagtactgtaacacgttatcactcccatcaaatgtgtaactcccatcaaatgtgtattcccatatggataaatatcacaagtag

SEQ ID NO: 186889 - DNA, 399 bp, Homo sapiens
cagccactcaacaataacaaaaaataaacaacacttaaaaatggacagagggtgtgaatcacatttctcaaaaaaatatagtactcaaggccctcaccagaagcaaatgccagcaccacatttcttgcacagcctgcagaactgtgagccaaaatatatctgttttcttcataaattactcagtctcagatattcctctatagcaagccaagaatgaactaacacaatattttaaaaaggtagccaaaggttttatcagccacctcaccagaaaagaaaaacagatggcaaacaggctcatgaaaacatactaaagatcatttgtccttaggtaattataaatcaggagaataagcattcttaggtagcattacatacctgagaacataactagaaaac

SEQ ID NO: 186890 - DNA, 354 bp, Homo sapiens
aataaatggaaattaaataacctgctcctgaatgatcattgggtcaacaatgaaatcaagatggaaatttagaaattcttcaaactgaacaataatagtgacacaacctaacaaaacctctgggatacagcaaaagcggtgctaagaggaaacttcatagcattaaatgcctacatcaaaaagtctgaaagagcacaaatagacaatctaaggtcacatctcaaggaactagagaaacaagaacaaaccaaacccaagcccagcagaagaaaagaaataaccaagatcagagcacactaaatgaatttgaaacaaaaaaaaaccacacaaaagacaaatgaaacaaaaagctga

SEQ ID NO: 186891 - DNA, 331 bp, Homo sapiens
gcagatgtcgagaacaggcacagccatagagaaagaaagatgagtggccacctagggttatggggcagtggggattaaggttgatgactaagggtgcaggtttctttttggggtaataaaaatgttctaaaattgattatagtgacggctgcataattctgaggatatacagaaagccactgaattacacattttaaatgggtgaattgtatagtacatgaatatatcttaataaagttgttgccaaaaaaaatgcttactgccgcactggcatgaagtaactgctagtgttatgatgatggtgactcatccgatatagcactggccttct

SEQ ID NO: 186892 - DNA, 618 bp, Homo sapiens
gggctggccaagaactggaaggaatgcggtctgagccaagcaagctcccaacatgtcctggctcctgtgaggaagcaaagctccgtgtactgcagttcattagggaaacggaagagattgtttcagcttccaacagttctcggttccctctgggggagagtttcctggtggccaagggaatccggctgaggaatgaggacctcggccttcctccgctcttcccgccccgggaggctttcgcggagcagtttctgcgtgggagtgattacgccattcgcctggcggctcagtctaccttaagcttctatcagagacgccgcttttccccggacgactcggctggagcatccgcccttctgcggtcgggcccctacgtgccacagtgtgatgcgtttggaagttgggagcctgtgcagtgccacgctgggactgggcactgctggtgtgtagatgagaaaggagggttcatccctggctcactgactgcccgctctctgcagattccacagtgcccgacaacctgcgagaaatctcgaaccagtgggctgctttccagttggaaacaggctagatcccaagaaaacccatctccaaaagacctgttcgtcccagcctgcc

SEQ ID NO: 186893 - DNA, 418 bp, Homo sapiens
ttggagggaaaccaggaatcccagaaagctgtttgctcttgtgtgggaatcaagtcccagaagaagtgggtagatgcctgccttgaaatctcacttaaggagagttggtcttttatgggaggattttaaatcataaagtgcattattaaggatttgccatctgggtttttcaggtataaaggctggcatttccctaaatggcttttccctgttgaaattgtgtttctaaaagtcggtggatgggacctctcacatcttcctggagcatagccttttaagcttagctgatttctgaggctgcctcagtgggctccccagccttcatgtagactggccttgtgtgggtgggtagtggccattgctagggattccagaaactactggtgtttgcttgtgttgtgtttaaacattcatagta

SEQ ID NO: 186894 - DNA, 1120 bp, Homo sapiens
acgtaaaaacctcacactaagtgacataagccagacacagaaggacaaataccgtatgattccacttagctcaggtacttcaataggcaaactcatagagacagcaagtagaacagcagtgaccaggggctgggacgaggagagaatgggtacagagtttgtgctggggatgatgaaaaagttctgggtgtagacagtggtgactgtgaatgtatttaatgccactgaattgtacacttacaaatggataaaatgataagtattgtgttatgcatattttaccacaataaaaaaatttttttaaaacctcagaacttcagctgccaaaacgaatgaatgaatgaatgaatgaatgaatgaatgagaccttcactcttccctgatcaagattttcctggttgcatcatcaaatagacaaagtgagaaaacagcatgctgtaccggggtagggacagcgactggggcagtctctctacctgggcctcagtttcgccaactgtgaaatcaaggcatctgccccatcggaccagatgtggagcctgtgaccagatgtcatctttcctctcttcagtctcacagctaattctaggaaggtgctggcactaggaagagctctggcttagccagccacctctcactgtgcccacgccacttcccctgggagactccttttctcacctgtgaaatgcggagactaatgacaaagctactgtctctacccctgcttcccttacacactggctgcggctccctcagaagatcacaaaggtgaggtggatggagccctagcttcttccctgagctggctgcctggaaaaagccaccccggccaggtaactcaagggactaggaaaatcctggctgcactcaagcttggcaaggaggctgaggggcaggagaaatgaaggagaactctccaaggcctgccttgttgtccaaccaacacctacttcatttttccttaggtggaaccatacaagagtgggcacattgggtacagagttagtgctggcgatgatgaaaaagttctgggtgtagacagtggtgactgtccatgtatttaatgccactgaattgtacacttacaaatggatcaaatgataagtattgtggcatgcat

SEQ ID NO: 186895 - DNA, 593 bp, Homo sapiens
tcgatctctagaggagtcccctggagctggtttcctctcttcagtctcacagctaattctaggaaggtgctggcactaggaagagctctggcttagccagccacctctcactgtgcccacgccacttcccctgggagactccttttctcacctgtgaaatgcggagactaatgacaaagctactgtctctacccctgcttcccttacacactggctgcggctccctcagaagatcacaaaggtgaggtggatggagccctagcttcttccctgagctggctgcctggaaaaagccaccccggccaggtaactcaagggactaggaaaatcctggctgcactcaagcttggcaaggaggctgaggggcaggagaaatgaaggagaactctccaaggcctgccttgttgtccaaccaacacctacttcatttttccttaggtggaaccatacaagagtgggcacattgggtacagagttagtgctggcgatgatgaaaaagttctgggtgtagacagtggtgactgtccatgtatttaatgccactgaattgtacacttacaaatggatcaaatgataagtattgtggcatgcat

SEQ ID NO: 186896 - DNA, 217 bp, Homo sapiens
ggagctctttgtactattctaagtctgaaattatttcaatataaaaagtctcaaaattgccaatgcccaagtttcatcccagatcaactgatttggctttctcttgcgtggcggtgggggggcggtgaggcacagggaccaggtgattctgatatgcagttggagtgaaaatccccacactggccacaccacctcctaatgcacacccactggtggc

SEQ ID NO: 186897 - DNA, 220 bp, Homo sapiens
actaagggaaaatgtgacatccaagtaaaattatgcctatccatccttttaccagaacagatgcctggaatgatatacaccaaatgctaacccaagttaattctaggtggccagtttgaggtcatatcttactttgttaactgtattgctgaatattggccaggaatcatttttctaaaaatagtgattttactcttgatagttactattcttttttttt

SEQ ID NO: 186898 - DNA, 207 bp, Homo sapiens
ttacgaaggaaccacaagtgctatagaaatgtgtacttaatttgtctggtactaaagagctactaaaaatttcagagcagaagagagtttgattaaatcaacaatgatttcttttcccatcatcactctttagctggtaattaaaacagtatgccagaagttccccatgtaagaaaaaagaaaggcaaaactgaggcccctgcctta

SEQ ID NO: 186899 - DNA, 472 bp, Homo sapiens
atttgtgttcctcaatatgttaccaatgtatgacctacattagaatttctgggaatggagcctagaatctttttaagcacattccccagctgactcttaatgcccatttatatattcatatttcagattcgctggtataaacaatatgcagaatgagtttagtagaagggagaggtcaaatggactcatttctctctttcaaatatacctaagctattttccagtattttccttacgttgcttttacatacaatcaaataatttagatttaaatggtacacaaaaaagtggctttaactagaaatactactactagtttcaaacaactcctcattgtgaaataatttataaagtcatgatagaccaattttatgttttaatagcaattatggcaggttactaagctaatactttactgattataaaaatcaatttatgggcaatgtacaaggtcaaattcatgaactgatta

SEQ ID NO: 186900 - DNA, 324 bp, Homo sapiens
ggaatgcttggaagaggcaggcagttcccttagaatcgggtcggcgcaggcttcgctgtgcccgtgtttcctccgtatggacatggccatccttgctgccttaacttctggcattgctgttgtgccctccaggccatctgctgctgtctttggtcctccatttcttccttcctttaccatggcatagtggtgagaagctttgaagtcagactacgtgactttgatccccggctcttgtccttagtcagctgcgcctcagtgagcatattattgagcctcaatatgtcccagtttcttctctgtaaaatgggactattaatggta

SEQ ID NO: 186901 - DNA, 399 bp, Homo sapiens
taaggaagaaatagcaatacaataataataagggatttcagtactgcactttcaaaaatggatcaatcatccagacagaaaatcagtaaggaaacagcagacttgaataacaatatggaccaaatggacctaacaagatatagacagaccattccatccaacagctgtagaatgcacattcttctcaagtcataaggagcattctccagattagatcatttattggaccacaaaacaagtcttaacaaatttaagaggattgaaataatatcaagaatcttgatatcacacaatggtgtgatactagaaataaaaggaagaaagttcacaaatacgtgaacaagacacccctaaactaccagtgggtcaaagaggaaattaaagggaaataaaaagaaa

SEQ ID NO: 186902 - DNA, 376 bp, Homo sapiens
gctggcctttcctttttattctcttaaaggtgtctcttcactaacagaattttttttatttttgtttttaattattatggatacataatagccatacatatttatagggtagatgtggtattttgatgcaagcatagaatgcatggttatcaaattagggtagagtaccccatcacctgaatcatttatcatttcttcatgttaggaatattccaattctagtcttttagtcattttgaaatataaaataaatcattgttaactgtagttgccctattgtggtactgaacactagacttactcattctttttaactgtatttttgtgcccagtcaccaatccctctttatttcccacttcccttcctgtcctttac

SEQ ID NO: 186903 - DNA, 258 bp, Homo sapiens
cctgagctcccacttaatcatctctagatacttataatacctaatacaatgtaatgctatgtaaataatgtcatactgtactgtttaggggataataagaaaaaagtatgtacatgtttagtgcaggcacagctatcatcttttttttcaattattttcaatctacagatgcagaaccccagatatagagggccaactatatctgcctattttataaatacaaagcaggcaacacccacaaagacatattttctcata

SEQ ID NO: 186904 - DNA, 403 bp, Homo sapiens
tgaggaaaaacgacggtctgctatatctacatgattcacatagctgtttccagtaaagtaacagactatttaaaaactaacgagaacacagtatctccaaacctatggaaatgtggtcaaaagtcaccatcagaggaaaatggcaaacaagctttcactgcaaatacacatacaaatccaatccagcagggtattaaaagcataatgcatcataactggaaagttttattgccagcaacagaaaaagaaacaagcagaacgaacaaaggctaaatcctaaaaccaaagtggggagatctagaacgaaggggatttgtactacacaagtctactgttgaagctttaggaagctttttttttttttttgagatggagtctcactctgttgcccaagctggattgc

SEQ ID NO: 186905 - DNA, 144 bp, Homo sapiens
tcttttggtgtgttattgggttgtttttaaggacactatttaaggaaacttcttttcccctggaaaatcttgaacaaaaattgcattgaaaaactggtgtcagttttctgtgctaaatttggtgaagtttccattgttctttta

SEQ ID NO: 186906 - DNA, 512 bp, Homo sapiens
tagggtatccatgacacggcttctgccagggttttggttttagagcatttaatgtgtcatgctcttagggaacattttcaaactctggcctctgtgtcaacttttccccccttggaaatacagagggttggctcatttgctgctccattttctgccaggacctttgaccaatacttggtttttctttcctgaaattttcaagaagggaatggaatatctttgtatagcttccccctcttctggtggcagatcaagcatatggccctttgaagtttcataaggagctataactaacatgaatgaatgtcaaccatgtgccaggccttagctaggtctctttgtttatcttatttaacccttagcactattctgagtggaagatggcattatctctattctgcatttgaggaacctgaggcttaggaaatttactttgcccaagatcatagtactaatacttaggtactagtattaatacaagtactagtacttgggttcaaacccaagtcttc

SEQ ID NO: 186907 - DNA, 104 bp, Homo sapiens
gaaccgatgtcaccctcttctatctcctctcccctactcaagacctgctggagaagtaaacacatatgctttctctcccctggaactaactataaacatatcac

SEQ ID NO: 186908 - DNA, 219 bp, Homo sapiens
gctcccagaggaactgcgtgttcttcagaaagtaccgctggagccttgtgagtacagtggtgctttgtggtttgagatctcagcacaccggcagcttcagggggcttaggtagtcttcaggggtctttagcagaaaggctgggaacctcccttctggtcagagcctcatatcccagtaagaaaagttgaagcccagagaaggcgatgtctgtgtcccag

SEQ ID NO: 186909 - DNA, 136 bp, Homo sapiens
cactgtggcctacagaaaggaagtccatacacaccccaatgttcacacgaaatgtaataaggaagtaagttccgaaacgcagagcacccctaaacgcctattttccacactcccacctccagaacaggcctttcgc

SEQ ID NO: 186910 - DNA, 276 bp, Homo sapiens
ggtctgcctgcaatcactccttctatctcatatatacaaatccttccaactgctggggctcatctcctgcctcaccctcttcctgaaatgctagtttatccagctggaaggaatttctttcatcttaactattattttacaactgtttgtatctctcaggaaaccaaagatactctacatggaagtatagtttttctgaagacatctgatgaaaagtcacaggtattgatttggaatgttggcaaggcccctaaggttgcccgccggatccccttt

SEQ ID NO: 186911 - DNA, 669 bp, Homo sapiens
cacttagttgcaatggttggtgaggatttcgggcatgtgagatgtttcacatggtgaccagcacaaggagtcctaaaaatctaagtcctaccccaccttctcttccttgcccctttctcttctacttgaaaaaggctttcccacctggtgagaaggtctgggccaaagctggtgggggatgccttctatttccccaacagtaccttctagcatcaggaatctcagacaccagcctccttggtgatcttctggtttaccaagggaaggtgtcagcttgggcatggggtaggtactgggcgagacttgctaaataacactggcaaacttcggcaactgagaaatatgggttcaacgtgctacttctcctcttgtaaagaggctacagtgccatatgcaatcacgactttcccagctgaaatgactttctcataagagggagcatcacatgttccactgtgaattcacatcaaatgttcactgacattttcaaacagtaatataaatctttacacagtaaatcaatcacaacggcagcagcaatgctgttggaagcctaaaagtgcatttaccttccaaagcaagatggtatatgtaaatgttcaaatgtctagataaaactcaacctgaagacagaaataataaaattgctcagtatgctgccaagaaggg

SEQ ID NO: 186912 - DNA, 548 bp, Homo sapiens
aagatgatatttaggccaggtgcagtggcacatgcctgtaattccagcactttgggaggctaaggcaggaggattgcttgagtccaggggattgagcctgcagtgagccaagatcatgccactgcacttcagtctgggtaacagagtgagaccctgtttcaaaaataaaaaataaaagataaaagatggtattgacaccacttagaaagccatttagaaaaaaataagccagatccccacttcattacttatattgagataaataaaagatggaataaagatttaaatgtaatgaagacataaagtttccagaagaaaatataggtgaattacttttgtaatcttagagtggaaaaaagcttttgttttaacctgaagccctaaagccctaaaggaaaaaaaaaaaatcagatgatataaaaatgtaaaatttccatatggctaaaaaaatcttgtcataaactaaataaaaagacaacaaaaggaaaacatatttgcaaaatacatgacaaaagattaattttccttatttccaaaaagttcttacc

SEQ ID NO: 186913 - DNA, 558 bp, Homo sapiens
tccccctgatatgtctggcattgctatatgttttctgcatatttacatatcacatccttttgttcctctgttcctcttttactaccttcttttatgctaaacacatttttttgtgatcactttcattcatgtttattttttaatctttttgtgttattctcttggttgctgccctagggattataacatgaatcttcaattgatcacatttgtacctcaagttaatactgagctaattctggcaaaatacagcaactttgcttctatatagctccatttcccatccctcctttctgctaatgttatttatattacatcttcatgtttaataaatccagcaatacagtgttagagttattgctttaaacgttaggtttttgaaataaattaggagaaagggaaaaatgcacacactgttttatattttcccacttatgtaccatttcttcttatgcaatagatttaccagtctgtgttatttctttcagcttaaaggaatttagtatttctggtagaacaggtctactggcaagatattctccaaatgtgagttaccag

SEQ ID NO: 186914 - DNA, 152 bp, Homo sapiens
cctggagttttacatggctcagcagcaactggcttttgggtgggaagtggcagaatggttatgcacaaggagaaatagatattgacatactgaggaatacttagattcgtcgatttctcagtgtccttcgttcttgttgtttcatttgtctt

SEQ ID NO: 186915 - DNA, 337 bp, Homo sapiens
tgaaaacccaatcatcatgcttgtgaactacagaaggatctctaatgttaccttccagccattttagaagtctacctcccaagcacatatatttaggtttttaatcattcttgaatttcttgttacatagtatgtgaactaaggaatctttattttccatccagctagctaattgtgccaacaccatgccacccctgtcagattcccattccccaaatatgtgtggtccatttctagtttcttctgctctattgtttttttgtttttgtttttgttttttttttttgtctaaccctgtggaaatatcacatcatttagattactatagcctcttaag

SEQ ID NO: 186916 - DNA, 598 bp, Homo sapiens
cgggtgaggcaagaggaagcggctcgctacagggaaaagcaatggactagaagtcaggaaacctggctcttgtcagagctaacaaggttgtgtggccttgaactggacacaattgctctgggttttcattttgtcacctgtagaatataagaggatttaactatataatctctacaccaagtctagctttatagatgggaagaccaaggaccacacagaccaacattttaatactttcaaattcactgttctggcattgcttggacctcagggacagaaagcaggacacaggaaacagaactgcagtcttccatttgcctcaagccatgcttactgcagcaatgtggccacatttattttggttgagtaaggcccaaaggagtttgctatggaagcaacagcagcatatgctgatattctataattattttctttcaaatataactttttctgcacttccaagattgtcaaaaatgtctacagctgattcaaaagcatgatttttgtttaaataagataatagttaccaccaaaaataaagaatatcacttgtaattcgtagatatttgaagtgccaatagtcaaaaagcattagtcc

SEQ ID NO: 186917 - DNA, 1388 bp, Homo sapiens
aggaccatttggaaagtgattaagtcatgagggcatggtctttacaaatgaattaatgccctgtaaaagggctggagggaattagcttaaattcttttttgcccttccaccttccaccatgtgaagacactgtctgtcccctccagaggatgcaacaataagacatcattttggaagcagagagacacaaaacctgcaggtgccttgatcttggattttccagccttcagaattttgagaaatatgtttctgttatttacaaattgcccagtgtgtggtattttggtatagtagcacaaatgtcctaagacatgataaaggtatccagaaaatgccaaaaggtcaaaacaagggaacattggaattaagggaagagagagaatgaggaaagagagaaaaagtttgtgaagggaagtcttcaaatcagaggttacaaggtattagtagttagaaagcataggctttggattcaaaaaggcccagatctgttctgcttactaggcatgtgacctgggcaagtaactggtttttgcttgtttgtttgttgtagtttaattttctcatcgtacaatagatacaacatctaccttaatcagtttgtttagaggttgggtgatgagagagaacatgtctcagccgtttaagtggttacttctctggagagagtttctgggcttagggaaagaaagataaatttatttttaaattttatagccctttatctgtatatttaaagggagggaagtactatgctttataagtatgttaattgttttctatgttagcaacatatcgtatacatatacctcaaggttataagaagtcttaaaaaaattgtgcttattatttatgttgaaatgttttgcttctaaaatcctttatgttttttagcctcattgtaatttgtccccagaattgctgtttcctttttctacaacaggtttctcaaaacactcttttaaaagactagctggacatggtggctctctcctgcaatcccagcgctttaggaggccaaggcaggaggtttgcttgaagtttgagaccaacttgtgcaacaaaatgaggcctgatcccttaaaaaaaagactcattcaatgtgtttagaagttcaggccgggcacgatggctcatgcctgtaatcccagcactttgggaggcagaggcgggtgggtcacttgaggtcaggaatttgagaccagcctggccaacatggtgaaactctgtttctactaaaaatacaaacattagccggacattgatggtgcgcacctgtagccccagctacttgagtggctcaagcaggagactctcgagcttgggaggcagaggttgcagtgagccgagatcacaccactgcactccagcctgggtgacagagcaagact

SEQ ID NO: 186918 - DNA, 422 bp, Homo sapiens
ggcttacccttcatgctgtcatattcacctgctaaaagtccagtcttcctttccgaaacaagctcagaaaaccttttgggacaactaagtcggttttctcaacacaatgtgatctgttcctctttaaacaatcataatcattctcgtctcccttcacctcttttatggaagtctgattgtattttagctgtcaccatacctgtcttatcacctacagctaactgtatataacttgagtacagaaatcttgatatactcattttcataccctttataagttcttccacagttcctgcctgaaacccagcaggtgctaaattaatatttatcggacaacaagaaactttagagaccagtatatcaggaattaactccacaaagttatcctctgctttttctatttctatttctttcaagtttga

SEQ ID NO: 186919 - DNA, 447 bp, Homo sapiens
agacaaagagaaacctagggggacagcaggtggacaaaaccttcccctgaactgcactcggtgtctaggactgttggggaaggaagtgaagagccagcatgtagtctcctctggactcttacaggatctgtccacctctgggctctttatgtaggggaaggtgtgagctcctgggagtactcctgatagaggactgtttccctgaaaacctcagcagtgtttgaggccctagcagggggaacccagaccccgcctgccaaagcccctaatccctcagggctattatcagcagcctaagcgccttagggtggccagagtccagcccagcaagcagcaaagtcagcagcctcctcgccctatcctctccatgccccggggcactccagtcccagctggctgatcacatacacttccacaaagccacacaaccacagcacaaccagacac

SEQ ID NO: 186920 - DNA, 892 bp, Homo sapiens
attccagacccaaggctgacgatcttcttcaaaggagtcagtggtggaaacacagactcagagccactcccaaaaggggtgtcagtctccactgtgactgaccacaaaaccctgcaggaaagaggctgtgggttttcctgcgtggtccccagaccctaatatgcccttgtggctgcctaatacacatctctatttaaaatgttcagaatctgtgtacttggaggactaagcaggaaagaaatagattgaacgggccaaccaggtattttaggattgggctgtcaactttatagtctaacagcaatggaaatgtctaagatggaaacaatcaaaacagtcaagttgtcaacaattgccaatgaattcagcagcctaaatgaaacaagcaaggaatgagacttaagaatttaaaaaagggatgaaggacccagttcttccagcctaaaggattttgaaatctccgtttgcttaaccaaggacatgaatgccacaactcctgaatgcagaacttaatccagcagcgtgcctccagtagaaaataagctgaagttcaatgtattctctatgaagaagagggatgtacaggaaaatctgcaggcctgggtgtcagccctgagtcaggactctgactctgttgcttcttagctgtgggaccatgggcaaagaagcctggatgataacactgaacttcagccaggaagtgatctatatcctttggtctacaaatgtttcgctccatagttgccgaattttagggaatatgttccctacccatttcagttcgatctcaaatttatttagttaatgtcttgcccagaaattatttccccggtggcaatattcttccgcgtttaaccaaaaaataggtccttttaaacccctaattgaattc

SEQ ID NO: 186921 - DNA, 374 bp, Homo sapiens
tgcaaattccttatctcttcaagatgggaaaagagtttgcaggtgccagtctaggccacactttgagtagcactgtgctacaacaatcatttgtctaacgtgttccttgtcaaacagaaggcatattagaataaacccaacaaaattcatcacttctgaaagtttacttctgcaatttcaaacacagttttaaaataatctctaggggaatacaaaaattagctgggcgtggtggcaggtacctgtagtctcagctactcgggaggctgaggttgcagtgagtcgagatcgtgctactactgactgggtggcaagggtgagactccatctcaaacaagaaacacaaaaacccaaaaagtcaactttactgtcag

SEQ ID NO: 186922 - DNA, 326 bp, Homo sapiens
acgaggcgtcacataaaacagtcgctcacccgaacccattatcttcccaactgcagagtattgtatcttgggggaccaaaggaggccataaaaatcaagtcccctcaaattctatcctcacacattcattcaccaatgaagagaaggctacagaattattattattattattttagacagggtctccttctgttgccccaagctggaatgcagtcgtgcaatcacagctcactgcagtctccaactcctgggcccaagtgattttcccacctcagcctcccaagtagctagagctactggtgtatgccaccatgcccagctgagag

SEQ ID NO: 186923 - DNA, 5489 bp, Homo sapiens
ggcagagctgcagaggcaccggacgagagagggctccgcgggcccagctggcagccaggccggagacaagttgcagtcccgggctctggtgacgccgtggccgcagggtctccattttgggacattctaatccctgagcccctattattttcatcatgggcttctgcctggctctagcatggacacttctggttggggcatggacccctctgggagctcagaaccccatttcgtgggaggtgcagcgatttgatgggtggtacaacaacctcatggagcacagatggggcagcaaaggctcccggctgcagcgcctggtcccagccagctatgcagatggcgtgtaccagcccttgggagaaccccacctgcccaacccccgagaccttagcaacaccatctcaaggggccctgcagggctggcctccctgagaaaccgcacagtgttgggggtcttctttggctatcacgtgctttcagacctggtgagcgtggaaactcccggctgccccgccgagttcctcaacattcgcatcccgcccggagaccccatgttcgaccccgaccagcgcggggacgtggtgctgcccttccagagaagccgctgggaccccgagaccggacggagtcccagcaatccccgggacccggccaaccaggtgacgggctggctggacggcagcgccatctatggttcctcgcattcctggagcgacgcgctgcggagcttctccaggggacagctggcgtcggggcccgaccccgcttttccccgagactcgcagaaccccctgctcatgtgggcggcgcccgaccccgccaccgggcagaacgggccccgggggctgtacgccttcggggcagagagagggaaccgggaacccttcctgcaggcgctgggcctgctctggttccgctaccacaacctgtgggcgcagaggctggcccgccagcacccagactgggaggacgaggagctgttccagcacgcacgcaagagggtcatcgccacctaccagaacatcgctgtgtatgagtggctgcccagcttcctgcagaaaacactcccggagtatacaggataccggccatttctggaccccagcatctcctcagagttcgtggcggcctctgagcagttcctgtccaccatggtgccccctggcgtctacatgagaaatgccagctgccacttccagggggtcatcaatcggaactcaagtgtctccagagctctccgggtctgcaacagctactggagccgtgagcacccaagcctacaaagtgctgaagatgtggatgcactgctgctgggcatggcctcccagatcgcagagcgagaggaccatgtgttggttgaagatgtgcgggatttctggcctgggccactgaagttttcccgcacagaccacctggccagctgcctgcagcggggccgggatctgggcctgccctcttacaccaaggccagggcagcactgggcttgtctcccattacccgctggcaggacatcaaccctgcactctcccggagcaatgacactgtactggaggccacagctgccctgtacaaccaggacttatcctggctagagctgctccctgggggactcctggagagccaccgggaccctggacctctgttcagcaccatcgtccttgaacaatttgtgcggctacgggatggtgaccgctactggtttgagaacaccaggaatgggctgttctccaagaaggagattgaagaaatccgaaataccaccctgcaggacgtgctggtcgctgttatcaacattgaccccagtgctctgcagcccaatgtctttgtctggcataaaggagacccctgtccgcagccgagacagctcagcactgaaggcctgccagcgtgtgctccctctgttgttcgtgactattttgagggcagtggatttggcttcggggtcaccatcgggaccctctgttgcttccctttggtgagcctgctcagtgcctggattgttgcccggctccggatgagaaatttcaagaggctccagggccaggaccgccagagcatcgtgtctgagaagctcgtgggaggcatggaagctttggaatggcaaggccacaaggagccctgccggcccgtgcttgtgtacctgcagcccgggcagatccgtgtggtagatggcaggctcaccgtgctccgcaccatccagctgcagcctccacagaaggtcaacttcgtcctgtccagcaaccgtggacgccgcactctgctgctcaagatccccaaggagtatgacctggtgctgctgtttaacttggaggaagagcggcaggcgctggtggaaaatctccggggagctctgaaggagagcgggttgagcatccaggagtgggagctgcgggagcaggagctgatgagagcagctgtgacacgggagcagcggaggcacctcctggagacctttttcaggcaccttttctcccaggtgctggacatcaaccaggccgacgcagggaccctgcccctggactcctcccagaaggtgcgggaggccctgacctgtgagctgagcagggccgagtttgccgagtccctgggcctcaagccccaggacatgtttgtggagtccatgttctctctggctgacaaggatggcaatggctacctgtccttccgagagttcctggacatcctggtggtcttcatgaaaggctctcctgaggaaaagtctcgccttatgttccgcatgtacgactttgatgggaatggcctcatttccaaggatgagttcatcaggatgctgagatccttcatcgagatctccaacaactgcctgtccaaggcccagctggctgaggtggtggagtccatgttccgggagtcgggattccaggacaaggaggaactgacatgggaagattttcacttcatgctgcgggaccacaatagcgagctccgcttcacgcagctctgtgtcaaaggggtggaggtgcctgaagtcatcaaggacctctgccggcgagcctcctacatcagccaggatatgatctgtccctctcccagagtgagtgcccgctgttcccgcagcgacattgagactgagttgacacctcagagactgcagtgccccatggacacagaccctccccaggagattcggcggaggtttggcaagaaggtaacgtcattccagcccttgctgttcactgaggcgcaccgagagaagttccaacgcagctgtctccaccagacggtgcaacagttcaagcgcttcattgagaactaccggcgccacatcggctgcgtggccgtgttctacgccatcgctggggggcttttcctggagagggcctactactacgcctttgccgcacatcacacgggcatcacggacaccacccgcgtgggaatcatcctgtcgcggggcacagcagccagcatctctttcatgttctcctacatcttgctcaccatgtgccgcaacctcatcaccttcctgcgagaaaccttcctcaaccgctacgtgcccttcgacgccgccgtggacttccatcgcctcattgcctccaccgccatcgtcctcacagtcttacacagtgtgggccatgtggtgaatgtgtacctgttctccatcagccccctcagcgtcctctcttgcctctttcctggcctcttccatgatgatgggtctgagttcccccagaagtattactggtggttcttccagaccgtaccaggcctcacgggggttgtgctgctcctgatcctggccatcatgtatgtctttgcctcccaccacttccgccgccgcagtttccggggcttctggctgacccaccacctctacatcctgctctatgtcctgctcatcatccatggtagctttgccctgatccagctgccccgtttccacatcttcttcctggtcccagcaatcatctatgggggcgacaagctggtgagcctgagccggaagaaggtggagatcagcgtggtgaaggcggagctgctgccctcaggagtgacccacctgcggttccagcggccccagggctttgagtacaagtcagggcagtgggtgcggatcgcttgcctggctctggggaccaccgagtaccaccccttcacactgacctctgcgccccatgaggacacgcttagcctgcacatccgggcagcagggccctggaccactcgcctcagggagatctactcagccccgacgggtgacagatgtgccagatacccaaagctgtaccttgatggaccatttggagagggccaccaggagtggcataagtttgaggtgtcagtgttagtgggagggggcattggggtcaccccttttgcctccatcctcaaagacctggtcttcaagtcatccgtcagctgccaagtgttctgtaagaagatctacttcatctgggtgacgcggacccagcgtcagtttgagtggctggctgacatcatccgagaggtggaggagaatgaccaccaggacctggtgtctgtgcacatctacatcacccagctggctgagaagttcgacctcaggaccactatgctgtacatctgtgagcggcacttccagaaggttctgaaccggagtctattcacaggcctgcgctccatcacccactttggccgtcccccctttgagcccttcttcaactccctgcaggaggtccacccccaggtccggaagatcggggtgtttagctgtggcccccctggcatgaccaagaatgtggaaaaggcctgtcagctcatcaacaggcaggaccggactcacttctcccaccattatgagaacttctaggcccctgcccgggggttctgcccactgtccagttgagcagaggtttgagcccacacctcacctctgttcttcctatttctggctgcctcagccttctctgatttcccacctcccaaccttgttccaggtggccatagtcagtcaccatgtgtgggctcagggacccccaggaccaggatgtgtctcagcctggagaaatggtgggggggcagtgtctagggactagagtgagaagtaggggagctactgatttggggcaaagtgaaacctctgcttccagacttcagaaacaaatctcagaagacaagctgacctgacaagtactatgtgtgtgcatgtctgtatgtgtgttggggcggtgagtgtaaggatgcagtgggagcatggatgctggcatcttagaaccctccctactcccatacctcctcctcttctgggctccccactgtcagacgggctggcaaatgccttgcaggaggtagaggctggacccatggcaagccatttacagaaacccactcggcaccccagtctaacaccacaactaatttcacccaaggttttaagcacgttctttcatcagaccctggcccaatacctatgtatgcaatgctcctcagccctcttctccctgctccagtagtctcccttccaaataaatcacttttctgccgcctt

SEQ ID NO: 186924 - DNA, 5681 bp, Homo sapiens
  misc_feature (171)..(171): n is a, c, g, or t
ggcagagctgcagaggcaccggacgagagagggctccgcgggcccagctggcagccaggccggagacaagttgcagtcccgggctctggtgacgccgtggccgcagctggaagaggaaaacaaggatcagattggagaagtgatttatctaagatcccacagtggactggnagcagcactgagacctcagcctagtctcctgatccccaagcagggccctgcctaaggaacacactctgcagagtgctgggccaaagcagggttttccaactaatcttagaaggtaaagtccatgaagggtctccattttgggacattctaatccctgagcccctattattttcatcatgggcttctgcctggctctagcatggacacttctggttggggcatggacccctctgggagctcagaaccccatttcgtgggaggtgcagcgatttgatgggtggtacaacaacctcatggagcacagatggggcagcaaaggctcccggctgcagcgcctggtcccagccagctatgcagatggcgtgtaccagcccttgggagaaccccacctgcccaacccccgagaccttagcaacaccatctcaaggggccctgcagggctggcctccctgagaaaccgcacagtgttgggggtcttctttggctatcacgtgctttcagacctggtgagcgtggaaactcccggctgccccgccgagttcctcaacattcgcatcccgcccggagaccccatgttcgaccccgaccagcgcggggacgtggtgctgcccttccagagaagccgctgggaccccgagaccggacggagtcccagcaatccccgggacccggccaaccaggtgacgggctggctggacggcagcgccatctatggttcctcgcattcctggagcgacgcgctgcggagcttctccaggggacagctggcgtcggggcccgaccccgcttttccccgagactcgcagaaccccctgctcatgtgggcggcgcccgaccccgccaccgggcagaacgggccccgggggctgtacgccttcggggcagagagagggaaccgggaacccttcctgcaggcgctgggcctgctctggttccgctaccacaacctgtgggcgcagaggctggcccgccagcacccagactgggaggacgaggagctgttccagcacgcacgcaagagggtcatcgccacctaccagaacatcgctgtgtatgagtggctgcccagcttcctgcagaaaacactcccggagtatacaggataccggccatttctggaccccagcatctcctcagagttcgtggcggcctctgagcagttcctgtccaccatggtgccccctggcgtctacatgagaaatgccagctgccacttccagggggtcatcaatcggaactcaagtgtctccagagctctccgggtctgcaacagctactggagccgtgagcacccaagcctacaaagtgctgaagatgtggatgcactgctgctgggcatggcctcccagatcgcagagcgagaggaccatgtgttggttgaagatgtgcgggatttctggcctgggccactgaagttttcccgcacagaccacctggccagctgcctgcagcggggccgggatctgggcctgccctcttacaccaaggccagggcagcactgggcttgtctcccattacccgctggcaggacatcaaccctgcactctcccggagcaatgacactgtactggaggccacagctgccctgtacaaccaggacttatcctggctagagctgctccctgggggactcctggagagccaccgggaccctggacctctgttcagcaccatcgtccttgaacaatttgtgcggctacgggatggtgaccgctactggtttgagaacaccaggaatgggctgttctccaagaaggagattgaagaaatccgaaataccaccctgcaggacgtgctggtcgctgttatcaacattgaccccagtgctctgcagcccaatgtctttgtctggcataaaggagacccctgtccgcagccgagacagctcagcactgaaggcctgccagcgtgtgctccctctgttgttcgtgactattttgagggcagtggatttggcttcggggtcaccatcgggaccctctgttgcttccctttggtgagcctgctcagtgcctggattgttgcccggctccggatgagaaatttcaagaggctccagggccaggaccgccagagcatcgtgtctgagaagctcgtgggaggcatggaagctttggaatggcaaggccacaaggagccctgccggcccgtgcttgtgtacctgcagcccgggcagatccgtgtggtagatggcaggctcaccgtgctccgcaccatccagctgcagcctccacagaaggtcaacttcgtcctgtccagcaaccgtggacgccgcactctgctgctcaagatccccaaggagtatgacctggtgctgctgtttaacttggaggaagagcggcaggcgctggtggaaaatctccggggagctctgaaggagagcgggttgagcatccaggagtgggagctgcgggagcaggagctgatgagagcagctgtgacacgggagcagcggaggcacctcctggagacctttttcaggcaccttttctcccaggtgctggacatcaaccaggccgacgcagggaccctgcccctggactcctcccagaaggtgcgggaggccctgacctgtgagctgagcagggccgagtttgccgagtccctgggcctcaagccccaggacatgtttgtggagtccatgttctctctggctgacaaggatggcaatggctacctgtccttccgagagttcctggacatcctggtggtcttcatgaaaggctctcctgaggaaaagtctcgccttatgttccgcatgtacgactttgatgggaatggcctcatttccaaggatgagttcatcaggatgctgagatccttcatcgagatctccaacaactgcctgtccaaggcccagctggctgaggtggtggagtccatgttccgggagtcgggattccaggacaaggaggaactgacatgggaagattttcacttcatgctgcgggaccacaatagcgagctccgcttcacgcagctctgtgtcaaaggggtggaggtgcctgaagtcatcaaggacctctgccggcgagcctcctacatcagccaggatatgatctgtccctctcccagagtgagtgcccgctgttcccgcagcgacattgagactgagttgacacctcagagactgcagtgccccatggacacagaccctccccaggagattcggcggaggtttggcaagaaggtaacgtcattccagcccttgctgttcactgaggcgcaccgagagaagttccaacgcagctgtctccaccagacggtgcaacagttcaagcgcttcattgagaactaccggcgccacatcggctgcgtggccgtgttctacgccatcgctggggggcttttcctggagagggcctactactacgcctttgccgcacatcacacgggcatcacggacaccacccgcgtgggaatcatcctgtcgcggggcacagcagccagcatctctttcatgttctcctacatcttgctcaccatgtgccgcaacctcatcaccttcctgcgagaaaccttcctcaaccgctacgtgcccttcgacgccgccgtggacttccatcgcctcattgcctccaccgccatcgtcctcacagtcttacacagtgtgggccatgtggtgaatgtgtacctgttctccatcagccccctcagcgtcctctcttgcctctttcctggcctcttccatgatgatgggtctgagttcccccagaagtattactggtggttcttccagaccgtaccaggcctcacgggggttgtgctgctcctgatcctggccatcatgtatgtctttgcctcccaccacttccgccgccgcagtttccggggcttctggctgacccaccacctctacatcctgctctatgtcctgctcatcatccatggtagctttgccctgatccagctgccccgtttccacatcttcttcctggtcccagcaatcatctatgggggcgacaagctggtgagcctgagccggaagaaggtggagatcagcgtggtgaaggcggagctgctgccctcaggagtgacccacctgcggttccagcggccccagggctttgagtacaagtcagggcagtgggtgcggatcgcttgcctggctctggggaccaccgagtaccaccccttcacactgacctctgcgccccatgaggacacgcttagcctgcacatccgggcagcagggccctggaccactcgcctcagggagatctactcagccccgacgggtgacagatgtgccagatacccaaagctgtaccttgatggaccatttggagagggccaccaggagtggcataagtttgaggtgtcagtgttagtgggagggggcattggggtcaccccttttgcctccatcctcaaagacctggtcttcaagtcatccgtcagctgccaagtgttctgtaagaagatctacttcatctgggtgacgcggacccagcgtcagtttgagtggctggctgacatcatccgagaggtggaggagaatgaccaccaggacctggtgtctgtgcacatctacatcacccagctggctgagaagttcgacctcaggaccactatgctgtacatctgtgagcggcacttccagaaggttctgaaccggagtctattcacaggcctgcgctccatcacccactttggccgtcccccctttgagcccttcttcaactccctgcaggaggtccacccccaggtccggaagatcggggtgtttagctgtggcccccctggcatgaccaagaatgtggaaaaggcctgtcagctcatcaacaggcaggaccggactcacttctcccaccattatgagaacttctaggcccctgcccgggggttctgcccactgtccagttgagcagaggtttgagcccacacctcacctctgttcttcctatttctggctgcctcagccttctctgatttcccacctcccaaccttgttccaggtggccatagtcagtcaccatgtgtgggctcagggacccccaggaccaggatgtgtctcagcctggagaaatggtgggggggcagtgtctagggactagagtgagaagtaggggagctactgatttggggcaaagtgaaacctctgcttccagacttcagaaacaaatctcagaagacaagctgacctgacaagtactatgtgtgtgcatgtctgtatgtgtgttggggcggtgagtgtaaggatgcagtgggagcatggatgctggcatcttagaaccctccctactcccatacctcctcctcttctgggctccccactgtcagacgggctggcaaatgccttgcaggaggtagaggctggacccatggcaagccatttacagaaacccactcggcaccccagtctaacaccacaactaatttcacccaaggttttaagcacgttctttcatcagaccctggcccaatacctatgtatgcaatgctcctcagccctcttctccctgctccagtagtctcccttccaaataaatcacttttctgccgcctt

SEQ ID NO: 186925 - DNA, 792 bp, Homo sapiens
ccctcctgagtgggtatagaaggtccttgacttaggaacaatctgtgctttcttgcaccgatgtttaagccacctttcaggagtcagctgttacaccctgagctaccacctggactggtggcccaggccaaggtagaaaatgctggtgatatgtttttgaaaactgtctccaaaaggcaatatataatcaggcatttgattaaaaaaaattttagttctaaagaatagaaaccttttataacacatcattctgccattcaacttttgcacattctgattttgtcccttcaactttcataccttttcaagaacaagttatgaatgcggattggctggctgttttattactttataaaataggcagctgaatgtgtgagagggttcccataaatggagttcacttatgtaaaacactcagagaagtgcctggggcataataagcactgtataggagtgagttactgttactgtcatttattattatcatccctggggctaatccctgggagccacctctttgccttagggtgggtgccgtgtcctttctcttacttctgccccttcttggttccaggtactggaggccacagctgccctgtacaaccaggacttatcctggctagagctgctccctgggggactcctggagagccaccgggaccctggacctctgttcagcaccatcgtccttgaacaatttgtgcggctacgggatggtgctgaacaggggtcctgttcagctgctagccaagagaccagattgggataccttaccatcttgacacagcagtg

SEQ ID NO: 186926 - DNA, 4138 bp, Homo sapiens
  misc_feature (2157)..(2157): n is a, c, g, or t
tcacctcacgctcgtccatttagcgagcagagcatcgtgtcatgagcacagctcgtgggcaggcatggacagctttggaatggcaaggccacaaggagccctgccggcccgtgcttgtgtacctgcagcccgggcagatccgtgtggtagatggcaggctcaccgtgctccgcaccatccagctgcagcctccacagaaggtcaacttcgtcctgtccagcaaccgtggacgccgcactctgctgctcaagatccccaaggagtatgacctggtgctgctgtttaacttggaggaagagcggcaggcgctggtggaaaatctccggggagctctgaaggagagcgggttgagcatccaggagtgggagctgcgggagcaggagctgatgagagcagctgtgacacgggagcagcggaggcacctcctggagacctttttcaggcaccttttctcccaggtgctggacatcaaccaggccgacgcagggaccctgcccctggactcctcccagaaggtgcgggaggccctgacctgtgagctgagcagggccgagtttgccgagtccctgggcctcaagccccaggacatgtttgtggagtccatgttctctctggctgacaaggatggcaatggctacctgtccttccgagagttcctggacatcctggtggtcttcatgaaaggctctcctgaggaaaagtctcgccttatgttccgcatgtacgactttgatgggaatggcctcatttccaaggatgagttcatcaggatgctgagatccttcatcgagatctccaacaactgcctgtccaaggcccagctggctgaggtggtggagtccatgttccgggagtcgggattccaggacaaggaggaactgacatgggaagattttcacttcatgctgcgggaccacaatagcgagctccgcttcacgcagctctgtgtcaaaggggtggaggtgcctgaagtcatcaaggacctctgccggcgagcctcctacatcagccaggatatgatctgtccctctcccagagtgagtgcccgctgttcccgcagcgacattgagactgagttgacacctcagagactgcagtgccccatggacacagaccctccccaggagattcggcggaggtttggcaagaaggtaacgtcattccagcccttgctgttcactgaggcgcaccgagagaagttccaacgcagctgtctccaccagacggtgcaacagttcaagcgcttcattgagaactaccggcgccacatcggctgcgtggccgtgttctacgccatcgctggggggcttttcctggagagggcctactactacgcctttgccgcacatcacacgggcatcacggacaccacccgcgtgggaatcatcctgtcgcggggcacagcagccagcatctctttcatgttctcctacatcttgctcaccatgtgccgcaacctcatcaccttcctgcgagaaaccttcctcaaccgctacgtgcccttcgacgccgccgtggacttccatcgcctcattgcctccaccgccatcgtcctcacaggcagggcctgggtgtccctgggaggctctccagggcctcccgcccccgctgacttcccctcgtatgagagcccccctctctgctggcacttacctttaatgtccttctccatcaggatggagttggcctgggccagggtgtgaagtaagcccgggagcctgtcgctggtcacttccaagtgcctcttcccgcactttccagggcgcctcaccagcctcagctgacaagttactaacaccccagaatgagtgtgcataatgtgtcaattctcccaatttttatgttttaaagcatgactctgagagaaagcaaaggagtgaacttctaatgctgtaatttcagactcacatggttgcgcacatggatggtgtgtctgtggggtgttgggtagggccaggtgattgtttagaggtcagaagtccaggccggcgcggcggcttatgcccctaatcccagcactttgggaagctgaggcgggcggatcacttgaggtcaggagttcgagaccagcctggccaacatggtgaaaccccgtctctactaaaaatacaaaaatcagctgggtgtggtggcacatgccggtaatcccagctactnaggaggctgaggcaggagaattgcttgaacctgggaggcagaggttgcagtgagccgagatcgcaccactgccctccagcctgggtgacagagtgagactctgcctcaaaaaaaaaaaaaagagagagagatctcctctcaaggtgtctctttgctgtcccttccacacaggtctgagttcccccagaagtattactggtggttcttccagaccgtaccaggcctcacgggggttgtgctgctcctgatcctggccatcatgtatgtctttgcctcccaccacttccgccgccgcagtttccggggcttctggctgacccaccacctctacatcctgctctatgtcctgctcatcatccatggtagctttgccctgatccagctgccccgtttccacatcttcttcctggtcccagcaatcatctatgggggcgacaagctggtgagcctgagccggaagaaggtggagatcagcgtggtgaaggcggagctgctgccctcaggagtgacccacctgcggttccagcggccccagggctttgagtacaagtcagggcagtgggtgcggatcgcttgcctggctctggggaccaccgagtaccaccccttcacactgacctctgcgccccatgaggacacgcttagcctgcacatccgggcagcagggccctggaccactcgcctcagggagatctactcagccccgacgggtgacagatgtgccagatacccaaagctgtaccttgatggaccatttggagagggccaccaggagtggcataagtttgaggtgtcagtgttagtgggagggggcattggggtcaccccttttgcctccatcctcaaagacctggtcttcaagtcatccgtcagctgccaagtgttctgtaagaagatctacttcatctgggtgacgcggacccagcgtcagtttgagtggctggctgacatcatccgagaggtggaggagaatgaccaccaggacctggtgtctgtgcacatctacatcacccagctggctgagaagttcgacctcaggaccactatgctgtacatctgtgagcggcacttccagaaggttctgaaccggagtctattcacaggcctgcgctccatcacccactttggccgtcccccctttgagcccttcttcaactccctgcaggaggtccacccccaggtccggaagatcggggtgtttagctgtggcccccctggcatgaccaagaatgtggaaaaggcctgtcagctcatcaacaggcaggaccggactcacttctcccaccattatgagaacttctaggcccctgcccgggggttctgcccactgtccagttgagcagaggtttgagcccacacctcacctctgttcttcctatttctggctgcctcagccttctctgatttcccacctcccaaccttgttccaggtggccatagtcagtcaccatgtgtgggctcagggacccccaggaccaggatgtgtctcagcctggagaaatggtgggggggcagtgtctagggactagagtgagaagtaggggagctactgatttggggcaaagtgaaacctctgcttccagacttcagaaacaaatctcagaagacaagctgacctgacaagtactatgtgtgtgcatgtctgtatgtgtgttggggcggtgagtgtaaggatgcagtgggagcatggatgctggcatcttagaaccctccctactcccatacctcctcctcttctgggctccccactgtcagacgggctggcaaatgccttgcaggaggtagaggctggacccatggcaagccatttacagaaacccactcggcaccccagtctaacaccacaactaatttcacccaaggttttaagcacgttctttcatcagaccctggcccaatacctatgtatgcaatgctcctcagccctcttctccctgctccagtagtctcccttccaaataaatcacttttctgccgcctt

SEQ ID NO: 186927 - DNA, 4361 bp, Homo sapiens
  misc_feature (3206)..(3206): n is a, c, g, or t
ccctcctgagtgggtatagaaggtccttgacttaggaacaatctgtgctttcttgcaccgatgtttaagccacctttcaggagtcagctgttacaccctgagctaccacctggactggtggcccaggccaaggtagaaaatgctggtgatatgtttttgaaaactgtctccaaaaggcaatatataatcaggcatttgattaaaaaaaattttagttctaaagaatagaaaccttttataacacatcattctgccattcaacttttgcacattctgattttgtcccttcaactttcataccttttcaagaacaagttatgaatgcggattggctggctgttttattactttataaaataggcagctgaatgtgtgagagggttcccataaatggagttcacttatgtaaaacactcagagaagtgcctggggcataataagcactgtataggagtgagttactgttactgtcatttattattatcatccctggggctaatccctgggagccacctctttgccttagggtgggtgccgtgtcctttctcttacttctgccccttcttggttccaggtactggaggccacagctgccctgtacaaccaggacttatcctggctagagctgctccctgggggactcctggagagccaccgggaccctggacctctgttcagcaccatcgtccttgaacaatttgtgcggctacgggatggtgaccgctactggtttgagaacaccaggaatgggctgttctccaagaaggagattgaagaaatccgaaataccaccctgcaggacgtgctggtcgctgttatcaacattgaccccagtgctctgcagcccaatgtctttgtctggcataaaggagacccctgtccgcagccgagacagctcagcactgaaggcctgccagcgtgtgctccctctgttgttcgtgactattttgagggcagtggatttggcttcggggtcaccatcgggaccctctgttgcttccctttggtgagcctgctcagtgcctggattgttgcccggctccggatgagaaatttcaagaggctccagggccaggaccgccagagcatcgtgtctgagaagctcgtgggaggcatggaagctttggaatggcaaggccacaaggagccctgccggcccgtgcttgtgtacctgcagcccgggcagatccgtgtggtagatggcaggctcaccgtgctccgcaccatccagctgcagcctccacagaaggtcaacttcgtcctgtccagcaaccgtggacgccgcactctgctgctcaagatccccaaggagtatgacctggtgctgctgtttaacttggaggaagagcggcaggcgctggtggaaaatctccggggagctctgaaggagagcgggttgagcatccaggagtgggagctgcgggagcaggagctgatgagagcagctgtgacacgggagcagcggaggcacctcctggagacctttttcaggcaccttttctcccaggtgctggacatcaaccaggccgacgcagggaccctgcccctggactcctcccagaaggtgcgggaggccctgacctgtgagctgagcagggccgagtttgccgagtccctgggcctcaagccccaggacatgtttgtggagtccatgttctctctggctgacaaggatggcaatggctacctgtccttccgagagttcctggacatcctggtggtcttcatgaaaggctctcctgaggaaaagtctcgccttatgttccgcatgtacgactttgatgggaatggcctcatttccaaggatgagttcatcaggatgctgagatccttcatcgagatctccaacaactgcctgtccaaggcccagctggctgaggtggtggagtccatgttccgggagtcgggattccaggacaaggaggaactgacatgggaagattttcacttcatgctgcgggaccacaatagcgagctccgcttcacgcagctctgtgtcaaaggggtggaggtgcctgaagtcatcaaggacctctgccggcgagcctcctacatcagccaggatatgatctgtccctctcccagagtgagtgcccgctgttcccgcagcgacattgagactgagttgacacctcagagactgcagtgccccatggacacagaccctccccaggagattcggcggaggtttggcaagaaggtaacgtcattccagcccttgctgttcactgaggcgcaccgagagaagttccaacgcagctgtctccaccagacggtgcaacagttcaagcgcttcattgagaactaccggcgccacatcggctgcgtggccgtgttctacgccatcgctggggggcttttcctggagagggcctactactacgcctttgccgcacatcacacgggcatcacggacaccacccgcgtgggaatcatcctgtcgcggggcacagcagccagcatctctttcatgttctcctacatcttgctcaccatgtgccgcaacctcatcaccttcctgcgagaaaccttcctcaaccgctacgtgcccttcgacgccgccgtggacttccatcgcctcattgcctccaccgccatcgtcctcacaggcagggcctgggtgtccctgggaggctctccagggcctcccgcccccgctgacttcccctcgtatgagagcccccctctctgctggcacttacctttaatgtccttctccatcaggatggagttggcctgggccagggtgtgaagtaagcccgggagcctgtcgctggtcacttccaagtgcctcttcccgcactttccagggcgcctcaccagcctcagctgacaagttactaacaccccagaatgagtgtgcataatgtgtcaattctcccaatttttatgttttaaagcatgactctgagagaaagcaaaggagtgaacttctaatgctgtaatttcagactcacatggttgcgcacatggatggtgtgtctgtggggtgttgggtagggccaggtgattgtttagaggtcagaagtccaggccggcgcggcggcttatgcccctaatcccagcactttgggaagctgaggcgggcggatcacttgaggtcaggagttcgagaccagcctggccaacatggtgaaaccccgtctctactaaaaatacaaaaatcagctgggtgtggtggcacatgccggtaatcccagctactnaggaggctgaggcaggagaattgcttgaacctgggaggcagaggttgcagtgagccgagatcgcaccactgccctccagcctgggtgacagagtgagactctgcctcaaaaaaaaaaaaaagagagagagatctcctctcaaggtgtctctttgctgtcccttccacacaggtctgagttcccccagaagtattactggtggttcttccagaccgtaccaggcctcacgggggttgtgctgctcctgatcctggccatcatgtatgtctttgcctcccaccacttccgccgccgcagtttccggggcttctggctgacccaccacctctacatcctgctctatgtcctgctcatcatccatggtagctttgccctgatccagctgccccgtttccacatcttcttcctggtcccagcaatcatctatgggggcgacaagctggtgagcctgagccggaagaaggtggagatcagcgtggtgaaggcggagctgctgccctcaggagtgacccacctgcggttccagcggccccagggctttgagtacaagtcagggcagtgggtgcggatcgcttgcctggctctggggaccaccgagtaccaccccttcacactgacctctgcgccccatgaggacacgcttagcctgcacatccgggcagcagggccctggaccactcgcctcagggagatctactcagccccgacgggtgacagatgtgccagatacccaaagctgtaccttgatggaccatttggagagggccaccaggagtggcataagtttgaggtgtcagtgttagtgggagggggcattggggtcaccccttttgcctccatcctcaaagacctggtcttcaagtcatccgtcagctgccaagtgttctgtaagaaggtgagtactgcccccacttcccaccaacccatggccccttcttccttgtcatggtacccatctgtgcctttctcctctgcctttgttcttggcttccctgaactgggcaggggcaagttggtttgaaacctggggttgggtggtgagtggggtggtatcaggatatccctagaccctttaggacagaactggttgcggatgcctccagaatctgcctggtttacaaagactctttccctcagttaggggtgctccacata

SEQ ID NO: 186928 - DNA, 3033 bp, Homo sapiens
  misc_feature (1052)..(1052): n is a, c, g, or t
gggtcccatggtgggtgccaaaggctaaggcttcctgtctcccagggtaacgtcattccagcccttgctgttcactgaggcgcaccgagagaagttccaacgcagctgtctccaccagacggtgcaacagttcaagcgcttcattgagaactaccggcgccacatcggctgcgtggccgtgttctacgccatcgctggggggcttttcctggagagggcctactactacgcctttgccgcacatcacacgggcatcacggacaccacccgcgtgggaatcatcctgtcgcggggcacagcagccagcatctctttcatgttctcctacatcttgctcaccatgtgccgcaacctcatcaccttcctgcgagaaaccttcctcaaccgctacgtgcccttcgacgccgccgtggacttccatcgcctcattgcctccaccgccatcgtcctcacaggcagggcctgggtgtccctgggaggctctccagggcctcccgcccccgctgacttcccctcgtatgagagcccccctctctgctggcacttacctttaatgtccttctccatcaggatggagttggcctgggccagggtgtgaagtaagcccgggagcctgtcgctggtcacttccaagtgcctcttcccgcactttccagggcgcctcaccagcctcagctgacaagttactaacaccccagaatgagtgtgcataatgtgtcaattctcccaatttttatgttttaaagcatgactctgagagaaagcaaaggagtgaacttctaatgctgtaatttcagactcacatggttgcgcacatggatggtgtgtctgtggggtgttgggtagggccaggtgattgtttagaggtcagaagtccaggccggcgcggcggcttatgcccctaatcccagcactttgggaagctgaggcgggcggatcacttgaggtcaggagttcgagaccagcctggccaacatggtgaaaccccgtctctactaaaaatacaaaaatcagctgggtgtggtggcacatgccggtaatcccagctactnaggaggctgaggcaggagaattgcttgaacctgggaggcagaggttgcagtgagccgagatcgcaccactgccctccagcctgggtgacagagtgagactctgcctcaaaaaaaaaaaaaagagagagagatctcctctcaaggtgtctctttgctgtcccttccacacaggtctgagttcccccagaagtattactggtggttcttccagaccgtaccaggcctcacgggggttgtgctgctcctgatcctggccatcatgtatgtctttgcctcccaccacttccgccgccgcagtttccggggcttctggctgacccaccacctctacatcctgctctatgtcctgctcatcatccatggtagctttgccctgatccagctgccccgtttccacatcttcttcctggtcccagcaatcatctatgggggcgacaagctggtgagcctgagccggaagaaggtggagatcagcgtggtgaaggcggagctgctgccctcaggagtgacccacctgcggttccagcggccccagggctttgagtacaagtcagggcagtgggtgcggatcgcttgcctggctctggggaccaccgagtaccaccccttcacactgacctctgcgccccatgaggacacgcttagcctgcacatccgggcagcagggccctggaccactcgcctcagggagatctactcagccccgacgggtgacagatgtgccagatacccaaagctgtaccttgatggaccatttggagagggccaccaggagtggcataagtttgaggtgtcagtgttagtgggagggggcattggggtcaccccttttgcctccatcctcaaagacctggtcttcaagtcatccgtcagctgccaagtgttctgtaagaagatctacttcatctgggtgacgcggacccagcgtcagtttgagtggctggctgacatcatccgagaggtggaggagaatgaccaccaggacctggtgtctgtgcacatctacatcacccagctggctgagaagttcgacctcaggaccactatgctgtacatctgtgagcggcacttccagaaggttctgaaccggagtctattcacaggcctgcgctccatcacccactttggccgtcccccctttgagcccttcttcaactccctgcaggaggtccacccccaggtccggaagatcggggtgtttagctgtggcccccctggcatgaccaagaatgtggaaaaggcctgtcagctcatcaacaggcaggaccggactcacttctcccaccattatgagaacttctaggcccctgcccgggggttctgcccactgtccagttgagcagaggtttgagcccacacctcacctctgttcttcctatttctggctgcctcagccttctctgatttcccacctcccaaccttgttccaggtggccatagtcagtcaccatgtgtgggctcagggacccccaggaccaggatgtgtctcagcctggagaaatggtgggggggcagtgtctagggactagagtgagaagtaggggagctactgatttggggcaaagtgaaacctctgcttccagacttcagaaacaaatctcagaagacaagctgacctgacaagtactatgtgtgtgcatgtctgtatgtgtgttggggcggtgagtgtaaggatgcagtgggagcatggatgctggcatcttagaaccctccctactcccatacctcctcctcttctgggctccccactgtcagacgggctggcaaatgccttgcaggaggtagaggctggacccatggcaagccatttacagaaacccactcggcaccccagtctaacaccacaactaatttcacccaaggttttaagcacgttctttcatcagaccctggcccaatacctatgtatgcaatgctcctcagccctcttctccctgctccagtagtctcccttccaaataaatcacttttctgccgcctt

SEQ ID NO: 186929 - DNA, 1791 bp, Homo sapiens
gggaatggtgaggttttgcaacctagaaggagcatggtacgtggtgaggtgggggctggatataccagcggggaagtatggagggtctaaggcctgagctggccctgtattctgctatgggcatcgctaggtctgagcagagctctttcctccatctagctcatcatccatggtagctttgccctgatccagctgccccgtttccacatcttcttcctggtcccagcaatcatctatgggggcgacaagctggtgagcctgagccggaagaaggtggagatcagcgtggtgaaggcggagctgctgccctcaggagtgacccacctgcggttccagcggccccagggctttgagtacaagtcagggcagtgggtgcggatcgcttgcctggctctggggaccaccgagtaccaccccttcacactgacctctgcgccccatgaggacacgcttagcctgcacatccgggcagcagggccctggaccactcgcctcagggagatctactcagccccgacgggtgacagatgtgccagatacccaaagctgtaccttgatggaccatttggagagggccaccaggagtggcataagtttgaggtgtcagtgttagtgggagggggcattggggtcaccccttttgcctccatcctcaaagacctggtcttcaagtcatccgtcagctgccaagtgttctgtaagaagatctacttcatctgggtgacgcggacccagcgtcagtttgagtggctggctgacatcatccgagaggtggaggagaatgaccaccaggacctggtgtctgtgcacatctacatcacccagctggctgagaagttcgacctcaggaccactatgctgtacatctgtgagcggcacttccagaaggttctgaaccggagtctattcacaggcctgcgctccatcacccactttggccgtcccccctttgagcccttcttcaactccctgcaggaggtccacccccaggtccggaagatcggggtgtttagctgtggcccccctggcatgaccaagaatgtggaaaaggcctgtcagctcatcaacaggcaggaccggactcacttctcccaccattatgagaacttctaggcccctgcccgggggttctgcccactgtccagttgagcagaggtttgagcccacacctcacctctgttcttcctatttctggctgcctcagccttctctgatttcccacctcccaaccttgttccaggtggccatagtcagtcaccatgtgtgggctcagggacccccaggaccaggatgtgtctcagcctggagaaatggtgggggggcagtgtctagggactagagtgagaagtaggggagctactgatttggggcaaagtgaaacctctgcttccagacttcagaaacaaatctcagaagacaagctgacctgacaagtactatgtgtgtgcatgtctgtatgtgtgttggggcggtgagtgtaaggatgcagtgggagcatggatgctggcatcttagaaccctccctactcccatacctcctcctcttctgggctccccactgtcagacgggctggcaaatgccttgcaggaggtagaggctggacccatggcaagccatttacagaaacccactcggcaccccagtctaacaccacaactaatttcacccaaggttttaagcacgttctttcatcagaccctggcccaatacctatgtatgcaatgctcctcagccctcttctccctgctccagtagtctcccttccaaataaatcacttttctgccgcctt

SEQ ID NO: 186930 - DNA, 1060 bp, Homo sapiens
tgtgcatatacaattgagctcggtacctgaatcattcatccttcatcgagatctccaacaactgcctgtccaaggcccagctggctgaggtggtggagtccatgttccgggagtcgggattccaggacaaggaggaactgacatgggaagattttcacttcatgctgcgggaccacaatagcgagctccgcttcacgcagctctgtgtcaaaggggtggaggtgcctgaagtcatcaaggacctctgccggcgagcctcctacatcagccaggatatgatctgtccctctcccagagtgagtgcccgctgttcccgcagcgacattgagactgagttgacacctcagagactgcagtgccccatggacacagaccctccccaggagattcggcggaggtttggcaagaaggtaacgtcattccagcccttgctgttcactgaggcgcaccgagagaagttccaacgcagctgtctccaccagacggtgcaacagttcaagcgcttcattgagaactaccggcgccacatcggctgcgtggccgtgttctacgccatcgctggggggcttttcctggagagggcctactactacgcctttgccgcacatcacacgggcatcacggacaccacccgcgtgggaatcatcctgtcgcggggcacagcagccagcatctctttcatgttctcctacatcttgctcaccatgtgccgcaacctcatcaccttcctgcgagaaaccttcctcaaccgctacgtgcccttcgacgccgccgtggacttccatcgcctcattgcctccaccgccatcgtcctcacagtcttacacagtgtgggccatgtggtgaatgtgtacctgttctccatcagccccctcagcgtcctctcttgcctctttcctggcctcttccatgatgatgggtctgagttcccccagaagtattactggtggttcttccagaccgtaccagttccagctactcaggaggccgaggcagaagaatcatttgaacctgggaggcagaggttgcagtgagccgagattgcaccaatgcactccag

SEQ ID NO: 186931 - DNA, 460 bp, Homo sapiens
taatttaaagaaagggtattgctctgttgcccaggctgtaatgcagtgatgcaataccagtttactgtaacctccaactcctgggcacaagcaatcctcctgcctcagcctcccaagtagctgggactacaggagtgcaccactatgcctggctaattaaaaataaaaaaattagagtcagggatgttgctatgttgcccaggctggtcttgaactagggagctaccccttcctctgaacactgcgttatccctgcctctgagcaaagagttagcctccacttattcctcctgcaacaggtccggaagatcggggtgtttagctgtggcccccctggcatgaccaagaatgtggaaaaggcctgtcagctcatcaacaggcaggaccggactcacttctcccaccattatgagaacttctaggcccctgcccgggggttctgcccactgtccagttgagc

SEQ ID NO: 186932 - DNA, 577 bp, Homo sapiens
ataagtgccagccctgggtagggtaagtggagcctgtctgagtgaagactgtgcgggggaggcctgttgtgagtggcagccggccagggcctaccgcccctaaccagctctctgtcctctgcactgaccctcgcttgcctgcctgggccccctccacagactacgcctttgccgcacatcacacgggcatcacggacaccacccgcgtgggaatcatcctgtcgcggggcacagcagccagcatctctttcatgttctcctacatcttgctcaccatgtgccgcaacctcatcaccttcctgcgagaaaccttcctcaaccgctacgtgcccttcgacgccgccgtggacttccatcgcctcattgcctccaccgccatcgtcctcacaggcagggcctgggtgtccctgggaggctctccagggcctcccgcccccgctgacttcccctcgtatgagagcccccctctctgctggcacttacctttaatgtccttctccatcaggatggagttggcctgggccagggtgtgaagtaagcccgggagcctgtcgctggtcacttccaagtgcctctt

SEQ ID NO: 186933 - DNA, 5187 bp, Homo sapiens
  misc_feature (3206)..(3206): n is a, c, g, or t
ccctcctgagtgggtatagaaggtccttgacttaggaacaatctgtgctttcttgcaccgatgtttaagccacctttcaggagtcagctgttacaccctgagctaccacctggactggtggcccaggccaaggtagaaaatgctggtgatatgtttttgaaaactgtctccaaaaggcaatatataatcaggcatttgattaaaaaaaattttagttctaaagaatagaaaccttttataacacatcattctgccattcaacttttgcacattctgattttgtcccttcaactttcataccttttcaagaacaagttatgaatgcggattggctggctgttttattactttataaaataggcagctgaatgtgtgagagggttcccataaatggagttcacttatgtaaaacactcagagaagtgcctggggcataataagcactgtataggagtgagttactgttactgtcatttattattatcatccctggggctaatccctgggagccacctctttgccttagggtgggtgccgtgtcctttctcttacttctgccccttcttggttccaggtactggaggccacagctgccctgtacaaccaggacttatcctggctagagctgctccctgggggactcctggagagccaccgggaccctggacctctgttcagcaccatcgtccttgaacaatttgtgcggctacgggatggtgaccgctactggtttgagaacaccaggaatgggctgttctccaagaaggagattgaagaaatccgaaataccaccctgcaggacgtgctggtcgctgttatcaacattgaccccagtgctctgcagcccaatgtctttgtctggcataaaggagacccctgtccgcagccgagacagctcagcactgaaggcctgccagcgtgtgctccctctgttgttcgtgactattttgagggcagtggatttggcttcggggtcaccatcgggaccctctgttgcttccctttggtgagcctgctcagtgcctggattgttgcccggctccggatgagaaatttcaagaggctccagggccaggaccgccagagcatcgtgtctgagaagctcgtgggaggcatggaagctttggaatggcaaggccacaaggagccctgccggcccgtgcttgtgtacctgcagcccgggcagatccgtgtggtagatggcaggctcaccgtgctccgcaccatccagctgcagcctccacagaaggtcaacttcgtcctgtccagcaaccgtggacgccgcactctgctgctcaagatccccaaggagtatgacctggtgctgctgtttaacttggaggaagagcggcaggcgctggtggaaaatctccggggagctctgaaggagagcgggttgagcatccaggagtgggagctgcgggagcaggagctgatgagagcagctgtgacacgggagcagcggaggcacctcctggagacctttttcaggcaccttttctcccaggtgctggacatcaaccaggccgacgcagggaccctgcccctggactcctcccagaaggtgcgggaggccctgacctgtgagctgagcagggccgagtttgccgagtccctgggcctcaagccccaggacatgtttgtggagtccatgttctctctggctgacaaggatggcaatggctacctgtccttccgagagttcctggacatcctggtggtcttcatgaaaggctctcctgaggaaaagtctcgccttatgttccgcatgtacgactttgatgggaatggcctcatttccaaggatgagttcatcaggatgctgagatccttcatcgagatctccaacaactgcctgtccaaggcccagctggctgaggtggtggagtccatgttccgggagtcgggattccaggacaaggaggaactgacatgggaagattttcacttcatgctgcgggaccacaatagcgagctccgcttcacgcagctctgtgtcaaaggggtggaggtgcctgaagtcatcaaggacctctgccggcgagcctcctacatcagccaggatatgatctgtccctctcccagagtgagtgcccgctgttcccgcagcgacattgagactgagttgacacctcagagactgcagtgccccatggacacagaccctccccaggagattcggcggaggtttggcaagaaggtaacgtcattccagcccttgctgttcactgaggcgcaccgagagaagttccaacgcagctgtctccaccagacggtgcaacagttcaagcgcttcattgagaactaccggcgccacatcggctgcgtggccgtgttctacgccatcgctggggggcttttcctggagagggcctactactacgcctttgccgcacatcacacgggcatcacggacaccacccgcgtgggaatcatcctgtcgcggggcacagcagccagcatctctttcatgttctcctacatcttgctcaccatgtgccgcaacctcatcaccttcctgcgagaaaccttcctcaaccgctacgtgcccttcgacgccgccgtggacttccatcgcctcattgcctccaccgccatcgtcctcacaggcagggcctgggtgtccctgggaggctctccagggcctcccgcccccgctgacttcccctcgtatgagagcccccctctctgctggcacttacctttaatgtccttctccatcaggatggagttggcctgggccagggtgtgaagtaagcccgggagcctgtcgctggtcacttccaagtgcctcttcccgcactttccagggcgcctcaccagcctcagctgacaagttactaacaccccagaatgagtgtgcataatgtgtcaattctcccaatttttatgttttaaagcatgactctgagagaaagcaaaggagtgaacttctaatgctgtaatttcagactcacatggttgcgcacatggatggtgtgtctgtggggtgttgggtagggccaggtgattgtttagaggtcagaagtccaggccggcgcggcggcttatgcccctaatcccagcactttgggaagctgaggcgggcggatcacttgaggtcaggagttcgagaccagcctggccaacatggtgaaaccccgtctctactaaaaatacaaaaatcagctgggtgtggtggcacatgccggtaatcccagctactnaggaggctgaggcaggagaattgcttgaacctgggaggcagaggttgcagtgagccgagatcgcaccactgccctccagcctgggtgacagagtgagactctgcctcaaaaaaaaaaaaaagagagagagatctcctctcaaggtgtctctttgctgtcccttccacacaggtctgagttcccccagaagtattactggtggttcttccagaccgtaccaggcctcacgggggttgtgctgctcctgatcctggccatcatgtatgtctttgcctcccaccacttccgccgccgcagtttccggggcttctggctgacccaccacctctacatcctgctctatgtcctgctcatcatccatggtagctttgccctgatccagctgccccgtttccacatcttcttcctggtcccagcaatcatctatgggggcgacaagctggtgagcctgagccggaagaaggtggagatcagcgtggtgaaggcggagctgctgccctcaggagtgacccacctgcggttccagcggccccagggctttgagtacaagtcagggcagtgggtgcggatcgcttgcctggctctggggaccaccgagtaccaccccttcacactgacctctgcgccccatgaggacacgcttagcctgcacatccgggcagcagggccctggaccactcgcctcagggagatctactcagccccgacgggtgacagatgtgccagatacccaaagctgtaccttgatggaccatttggagagggccaccaggagtggcataagtttgaggtgtcagtgttagtgggagggggcattggggtcaccccttttgcctccatcctcaaagacctggtcttcaagtcatccgtcagctgccaagtgttctgtaagaagatctacttcatctgggtgacgcggacccagcgtcagtttgagtggctggctgacatcatccgagaggtggaggagaatgaccaccaggacctggtgtctgtgcacatctacatcacccagctggctgagaagttcgacctcaggaccactatgctgtacatctgtgagcggcacttccagaaggttctgaaccggagtctattcacaggcctgcgctccatcacccactttggccgtcccccctttgagcccttcttcaactccctgcaggaggtccacccccaggtccggaagatcggggtgtttagctgtggcccccctggcatgaccaagaatgtggaaaaggcctgtcagctcatcaacaggcaggaccggactcacttctcccaccattatgagaacttctaggcccctgcccgggggttctgcccactgtccagttgagcagaggtttgagcccacacctcacctctgttcttcctatttctggctgcctcagccttctctgatttcccacctcccaaccttgttccaggtggccatagtcagtcaccatgtgtgggctcagggacccccaggaccaggatgtgtctcagcctggagaaatggtgggggggcagtgtctagggactagagtgagaagtaggggagctactgatttggggcaaagtgaaacctctgcttccagacttcagaaacaaatctcagaagacaagctgacctgacaagtactatgtgtgtgcatgtctgtatgtgtgttggggcggtgagtgtaaggatgcagtgggagcatggatgctggcatcttagaaccctccctactcccatacctcctcctcttctgggctccccactgtcagacgggctggcaaatgccttgcaggaggtagaggctggacccatggcaagccatttacagaaacccactcggcaccccagtctaacaccacaactaatttcacccaaggttttaagcacgttctttcatcagaccctggcccaatacctatgtatgcaatgctcctcagccctcttctccctgctccagtagtctcccttccaaataaatcacttttctgccgcctt

SEQ ID NO: 186934 - DNA, 5279 bp, Homo sapiens
  misc_feature (3206)..(3206): n is a, c, g, or t
ccctcctgagtgggtatagaaggtccttgacttaggaacaatctgtgctttcttgcaccgatgtttaagccacctttcaggagtcagctgttacaccctgagctaccacctggactggtggcccaggccaaggtagaaaatgctggtgatatgtttttgaaaactgtctccaaaaggcaatatataatcaggcatttgattaaaaaaaattttagttctaaagaatagaaaccttttataacacatcattctgccattcaacttttgcacattctgattttgtcccttcaactttcataccttttcaagaacaagttatgaatgcggattggctggctgttttattactttataaaataggcagctgaatgtgtgagagggttcccataaatggagttcacttatgtaaaacactcagagaagtgcctggggcataataagcactgtataggagtgagttactgttactgtcatttattattatcatccctggggctaatccctgggagccacctctttgccttagggtgggtgccgtgtcctttctcttacttctgccccttcttggttccaggtactggaggccacagctgccctgtacaaccaggacttatcctggctagagctgctccctgggggactcctggagagccaccgggaccctggacctctgttcagcaccatcgtccttgaacaatttgtgcggctacgggatggtgaccgctactggtttgagaacaccaggaatgggctgttctccaagaaggagattgaagaaatccgaaataccaccctgcaggacgtgctggtcgctgttatcaacattgaccccagtgctctgcagcccaatgtctttgtctggcataaaggagacccctgtccgcagccgagacagctcagcactgaaggcctgccagcgtgtgctccctctgttgttcgtgactattttgagggcagtggatttggcttcggggtcaccatcgggaccctctgttgcttccctttggtgagcctgctcagtgcctggattgttgcccggctccggatgagaaatttcaagaggctccagggccaggaccgccagagcatcgtgtctgagaagctcgtgggaggcatggaagctttggaatggcaaggccacaaggagccctgccggcccgtgcttgtgtacctgcagcccgggcagatccgtgtggtagatggcaggctcaccgtgctccgcaccatccagctgcagcctccacagaaggtcaacttcgtcctgtccagcaaccgtggacgccgcactctgctgctcaagatccccaaggagtatgacctggtgctgctgtttaacttggaggaagagcggcaggcgctggtggaaaatctccggggagctctgaaggagagcgggttgagcatccaggagtgggagctgcgggagcaggagctgatgagagcagctgtgacacgggagcagcggaggcacctcctggagacctttttcaggcaccttttctcccaggtgctggacatcaaccaggccgacgcagggaccctgcccctggactcctcccagaaggtgcgggaggccctgacctgtgagctgagcagggccgagtttgccgagtccctgggcctcaagccccaggacatgtttgtggagtccatgttctctctggctgacaaggatggcaatggctacctgtccttccgagagttcctggacatcctggtggtcttcatgaaaggctctcctgaggaaaagtctcgccttatgttccgcatgtacgactttgatgggaatggcctcatttccaaggatgagttcatcaggatgctgagatccttcatcgagatctccaacaactgcctgtccaaggcccagctggctgaggtggtggagtccatgttccgggagtcgggattccaggacaaggaggaactgacatgggaagattttcacttcatgctgcgggaccacaatagcgagctccgcttcacgcagctctgtgtcaaaggggtggaggtgcctgaagtcatcaaggacctctgccggcgagcctcctacatcagccaggatatgatctgtccctctcccagagtgagtgcccgctgttcccgcagcgacattgagactgagttgacacctcagagactgcagtgccccatggacacagaccctccccaggagattcggcggaggtttggcaagaaggtaacgtcattccagcccttgctgttcactgaggcgcaccgagagaagttccaacgcagctgtctccaccagacggtgcaacagttcaagcgcttcattgagaactaccggcgccacatcggctgcgtggccgtgttctacgccatcgctggggggcttttcctggagagggcctactactacgcctttgccgcacatcacacgggcatcacggacaccacccgcgtgggaatcatcctgtcgcggggcacagcagccagcatctctttcatgttctcctacatcttgctcaccatgtgccgcaacctcatcaccttcctgcgagaaaccttcctcaaccgctacgtgcccttcgacgccgccgtggacttccatcgcctcattgcctccaccgccatcgtcctcacaggcagggcctgggtgtccctgggaggctctccagggcctcccgcccccgctgacttcccctcgtatgagagcccccctctctgctggcacttacctttaatgtccttctccatcaggatggagttggcctgggccagggtgtgaagtaagcccgggagcctgtcgctggtcacttccaagtgcctcttcccgcactttccagggcgcctcaccagcctcagctgacaagttactaacaccccagaatgagtgtgcataatgtgtcaattctcccaatttttatgttttaaagcatgactctgagagaaagcaaaggagtgaacttctaatgctgtaatttcagactcacatggttgcgcacatggatggtgtgtctgtggggtgttgggtagggccaggtgattgtttagaggtcagaagtccaggccggcgcggcggcttatgcccctaatcccagcactttgggaagctgaggcgggcggatcacttgaggtcaggagttcgagaccagcctggccaacatggtgaaaccccgtctctactaaaaatacaaaaatcagctgggtgtggtggcacatgccggtaatcccagctactnaggaggctgaggcaggagaattgcttgaacctgggaggcagaggttgcagtgagccgagatcgcaccactgccctccagcctgggtgacagagtgagactctgcctcaaaaaaaaaaaaaagagagagagatctcctctcaaggtgtctctttgctgtcccttccacacaggtctgagttcccccagaagtattactggtggttcttccagaccgtaccaggcctcacgggggttgtgctgctcctgatcctggccatcatgtatgtctttgcctcccaccacttccgccgccgcagtttccggggcttctggctgacccaccacctctacatcctgctctatgtcctgctcatcatccatggtagctttgccctgatccagctgccccgtttccacatcttcttcctggtcccagcaatcatctatgggggcgacaagctggtgagcctgagccggaagaaggtggagatcagcgtggtgaaggcggagctgctgccctcaggagtgacccacctgcggttccagcggccccagggctttgagtacaagtcagggcagtgggtgcggatcgcttgcctggctctggggaccaccgagtaccaccccttcacactgacctctgcgccccatgaggacacgcttagcctgcacatccgggcagcagggccctggaccactcgcctcagggagatctactcagccccgacgggtgacagatgtgccagatacccaaagctgtaccttgatggaccatttggagagggccaccaggagtggcataagtttgaggtgtcagtgttagtgggagggggcattggggtcaccccttttgcctccatcctcaaagacctggtcttcaagtcatccgtcagctgccaagtgttctgtaagaagatctacttcatctgggtgacgcggacccagcgtcagtttgagtggctggctgacatcatccgagaggtggaggagaatgaccaccaggacctggtgtctgtgcacatctacatcacccagctggctgagaagttcgacctcaggaccactatgctgtacatctgtgagcggcacttccagaaggttctgaaccggagtctattcacaggcctgcgctccatcacccactttggccgtcccccctttgagcccttcttcaactccctgcaggaggtccacccccaggtccggaagatcggggtgtttagctgtggcccccctggcatgaccaagaatgtggaaaaggcctgtcagctcatcaacaggcaggaccggactcacttctcccaccattatgagaacttctaggcccctgcccgggggttctgcccactgtccagttgagcagaggtttgagcccacacctcacctctgttcttcctatttctggctgcctcagccttctctgatttcccacctcccaaccttgttccaggtggccatagtcagtcaccatgtgtgggctcagggacccccaggaccaggatgtgtctcagcctggagaaatggtgggggggcagtgtctagggactagagtgagaagtaggggagctactgatttggggcaaagtgaaacctctgcttccagacttcagaaacaaatctcagaagacaagctgacctgacaagtactatgtgtgtgcatgtctgtatgtgtgttggggcggtgagtgtaaggatgcagtgggagcatggatgctggcatcttagaaccctccctactcccatacctcctcctcttctgggctccccactgtcagacgggctggcaaatgccttgcaggaggtagaggctggacccatggcaagccatttacagaaacccactcggcaccccagtctaacaccacaactaatttcacccaaggttttaagcacgttctttcatcagaccctggcccaatacctatgtatgcaatgctcctcagccctcttctccctgctccagtagtctcccttccaaataaatcacttttctgccgccttcagggtttctttattctgccctaggaccggaaggggcatggggagaggaagccactaacccagccagctcaccaggctggcccagacatctc

SEQ ID NO: 186935 - DNA, 2729 bp, Homo sapiens
tgtgcatatacaattgagctcggtacctgaatcattcatccttcatcgagatctccaacaactgcctgtccaaggcccagctggctgaggtggtggagtccatgttccgggagtcgggattccaggacaaggaggaactgacatgggaagattttcacttcatgctgcgggaccacaatagcgagctccgcttcacgcagctctgtgtcaaaggggtggaggtgcctgaagtcatcaaggacctctgccggcgagcctcctacatcagccaggatatgatctgtccctctcccagagtgagtgcccgctgttcccgcagcgacattgagactgagttgacacctcagagactgcagtgccccatggacacagaccctccccaggagattcggcggaggtttggcaagaaggtaacgtcattccagcccttgctgttcactgaggcgcaccgagagaagttccaacgcagctgtctccaccagacggtgcaacagttcaagcgcttcattgagaactaccggcgccacatcggctgcgtggccgtgttctacgccatcgctggggggcttttcctggagagggcctactactacgcctttgccgcacatcacacgggcatcacggacaccacccgcgtgggaatcatcctgtcgcggggcacagcagccagcatctctttcatgttctcctacatcttgctcaccatgtgccgcaacctcatcaccttcctgcgagaaaccttcctcaaccgctacgtgcccttcgacgccgccgtggacttccatcgcctcattgcctccaccgccatcgtcctcacagtcttacacagtgtgggccatgtggtgaatgtgtacctgttctccatcagccccctcagcgtcctctcttgcctctttcctggcctcttccatgatgatgggtctgagttcccccagaagtattactggtggttcttccagaccgtaccaggcctcacgggggttgtgctgctcctgatcctggccatcatgtatgtctttgcctcccaccacttccgccgccgcagtttccggggcttctggctgacccaccacctctacatcctgctctatgtcctgctcatcatccatggtagctttgccctgatccagctgccccgtttccacatcttcttcctggtcccagcaatcatctatgggggcgacaagctggtgagcctgagccggaagaaggtggagatcagcgtggtgaaggcggagctgctgccctcaggagtgacccacctgcggttccagcggccccagggctttgagtacaagtcagggcagtgggtgcggatcgcttgcctggctctggggaccaccgagtaccaccccttcacactgacctctgcgccccatgaggacacgcttagcctgcacatccgggcagcagggccctggaccactcgcctcagggagatctactcagccccgacgggtgacagatgtgccagatacccaaagctgtaccttgatggaccatttggagagggccaccaggagtggcataagtttgaggtgtcagtgttagtgggagggggcattggggtcaccccttttgcctccatcctcaaagacctggtcttcaagtcatccgtcagctgccaagtgttctgtaagaagatctacttcatctgggtgacgcggacccagcgtcagtttgagtggctggctgacatcatccgagaggtggaggagaatgaccaccaggacctggtgtctgtgcacatctacatcacccagctggctgagaagttcgacctcaggaccactatgctgtacatctgtgagcggcacttccagaaggttctgaaccggagtctattcacaggcctgcgctccatcacccactttggccgtcccccctttgagcccttcttcaactccctgcaggaggtccacccccaggtccggaagatcggggtgtttagctgtggcccccctggcatgaccaagaatgtggaaaaggcctgtcagctcatcaacaggcaggaccggactcacttctcccaccattatgagaacttctaggcccctgcccgggggttctgcccactgtccagttgagcagaggtttgagcccacacctcacctctgttcttcctatttctggctgcctcagccttctctgatttcccacctcccaaccttgttccaggtggccatagtcagtcaccatgtgtgggctcagggacccccaggaccaggatgtgtctcagcctggagaaatggtgggggggcagtgtctagggactagagtgagaagtaggggagctactgatttggggcaaagtgaaacctctgcttccagacttcagaaacaaatctcagaagacaagctgacctgacaagtactatgtgtgtgcatgtctgtatgtgtgttggggcggtgagtgtaaggatgcagtgggagcatggatgctggcatcttagaaccctccctactcccatacctcctcctcttctgggctccccactgtcagacgggctggcaaatgccttgcaggaggtagaggctggacccatggcaagccatttacagaaacccactcggcaccccagtctaacaccacaactaatttcacccaaggttttaagcacgttctttcatcagaccctggcccaatacctatgtatgcaatgctcctcagccctcttctccctgctccagtagtctcccttccaaataaatcacttttctgccgcctt

SEQ ID NO: 186936 - DNA, 1120 bp, Homo sapiens
tgtgcatatacaattgagctcggtacctgaatcattcatccttcatcgagatctccaacaactgcctgtccaaggcccagctggctgaggtggtggagtccatgttccgggagtcgggattccaggacaaggaggaactgacatgggaagattttcacttcatgctgcgggaccacaatagcgagctccgcttcacgcagctctgtgtcaaaggggtggaggtgcctgaagtcatcaaggacctctgccggcgagcctcctacatcagccaggatatgatctgtccctctcccagagtgagtgcccgctgttcccgcagcgacattgagactgagttgacacctcagagactgcagtgccccatggacacagaccctccccaggagattcggcggaggtttggcaagaaggtaacgtcattccagcccttgctgttcactgaggcgcaccgagagaagttccaacgcagctgtctccaccagacggtgcaacagttcaagcgcttcattgagaactaccggcgccacatcggctgcgtggccgtgttctacgccatcgctggggggcttttcctggagagggcctactactacgcctttgccgcacatcacacgggcatcacggacaccacccgcgtgggaatcatcctgtcgcggggcacagcagccagcatctctttcatgttctcctacatcttgctcaccatgtgccgcaacctcatcaccttcctgcgagaaaccttcctcaaccgctacgtgcccttcgacgccgccgtggacttccatcgcctcattgcctccaccgccatcgtcctcacagtcttacacagtgtgggccatgtggtgaatgtgtacctgttctccatcagccccctcagcgtcctctcttgcctctttcctggcctcttccatgatgatgggtctgagttcccccagaagtattactggtggttcttccagaccgtaccaggcctcacgggggttgtgctgctcctgatcctggccatcatgtatgtctttgcctcccaccacttccgccgccgcagtttccggggcttctggctgacccaccacctctacatcctgctctatgtcctggtgagggcttttggctgtgagcc

SEQ ID NO: 186937 - DNA, 2114 bp, Homo sapiens
ccctcctgagtgggtatagaaggtccttgacttaggaacaatctgtgctttcttgcaccgatgtttaagccacctttcaggagtcagctgttacaccctgagctaccacctggactggtggcccaggccaaggtagaaaatgctggtgatatgtttttgaaaactgtctccaaaaggcaatatataatcaggcatttgattaaaaaaaattttagttctaaagaatagaaaccttttataacacatcattctgccattcaacttttgcacattctgattttgtcccttcaactttcataccttttcaagaacaagttatgaatgcggattggctggctgttttattactttataaaataggcagctgaatgtgtgagagggttcccataaatggagttcacttatgtaaaacactcagagaagtgcctggggcataataagcactgtataggagtgagttactgttactgtcatttattattatcatccctggggctaatccctgggagccacctctttgccttagggtgggtgccgtgtcctttctcttacttctgccccttcttggttccaggtactggaggccacagctgccctgtacaaccaggacttatcctggctagagctgctccctgggggactcctggagagccaccgggaccctggacctctgttcagcaccatcgtccttgaacaatttgtgcggctacgggatggtgaccgctactggtttgagaacaccaggaatgggctgttctccaagaaggagattgaagaaatccgaaataccaccctgcaggacgtgctggtcgctgttatcaacattgaccccagtgctctgcagcccaatgtctttgtctggcataaaggagacccctgtccgcagccgagacagctcagcactgaaggcctgccagcgtgtgctccctctgttgttcgtgactattttgagggcagtggatttggcttcggggtcaccatcgggaccctctgttgcttccctttggtgagcctgctcagtgcctggattgttgcccggctccggatgagaaatttcaagaggctccagggccaggaccgccagagcatcgtgtctgagaagctcgtgggaggcatggaagctttggaatggcaaggccacaaggagccctgccggcccgtgcttgtgtacctgcagcccgggcagatccgtgtggtagatggcaggctcaccgtgctccgcaccatccagctgcagcctccacagaaggtcaacttcgtcctgtccagcaaccgtggacgccgcactctgctgctcaagatccccaaggagtatgacctggtgctgctgtttaacttggaggaagagcggcaggcgctggtggaaaatctccggggagctctgaaggagagcgggttgagcatccaggagtgggagctgcgggagcaggagctgatgagagcagctgtgacacgggagcagcggaggcacctcctggagacctttttcaggcaccttttctcccaggtgctggacatcaaccaggccgacgcagggaccctgcccctggactcctcccagaaggtgcgggaggccctgacctgtgagctgagcagggccgagtttgccgagtccctgggcctcaagccccaggacatgtttgtggagtccatgttctctctggctgacaaggatggcaatggctacctgtccttccgagagttcctggacatcctggtggtcttcatgaaaggctctcctgaggaaaagtctcgccttatgttccgcatgtacgactttgatgggaatggcctcatttccaaggatgagttcatcaggatgctgagatccttcatcgagatctccaacaactgcctgtccaaggcccagctggctgaggtggtggagtccatgttccgggagtcgggattccaggacaaggaggaactgacatgggaagattttcacttcatgctgcgggaccacaatagcgagctccgcttcacgcagctctgtgtcaaaggtggggcagcctggtaggcagcactgactcattggttaggcatagtaggcacaatgcccacatacttttaggagtccacagaaatgttttaatttccattaaaatcagaag

SEQ ID NO: 186938 - DNA, 474 bp, Homo sapiens
ccaccaagaatttcctgaggggcagccagtccagatatcagctctgagggagccctgacttcccctctgagacatcagcttcaaaggagggaaccatcctcccaggccctgagggttccccttgggctttgtggttcttgagatgagcagaccctctttgtatctgttcgcattttttttgcatgttccagtctctggggtgatagtttgatgagatagttccatgagttgttgacagctcaggggagcgtgttaaagccatgacgtttgctgtcatatataactttggctagtggcactgggacctctgtatctaccttttttttttctctgtagttaaaaatgtcctgtaatgggaacaagttgtcttctaggaagtccaggaattcaagagaagccaaggtttcttcagcaatggttatctgctgcccagtgtagccatatatccatccatctattcatctgtccatccat

SEQ ID NO: 186939 - DNA, 552 bp, Homo sapiens
tgcattgtttccgcgtagctgtatactacaggcacccaccaccactgcatctggcctaatgtttgtatttttagtagagacggtgtttcctcacattggccaggctggtctggaactcctggccttaagtgatccacctgcctcggcctcccaaagtgctgggattacaggcatgaaccactcctggctgttccctacattttttttgctcctttttccctttagccttattttggagtggggtggggagacaaggtctcactgtgtggcctaagctggagtgcagtggtgccagcatagctcactacagcctcaaacttccgggctcaaacagtgctcctgccttatccttccaagttgctaggactacaggtgtataccgtcacacccagcccccctcttagcttttttactcctctttagaaccacctgtgtacttcctggttcttgcattgtgatagagaaaggtagagataatgttaatagaaacagacatccgtggagttccaaggaaatacagtacaaacagttcaggctttctcacagagcatg

SEQ ID NO: 186940 - DNA, 324 bp, Homo sapiens
ggctggggtctctgcctggggtattacaagggtgaaatcaagacgtcagccagaagagcatctctctggaggctctagggaaaaattcacttccaaatccatcatattcatagtcccaggcattattcaaagcacatacaacagggaagtgggaaagctcaggggtccatcttagaattctatctaccacagtacttttgttagagttataaatgacttttataaaccataattgtattatctaaggactgattatatgtgggtgctactgctggttctcaaaatcagcaatctaaaaaggaggtatgataaaaatgttatgac

SEQ ID NO: 186941 - DNA, 186 bp, Homo sapiens
tctgttacccaggacggctggtcttctagaaggaggccaagcttccaagtaggggaccagagtcttgggctaggctttgccctccttccctgaaaatgtacacaatgtacctggttcacctccatttttgtgttcattcattcattccttcattcagcaatgttactaagcatctagtaagttcta

SEQ ID NO: 186942 - DNA, 323 bp, Homo sapiens
aaagtacaacttggaagagggctaagccggtgacttgagagaccaagtgcacaacttgacctcttgacttggggttttatactttggcaaactactaggatcttgcattacttctgcccactcttcaaatcttattgggaagctgctgatcaatttcaggagacataaacctaactgctgttaggcgggtgttggatgatgattctttctggctacttcctgttgaaaagaggcatcgtgtggtggggacaacagttgggcctcctcttgaagttgataaagcattctgggaagaattgcgtgtacatgcatggtttgcagtg

SEQ ID NO: 186943 - DNA, 260 bp, Homo sapiens
aggtgctcaaaagccacaggtgctactgcagatccagatagtgctagtctagtcactgcctcactagtttcaagagaatctgtggattatttcagggtaatgtaacaacagtggagctttggatggttgccttccagtttacacaggatgttttaggacacttttgtcattgaattctgacagctggccttggaaagtaggctgtcttttcctcattttggtttctgaggaagacagcaccaggacatcaaactaaatct

SEQ ID NO: 186944 - DNA, 249 bp, Homo sapiens
cataaactgtacagaagtcccccttatccatagttttactgttcagtttcagcaacccatggttgtatttcaaaaatagtaaataaacatttccagaaatagacaattcctaagttttaaattttgagttctttccaagtagcgtgataaaatctcacaccatcttgggaggtccagcaactccacactgtagacacttcctgccctggagtcacggaatagccatctcggtgatcgaattgactgtgg

SEQ ID NO: 186945 - DNA, 381 bp, Homo sapiens
actttttgtgtgacattagtatttttatttctgaaatagtatgaccacatagttgtgatgagttgaggaagagaaagaagattgatagtgaagatttttaattctgcaagagagatgaaattggtggcagtgtttgctgttcttataggaaagctgtcatgatatggacaatgaagcagaagaaactgatatagataagctactatgtaaagctttgatgtccagttttgctttatactgtcaatttgtttagaaggaatgagaggggtgttgatttttagtattacagtttctaattcaaaacctggttctaatttgaggtccttggaacttaccaggaattctctatggatttgaagagtcaatgaattattaaagtta

SEQ ID NO: 186946 - DNA, 319 bp, Homo sapiens
atttgtggcagtgtattctataaacaagctaagtaattatcttcatctgcagagatatataaactaaccacattataggctgaggaaaatttcacttaaaggtatatgctaattatagaagagcacaaccttcagggtgctttctcctaaagcaagaacaaatatcttaaaaatattagtgaataggctgataaaatcggaaggtttattatccaaagatttttctcagatgaaaaaaacagaaacaaaaccagcttcttagaacgccagaacacccaacacttggattctgtcctgtttggtagcctctgtttattat

SEQ ID NO: 186947 - DNA, 375 bp, Homo sapiens
tatcttatgaataattgggctattctttcatatgcccaagggccattttatagctctatatttcttttgtgttctgtttggggcttgaagtctctacttctgtatcgggattgcaatgcctgctgtcttactgtttccatttgtctggtaaattttcgttcattcctttatttttagctatttcaattgctgcattttcggtgtgtatcttgtgtgcagcacacagttgagtttttgctatacgagccaatccgaaaataatcttttttaataggcaaattaagccgatctagttttgatataactaccatgtttgatgtcaattctgtcatattttagattgtaattgctgaatgtattatatttactgtgtct

SEQ ID NO: 186948 - DNA, 373 bp, Homo sapiens
aggataggactggagttgatagacaaagctataaagggagacggttactggggggagagctctgtctcgcttagcatcacttgctgttagtggtgggcccagacagtgactgaaatattttcattccagaccagggtccagtgtatttatacttgatgcattaagttctgatctttaaaaagctgccagttttttagaaggagagtttttattttcattttatatggtgtgggctgaaggaatcttttgctaaatataacaatgtgagtttgctagtctttctgaggcattgaaggcatttaaaatttgaaaccagagctacctgatgggaacatccttgatctcttctccaagtcaaaccaacctaggccac

SEQ ID NO: 186949 - DNA, 303 bp, Homo sapiens
taccacagtggacacctggacttcctctggctttctcttggggactctgccaggcagaggccctcagccgtgcactgggacagttctgtgggcagtggcaggaagccttcagtcggtgaacagcgtgaagacagcctgatgcatgcaaggcgtggggatgtgattgtgtgagcagatcaatacctatatctcaaaaatgagaactttcactttagtacttgatcacttaccctattgaattatgtaagtacttcagtctcttcaacattggctttctttcattctttgtttttttaatctccc

SEQ ID NO: 186950 - DNA, 159 bp, Homo sapiens
cctagcatatcccatacaccctatacaccataccgtcctgataccaccctataccactgagcttaccactatcataacaaaaacataaacactctgcatttttcataggaatcttactttttattcaataacattcttgctcttgaaagagtaagaaaa

SEQ ID NO: 186951 - DNA, 247 bp, Homo sapiens
cttttgattatttgtctttcatatttaaatgtttgatttataaagaaaacacaaacacctcctcttaggctctccattgatttcagtctcacctaccttctcttcctctcaccatccgtgaccccatttatccaattcaattccttcatcttctcttcacctcctcaacccactgcagtttcaccacatcactccaactgtggttgccagaatgagtaaagaccttctagttgataagccctcaaga

SEQ ID NO: 186952 - DNA, 620 bp, Homo sapiens
cccgctggcgcttctccattgtagaatgtgaaattcttaaaatgcatcctatataaggaatactatagctgtgcactggtgttgttctcttctttaaactcgggaccgtatatatctggtcaaattggccaagtattacttatgctgcactccatcaagtgtcaggccacattctatcagcacagcgtgactgcctatcagtgacaatataagtgagctctatttggatccctcttaccctaccctttatatttatgacagcattatcataaaactccaatattcttcaataacttacatgtttgttgtaggataaaattattaccctcaatgaactacataaaaaatacaaaaattagccgggcgtggtggcacgcgcctgtagtcccagctactcaggaggctgaggcaggagaatcacgtgaacccgggaggcagaggttgcagtgagtcaagatcacgccactgcatcccagcctgggaaacagcgagactctgtctcaaaaaaaaaaaagaaggggttgactgccaagtttaaatattggcaggagatgaggagatttcagtttttatggagctttgttaatgagccgtgactgtttattacaagacttttactt

SEQ ID NO: 186953 - DNA, 780 bp, Homo sapiens
gtccaaaagcaccccatttacaaatctctttgttcctcaaacacaatttcagcttcctgtctacaaatgtttgctcatgctctttcctccacctgaaatgcctagtgttcctaataacttatcatttaaggtccagttatcttcccttatcaaaagcagtatctctcttatctgatttttaacatcatttgatctgtacttatctcacattgtctggcaatacagctatctgcatacgtcatctaccctactagactgaggacagattagtgtttcacaataatctcaacacaacctgaatagtgacactgttaattaaatttggcctaaagctgcttccataagcagggaactgcacctcagtatgttaaaactgcaacctaactcgagtatattcttgtaacgaggctaagcgttctgccaatcacaagcggcaagctgctcagacatgtccaaataaggcaaacgtggacacaaacgtggacctgtaaccaatcagactatgtctggatgtcacttctttttctgtctataaatcctgactatccacattgctgggtggaactctctgaacctttactccttcagggtgctgctcaattcatgaattgtttctttgctcaaattaactgccaaatttaatttgtctaaagttttattttaacaagactcaatatgtaatgctaatgagcatattaatttccttaagacgaataaagtcttttttttgagacagggtctcactgtcaccaaggctggagtacagtggcatgatctcgg

SEQ ID NO: 186954 - DNA, 264 bp, Homo sapiens
cctactcaaataaataaatgataccaataataaacaagtaacactaatctctatttgggctcaatatttggagtatgttttaatttctatattgtttatagataggttgctcaggaaacttgaataaatgcccaactcttgaggtcatatgactttttgttagtagcattttgttttccagattccacaatattatctagcaagcagagaattttgaatgcttgtgcaagtgtggttgccgctgaggtgtgcagctcaggactt

SEQ ID NO: 186955 - DNA, 289 bp, Homo sapiens
tggctggctttgacttgctttggctgacagaatgcggcaaaagggatgtcatgccacccagtagaggcctcaagaaggctgggatacttgcctctctcagaaccctgcttctaccacgaaagcaagcctggggtggcctgctggagcatgagagactacgtttaaagaacagagttgtcctgaggccatcctagaccaaccggtaaccacagacacatgaatgagcacagtccaggtgagccacgaccagaactgcccagctgaacccagcctattgcggactcacaga

SEQ ID NO: 186956 - DNA, 602 bp, Homo sapiens
aatacagagtctacagtgaagttgtggagactgaacaaggaatatattttttaaaatcaagccatgggtgggcctgggtgcttatgcctgtaattccgacactttgggtggctgaggtgggtggattgcttgagctcaagaattttggcaatatagaaagaccgcgtatctataaaaaatcaaaataaattttaaaaaagaaaaaagccaggcgcggtgctcaggcctgtaatcccaacactttggggggccaaagcgggcagatcacgaggtcaggagttcgagaccagcctggccaacatggtgaaaccccgtctctactaaagatacaaaaaattagcggagcgtggtggtgcgcacctgtaatcccaggtactcgggagactgaggcagaattgcttgtacccgataggcagaggttgcagtgagccaagactacaccattgcactccagcctgggccacagggcgagactccgtctcaaaaaggaagaaagaaagaacgaatgtaaagaaagactgaaagagaaagaaagaaaggagagagggagggaagaaagaaaagaaaggaaggaaggaaggatggaaggaaggaaggaaaga

SEQ ID NO: 186957 - DNA, 527 bp, Homo sapiens
ctcctctatctaaataaaagttgaaataaaaaatggatatagaggtagcatacctcaaaataataaatgctatatgtgacaaagccacaactaacatcatagtgaacagggaaaaattgaaagcctttcctctaaggactggaacaagacaagcatggcccacttacactgcttttatttaacactgaaagtcctggacagggtaattaattaggcaagaaaataaaaagggcatccaaattgaaaaggaagaagtcaaattagccttgtttacagatgacataatctcatacctagaaaaacataaaggctccaccaaaaaactcttagaactgaacaaattagaacaaattgagtaaagttgcagaatacaaaattagtaacatttatatttgccaacagcaaacaatctgaaaaagaaatcaagaaagcaatctcatttataatagctacaaaaaatagaaaatacctaagaatcaatctgacaaaagtagtcaaagatctatacaaactataaaactcagatg

SEQ ID NO: 186958 - DNA, 335 bp, Homo sapiens
tatagcttcaggtcttagatttgagtccttaatccatcttaagttcatttttgtataaggtgagagttgagtattcagtttcattctcatacatgtggctagctaattatcccagcaccatttgttgaaaacggtgtcctttcccctactttatgtttgtgtttgcttgttgaatatcaattggatgtaagtatctgggtttatttctgggttctctatgctgttccattggcctattgcctatttttataccagtaccatgttgttttggtgacaatgactttatagtatagtttgaaatcaggtagtacgatgcctccagatttgttattttt

SEQ ID NO: 186959 - DNA, 675 bp, Homo sapiens
tcagcccacttgcatccgagtgaataaacagccttgctgcttacacaaagcctgtttaggtggtcttctatatggacacgcatgacaatatttacaacaaataccaaggaagagctaagagcacatagcatttcccaggcttattagactgtgggatcaacctctttaagaaagcattttgcagaattgttcacaggtcattctgcagtgtgaagttttttttgcaataagatccttactctagagttaacttcactaggaagtacactctgggtgtttacctttagagcttcagtttctacaagaatttggcaccggttgggtcttgtagaaatatttactgcatggagttgaaagaagagtctggactgggagaaggatgtatggataaagaacaagggttcttttcagaaaaccaagcagctactggatactgaccttattctaaaggccaacagaagtgggaataaggtgcaattgcggaatctcactcaatattgaaggatgacggtgaccttgtgggaaaataggattcaggaatgtctttttaaattctggttatttgtacatacgcactcttacagatttttttcaaaaatcccaattccactggaaaacttttacctcgatttttccttttctaaaattctactccagactttatttcatttgcca

SEQ ID NO: 186960 - DNA, 679 bp, Homo sapiens
ggcgctgtctccatatttcacaccactaaccaccctgctgtgctcaggatgccctgtgatgcactatgataaaaatgaaagtggaagccaagcacagtggctcaagactggtaatctcagcaatttgggaggaccaggtgggagggtcacttgggcccagaagttcgagaccagcctaggccacatagtgagatcccatctctacaaaaatttaaaaataaaaaaaatgagcttggcatggggcctgtgcctgtggtcccagctacttggaaggccagggtgggaggatcatttgactctgggaggtggaggctacagtgagccgtgatcgcgccactgcactccaacttgggtgacagagtgagaccctgtctcaaaaaaagaaaataaaaagtggggataaaaagataataatcgccaacttactggtaagtccagttgaactttaaatattgccaagatttctaatttttatttttgagcctattgcttccacatttttacctgtgacttcatcttgtcttctctctctcagattttggattcataaacacctttggggaagccacgcccatcgctctgtcttgggcttgatcatgatcagaacagcctgaaataatcccatacatccacaatgacaaacggtggagcatcttagtattagggggttagtcactta

SEQ ID NO: 186961 - DNA, 427 bp, Homo sapiens
aagatgttactagctcatccaatagaagtttatttcatgctcatgttgcatgttcattgtgagtaattgattatagtactatatcctcttccctccacaactcatgttggcagggcaccctcctgggtatgacttggtgggcccatggtagagagcacagagcagtggcagagcacatggtcgctcattaatgcttttgctcggaaatggtatatcccatttctgctcacatttcattggccaagacattcagcaccaaccttaaaatctaatgcataacaaggtatcatctttcagtaggaagatacccaaggtacatggccaagcttgatatcagtgggacaggaagggatagcatttatttatatagtatacacattgggatagtatacctttgggaaaagaatatgtctgccatacctattaa

SEQ ID NO: 186962 - DNA, 734 bp, Homo sapiens
agttacacctgtgtgttgtggctttttgtgtgtttctggtgtctgtatgaagtcaggctgccctaggatggctgctctcaaccacaaggcagcgaccatcagtggcaagatgggccacaagtagtctgtcactcacgagaagggtgcaggtgactgacttccttgtatgttaggactctgtcagttgcaaataactgacaggaaacagttctcagtgccttaagcacatgtgcacaaacacatacacacatacacatgcgtgcacagcgggggggcagtgtattgtccggctgaccaaaaagatccagcgtggccaggagaatctcgtgccaggctgaggcagaagaatctcttgaacctgggaggaggaggttgctgagctgagatggtgccactgcactccctcctgggcgacagaggccactgcactcctgcctgggcgacagagtgagagacaaaggacaacaccctagtctcccttcctggctctgcatcccgccgtgccagcttcactcgcaggacccacagcatagcccgggaggcagcgctgcacttacagccccccaagtctgagtctccctttccagctgtccctggagattctagacctgtccatcatcgtatcaatggccatatctctcaacccatctctgtggctggggaatgggttttgcttatcagcttgggcctgggtcacatgcccacctctgcagctggggctagagtcagaccca

SEQ ID NO: 186963 - DNA, 251 bp, Homo sapiens
gagaaacagcgcgcactcagatttttagagaagaaatctggagaggacgtaagagagagaaacagcgcacactcagatttttagaagaagaaatctagagaggacgtgagagagagaaacagcacgcactcagatttttagaagaagaaatctggagaggacgtgagagagagaaacagcgcgcattcagatttttagaagaagaaatctggagaggacgtaagagagggaaacagcgcgcactcagattt

SEQ ID NO: 186964 - DNA, 147 bp, Homo sapiens
tgtggattagaaagaagaaaagaagtcagctaagacagaggacgagcaatcagaggagtgactggaaacccaggaatgacagtgttgccacaacaagagggaagcaagattcctgaaagagtgtggaatcaacactaaatgctgcag

SEQ ID NO: 186965 - DNA, 406 bp, Homo sapiens
taaatatacaaataagtgattgaagaaataaataaatgaggagagtagacaagccttccttccaaataacaattccaatttcttccaaataagaattccaaataacaaatgtggaaggaatgaaggaaatgggaaaatcaccttcagacctgcatagtaatgatgtcatgggccagaaaccctgaagaataataaattcatggcaaagctttaaggaggagctgggtacttacatagccccaagcaactcctccaaatacttaaacagtactgggatggtttccacagggccccacactcctggtacgccttccatcagagagtggagctcagtctccccatactgagacctgagtgtgagctgaactgggtgactctgtggacagcgacttcccagaatgaagaa

SEQ ID NO: 186966 - DNA, 444 bp, Homo sapiens
ttctcaataacaataaataacctagataccaattacatatctccttataagatactaccaaatcgccctcactcattcccctaccatgagcatcccaaacaaacaatctaaaaacaatacttacaatagcactattccttcttaccctactagcagcacgcctagcctgtgatactgggctgcccccacacatgagtgctgccctcctcacgttgcttgggacggcactgtgtcctgggccaccatgacttttctcataactagcgtggatgcttaccttgttccacaccagtgaatggcttcaggaagagaagaggaagagaaaaatatttacatttaaagaaaggtagtttaaagaaatatgttaggtaaagaattgagcaggtaatatacggagctggcaaaaattgtgaccaaagtaggtgaatgattgagatttatgca

SEQ ID NO: 186967 - DNA, 458 bp, Homo sapiens
cagcaaaacaccttccaaatctaccagggaatcttacatatactagaaactctataaatatatttgaatgaataaatgtatttttttctgataatagcctgatatggagatgagatagcagaaaattggcatgatctagaagatttcttttccccttaaacctgagtgttttttgttagtgaattcactccaatgtattgctaaaggtggtcgtataaaccattctgtttgcaatctcctttttgtccttctgttcaaagtgagtaaagaacaacctgtttgaatcagacatcagatcatgatagttatgtggggagagggcaggcagggactcagtaaaaggacctggtagagaaagcagaatctacaggtttgaacataacattatggctcagggtcagtcattctaggaattggtctcatggcagatgtacccaaagctgcatttcaagtcgtga

SEQ ID NO: 186968 - DNA, 897 bp, Homo sapiens
agacgggtttgatccaaagtggtcaagattccttttctttaaatttgttttttttttgagatggagtcttgctctgtcacccaggctggagtgcagtggcgtgatctcagctcactgcaacctcctggattcaagcgattctcctgcctcagcctcctgagtaactgggattacaggtgaacaccaccacgcctggctactttttttgtatttttagtagagatggggtttcgtcatgttggccagaatggtcttgaactcctgacctcaagtgatccacccacctcgacctcccaaagtgctgggattacaggcgtgcgccactacgcactggcaaatttttgtattttcagtagagacagggtttcgccatgttggccaggctggtcttgaactccggacctcaggtgatccacccacctcagccacccaaagtgctacaattacaggcgtgagccaccgcacctgggctattttcacttctttcgaagttatacctaggagtggaatcgctgggtcagttggtaattctatatttaattaatggaatcaagatttctttttcttttctttttttggttttactttaaaaaattctatcttattacataaaaaaaccacaggttcagaaaagccacaccaaacaaatgaatagcctaatggttcactctaacgtcaacactcatataatccctaactctggttgagaaatagtactttgccagaacaccccctccaaaagccatgccacggaccacatcctagtcacagccctcttcccccagagtagtcactgtcctgtcttttgtagacatcacttccttctttctgtatagttttatcacccaagtgtgaatctgtagacaaatatttagctttgcccataaaaaaaaaaaa

SEQ ID NO: 186969 - DNA, 701 bp, Homo sapiens
ttatttattaaagagatggagtcttgctatgtttcccaggctactcacaaattcctgtcctcaagtgaccctctcgcttcagcctccccgattagctaagactacaggtgcgcaccaccatccctgactaatttatttttaaaatttttctttttgtagagatggggattttgctatgttgcccaggctggtcttgaactccggacctcaggtgatccacccacctcagccacccaaagtgctacaattacaggcgtgagccaccgcacctgggctattttcacttctttcgaagttatacctaggagtggaatcgctgggtcagttggtaattctatatttaattaatggaatcaagatttctttttcttttctttttttggttttactttaaaaaattctatcttattacataaaaaaaccacaggttcagaaaagccacaccaaacaaatgaatagcctaatggttcactctaacgtcaacactcatataatccctaactctggttgagaaatagtactttgccagaacaccccctccaaaagccatgccacggaccacatcctagtcacagccctcttcccccagagtagtcactgtcctgtcttttgtagacatcacttccttctttctgtatagttttatcacccaagtgtgaatctgtagacaaatatttagctttgcccataaaaaaaaaaaa

SEQ ID NO: 186970 - DNA, 207 bp, Homo sapiens
agggacagtaggagaacgatagtgctattaacagcaacagggaaactggaaaggtagatgggtatagaccacaacagagttaacactaattttgaaggtgagcatcttcagtccacggttttggggaaaatcagagacaactaaagagttaaaatttgccctggaatgtggtccttatacttcagggtgataagaatctcctgaggt

SEQ ID NO: 186971 - DNA, 286 bp, Homo sapiens
atcatgcatgtttgctgttgaaaaggttaaaaaggttgaacaggatacaaaaagtaaaagaaaaaaaattataagtcattttatttccacttttcttctgtgcacaccgtctactttaattatttgttcttactgcccagaaacttttcctttgttattacttcctagagatttcattcttcatcatgccatcttaagtagactttgtactttagctcaagctaaaacacttgaagttaaggaaaatgagcttagaaacaacttttcttctatctaagaagctctt

SEQ ID NO: 186972 - DNA, 426 bp, Homo sapiens
agagaggaagcaagagagagagcgaggaggtctcagactctctttaataatcagatctcctgataactcatttccatggggagggcaccattcatgagggatccgctcccatgacccaaacagctcccaccgggccccactgtcaacactgaggatcacatttcaacatgaaatgtggaggggacagacatccaaactatatcacctccatactgttttccacagcattcccaccaacagtgcacaggggtttcagtgtctccacatcctcatcacacttgttatcttctgtttttgtttgtttgtttgtttgttttttatagtagccattctcatgagtgtgaggtattaacagtgtcttttgaagatcagaaatttctaatttgatgaagtccagtttatcattttttttcttttctggatcat

SEQ ID NO: 186973 - DNA, 217 bp, Homo sapiens
tatacagtacacttttaccatgtactgcagagtaagagccaaactaccaaagcaagagctcgaagcaaaacactctggacagcttgaagaaaaacactcccacatctgtgccaagaggttgtgaaattacagacactttaaaattagagaaaaggccgggtacagtggctcatgcttgtaatcccaacactttgggaggccaaggtgggtggatcac

SEQ ID NO: 186974 - DNA, 281 bp, Homo sapiens
tgcttcaggaaggtgatgaacaataaaaaaaaaagatatacttaaattgacagattctgttttttaaaaactactcagtaaatacatagttcagtaactgttgtgagacaggctatactacgacttgatgtttttgtaaacacagaaaatttttacataaagtttacaaacttataggcaaatttctgaatttatttttttatttttatttttattttttttgagacggagtctcgctctgtagcccaggctggagtgcagtaacgtgatctcggctcact

SEQ ID NO: 186975 - DNA, 160 bp, Homo sapiens
tcaattagaacactgaaaaatatgttttataaaaaaggtatttaattttgtttgtaggattaactcatgcaaataataaaaaagataccctgttggttcaatagtacactgtctcctttaaggaaggaagcatgatgaatgaatgatgtgtagacttgag

SEQ ID NO: 186976 - DNA, 371 bp, Homo sapiens
ccttctccatttctctagaaaagtgagttgtctacaccacaggcattccttcagcctctgggtgtagatggagcatacagatcttgtcctcatgggcagtgtagatgtttacagacactgagcccacttgatctgctgtttcatgatccaactcagacatttgctctttggttaactcattcacccacagccgctcggtggccggcctttttctcttctgttttgcccattcccctgagaacatacactttttatattgctttggttaagcctcaagcataatcatttggtttctttatacagcttctttctctgaagctaggactaccctagtttagataccctaatgtccaccagcaacatggcatcat

SEQ ID NO: 186977 - DNA, 286 bp, Homo sapiens
ttcagaggccccgtccgcaattcttcccttatatgaggatacctgcatttccttgatctatccagttttgcatatatattctgaaaattatttataactttgtgtaattctcagcaaccatggcctggatcgtgtcttttgtgatttctctattaggtgtcttcaaatctcctcactttcttcaacttacacacagagcaacaatgggaaggctgtctgttcattcaccctaaacctcttccctccaatttctttgcaaaatcctctcctcttccaggaagaaaga

SEQ ID NO: 186978 - DNA, 236 bp, Homo sapiens
caatgtaaatatgttcaataggtgcgctgtttcatggagaaaatatcttaaacatgagatccatgggaaaaaaaaaacaaataaaaggaactcttgataaactaaagttgtgtaattataaagtatgaacagatgagaacacgaggcccaaggatccattggccagcccagggtcacacatggagttagtgctgtgattacagactcagatgcccataggtgtcacgtaggtaata

SEQ ID NO: 186979 - DNA, 942 bp, Homo sapiens
agaatctcttgaatggtaagatgcagctgacatagactacgtattgtaggatttcctgtagcttttgaatgtgacttaatctaaactttatttcatttggtattttatctataattttcttgttttaggggcctcttgaactaaaaagaacaaactgggaaaaacataagctaaggttccatttcctttcccatttttgttgtgtgtgtgtgtgatggttgtaaatgcttgaatgtgattttgagattaccatacacaacttctgtaacgctggacttagctttattacagtaagatacatcttttgatagtttattactatatgtatttttgtaaaaatcttcatgtcagtataagccacattgtttcaccctagtctggttatatttgtgaggtgaaacagatggacaagaaggaagcccttttacttttacaatcattttaaattgattgtttctaaagccttgatttaacttattttggacactttcttgccatttaaccttggacaaatgactttatcatctctctcctgctcatttgtttgtgaccaaagattcacaacagtattctaagaattggtgagggtgtttataaatctaaataatattttaggaaaaagtaggaagaatgagtctccttgtttatcacgggtgctatatcatgtgcagatccttctgtcacttcttaacttttgtttggtgtctgttggccacttgtttgctagttatttcaccagacatagaactggtttttaaagaaaggtataaacaaagtgacttcattttggtgaaaaatgcattacagcagaggttacatcttaacgaatttcactttggtactccatttctacagattattgagagagagctgttgtgatgtttaagagaaaagcaccttgcttgtataaagctaaggtgcagtcatttagcagatactcct

SEQ ID NO: 186980 - DNA, 772 bp, Homo sapiens
tgtgcctcctcaggttaaactgatgctaccgattcctatcatagcatctagaaaatttcatgggactcatttttaatgcttcagtctctctaggtaaatgtaggcacaaaataaatggttttcaatgaatcaatggatggataaatgaatatctctattctagaaagcacaaaagagtattttattttatttttgcttacgtgtctgatttagtctgtgagcttctcaacaacccagaatacttctgatacattttgtatctccaatgcctgacacagaacctgtatccactcaatgaataaatggctggagttgttgctactcaaaagaaaacaacaacaaaaaacccacataggccgggcacggtggctcacgcctgtaatcccaacactttggaaggccacaaggcaggcagatcacctgaggtcagtagttcgaggctaacatggagaaaccctgcctctactaaaaatacaaaaaaaaaaaaattagctgggtatcgtggcgcatgcctgtaatcccagctaccaggaggctgaggcaggagaatcgcttgaacccgggaggcagaggttgcggtgagccaagatcgcaccattgcactccagcctgggcaacaagagcaaaactctgtctcaaaaaaaacaaaaacaaaacaaaacaaaaaaaaccacccacatagaatcatcaaaatgagttttggaagcaaacttgaaatcactattcaagacttgggcaaaaccaaagagcatctgagattaaactgggacat

SEQ ID NO: 186981 - DNA, 295 bp, Homo sapiens
attaatatgtacacttttcctttagtgctataaattccactttcagcactgttttcgctgcgtcccacacattttgataagttgtattttttcttcattcagtttaatgtaatttttatttcctttgagattcccactttgatcactgaattatttagaagtatgtttaatttccgagtgtttggacatttttctattttttttattatttatttctagtttgactcattgtagtcagagaacatactctgtatgattttaattctttcaaatttgttgaggtttgttctgtggc

SEQ ID NO: 186982 - DNA, 299 bp, Homo sapiens
tcattgaatgcatccaacattatttcctaacactttccagtccctctttcgctccaactagaacgggctttaaatcttgagctcagaagaattgctctcacttggtggccaccctctcatggcaatgccctcctgtcttccctctgtctgcacaattccaaacagccccacagagaccctgtactccatgaagtattacttccaactcaccattttttttttctccttcaactctcagagaagtaaggctgtacatttctacggggtgcaaaacaatatctgccgtaatgttagagata

SEQ ID NO: 186983 - DNA, 182 bp, Homo sapiens
tctttactacgtccagtaaattgtatctaataaagcagccagcatgccatgagagctgctccaaaggacagctgcacagtagcaggggcccccaccactcccaggggatacctagcactcagagcccctcctacttccaggtaaacagatgaaagggtattctgaccagtcaaaggcaaagg

SEQ ID NO: 186984 - DNA, 330 bp, Homo sapiens
gatcacgccactgcactccagcctaggtgacagagtgagactccacctcggaaaaaaaaaaaaaaagccagtgccaacttagaccatgactgagagctcttggtttatcttatccttgccgagctgggtgttacaacattgaagccttctgcagtgtcctccctccctttttctctctttctctctctctcctccctttcttccttttacttctcttatgataggctcgtctgtacttttttgatagaggtaaccatttgccacaccattttctgaagggcctgctctcttccccattcatttgtgatggcacatttatcctaccctaag

SEQ ID NO: 186985 - DNA, 153 bp, Homo sapiens
ggaaactgaggcaaagagagtttctccaaggacatagaggaagtaagtggcagcacagggatttgaaccgacaggctgggtcttgggtctgggctattaaccactattacactctgtccacaactacaaaaacaagaggtgacattttcttaa

SEQ ID NO: 186986 - DNA, 177 bp, Homo sapiens
gcgggaacagagaagccagatgggtctggaggtccaggcaggagaccagcctgttccaagaccccatcgtggagtccttcaccaatggcaaaacactgatgtgtggatggtggtgtacactcatggcattcaaaatgttcccaatccgaatcgaaaacataatcctgctcgggtgtg

SEQ ID NO: 186987 - DNA, 630 bp, Homo sapiens
tctcctgaaagcaagtttcagcaagaggctggaaaggcctctcagagagaaggctgagctggcagtgatcagggagcccccgggcatttggcagccgtccacagtaagaccggcagatggagccttcatctggcaagaaactggggaagctggcggtgtcgtcaggtgcaagcttcagtgagaagtgccagcactctgagaagatgcacagaaatacagaagcagctcccgtaggagaaggaatggaggccgcacgcggtagctcacgcctgtaatcccagcactttgagaggctgaggtgggtggattacttaaggtcaggagtttgagaccagcctgaccaacatggtgaaaacccgtctctactaaaaatacaaaatattatccaggcgtggtggtatgtgactgtagtccgagctactcgagaggctgaggcaagaggaatcacttgaactcaggaggtggaggttgcagtgagccaagatggtgccattgcacctcctgcctgggcaatagagcaagactctgtctcaaaaaaaaaggaatggagaaaacatagccatagctctgggagtaggaacagaagcaagcaagctgactgccagtcgggttctttcttctggaaaaggc

SEQ ID NO: 186988 - DNA, 314 bp, Homo sapiens
caaagtgctgggattacaggcgtcagccaccgcgtccggcccaggaaatggcttcttaggaaacctgttctagtagtcatagaggggaaaagactcaagaacagattaatagttttatgtgctgcctcacagggtaaactttcatatgtctgatatgacatatgaaataataaaggatattatctgaacctttttttccaccaacttttccctgtctttcatgctatagaaccatcaaattttatttctgaaagagacctgagagattgtttatagtaccttcctttggtgaataaagaactcactcaagagag

SEQ ID NO: 186989 - DNA, 239 bp, Homo sapiens
cctggatgggaaaaatcaacaactaagcattcctattttttcctaatttccttatttgtattgcttcctaaatattgtattttgcagagctgaaaccagggctttaatttaacaaggttttcttctgggctagagtcaagaggaggaaaagaagaagagagaactgaacttccagtgtttcattccattaggtttttatgtgtggtgcttactggtgtagaagtggcaataaaaaggta

SEQ ID NO: 186990 - DNA, 784 bp, Homo sapiens
cctggtcttgaactcctgacctcaggtgatccacacccaccttggcctcccaaagtgctgggattacaggcatgagccaccgcgcctggttgcattcccatataaatttaaaaacaatctactgaaagatgtatacgacctccaccaagaaaattgtaagacatttggagaagtttaaaaagacatgaataaacggaaatggtttttttaaataaacaaatgatttttaaagttgatcattaggttaataaatagtcatataatgacaatccgatgagattatgttgcccagggtggtctctaactcctagcctcaagcagttttactctctcattacaggtgtaggccaccgtgcctggcctgacacttggaaatcttaatcacaattattctttgtttttataatgtttactgttcaaatcaatttctggttggatagtatgtatatataaagccatgctcaatggcctagatatatttactgccaaatcttttatgcttttagtgttttttttctggacaagatctatgcttattgcaataaattaaatgcaaagaatattctagtagaaagtcagtctgcacttcctaaaccccaccccaccccaccaattccttcataactgttattaacagttagctgtgttttctaatggattatctccaaagtatatgtaactcagatttttgtgaggtaggaaaagaataacattaattccacttcacatattgaaagtctaacatacaaagagattaaatatctcctttcttttgccaaatgtt

SEQ ID NO: 186991 - DNA, 291 bp, Homo sapiens
tcactatgaggttgacttgcttgtaaataaatatgactattattcaattatctatatttgatgtcagcaaccttcttccttgattttatttttctacttcaataagcccactacttatacttgtgtgtatgttttctttttcctcttactctatatttaaataccacatgcttgagaaagaagataaataggtaatatttttgcatttgtagaagttcttcagaagcatacagactcctcgatgacgtacgtcttttttttttttttttttgagacagagtttcgctgttg

SEQ ID NO: 186992 - DNA, 416 bp, Homo sapiens
cagcatccattaaagtagttctgtggcagttgcaagtctttttggattaagaattcatcaatatttgtaatgtgtgctgctgttttccagagaagagaaaagctcatttcctgtgatttattagtaatatcattagatactttataaagtatctgcatttattttcccagatcactctgggcccattatcaaacaatcaaaacatcatgaatgaatgagaagcaaccctttgaaatgctgtgatggagtaagacagcagatggtgacaagtgggcgatactgccctactccttgtatggagacactggagagtgccggccacttccgcttctgccgattccagttccagttctgtctcacagtggacatagctgatgtagcagttttgaaaacttctctgcctgttttgttaaggg

SEQ ID NO: 186993 - DNA, 295 bp, Homo sapiens
agacagtttgtgtccacctaagaacaagtattttaagcaaccactcaaatttcaccataactgcaaccagaaattggttcaggcaagaattatcaatgtatgttaggtattagagggaaagtttaaagaggagtatgatcttcaaatgtttccctacagattgcttattagttgcaaggggaaataacatctacacagtaaataaatcagattaacacttgaccagatgatcaaaattagtatcaccaatgaacagcacctgcagttgtgataccctgagaaggaccctatatca

SEQ ID NO: 186994 - DNA, 165 bp, Homo sapiens
aaaaacatacaatatatgttttgaaatacaatatatgaaattaataaatttcacatttattatatgctgaaacttgtaataatttatgtagaggctgaaggtgatatcttccaccagagatgattcccctttttagttgttaggccaatttaattagagttttat

SEQ ID NO: 186995 - DNA, 729 bp, Homo sapiens
ttttttcttgaacgttggctcccccatgagaagcaagctccacgaggctgtgtccgttttgatcgctgctgtatcactaggaggtagctcatccctattgagcaccaggaccaagggctcaataaatgttgctgaatgaatgaataaatgaatgaatgaatgggtggatctttgagacggaaaaggtcttagattcttctagtccaaccttgccattgtacagattggaaatctgaggcccagggaggataagagacttactcagggtcacagagagtgactggcaaggttggggcttggagcacggcctcaccagcatctagcctcgtcgcttgggaagcattttcagaatttttcctcagtagccaggtctgagctctaagctgcgggggccctgaggacgcaaagcctggcccctgcaccccctggattggaacagcaggtgacctctgttacctacgtggaggccactcagggggtcaccagagacaggccaggctggtgtgtgcctacgcggggaacagaaggcccatgttggggcctggggctggaagtagaacctgaagcgtgggttggggcaagggcagcagaagcaaatgcctacaggggagtccacgtggccttcctgagcctcagagcggggtgcaggagctgggtaaggctggccgacctgaattccttcctcccctcacatgctcctgggggacccagccgcacgcaaactcgaat

SEQ ID NO: 186996 - DNA, 437 bp, Homo sapiens
aggagggggtgcagaagtgaggcggagttgatggaggctgagttcagtggggagcggaggcggatgatcctgagcctgggttctctggagctcagagagcctggagctgagcctttctgccctatctgaagggtagaaaattgagtttacgttatttcatccttgcaatagaaaacttactccgtgagatcctttgcaaaaaaagctgaattactttcactggactatgaaacgaaggatagcatttttgcttgcctatgcttctatgtgacaatttatcacattttggcttttaagtgatagttatattgtcccaaaataaatgcagggagaagacagaacatggattaaatgaattctgaattcccagagcacttaatggaagccagtagatggcacctcatatgcctactctctggccattactctttgtaccc

SEQ ID NO: 186997 - DNA, 734 bp, Homo sapiens
  misc_feature (731)..(731): n is a, c, g, or t
tgaaaaataaatatactaacttgatttgtgtggtaactaacacagtaacatgccaaagaggtgcttgtttcattcatgcattcatttatcctttcatgcatttattaacattttggaacacgaagtccaggtgtcattgggtactgggagaatcaaaggtgaactttgattacattacaagagcagaaggtagacaagacatggtgtaataaactgcaccaccaagagggaaatgtcgtgccaagcaaagtacaaagtgctgtgggcttatttgatgataagactgttctgttctcagtaaaccaagtacaggttggacaaaactgctaatggaaatgccagtgcattttaatccttactcaacatgttgaactcttgcaacactgacgtgtcctgaaagagagagcaactcttttgctgacttctaagttcatattggaacaaatattgtgttatctgatgctaaaaatgggattgcaaatattatagaatgtttagtgtcccatctgggaaagaaagagagtgaatacacatgcttggcattataatcaagttaccatatcctgtctcttgaaacacacaaaaagttatgcaaaataattatctgggtgaatttatgatctgagaaatttcttataagtctgtatatttgtatttctttaaaaatagacatactaagatttaataattgttagcacgacatatacctaggggggatactctagagcggncct

SEQ ID NO: 186998 - DNA, 371 bp, Homo sapiens
gttatctgatgctaaaaatgggattgcaaatattatagaatgtttagtgtcccatctgggaaagaaagagagtgaatacacatgcttggcattataatcaagttaccatatcctgtctcttgaaacacacaaaaagttatgcaaaataattatctgggtgaatttatgatctgagaaatttcttataagtctgtatatttgtatttctttaaaaatagacatactaagatttaataattgttagcactataaaatatctatagacaaatactgtcaaatattatttctgaaatggccaaattaaccagtacccataggacatcaggaaatttcttcataattctagaaatagttgttgaattattgcttga

SEQ ID NO: 186999 - DNA, 513 bp, Homo sapiens
actcagaacaggaaagcacagaacttctcgattccatagctcccactgtgctcctgacagtaatatgtatatgtatatgaccttcttccccagtggaactacccagagacagcatctgtgttcagtggcctgcccatctgtccagtcatcttgacagtcacgtgtcctccttttgtccacgtaaggttgtactgtccaccaggcagaacataggcataacagtgaactcatttgatttttatcttgcagctaactaatctgaggatgtatgcttaatatctagaacctagatttgattctagatcagttttacccctggattgaaaaatcagttatgttcattgacaccaattactgcctattattactgaagtttgttcttttattgaatttctactaggtcttctatgacatattaaattagagtggaattttaatcactttaactgatagttttctagtcttgccttcacgattttttgattcaatacagtatgtattaaatgcttttgt

SEQ ID NO: 187000 - DNA, 294 bp, Homo sapiens
gttaccctccaccaccactaccactttaaaaagaaattgaggctcacacaatttagtaacttgaccaaggtcacatgctggtgagaggtgaggcaaaggctgggactcaaatccagtgcaaaagcccatcctctaatacagaagcctgtgccctaacacagaaatgcgtgtgcatggcgagacgtatgtctgcacagaaagacctctctgctgacaactgcagtggctgcatctacataacggggtttgggtcacaactttctcatattttgtaaggttctttttttttttttt

SEQ ID NO: 187001 - DNA, 248 bp, Homo sapiens
  misc_feature (35)..(35): n is a, c, g, or t
tgaaaggagataatccagcaaaggaagcgagtctngactcccagccccatcctcttattccccctccccccaggcacagctgctgtttggctcactctatatatagcggcattttcagggtaattacaataaaactgttgaaaggagataatccagcaaaggaagcgagtcttgactcccagccccctcctgtccctggcttggtgcagccctgcaccccctttccccgaggcctcctgttcccaccc

SEQ ID NO: 187002 - DNA, 419 bp, Homo sapiens
tatgccatccccatctaccccgcgaaattcttaacaccacaactcgctccctccctgccgttatatctacaagcctgtagcagcgcagccacatcaatgcaggcctgaacctgaccctgggtggactccctgctctctgccagcccctttctcacccctgggtccccacggcccctggctctctcccctctgctagaatctcgctgagggattggtggggagggggtggtcacgcactgggtggagatctggtgccccctggaggccggacaggaagggccagggcggacaaggtctttgagaactcggtggcatcccgctcctgatggcctgggtcccaccgcccctcccccagccttcctgacagcagaggagattatgtgctgcgctgctacgggtaccagtcagcgtcttcagta

SEQ ID NO: 187003 - DNA, 374 bp, Homo sapiens
  misc_feature (18)..(18): n is a, c, g, or t
  misc_feature (31)..(31): n is a, c, g, or t
  misc_feature (43)..(43): n is a, c, g, or t
tacatgataccatcgttntcggtacccgttngcagcgcaccanctacatcaatgcaggcctgaacctgaccctgggtggactccctgctctctgccagcccctttctcacccctgggtccccacggcccctggctctctcccctctgctagaatctcgctgagggattggtggggagggggtggtcacgcactgggtggagatctggtgccccctggaggccggacaggaagggccagggcggacaaggtctttgagaactcggtggcatcccgctcctgatggcctgggtcccaccgcccctcccccagccttcctgacagcagaggagattatgtgctgcgctgctacgggtaccagtcagcgtcttcagta

SEQ ID NO: 187004 - DNA, 345 bp, Homo sapiens
tcgcaccctggccacaacatcaatgcaggcctgaacctgaccctgggtggactccctgctctctgccagcccctttctcacccctgggtccccacggcccctggctctctcccctctgctagaatctcgctgagggattggtggggagggggtggtcacgcactgggtggagatctggtgccccctggaggccggacaggaagggccagggcggacaaggtctttgagaactcggtggcatcccgctcctgatggcctgggtcccaccgcccctcccccagccttcctgacagcagaggagattatgtgctgcgctgctacgggtaccagtcagcgtcttcagta

SEQ ID NO: 187005 - DNA, 406 bp, Homo sapiens
ttttaatggggattctgaccgtagcctggtgaggacacatttaacgtataaggaaatgagagatggaggttccgcatcagggtggtggcagcttgagtcctgctgagttgccttggactctgttttttccaaggtggctggggagaggatggctgagctgggattcagccagtgatggatgccctcagccaactgcaggggcgaggagagacttaagccccctccctgtgatgggatcatgcagaccctttggtgcgcttctggagaggtggctccccgacttacagcttttcttggaaggccaaggctgccctcttctggtcgtctgtagtgggtggccatgcttaacagcgttgtgccttagtggacactgaccaagggcctggcgtaagctagggctggatgt

SEQ ID NO: 187006 - DNA, 191 bp, Homo sapiens
ctacagcattcttcacttgaccttcttttcatcccaacattcttcctaaaatctctaccaagctggtacacacctcaaggttctctccttgatctttctcacccatccaatcaccctaagcaatctcatccacatccttgcttctactgtgtggtctgcagcagcctgggagcttctgggaaatccagaat

SEQ ID NO: 187007 - DNA, 197 bp, Homo sapiens
ctaatccaccacacattttggattctgctctgtttgcctgaggtgttagatctctagccaggactgtgaagggaaggaacttgaatccttcctattgagctattaatgcagagtcagtgagatgaagggttccactcggggtcaaaatcatgtcagttaccaagcaaaggagcaagtaaggggaaacatctcctcat

SEQ ID NO: 187008 - DNA, 175 bp, Homo sapiens
taagagggatcaatcactgatttgaaggtgttctagatgtgaatctacaatagagttcattgggacaatgtcccaatgtcccgagagcctgaaggataccttggtctttctacttcaactgtagaaatcataaaggcatactacaggttaggtcagacaggagacaactgaaaga

SEQ ID NO: 187009 - DNA, 570 bp, Homo sapiens
tggtttgtggatcatttatctaataggtattcaatatctaaagacaatccattcataaaactggtggaatctgtaggtaattaagtgggtgttgtagttgtgattttattttatgtcagaaacaagttaggtataatttataaataggtaaattttctgtttttttagtaggtgctgcccccttaagtagaactaaggaaattgtattaggaagagtactgaataaatataacactacagtttctcatttactagtcaccagggagactgatatgaccattgcctttaaatgatcatagggaatttgacttacattcaccctatcacttcttgggagaatatgagtggggttgaaagagaatccctcaggtgcacagaattttagttaatcatactgcctggtttatgatattctatcatcattggtgtctcagtcattctatttatgttactaaatgcaaaggaaattcagcttacttagaactggaattaatacagtgtgaggatttttgtttactttgttttgtttttgtcttgagctgcagtcagggtgtatagttcctaaaggat

SEQ ID NO: 187010 - DNA, 390 bp, Homo sapiens
gcttgaagttttccagaacccgtgcgcagtgcagaggtacaaggaggacagtgttgagagccggtttgtgctgacagcaatgctgactgaagctctgtgcttcacttggtcctcctggcccttccagggtcgggacagttaccccctccttttcacagcttcccaactggtcactgcagaccaggattcaaacccaggcagtcttctcagccaccctccatctgatttttttttccggccatctccaagtggattctggcctgacaccaaagacagctcagccgggtgccgtgggggattcccatggggttgttttatcacatgtgacttccaggccaaagtaagcttctggagataggaaggtggtttctcagcgttaggtctacctgg

SEQ ID NO: 187011 - DNA, 358 bp, Homo sapiens
agccgagatcgcgccactgcactccagcctgggcgactgagcgagaccctgtctcaaacaaaacaaaacaaaaacaacagcaacaaactaaactgagtcctcttaaaaattaaagagttttgcttctcagaataggagtttgaaaaaaatgaatgagaaatgtttcctgaatgagaaacacccagtcatggcttgcagtttgataacggaaagagcaaaactctgcaaaataacttgaactatgttctacgccgaatatgagagaacgtgaccaagggaaacaaccgcatgtagcctcgagtaagtggtccccaggaggttcgatggcagtttggttttattcatttcagcgagacag

SEQ ID NO: 187012 - DNA, 235 bp, Homo sapiens
atgaggcttggaccaagggccttggtcaacacgaagaaaaaggcagacctgggtctctttcagtgccctggcttacagctgcttttcacagatgcttttgccagggagaactttcatctagccacaaaccccctgaagccacacactttctaagatcttggcttttccctttgagaatttgctgagatgatcgactctcttctccagaaacacaagtctgccaccagcccctctt

SEQ ID NO: 187013 - DNA, 550 bp, Homo sapiens
cgatagtatagtctgtagagttctatttctcgatagtacactgagcacatgtgtatatatgtgggtacacactgagggctcgtactttatatacactctatataagtgctctctgtgggggcacaccactttttgttgttgtctcgctgcgtgtctctttcccccccctctcacacaacacatacttttggtatatatctctctgtgtgtgtgtgtgtgtgtgtgtgtgtgtgtgtgtgtgtgtgtgtgtgtgtatatatgtaatccctcccagctctaaaatttgcaactccaaggttgcatgttggaaattggacaactgagtcattaaaaataggtattttcccttcacatcccaccctattgatttctgtcctggtgcctgttcaagcttcatgctagggtctaccggttcaaagaggagcatgacacatgaagtcagtcttgtcactgctaattggtgtcttacatagataaattatctagttatcaggtgtctcttcatttcgtgacaacatagcatcaagaaagttcgttaagaatgcggaga

SEQ ID NO: 187014 - DNA, 189 bp, Homo sapiens
gaaatgtcttatcatagattctacaaaaaaaagtatttccatcttggtgagtcaaaaataaggtttaactctgtgagatgaatccacacatcagaaagcatattcaaagatagctcgtttctagttttttattgcaagatattccattttttactataggcctcaatgggctcagatacatcccatcgt

SEQ ID NO: 187015 - DNA, 368 bp, Homo sapiens
cacaggtgttattcccaagtggtgacgggcaaactgggtaaaactataatagtacgaatacctggcagcaagacacgcacatccagattgtacggagagtagggggcagggacagagggagtcctgagcacacctgggccgatcaggtaccttttcaggaacctggaactacaactgataaaataattttctctctccttgtgagccttgactccaggcccacgtatgagaatgggcatcttccaagaggcctggagacactaagcatgcaggtctgcagatgaagggaagacggcaggcaccgaagagctagcccgggaggaaaacagacagggtgtctgaccacacaggcctggctcacgtaacct

SEQ ID NO: 187016 - DNA, 308 bp, Homo sapiens
agttcccaacaaatggactgtgacattggcgcagaagtggaaaagtgaactgcctaaaaaaggaccagctgaatgaggaacagggaggaggcaatatagaggtaaaaaaaaaaaaaaaaaaaccaaaaccaacaaatttttttgcagtggcagttttgcccccaatgaggtttttctgaggggggtctaactgcaaccatgatggcattgagactgatcccatttagactagcctacttcataaatagcccccaccaaaaaaagaaaactcgcaaccccgaatataacccattctaggtctaaatgca

SEQ ID NO: 187017 - DNA, 115 bp, Homo sapiens
atgtgaaaatccagatcagtcaaccaaaggaaggtattttttttttcttaaaatgaaggcttcctggtttgtttagaaatgtaggttagccttcaagaactcggtttccatgcag

SEQ ID NO: 187018 - DNA, 1631 bp, Homo sapiens
ggtggcagatgctgggttcctatgtaccttgtctcacctaatcctcacgcaagtctggaaggaaagtctaccattattccttttaatgaggacactgaggcctggcgatgttaaagacaacccctcaccacctccacgtcacccagcctcctgaaggtacagcagaggtataaacgcaggcagtctgaccccagagcccatgctcctgacctactgcagtgtattcttgccagtcagaatctcttgggtggggtataggcacagggattctagtctagtcaatgctccagagtgacagttgagactttttcttctattttcttcagagacagggtctcactctgtcactcaggctggagtgcagtggtgcaatcatagctcaccgcagcctcaaactcctgggctcaagtgatcctcccacctcacctgcctgattaggaggactacaggcacatgccaccacatccaagtaatttattttttgtagagacagggtctcactgtgttgcccaggctgatctcaaactcctgggctcaagtgatcctcctgcctcggcctcccaaaggactgggattagaggcacaagccaccacaaccggcatgaaccttcttgccacactgatcaccaggccagggactgctgtggcagcctgagcatccaggtgggtcactaaccacaatgacgaaggccctccggaacctgatgctcaaacctccattgccagtttcatctttggctcacagccctgcacccaacaactggtcactgttcctgcacattcctgtctctgggcctttttgcataggtcatcaacacctcagaggatccatttcctgagggctaatgctataccaaggtccttatgtgcagttaaccctagctatcttcattggagagatggggaaactgaagctcagagggctgttgaaagttatcaaccaatgcagagccagactgggatctaggccattccagaaccttaggccccactgctggctgcgtcccttcatctgaaatcctcctcaaggcccggctcaaaggtcacttcctcccttcctttgtgttcctgcatgactctgttgtgtagcacagaattcctcatctgccttcctggctgaaatttactaactgggcactgtgctaggtaggaaaaaaagctccagggagaaaggcagacccctatgtagagaacaacacacctgcccctacttagctctgccaagtgctacttaggtctcatgagggctctgccaggctcggggtaggaggtgggggaggcggcagcctctggaggactgatgcaggagctaagacttaaaggatgaggtgacaccagccaggtgagaagaaagggtggtgtggcccaggcagaggggatggcacaggcaaggccgtaggagagtacacccacactgctgcaggctgttggagatgatcccctgtggaaaggcaccagggaagggtcagaatcttgtagggagaccacagagggccaagtgagaggcaaagatgtctgaatccttgaagatgcagagatgggggtgggagggggtggaattcacggaacattcacagaacatttggtaggaagatccttagcacttgatgtctgagaaggaatgaggcatg

SEQ ID NO: 187019 - DNA, 233 bp, Homo sapiens
ggcatggtggcaggtgcctgtgatcccagctgcttggaagtctgaagcatgagaattgcttgaacctgggaagcggaggttgcagtgagctgagatcacgccactgcactccagctggggcaacagagcgagactccatctcaagaaagaaaagtggggtgtttagtcttcaaactccgtgtttaagtgactggagtgaaaatgtaaatcataggccggtgttggtttaaaaa

SEQ ID NO: 187020 - DNA, 374 bp, Homo sapiens
tatgttcctttcctccattcaccccatgagataccacgtttcacagggatgtcttccagactttgatacatatgtgcataatttttcacaagtcaatcaaatgataccatattccccaaactatacatattcaaaatgcccaaccatttactgtattgtggtcatctcttcatgccaataaaggaaggccaccttaaatctttttaacaactgcacagtatgccattccaagtctgccttaatttaaccaatctattgatggacatttagattcatccaggggtgtccaatcttttggcttccctgggccacattggagaattctgtcttgggccacacataaaatacactaactagtaatagctgatgagctt

SEQ ID NO: 187021 - DNA, 310 bp, Homo sapiens
ccagaggctgctcttgtgtgtgctccacattacagcccttgacttagagggcttgaaattttccccaaaagtagtcaaggaaaaatactaaaagtaaagctttttgacgcccggggccccgaggcagacccgggggtgtgggtgcaaatggctcccggagtccccccaggctgtgtccaatcagccatcaacaccccttactaccccctccagctaggaacagggctcagggaaccccttttctctccatttgtgtttgaaaattttcatggtaaagttttagaaatagtggcctggctgggcgcggtgg

SEQ ID NO: 187022 - DNA, 449 bp, Homo sapiens
gaatgctgattgaaacttagactatgatggggtagatgggtgtactgagatgcaaactatgcttcccgagtgaacagccacagcctgtcctccttaggaaagaatgaccttattaagagcagccaccaatgatgacaacaggtataggtggagttttagcttcagtttgagggggtggggtggagaacttattctccaggcatctctggctttgcagctaggattcctaactcagattcctaactccttattcaccattatgggaagtcgcacttttgttgcagcttgcttcgttcattgttttctttcatgctttaaaattttttcccgcttgaaataagccttcttttggtttcctaatagtcgtttgcattttctcttcctctgaaatatagcagaacagagaagtcaggcaaaatggccagcagactgattagagacaactggca

SEQ ID NO: 187023 - DNA, 184 bp, Homo sapiens
tgcattcttggcacacccagcaagacatgtaagcacacaacagatccatggaggactctcaacacaaagatcgcaataaaaattgtttcaggcaaaaattattgatgggctgggtacagtggctcaagcctgtaaccccagcaatttgggaggctgaggcaggaggactgcttgagcccaggag

SEQ ID NO: 187024 - DNA, 114 bp, Homo sapiens
agatgagacattttgaagcacattgaggcctggagtttaaaaccaaatatcctgcgataaaaactagaaacaagctatctgtgaaaatgctttgtgatctgtgaaataatgtca

SEQ ID NO: 187025 - DNA, 257 bp, Homo sapiens
aatcttactacatttctttagcatacttattcatcctttcttagaaaattattttacaccacctctctcttctgaagcctccaacaactcctccccattcttactctcagatgatcattttttttacgccgatcaaaattgaactcagaaaagagcctccgttcacacacttccatccccatgagtacccagtacctggacctatgcccttgtatgctctgcctccttgactcttctctttatcccacaatctactt

SEQ ID NO: 187026 - DNA, 166 bp, Homo sapiens
gcaccgggtgccagacctacgcagccacagagccttcctgaagccctccatgagagtcacggctctcagaaacgtcctcagtacaccgaactcagggtctaacctcaggcagtgctacccaagctcacttcgcggcacccactcagcaggcaccgcagcaccgttc

SEQ ID NO: 187027 - DNA, 476 bp, Homo sapiens
gcattgaggagggaacatctaggttgcaaacttgttgtagagattttactcctatatttgataatctgatttcattttgtctcaccggaaatcccaggtggcagccgccttctccctactctgcctgtccctgcatttcatttcagcgtgccagttagtaagctaacagagactgagctcttttaatgaaatgtaggttttctactgtagctacctagacatacaaaattactctcacctcttctgatttctttgtgctaaatgatctctctctttctaccctgtcctgcttcaaggtttatttcatttccttaatttgatatttttccattattggtctggaagactgtgtattacatgtataaacaagatattcttatttttgaagaaaaagaccctttgggatctgaacagaaaagcaacacattcctgttccctccagtaatgtttctttcccccttcacttcccttcacta

SEQ ID NO: 187028 - DNA, 408 bp, Homo sapiens
ggagattgactgccaaagaggaagtaggagaggtgtgagaggttggagtccagtgaagagaaggggtcaaggaatgtaggcagccttcagaagctagaatatgtgagggaccagattctccactaaagctgccagaaggaacccacacaacaactttatagctctgaaactgattctcactgctggcctctagaactataagagaataaattcctgttgtttcaaaccaccaaattggtggtagtttgttacagtggtaataggaaactaatacatgtgctagcatcccctgtatagcttcattctgcaggaacttggcaagtccctgttatgtgcaaggcacaagacctactgttcccccttaaacctaggagaggggggaagtggaataaaggggctttttttgca

SEQ ID NO: 187029 - DNA, 451 bp, Homo sapiens
acttgaacaaacctggcttgagattgggtcaaaacacacatttcaatgtccaccagtgggacaaacgcccccttctccagtgaggaccctatcactttccacagcttttcttcccactcttggacaacagacagcccacactgactttaagttctgagcgcttggttagtatttccggtcttcaggatgggtccctttcagagacctgcgcaggcagcctgcagtctgagcttgctggctctcctactctccaccttgtgtgtcccctaccaccctctcccccgacctggcacctgctcattgttcctctcggctcattgttcctctcagggccagagccaggaatgaggaagaggaggggagagaatgggcttcgactgatctcctctcttccccagcctgacccttctctcctggaggtccctgttggcttcactccaggcagggtctc

SEQ ID NO: 187030 - DNA, 633 bp, Homo sapiens
gcacccaatggggctggactccagccatctgctacccagactcactgaagagttccgcatctgatgaaacctctggggagaatgaatgagaactgatgagggaacactagcactgcatctgagtaaggggaacttgggagaaaacaattttcctgcctgtccagagggatgggaactcagaattggaattaagctgagttaaagaaagtaaatatgacatttccagtgcatctgctttgtagtagttatactttttatgttgaatcactcagaaaaaaatgtaaagataaaaacagactaattttagtaatgccttacataaccttatattttatgacttacaaagtgtttacatacatttgaaaacagtggtacatatagcactttatttacttgttttgtctataggcatggggattttctgctggaaggtagtaactccacagccccactgggatcagaggctcacagctctgacagcttgaagagattgctgtaattataagaatggaaatagtactgattatcaagagctcgttagtgcatagtacggagatgatatcatcttttgaaaagtcttaagaggctgcaatctggctttcatttgcaaatttctgttcccacccttagttt

SEQ ID NO: 187031 - DNA, 265 bp, Homo sapiens
ttgtgatccacccgcctcggcctcccagagtgctgagattacaggcgtgagccaccgcgcccggcctaattttttcattttttatagagacagggtcgcaccatgttgcccagcctggtcttgaactcctgggctcgagggatcctctcaccttgacctgagattacaggtgtgagccattgggcccagcctgcattttcttgaagttgaagatttcctctgtgatcacatcaacccaagattctctttctctaagccctattag

SEQ ID NO: 187032 - DNA, 220 bp, Homo sapiens
cctgacatagccaggcccagcctctggaacagtcctgcccaaacttgggcttagcaactgttatcaagaactggatgaactgaggcctccttcccaccacagggcaaatctgcccatcgccaggtttgaagttcttaatgaagaccaggctgagaagaagctcacagttttaggtttctctctctctccctctttctctctctctctctctctctctctc

SEQ ID NO: 187033 - DNA, 198 bp, Homo sapiens
gtaatattggtaatatttggtaatatttgagcaacttgcttttaactgtaggcttttgaaaaaaaccatttttttgtggattcttaaatattgtagtaaatggaaatgccctttttatgggagcctgtgctggggcttcacagtcacacagagttgcctttgagaacaagaatcagttataaactatgtaaagttggg

SEQ ID NO: 187034 - DNA, 549 bp, Homo sapiens
cctccttctgccaacatatgactcagacaagggggatggagcccagcagccatcatggactgtgaggtgacctagatcctgaaagccatgtgtaagcaggtagaatatgacagcctgggcgctctaagagccctaaactactacctctaactaatttctatgtgagagagaaataaaactttacatcacttaagcctccgttaactgactataaatctgatttgttgctgttgttatacacagctaaagttaatcctaagtaacataagcccaaagcaaaaataaaataccaacatgaccctgcccccacttcttaatcccaaccaactccataaaagacaaaacatctgtccagataaaaatccaacattcctacaaattaatctgttttacatttgaatgtccagaatttcttatactatctctatcactggctccagagaacatacaatcaagatactaagcctttttctaattaagataaaaatttccccctgtcttaccggaggcactcatcaggggcctttgtgagtccagtggtgggagggt

SEQ ID NO: 187035 - DNA, 516 bp, Homo sapiens
tctagtttagaactcaaacatttacctactgatgtgatttttatttttgtaggcatttgtcttggttataagagggcagggaccacatcttactctccagaagccctgacattgtccagctgaatgggtccccagcagtggtgcatgtactgatgcaggagagtgcagtgagggataggaggaagccaggaggcgaagatgggaggatgtaaggaggaaggtgctgtgtactcagcaaaggcaccctgggggaggccaggcttacctctctttgcaggaatagtttatgtttgaaacacctggctgggtgcggtggctcacacctgtaatcccagcactttgggagcccgaggtgggcgaatcacctgaggtcaggagtttgagaccagcctggccaacatggtgaaaccccatctctactaaaaatacaaaaattggccgggcgcggtggctcacgcctgtaatcccagcactttgggaggccgaggcgggtggatcatgaggtcagtatagata

SEQ ID NO: 187036 - DNA, 359 bp, Homo sapiens
aaggaactcttgaagaaaaaaatgcatgttaacataagatcttcatactcagttgatcattgatactgttttcattcttgctaatctttctaaaaaccaccaaatatatttctatattcatgtgtattatacatagctatatatagtttaggtatcttcaattcagctgaaaaatgttaagcctaaacatttccaaatttagagcatttagtcacatcaactctgcttttccctggggctaagtttttggaaaggtagggagtcagctgtcatttctgctgtttttaaaaaggtgaagtgtgcttcctaacaaataaaaaggatgctgacagaaggttactttctgcgttggacttact

SEQ ID NO: 187037 - DNA, 254 bp, Homo sapiens
ctgctgcttccaacacccacctctcagtagacccgaatcctaggcctgggtgaacactgccatctagttcagcctcacatttttggtgggaggctggaataggttagagggcaaagttccttttctgacaattcagtggaaatgtttaaattaagcagaagtatttatatttctacactctttgatcttaaaattttcttggatgtgggagaggtaaatgttacagcatgatagatagctgttgtgcctgttat

SEQ ID NO: 187038 - DNA, 650 bp, Homo sapiens
  misc_feature (3)..(4): n is a, c, g, or t
  misc_feature (616)..(616): n is a, c, g, or t
  misc_feature (650)..(650): n is a, c, g, or t
ggnnagcaatcagcgagactccgtgggcgtaggaccctccgagccaggaaagggaactctctgaccccttgcgcttcccgagtgaggcaatgcctcaccctgcttcggctcgcacacggtgcgcgcacccactgacctgcgcccactgtctggcactccctagtgagatgaacccagtacctcagatggaaatgcagaaatcacctgtcttctgcgtggctcacgctgggagctgtagacctgagctgttcctattcggccatcttggctcctccccaccctagtctgaaacagaggtcaacccacaccttgatttcaacttggcaaaaccttaagcagaggactcagcgaacatgtgcttggacttctgaactacagaactgtgagataataaattggtgtaattataagttgctaaatttgtagtcatatattatctgaaatagaaaacaagtgcaatcatttagcacattaataagtatttacttttattcaggaattatgtaactttatttagtatttgcttagtaataattattgtgagtttttgagcatgggaactatgtcttattatcttttttatgctcaatccctatcagaagttgtgtattaaatnaatatttgtcaaacaaataaacaaatggtgcctn

SEQ ID NO: 187039 - DNA, 236 bp, Homo sapiens
tgttctggtttggtttttgggtcctcatgttatttattgccgaaaccaggcaggcaaccccaagggcaccaaccagggcctccccaaagcctgggcctttgtggctgccactgaccaaagggaccttgctcgtgccgctggctgcccgcatgtggctgccactgaccactcagttgttatctgtgtccgtttttctacttgcagacctaaggtggagtaacaaggagtattaccac

SEQ ID NO: 187040 - DNA, 1289 bp, Homo sapiens
catggtggcgggcgcttgtagtcccaggaactcaagaggctgaggcaggagaatggcgagaacccaggaggcagagcttgcagtgagcggagatcgcaccattgcactccagcctgggcaacagcgtgagactccgtctcaaaaaaataaaataaaaagccaataactagatggacatatggcaagaaggaaaggtcttaaaaacaatgttgactgaaaaaatcaagtaacagaaagagctcaagaccatattaccattatgtaaattacaaacacattacacacaaaataatatatattttacaaagataaatacatatatgcaggaaaatatatccaagataaaagtagacatttatatgaaaacaggaaatgggagtaggaattaaggatgaaagaaaaaaaataagagggtaagaagaactttgaagagattaaaaattatactgtattaggacctgagttgtattgtaaacagaagtctctgctcctaagttatacatatgtacacatgataaagaacctaagaatgaggttcaatctttcagtctaaagaatcattggtatataattttaaaaattaaaaccaatctaaattattgttagagtttattacattatgggaagtgatgggagtagggtggcatagatagatgcatattaaaatttcttattaaaaaagaagacatgtatttggttgattctaggtgtgatagacaaaagtgagttttaaaatgtgaattaaaagttttagggtaatagccaggtgcagtggtcccagctacttgggaggctgaggcaggaggatcacttgagccccagagttcaaccatacagtttgagcacgatcgtgtaaccgcacttcagcctggggtgatagggtgagactctgtctctaaaaagaaaaaaaaaaaagttttagggtaaccattagagatacagacatgagatttcttgctttaaacaattagtgaaaagattggaattgaaagaaaacttagtgctcacaagaagaaaaaaaagaaaaagcataggtaaatagaaaacacactaatggtagaaataaggtgaaatgtatcaataatcaccttgtgagttaaattcttctatgaaaaaagactcattaagaatcatataagcaaaaatatgcagtactatattgtttttaagatatcctaaaataaatattcatatcaaacaaaatagaggcccaagtcaaaaccaaattatttatctacctgggatattttacaacgattaaaatacacacctacctaagataaaagtca

SEQ ID NO: 187041 - DNA, 730 bp, Homo sapiens
agaatctgtcattgtgatcaaagtttatgaaatgaatgaggcagaaccaacttgagactattggtgactcaggtagtgattccagaagcctgtacatgagctccagcatccaggttcctctgcagctgcccccatggccttggatgctgttttaaataagatgaaaaaaccaggtttgggacagcagacctattgtcacctagcagtgcctagaagaaatgatcctcaggctcaaaacttacacgaggtctctacacccccacatagaatttagctggtttcccttcctcacctcccaccacaactaaaaccccagtgagctagtgtaagcctcgcctgaatttgtgaacttttgccctagtcacagatagaagagaaggccagtgagaaaagaatggaggcctaccctcttcaggcaagccttgcccaggtggacgtgatacccgggggttggaagtgagccagcccactgtgcttaggcacatagcagtccacggaagaaaacagctagcctggttcttgcttttaagatgtagtacctccccctccccccaccttgccactagtagtaaaacaatgactatcaggctctggccaatctgattaatcgtttctatgagccagaacaatgctactcaaagtatggtccacagaccacttgcccatctgaaaactgcttgttcctgatccaccgtgagataggtacagtacatgagaatattttgaaaac

SEQ ID NO: 187042 - DNA, 534 bp, Homo sapiens
gtgaagattgaatgagttaacatcgtagacaagtacaacaggaatgttattagctactgttagctggacttaaattacaatgtaaagtttgagcctaactccaatttcatgacaaagtagaagagtagtgttatgttaataagtacttctaaaccagtgtcttgatattgagctacaataaatattaagtccaataaaggtgtttttgttaatccaaaatgcaatttcccctcagtcctgattcaagcaggcctgcaataacttagttatccaactgattaacattctaaaactatactgagggaaaaaacattctaccagaaatttacattttgtactggaaaatgaagatccagtaaaatgtcacatttctgtaggaatgtaacaatcagggcttttgttgtttaaatggaaggatgcaggctccattctgtgtaacaccaaagaaatatgacatgtttgagaaattttgtatttttttgcatggtggccttactttcttgttgttactcatttttggggtggggggaggtc

SEQ ID NO: 187043 - DNA, 219 bp, Homo sapiens
aataaggggttcttatccttggaggcagagctgggaaagaatgtcctgtaattaagagtcctgatatatatttggtatttcaaaatgtgcaccaaaagttagataagacagaacatccacataaagaagtgaatgtaaacaagcacttgtgtaaccaactgtaaataaccatgagtagaacatcaccagcagcaatttccataaatgccatattggttg

SEQ ID NO: 187044 - DNA, 410 bp, Homo sapiens
gtcaaggctgcattgagcagtgtttgtcccactgcactccagcctgggtgacaaagtgagaccctgtctcaaaaaaaaagttcaaacttttacaggcagctgaaactcattttaccatttatttaaaaattgagataaaaatcgtatgctctaaaattcaaatttaaattatacaatttaggaagttttaatatattcacaagattgtgcaagcatcaccactatctaatcccagaatattttcatattctgaaattattttcatatttcatattcatcagcagtcacttcccattttatccttcccacagctcctggcaaccacgaatctattctctgactctatgtatttacctattgtggacacttcatacaaacacaatcatacaatatgtggtcttttatgtctg

SEQ ID NO: 187045 - DNA, 524 bp, Homo sapiens
atccatgcgtctttcttctgattaccagcatctctgtggtgacatactcttttttcttcggtttatttccagatctaacagaatgatgacattgtgccaattctcagtgtcttgggaggtggggataggttggaacatgcctgctattccttgtcagagcagacctggggaggatgtccatcaagaaaggacctccagttcctcaataagtcaaagaattaccatgtgacccacaattccactcctaggtacatacccaagagaactgaaagcagtacccaaataaaagcttatacatgaatgttcatgcagcactattcacagtagccaagaggtggaaacaacacaaatgtccatccattaatggatgaatggataaataaaatgtggtagatccatacaatggaccattactcagccataaaaagaactaaaagtgctgattcacgctacagcatggatgaaccttgtaaacattatgtctaatgaaaatagccaagcacaaaaggtcatatataaatcca

SEQ ID NO: 187046 - DNA, 698 bp, Homo sapiens
gcgtcagaacaatccctctgagctccagttctctgggggactagaagaattagcaaacagtgcaatttcacctttaagaacagggcgagcctgtgaattagacaacaccaagatcacatcgtgcctttcctcagagcggaacaggctgatgaaattgcaaatcaagctccatctggccttggccgacccagccctctgctgccagggcccaagttcgtgactcatccctctgccagggactttgggtgcagggcttcatcaagccccagggccgcgtgccggatggtcaaggagggtgtgcaggtgaagtgggcacgtcttggcacagggcaccggggtttgagtgtatctgctctgtcgcgatgaacaactggtgactgctccccttctgggggcagaacagcaaccatgacttaggtttcactactcgggtagctgatttcagcgcttcgggtcacttcctggtgttgtggagggtaactgtgttttccctttgggggctgtgagaactgtggcctcctcctgtgtgtctcctctggcttcctaagtagggagagtcaggagggagacgggggtgccttctgccaacctctctattcactcctcatccttccctctcgcagggtcacctgctggagacagctcctcacccttctttcgtattctctctctctctctctctctcaactattaattat

SEQ ID NO: 187047 - DNA, 377 bp, Homo sapiens
ataattatgaacaaatttctgactactgatattctccttaagttaggatttactctgttaacttcatgtcattattttagcctctttgtcttcatttacttttgtccttaaggctgtagaaacacgtagtaataattagtcagattatggaactgatgagctgtggttatagcctccatcaccagaaagccttccattaatttgtaacacagtgctatttacataggaaaaggtctattttaacagagctgtattctcttgaaagaacccttttgccctaggtatccataaaagtggcacagtagtgttctttgttttactttggatgcaaatggagaaataaatgtgaatcaaaagtaatctatgagaagtatagc

SEQ ID NO: 187048 - DNA, 178 bp, Homo sapiens
caagcagtttatttccaaatttccaaagtaaaaatcttttaagtaattactgcatgcctgaaacacatacaccaacaaggttagagttttacatcataatttcaatgcacattatcgactttttgtgaaactatcaggactgccaacttttaattttttttttttttttttttttttt

SEQ ID NO: 187049 - DNA, 645 bp, Homo sapiens
cttgttacgggcgggcacacaggcagcgtggctcagagaagcaggagcaggaaagaggcaatttattctaaaggcttaaggataaccagcgccagtcctaagaggccactgaagacaaaagacacaccgtaggttaccaatgagctttcagtacagctttgctgcctcctcagtctgcctaaagaaatcaaggtcagaacctgcctgtacctgcctgggaagcctccaaaggaaatttcagcgctcagattctctcctggacagcactctgcctcctgagtcaggctgagcccaacccaagagtgcgggactctgaagggtcctctgcaattcttcctccagcccagatgacccactagagcccaggtaccctggaaccaggtcacacagccctcctgtgctcttgacaacagcttcttcacaaccaaagagatacaaagggtgtgctcttcacttagacccctcactaaaccatctacaaacacacactcacctttcagccgcactatctagcacagcagcgtggcattcctaagagcacccagcctgaagtgaaacacttggcatgtactatttagttctcacaaccccatgtaaccaatttttcaattttttttatttttcaaataagtacactgagaatca

SEQ ID NO: 187050 - DNA, 271 bp, Homo sapiens
gtatatgagagaatatttgagttgtgaaaggcagaaagagaacaagaacaaatgagtaggagagggggctgggggttaagggacagggaaagggaaggagagaggagagagatgccagagtgctctcctctagcctcttgccctctctttccctgtgactgggaaataatgacacctagagcagctgtcttaaactcccaagctaacccaagtgttgaggttggttttgatggccatacacttagccctggactattattggaaacaagct

SEQ ID NO: 187051 - DNA, 204 bp, Homo sapiens
cccttgggaaacccatgtggaggaggccccattgctgcacccgaggggcttgcagtctggtgttgaagacaccagttgatgacagctgttgatgacagctggagcaatgaccatgataagagcttcatgcagcatcctttccgcttccccttctcagtatctctgcctagggacagaaagtccctggaaacctaggggcaagcg

SEQ ID NO: 187052 - DNA, 462 bp, Homo sapiens
  misc_feature (39)..(39): n is a, c, g, or t
tgaaaatgtgggtgttacagtcatggacggtccgttctnttctatgatgccgtttcccacacgtggtacggtgtcgctatagcgacaccgtacacagacacacaaagacacacagtaacaaaccacagacacaaacacacagcaacacacagacacacacaatcacatacacagacactcaaatccatggaaatacacacactgctgagtagctaaggaacagagcttaattccaaggacctgggagtgccagcccctggaatccagcagaccccagcactccaggccagcccaccttggtgacgaagtctttctgggaacacagcttgtcaatgtagctcaggaggcccgggtctgggggcgtccagtcctcttcctgtggctgcttcactttgccctcttcccgttgtttctcgggctcccccgtggtacggtgtcgctatggggatcgtctagagtccc

SEQ ID NO: 187053 - DNA, 347 bp, Homo sapiens
ataaaaaaaaccccacatttaatgttaactctgttttaaatgcttcagctgcagttaaggtctgttacactcttttaatgcatttcttgtatctatataagtgttcaaaatgaaaattatttgatgtttgagttatgcttctgcccggtttgtgttctcaaccccatccacagacctataagatttgtttcagcaacctcattcttacaaacaaaactaacttacatacgtgcactcggtgcaaagtagatgccattgaaggtcaagaatatgtgttagatttctgtttgaggacatttcaacattttaaacagactaggaatacttggatttactcctacatctag

SEQ ID NO: 187054 - DNA, 269 bp, Homo sapiens
tctagtgattctgctgcctcagcctcccaattagctgggattacgggcacatgccaccacgcctggctaacttttgtatttttggtagagatggggtttcaccatgttggccaggctggtctcgaactcctgacctctgcctgccttggccttccaaagtgctgggattacaggtgtgagccactgtgcctggcaataatttttaaggatgggaaaaggactctaaattccactatcctcatgtaattttatttcattctcacttttca

SEQ ID NO: 187055 - DNA, 416 bp, Homo sapiens
ctgtggagtccctaactgctgccatgggtgagaaagcatatgtcagtgagcatgctctctggttccagtaatggaatcgctaactaaaaatgcctttaaacaacagaggtttctgttttctctttgaagtgatatggaagtatgttacccaccttgaatctaaggatgaataatcaaagacccacttccaacatttctactgcatcattttgaacatgttggcttttgtctccaggctgttgcctcatggtctcaagatggctgccacagctgttgcctcacggtctcaagatgaccaccacagctattgcctcatcatctcaagatcactgctgcagctccaggcatcacagtctctcacagttgtgttcagcgacaggaaggaagaggacaggcaagagagtttctctcttttg

SEQ ID NO: 187056 - DNA, 486 bp, Homo sapiens
ccccaatacggataggaaaacaggcccagagaggttggttcatccgcttcccacaatttgatgaaaaaattccctttggttatttatatacttgggctggaatttccctgccaacacctattgctcccttctcctccaacaatattttgggaattctcattctattatccccccaaactgctcatatatgttgactgaaaggtagatcaaagccataagcatccaaaccacaacagtcgttcatcgggatgacgcagacgcttattaaagattgtgctgagggttttttctccaaatttcctcagaccctcgccatcctaacaggctcttacttgtaaagctttcagtggtggcccttgacattttctcagttgctcggtctgcctacagtctttagaaagatgtattcattgcctcacaccataagctaaatgaacatttattcagtgcttggtgtaggtgccaagcattgtctagacactggta

SEQ ID NO: 187057 - DNA, 296 bp, Homo sapiens
ctgcccattagactatgacttatcaccattttaagacatctcaatttcaaagatgttaagatgtgggaaaaaaaggtctcagaatctataaaatacaagataaaccagacactgtttactgacataaaaacacttaccatcttcacacgccaccaatattccttcttagctaaatgtgtatttacatggtttactgaataattctatccagtctggttcaaatattatattaacacattgccaggcacagtggctgatgcctgtaatcccagcactttgggaggccaaggcgggct

SEQ ID NO: 187058 - DNA, 717 bp, Homo sapiens
ttgcaatgtggcaataacaatgaagtcttttataatttgcaagagtgataatccaaagactttctacctcttgaaaagtaccttatttagctgcttcatttgcaagtgtggcgggagcggcaattgaggtggccttttggtctgttcagtattgagtcttaagctgaggggcatattaaatatgtcgctgacacgggtatccctatgctatgtgctcttcctgttctgattcttaatttgtcttcactgtctcagtagtggtataaatggaattagccaagttctgcctgttgagtgtaggtatccagtgatcccaataaaatctcctgccatcaatttttgttacgtatgtatttagaggaatgtctagctggttaagccagagttctaatggctttgaattgcaggaaattgaggccctgtagaataatacacctacttgcctatcaatgataaagtggaactttatataagatgaagttacaagtgggttagagtgggaaaagggaactaaattcagtacaatattttacaaggagtaaagaaactgagaaaatgctatacagtttgtatgccaaacaaagacctgtactttacaagatcgaaatagggaaaattaaggccatcttagtgttaagattcttctaggaaaagtagcttctgatttcttaaatattagctttggctagtggtcatatttgtattcctcttgagctt

SEQ ID NO: 187059 - DNA, 561 bp, Homo sapiens
cctagaggacaagccttctttctcttggtatttttttcctagaatctggcatagccctttccacatcatgggggcgctgaacaaattttagttcatggaagaacaaatgacagagtgaagactactccctctaggcagtgagggagctgattggtgcttagtaccacagtaggttcgacttaaatataaaaactaaggctgggcacagaggttcacacctgtaatcccagcactctgggaggccaaggtggacaggtcaactgaggtcaggaattcaagatcagcccggccaacatggtgaaaccccatctctactaaaaatacaaaaattatctgggcatgggggcacacgcctgtactctcagctactcgggaggctgaggcaggagaatcacttgaacctgggaagcgaagattgcagtgagcagtgatcacgccactgcactccagcctggcgacagagcgagtctccatctcaaaaaaaataaaaattaaaataggccgggcacagtggctcacacgtataatactagcactttgggaggccgaggtgggcaaatc

SEQ ID NO: 187060 - DNA, 278 bp, Homo sapiens
agtcaaagaggaggcaggttgattgacttcattcctttcggttcccctggctctcttagactcaacatgttacaatatttgcagtaaataccgtctaatactggctgtgcattctggttctgaaagatgtgttagccatctgctgctctccctgccttgtgatgtctgtctttttgtctcttgctcatcccatttctcacacatggtggatgtatatggcatgcggtcgggacccggtaagctggatttgggagacagaggctggagtcaggtgggtg

SEQ ID NO: 187061 - DNA, 236 bp, Homo sapiens
ccaggtagacctaacacgagatggacactcaggccacaagtgaacatctgtccccaggtggacatccatcccaaggtggacatcaggccagaggtagtcattagtctccagctggacaatagtccctaggtggatacctaggccccaggtggacactagaccccagattaacacaaaaaccaagtaaaaaatcaaaccccaagtggaaaaccagtccctaggttaggtctacctgg

SEQ ID NO: 187062 - DNA, 595 bp, Homo sapiens
tcctggcaaaacagagagctgggctgagtcagccatggaaattctgtgcctgtaagcattttggtcaataaggggtcaaggaggaaggagaacagatttggttactgcatttgctcctggttctgggttgaacttttgagaaaacagtttctcctgaaataaaagaagatatttgttaaaaatcaaaacaactacataaaagaatattttaacaggtagctgtaaatgataaaagaaagaaaaaaaccaccgaagtaaaaccgtgtatccactacccagcttaaaaacagagcaatgtcaagactcttgaagtctcttatgtgctcctttctgattctatttctttctctcatcctcacctcctaggttggcaaccatttacatttttatattttaacattactttgactttatttgtagttttagcctatatgtatgggcaaaatatttcattttgcttgcctgtgaactttaaacatactgtatgcattccttttgcttattttccttctcaatattgtgagatttacccatattgactggctagctgcaggttattaatttgtattaattaatgctatatagtgttccatag

SEQ ID NO: 187063 - DNA, 380 bp, Homo sapiens
ggaaaaaaggcattcattacatactttgaaaggtgaagtgcaaagtactgtggaaacacactgggagcccctgagggaatgacgccaaagccagaatcttgagtgaaccaagttaaccaagtaaacaaggcagggaagtgtgctccagaaggaggaagccccatgtgacccagaggtaagaagagcatgagacttagaaaactgcaagtcaggcaggcctgggttaaattctacttttgcttaacttctctgggcctacttcctcatctggatgaaggagatgggttttaccaccttacagagtggcttgcagatgaaatgtgataacatatatgaatctactactggttcatggcacacagtaagtgtgcatccctttc

SEQ ID NO: 187064 - DNA, 393 bp, Homo sapiens
ttaaaaacaaaaatgaagtcattagttggaaaggataacaacccttttgttccttcctccttctccttgatattattagatactggataactaaaaccacttaaaaatgagctaattaagatcttaccttctttttttagaatgccttttgccttaagtgtaattaagaagcttacaccacaccttggccccactcccacctctaacccttcatcgggaagagacaatactaagtagttggtgtttccttgacatcaaaggacacggtataaacctcaagtattgatagaaacaaaagccagaggaccatgtgacgatgactggccctctttctctcctagacgggggtagccgtgtgtacacacgtgtgtgtgagtgtgccgggacgctacc

SEQ ID NO: 187065 - DNA, 631 bp, Homo sapiens
atcagtgctgctttagaagcagcaaggctgggccaggtgtggtgctcatgcctctctaatcccagcactttgggaggcctaggcaggaggatcacttgagctcaggaatttgagaccagcctgggcaacatgatgagatcctgtctctatgaaaaattataaaaattatctgggtatggtggtgcgtgcccgtgatcccagctacttaggaggctgaggtgggaggatcacttgggcccaggaggttgaggctgcagtgagccaggattgtgccactgtactccagcctggtgacagaacaagaccctgagtctcaaaagaaaagaaaaaaaaatgctggagtgtttgattttgagttgttatattctggtatctaaccccaaaagagatgggagacattgtgacttccttggtaattaaaatttaactggcccaaaaaatataactgttaaggtaaaggatttttgtttgggggaaaggctataatttaattattcaacttagctttcaagaacagaaaagtatttatataactaaatatagaataataatggctgtcaacatctaatccaactgaaataaactttagttttcttatgcctccaaagtaccatagaaaaagagaaaagac

SEQ ID NO: 187066 - DNA, 597 bp, Homo sapiens
acaggtcctgcactgagcctgggcgtgtgtcatctgcaaccggctttctcagaggcatctgtgtgtctcctctaggactgactacaccagctccttcattcaccctgtctctctgctgaggggcactggggctatgtgaccagttcaaggcaaacagaaatacctggtaaccctacctctctgctcaggacactcatcctccctgatcccctgccaggcctcgcagcttttttagtccttcttaagaagataaaaagtgcaattcagtctaataaatataaaactccagagcagaccagtgtaacatcaaaactccctgtttctcgattggtggcttctactgacagaaggcagtggaagagagagaccagtggacgcacttatgtgctgtgtccaggcacaagggctgggcagatcctgagattccaaatcccggaagctttgccagtccatatgagtcagggccccatcaggacagaacctgagatctggactgggactcaaagcccgcaaggtctgggatcccactgcatccttagggaaaacccagcgacccccagccttatctgcatcccctacctgggacggggatcctct

SEQ ID NO: 187067 - DNA, 415 bp, Homo sapiens
tcccacaatctataatatacagcaacaggcaccactgtgcagcttcttatccaatcacccgcaaatcccgtttcatatgatgttgcttctatggcagtctcaaaagtagaagatagtataattctaatgtctacatgctgtcttgcttgctcctcaaaatagcattatagatatcaggaaagcaagtgttacttttattattacatttactaggaagaaacagaaagttacctaaaggtgggggaaaaaaagtggtaagcatcagaaccaggatgtgagcccatgtggttttaggattatttaaaactgagaaaattataatgtgttgatatatttagataacatttcattccttgccaaatttgaaggcaaaagtatcaaatattaagaaagtgaataatggctaaaaataaag

SEQ ID NO: 187068 - DNA, 534 bp, Homo sapiens
tggttctctcctttacagtgtgggactaggacatcaacacaattttgaattttggtctcatttcaggcctgtgtgagggggtgctgactctgggtgacatcaggagatcaggcactggctagtcatcacaaacagaatcccaagagttcacttagtgcccatttttgcttatatgtgtatcttattggagccacctgtgattttcagaactgctgaattgggggaaagcagacgcaactgtttggggccacgtgcgcacacacttgaaatgctcagttgcactgtgtaatgtaggatttttccgtggttttggattcttcccatttttgttggccttttccctgtgttacgcactgagacacttctgtacacagctgtttcttcgaaatcaatcaaatttgaaacagcctgatttgcaaaactgaaagttgttgtatggaggaagatccttggtaagaattacatggctcacgtatcatgttcttcttacattgttttttgtttcccagccattgtcagggaacaatagctgga

SEQ ID NO: 187069 - DNA, 366 bp, Homo sapiens
acccgtggcaccttcacacatgctgagacacagcctcggaccccagatgtcacccacagcgaggaggggcctgggaaatggagcaggcttcagtccctagcaccgccacaaacctgcttggcagctcagatgcaactgtcagacccctcagcattcagtggaaatgccagggacccagaacagtcaaataatgtccaaaaagaacaaaactgggggattcacagatcctgatttgaaagcttgctacaaagctacagttatcaagatggtgcagtcccggcgcagggcagacgtctggaccaatgggataaaacggcaagtcaaaaaacaaggtatgatgtcaaaagcaattcaatggggaaagaa

SEQ ID NO: 187070 - DNA, 788 bp, Homo sapiens
agccaaattatagtctaacacattgctgtcaattgcacagattcacctgggaataaggcatcaaacatctccataccaggccctgtcctaggccctgggtcacagatgtaaacaaagtcaacatgtgccctggatggagctgctcagttcagggaaccgcaggttgctgagcatggctggagcacagagcaggaggtggaacgtgatgagagaccagtcggagagacaggcagggcccgctcacgaggtgccttgatgcctcgcagagggacctcgagttttccctggggtggtgggggctgaggaaggagtcaagcaggacagacattggcagatgctcgaggcataggcgcagcactggggacaagaagatcaagctcccttgggaagattcctagctgtgctccgctccttccctcctctgtaaaatggggacaggagaagtacttatgtctccgggtggtcatgcagtcccatctgtaacaaacacagccctaaaatctccatgagggcaaggactctgctcaccctacatcccagtgcccagaacagagcccggcatacagtaggtgctcagtactgctcaatacacggccactaccgtcgtctgcaattatagagttttttgatgggcagcatgagaatggcctggctgcctgtggggcgggcaagaagagcagcaaacccaaccggaagtcccctggaatatccgctcccttggggacctcacccaggccctactgggccgggatgttctggctcaagacacactcgcacagttcacagac

SEQ ID NO: 187071 - DNA, 788 bp, Homo sapiens
tctctcctggcctttgaaagatgctgactagagcacactctcctgccctttgctgggtgcttagaagaaaggccttgaggtaaccctgttccagcctccccacaggcccctgcagccacgtggactgaccagaggctccacacacgggcaggtgtggcctgacctcgctcgcgtaggatcatgggctagtgggtcccccaatggggggctgcttcgagtgtcaggaggcagcgaggggtgcacagtgccctggcctctgccatccccgttggttatttggctggtctgtgtttggtgagcgagtagagggatccagagtgcagggtggtcttggcctggggcttttgactgccctctggagatgcactgagggccacccagctggggagcagccgggagggataggaacctgttcccaccgtggcgtctttgcccttccaatctgcttcaccgtcgcccttgatctctgtgccagttggaaaattgaggcagaaccaatacccctgggtgatctggaaatcatcagtgggaagggttgcctttgcccaaggctaaagatgacatgtccctgcacactttcagccccaggttttccccacagacccctgcagccacgtggactgaccagaggctccacacacgggcaggtgtggcctgacctcgctcgcgtaggatcatgggctagtgggtcccccaatggggggctgcttcgagtgtcaggaggcagcgaggggtgcacagtgcctgcctctgccatccccgttgttatttgctgtccgtgctgatcg

SEQ ID NO: 187072 - DNA, 1069 bp, Homo sapiens
tctctcctggcctttgaaagatgctgactagagcacactctcctgccctttgctgggtgcttagaagaaaggccttgaggtaaccctgttccagcctccccacaggcccctgcagccacgtggactgaccagaggctccacacacgggcaggtgtggcctgacctcgctcgcgtaggatcatgggctagtgggtcccccaatggggggctgcttcgagtgtcaggaggcagcgaggggtgcacagtgccctggcctctgccatccccgttggttatttggctggtctgtgtttggtgagcgagtagagggatccagagtgcagggtggtcttggcctggggcttttgactgccctctggagatgcactgagggccacccagctggggagcagccgggagggataggaacctgttcccaccgtggcgtctttgcccttccaatctgcttcaccgtcgcccttgatctctgtgccagttggaaaattgaggcagaaccaatacccctgggtgatctggaaatcatcagtgggaagggttgcctttgcccaaggctaaagatgacatgtccctgcacactttcagccccaggttttcctaccttgtggggaggtgagagcgtcagggtgagtgctgggtttgaggctcagctgtgctgtgtgaagattgagaggagcccacctgatcacatggacagaacgcacaggctcctgggtggccctgcggctccagtgacatagcacatggtcgggcatacaacagtgcccaggaaaggttagctggtggtgtttccagggtatcgtgctgagcttctgagatgagaatgtcctgtgaaagcctctgtctggaggtttcattggaagtaaagtttacatacaattaagggcctaaaattgtattttcatttaccttaacccagattcccagcaagctagagagctgccctcaccccaaagagttcctcatgccccgtcctggataggcctgtcagggccaggcagtgggcgcttgtccctcgccccatcctggacagtcctcacctgtcgctcacagcctgttctgctctggtttt

SEQ ID NO: 187073 - DNA, 224 bp, Homo sapiens
acacactgatttaagcggcctcctataattttgtccagtggatgaacaaggtcttgacttactcagtgagagtggtgttggaggggatgggctcacggggaaattggggtgttcagcattacaaaatcgataggctgaaaagaaacagtatttgcgtccagatcaatgtaccatgtgatgcaaggccaggaaaggaagggcaagggtggagggcagaagtaatg

SEQ ID NO: 187074 - DNA, 574 bp, Homo sapiens
ctttccctttggtttaagtctcactactcagactaacgtaacagcctattaacataacagcccaggatctcttatcactggtcctggttttctctactacatcctccacacaaacatctaaattttgtttctaaaagcccagaaaagagctcattttgctgcttaaaaccagccataatgatggattaaaaaaaaaaaatcatttaggtccttttgcgatacaagttacagtctacctttctgtcctagtatttaaattacactatgctagtattcccaggtcctcaaacatggcatttgctttcttattgaggaaaatctgtaatgcttttctcttcactcttaacagtagctggacccaatttgaacaactcctcttttgaaaaaaccttctgcaaatttttgtccccctcctcacattattcccctaatacatggaacagaacaccagcactaggtgagaaaacagaggtttcatgggcacctattaatgattattctgcttgaaaaaacaatgggtatttcttgggaatttaagaatgtaccatcacgtgagaaactgaggtataagaaa

SEQ ID NO: 187075 - DNA, 313 bp, Homo sapiens
ctctaaaaaaatttttttaaattagccagatgtggtggcatacacctgtagtccccactactgtggaggctgagatgggaggattacttgagcctggcagttcaaggctgcagtgagctatgattgtgccaagtcacttcagcctgtatgacggagcaagaccatgtctctaaaaaataaatagataaatgaatacataaacaaataagttctctgattggcctggcttcagtcacatgactgaagggggatgaagtgctgctagggtcttgggtcacatgtccaccctggtgccagcccctctagaatccta

SEQ ID NO: 187076 - DNA, 143 bp, Homo sapiens
gtggaagatataccacagagctcatgaaagacttttaactgattttaatagcagtcattacattagaaaatgagacttccgcttgtaacagagatgaactgggaagaaacaaaggaggagaggtaactagtgcagcgccccag

SEQ ID NO: 187077 - DNA, 431 bp, Homo sapiens
gcaggcagcagaattggatcgggaatttctcaaactgccaaagatgaaattagaatgagtgatttttggctggcagcttgaagtacatatatatcagtttgtgtatgatacgtgtgagtatgtagtggtttttccctcttcaactgtctttaaatatgtgtgcgtgcgtgagtgtgtgtacaaacacacgtagctttaatatcaaaaaggttatttttgtaggtctgttaggagacatgaatatgctcaaaagggaaaaaaatacatggatagggtgagaggagtttgctttatttaaggacatgataaaaggcatagcccttctgcctttctggaatgctgtaacagaatatagaaataattgtatcatctcctgtacttctcagagctggtgtttgcgtgaggctggccctgtgccaggttggcagggt

SEQ ID NO: 187078 - DNA, 338 bp, Homo sapiens
cctcatccgttcttgtcaagatttaaaaaggtaatacaatgatgtccttagaatactgccaaacacaataattagttagttattattataccttggctgattctcatggtctcctaactcattaaattttttctaattcattttttatatctcataatacattcttccccttttttccctttgcttaccaagctctgcaacctcataatacatttgataggtagtcattaaacaaaataatttttttgcagattgactaacgttgggtttagggctgttctcttttcttttcttttctttttctttttcttttttttttatttgagatggggtctcac

SEQ ID NO: 187079 - DNA, 389 bp, Homo sapiens
cagtagagagttctgggctagagagataaatgtgtgagctgtcggcctatggatggtatttaaagtcatggcactgaagagataactgggggaatgaatatagagaagaggaccaaggccagagcccatgggacattcagcatgaagaggttggggagaagagaaggaatcaggaaagggacagtgaaaaagtgaacaatcagatgtgatggggagccgggcgcggtggctcatgcctgtaatcccagcagtttgtgaggccgaggtggatggatcacctgaggtcaggagttcaagaccagcccaagcgacagaacgagatcccatctctacaaaaaattttttaactaggcaagtgaggtggcgtttgcctgtagtcccagcgactt

SEQ ID NO: 187080 - DNA, 218 bp, Homo sapiens
ttttccacaccccccctcctcccattcaagttgtcttcagtgggatgttaggactgccatgtgttaagggactctcctcatattctattcctttcaaccaccctgtgaattggaaaccaaaactctatgataaactttgcttttttaaggtcagccaggtgcagtggctcacacctgtaatcgtagcactttgggatgccgagatgggaggattgctt

SEQ ID NO: 187081 - DNA, 205 bp, Homo sapiens
tggccacatctgacagttttatggcatcattttctgacccccatctaggttgggaaaatgtccaggcttttgcagcctctggtgggcactattttatgccctccaagtaccagttgttctctgtagttcgcacaaatcgccccttgttcacacaaggcacgggccattgttggaatcaggctttccaagctggaggggcccttag

SEQ ID NO: 187082 - DNA, 579 bp, Homo sapiens
aaaggaaatctctggggttgtgctgtgttcagtcacatcaacgcttatgtggcagggattctggttctaactgccaggctcctggaagccactgagacaccaaaccctatgggaggtgtaaggcaggttccctgtgaaggaaaggggtatctggttgggtaatttgcacaccatcagtgacgagaaactgaggatagagaaatcttgctcaagacataattcagacaaagggacattatggtaatttagacaaaagactcaccctagagtgtttttatgcttggcctctgccaccatcatttttctttcaatgtctgtcattgtatataaatgtttattatactagagttctgtcataatggatatgagttgagacaaaggatagagaaagtaatatgatgctggctacttttactccaaaaaggaaattctaaacaagcagagtgaagccagctgctctatatgtcacattgatataagtcactgaaatgctgagttcccaaaattgtgttccttccttttcacaatctctccttgctcacatcggaagtggaagtgagcatggtcactggtggacat

SEQ ID NO: 187083 - DNA, 331 bp, Homo sapiens
taactcactccttgaaacacgtcattgacttccagggcactactcttggttttcctacctttcatctccttagacgattccttttaatctcctgaccttcaaatgttggaagtggcctagagcagagagcacctaatttccaaccacactacagtccttacaaaggacatctggtagcgcggcttaaactagccacccttacattgtatgcgtccaaatttctatctcctgttttaatttctatgaactcctgacttgtacatcaaactgcttcggtaaccttttcatctggatatttaatagacctcaaacatacctacactcaaaatta

SEQ ID NO: 187084 - DNA, 382 bp, Homo sapiens
cacaacggcgatatgttcgtagagatgtgtcgttaggtgatttcgtcatgggaccatcacagagtgcactcacatgagcctggatggtacagcctactacagataggccatgtggagtagcctactgctccaaggctactgagtgtcccaaatcctgcaggcaactgtaacacaatggcattggtgtatctaagcatgtctgaacaagaaagggacggtaaaaatgccatatgacaatcttatgggactcctgtagcatacgtaatccactgttgacagaaacatccatatgtatgcaggactatgtcttcataaagacacaggctggaaaaaacaggaccaaatgagagcaatttgcttattagaaggaaagatgactttc

SEQ ID NO: 187085 - DNA, 277 bp, Homo sapiens
caactcatggcttcttccatgggagggaatgaaaagaatggaatttacatctaatgttccagctttttggggaaactacccaagggactggtttctgttttgtgtgactctgaatgctgacagagaactagcatactttggatacatgagggcccttgagacagctcagcagcttgttgcagcaccagaaaacctgcagtactgaaaacagacaatggaagcagcaagaaattatgagctcctgataaaaaccagcaaacttttctaattgggaaat

SEQ ID NO: 187086 - DNA, 290 bp, Homo sapiens
cagcagtggtttcttccctgtctatggatccgtggacaacctctgaagatctcttctttaccatccttttggtcttctccagagccaccctactggggctagaccctattctcaaagtaccattcctctagtatccatttgtacttcatgacatttccaaaaaaagtcctatgtttgcaatgaaataagaaagtggctgggtgagggtcggagggatgagctggtatgtgtcattgcttggagaattgacctaccaaaggacttccgtgttgctttggccagtcccagag

SEQ ID NO: 187087 - DNA, 265 bp, Homo sapiens
atcagattcttcagattaaaaaattagggtaagaaacaatcagatgatctctgtttcagcttacatacataattcttcattacatccatctcatctgatcctattaccctctttcatgtctttttatcattgttagaagagcctatgacatcttatacttttccttcttagaatttagcacaaataaaattaagtcattatttgagctttatgagaattaagaccaactactattgcttagcacagtgctcgacatgaacaggta

SEQ ID NO: 187088 - DNA, 311 bp, Homo sapiens
accagtacatttctgatcattgaatcctgtcctataacaccaatacactatccattattgtcagagtttaaatggatatttttataattacctcatacagttcagttataaataaatctcctctgtgccgatgtcgccgcgccctcggaggggctcgcgggggccactccagggcagggcagggcagggcagggcaagaaagaaagaaaagcatgagaggacccaggaataagagatagcatggtaaaaactaaagtaagtttgagaaggcctaaagcacagaatggaggggagacacgggtaccgagctc

SEQ ID NO: 187089 - DNA, 228 bp, Homo sapiens
agctaaggacttaggcgctccccaatactatgtaagtgacagtatacaaaatgaaatttcccaggaaattattgttttccagaattgaagggataggccagctgagctttttgcccttgatttttcactcaacccagaatgtgctacctggggtaccatggccagtttgtgcaattctctaagaaagaaggaccaggaagatggatagagtctggttgcttcaagtca

SEQ ID NO: 187090 - DNA, 462 bp, Homo sapiens
cacacaacacacacacacacacacacacacacacacacacacacggtccttctctctccacaaatggtaacatactaaagatactcttctgtactttcacagtgcaagtaccatatcccacacctaggatttggctaaggccacagccaagtgaaggcagggtaggcacttggcctctaagctctgcatccagtgctccacgtccaagctctgcttgctccccacagcactccccaactcatccacagcagccaactcagccgcaggctgcctctaacaaccacacacaaaaacaatgagaaatggcccatgctgctttctgggcaggacactccatcctgcagaagggacctaaaggtccctcactcctccacctgggaagctgggctgccaagggatggggcaggcggtaggactcacactgtccatgttcttctgctgcatggagacagcaaagagtcc

SEQ ID NO: 187091 - DNA, 578 bp, Homo sapiens
gcaaacatggagtaggcagagaaaggagttcaaatcagtcacctactaagaaccagcaactcttttgaacttaaaagtcatttttccattcaaactcatgaacctgaaggagatattgcgtagacggcggggacggtggaaagaggctcagaaaggttaagcaactctcctaaggtcacacagctataaaaatggaaaaacaagtttagaaccagtggttatcttaagatgatagcattactgctaatacttattttcctttttatgtttatttgcatttctaacttttcctaggttaaacacattttgctgggaaaattttccagactcaaaaaaaaagattaattattggaatgaatttgtttaggtatttctaaataatggtgtgataacaaaaaattaactggtcccaccttaatcttcacctatgcaggaagtatcctgaatttttcctccctctgcctctctgaagcccatgtgggccacaacagaaacacgactgaagcccagcctcttgggtatcagtacatgctcaacagacaccatgttgtggcttccttggaacttcaatggcacca

SEQ ID NO: 187092 - DNA, 476 bp, Homo sapiens
gcccaggctgatcctgaactcctggcctcaagtgatcctcccaccttggctcccaaagtgctgggattacaagtgtgatctaccacacccagccagtgagggcatttttataatttcatctctaaacagtggatgcacacattgatatgtgaaatgctctgggctggtgttttttcactctgtgagtggtgaattggtaggtagtaaagtcagtaaaattagtcatgactagcgtcttgaagaaaagaaaatagaatacaaacaaaaaatatcagagtgaatcactcaaagtaaggataagaaatttttataagaccttttttacgttttatgagtgtgtgtgtcctgatatgaaatatatttcttcctacggatctcgaaaaagtttgaaaacctctagcatccgctcatgccccagtttaatctctcgccatcttttaccccaggcttcaggcatgttgattgactggacattc

SEQ ID NO: 187093 - DNA, 957 bp, Homo sapiens
cgcttctccacctctctgctcatgtaaagaaactgatgagaaaagagactaatatgtctagactgagttagaaacttcatatgagtgggttttgtagaattgatgggaaagacagtgggaacctagaagaacagaaagagacccacagaatgtctttctttcgtctctttgcgtcactcttgagggaggggcgtatccgcgggcggctgtttaccccgtagctggggggtcaggtgggggccatcataaagaccgtcgtgtgtagaccctcctgtgctcccgaggtgttcccgcgcaggattcctccgtgggcctagcaggcctccacgattgagcgtgagagtgttctcggggtgccgcgcacacccaaatccccgcgcttacattctggggggtgatttcctaggtaagaagacagggtgtttccccaactgtttgcgccagggctgggtccttcagagtctccttgccctcaggggggttccaccccgcttggtgttccccccaaatggtgctggggataatatcacggcggtagccgccactgtgccttggcccagaaatggttcttcttcaaagatcaggagttgtaagcctctctcaaataaggtaaaggcctgtgatcccatgtcatgagataccaaaagcctccgtggggagcttccgaggcgactgcctaggaaagttagtcgaacgtgttccccaagatagttctcttgagccatatagcccccccagtgtttaggaacttcacccggtgtgggacaagacaccacctattgtctgccgggggtcaccaaaattggcgcgctcattaactgctgctggttgtaaccgcggcccctatattcgcagaaagcccccctcgtgtgtgtgttgttcacccaaccctccgtgggcccgacttaggggcaataacacgacgaggcgggccgtacttttatgtcggtgtgacca

SEQ ID NO: 187094 - DNA, 399 bp, Homo sapiens
gagtattaacaaactgctacatagctgattcttccaagtatccccacccccatttaaaaaaagggaaaggttgctttacaacaacttatgtttttgtgaatttaggaatttcaaagaactgctcaataatcacatataatactgtcctggcagcatgagagtcagcgaaagaattaatccctgatcgctccactgtatgtaatgaattcgctattttcttatgcatttagaatgatggtgctagatatatgccattcttagaactaagagagtaggcactcttttcctgtagggattgtcttatggaccccaggtgagaaagactgcaccaaaaatgtcacaaaggtacagaaccgctgctttagaaaattatgtataacgcctctgaacaagtaaaca

SEQ ID NO: 187095 - DNA, 210 bp, Homo sapiens
ggaggtgggccctttgatgagtgattaggtcatgggggcagaagcttcatgaatgggattagttcccttccaaaagaaacttcagagagttccctcaccccttccaccaccaagaacacagtgagaagacagctatctttgagcctggaagagttcctcaccagataccaaatctgccaacaccttgatcttggacttcccagcctctag

SEQ ID NO: 187096 - DNA, 308 bp, Homo sapiens
gagggaggaacagtggcttgtactgggagggtgtcaggaaggaacgggaggaagatggcgacatcaggggcagggcaaatgagccttgttcggccacagccttggctttcaatctgtgcaagtttagtgagatcacgctgcagaagcagtgtcaggctgaggacacagtggccctcgaggaaatgataatggacatcagctccacccagttacacacccaaaaactgcaactgccatacacaaggagctcccgttatggtggttctctgccaacaccctaccacactgacagctctccctatagtcct

SEQ ID NO: 187097 - DNA, 400 bp, Homo sapiens
ttgacaaccttcagggtctgtttcagcttggtatgctttctctttttgtgtatctagcaaaaggaagattattttgggattattattaaaggaggttttggtcctacaaccatgctaattgtacgtgaaaatgttttggacccaatacagatgtgaaaacagaacatacagtttataatgactggaattgtttagcaactaccacgttaacattgaaaccttgcaagtcccatagccaaattttcttagtgaaaaaaaaagaaatttttgattaaagtgcagacatttctagaaagctgcgggtcaaaccagttaattatttttatcatgaaatggggaagaaaaatatgctatcatttggcacatctggctgatttctttccttactttgaaataatac

SEQ ID NO: 187098 - DNA, 201 bp, Homo sapiens
aggtgcatacctgttgtgttgttgtgttcaaggaacagcaaggagaccagtgacagtggagtgagcaaagaggaaagtgggaggagataaggacagagaggtgaggccaaatcttgtagagccttatggccattttaagaaccctggtggccaggcacggttgctcacgcctgtaatcccagcactttgggaagccaaggc

SEQ ID NO: 187099 - DNA, 324 bp, Homo sapiens
aggcagaaggagacaccaaagcaagttttagagcaggagtgaaagtttattagaaagctttagagctggaatgaaaggaagtaaagtacacttggaggagggccaagtgggtgacttgagagatcgagtgcatggtttgaccttttgacttggggtttcatatattggcatacttccagggtcttgcctcccttctcccctgagtcttcccatggagtgggctgttcacgtgctgggtggcctgcatgcacagtgtgtttactgcagtggtatgcatacccacttgaggcatgcttcccttacctatcaagcgtccctataagg

SEQ ID NO: 187100 - DNA, 596 bp, Homo sapiens
caaacaaagagcaacagtaacaaatttcagtgaaattaaaaaaaaaaatcagaatccagagctgctacaatgcataatcaaaaatgtccagttttcaataaaaattataagacatacaaagaaacaggaaagtgtgatccatactcagggcaaaaaaaaaaagcagccaaataaaatggccactgagtgttctcaagtgtctgatttaggagaagtagattttaaagcacctattacaaatatttccaaagaatttttaaaaacatatttgaagaatgaaaggaaagtatgacaacaatgaatcattaaatagagaatctcagtaaagatattatacattgttttttaatggaaattattgagttgaaaagtataataactgagaaaatctcaaaagtatatttgagatggcaaaagaaaacaacaatgaaataaaagaaaaattaatagatattacacagtatgaataacagagagagagagagagacagagagagagagagaagaagaagaagaagaagaagaagaagaagaagaagaagaagaagaagaagaagaagaagaagaaggaggaggagaagaaaagaaaagaaaag

SEQ ID NO: 187101 - DNA, 528 bp, Homo sapiens
atctgattcaagatgtcgctattatcccagtttagaaacatttctgtcactgcatcaggatcagagaatgcagttctaaatggcaaatctagacttggtttgacaagacatggaatgaaactttgaaattaaaactccttccttttccatccttagcagaatctcctgagatgttcaagtagctctggaaagaaactgatcagattctaatctgtcaatttaaaaagtttttttttaaacaatttttaaatttgttttagagatagggtcttgctgtgtcattcaagctgcagtgcagtggtgcaatcatagctcactgcaatcttgaactcctaggctcaagggagcctcctgcctcagcctccgtagtagctgcaactacaggcgcccaccactacaccctgctaattttcttatttttaaatttttttgttttgttttagagatgaggtctcactgtgttgtccaggctggtactcctgacctcaagtgatcctcctgctttggcttcccaaagctctgggatta

SEQ ID NO: 187102 - DNA, 256 bp, Homo sapiens
ataatgatgataatatccaacgtttatcgatggcttctgtatcactcactgtgctaagtgttcaatacactttgtctcatttaatcctcactacaatcccttgcggaaactgtgttgttatctttgttttacagatgaggagggtgactgcagagggagatacatggtttgcccaaggttacatagctagacataaatgacaagcaagagtgtggcaccctcacttttaattccagggacgcgttcctcttctagt

SEQ ID NO: 187103 - DNA, 274 bp, Homo sapiens
tctggccttgctcccccactccctgccctcctggaatgctttcagaatttttgcacctctggaagtgggaagatcaatattttaaaaacctcatccgaagctcagagaccccctccacagcatagtaggggatttatgcgctggtgttttgacagttttccctgtgactgatgcagaactcagtgaccttcactggctccgtgaaccagcggtggcagtgtcgctatgtgctgagaagcaacagttcaattccattccagagatagttttactt

SEQ ID NO: 187104 - DNA, 287 bp, Homo sapiens
agcctcctggactcaaacaattctcccacctcagccttctgagtagctgggaccataggtgcatgctaccatgcccagcttttttctttctttctttctcttttttgtatttttggtagagacagggtttcaccatgttgctcaggctggtctccaactcctgtgctcaaggaatctgtccacaggcctccccattttatagatgaaaaaatgcccagagaggtagaataacttgtccaagatcacacagctggaagtgtgtccagtgatcacagagctggaagtcc

SEQ ID NO: 187105 - DNA, 294 bp, Homo sapiens
gtagtctccaaaaaagcaacaacaacaacaatcaagaccatgtgtccaggaacatctcatataacatgacatcctctcccttgacatccagcattctaccagaatatgcctgaaagttataaataacctttgggcagccaagatctcaagtccacattaattggttgtaataccagatgagacatatccagtcaaccttatttacagctcctgcaaaggcagaaaaacaaatatactacacagaaataaagctgtaatatctatacagaactccagaattcaattaatccagac

SEQ ID NO: 187106 - DNA, 540 bp, Homo sapiens
gcctataataccagccctgtgggaggccaaggtgggaggattgcttgaggccaggagtttaagactagcttgggcaacaaaatgagaccccatctctaaaaaataaaaataaaaaagttagacgggcatggtggcatatgcctgtagtcctagctactcagagggctaagacaggaggagggttactaaagcctaggagtttcaatgttgcagtaagctatgatcatgccactgcactcccgcttggacaacagagcaagaccctgtctctaaataaagacaattttaaaaataattaattaaaactagctgttcatgaggattgtttgtaaacactaaaaccaggtagaatgatagaaatggcaaataaaagcaataacccttaatgacaaacggattaatgccaatgggtattaactattgtaattgtaataacaaaacagaatgcagaagatttttgaaatcttttaaaaatactgaatctgacacaattttggttgttgtaaataaggacaaaaaatgtacgaaaggagtgggtag

SEQ ID NO: 187107 - DNA, 440 bp, Homo sapiens
acctcctccactaccatctagtttttattttttatttatttatatatatattttgagacagagtctcattctattgcacaggctgggcgagactcagtctcaaataaataaataaataaataaataaataaataaaaattcaggctgggcatgggggctcattcctgtaatctcagcacttcaagatgtcgaggtaggaggatcacttgaggataggagttcaaaactggcctgggcaacatggtgagaccctgactctacaaaaattcaaaaaattagtgtggtgtgacagtacatgcctgtagtcccagctactcaggaggctgaggcaggaggatccctttagtccacgagttcaatccatcagtgacctatcattatgccactacactccagcctcggtgacaaagcgagaccttgtctcaaaaaataaaaataag

SEQ ID NO: 187108 - DNA, 198 bp, Homo sapiens
agtcacccctttcgttcattctttcttcattcttccagagtttctaagtacaaactagtataactacatatctgattacttaattttctctctctcttaagcaaaggtagtaccttgtacacaccatcttgtgtgtaaaacaagattttttttaaaaaaacaagcttgtttacttttatttattcctttgacaatgta

SEQ ID NO: 187109 - DNA, 330 bp, Homo sapiens
aaatcattatcttaccatttctctcaccacctctctatcctttggctatttggattgaacccaagaactcaactcttaacacagctcagaaaatcataactatatagccaggtgtggtggctcatgcctgtaatcccaacaatttgagaggccaaggagggaggatcgattgagcctaggagttcaagaccatgcctggctaatttttatattttttctttttgtaaggatggggtttcaccatgtttctcaggctggtctcaaactcctgagctcaagccatccgccctccttggcctcccaaagtattgggattacaggcgtgagtca

SEQ ID NO: 187110 - DNA, 370 bp, Homo sapiens
aaaggacactgaaaattaaaatatgagatttgggggcaaatcatcaaacctgtgtgataaatggattagattcagagatcaacaatttcagattgaagctggtattgggtatacactgtccttttggatctgtgatttagtagccaaacgaaatccaatatcctaattggtgaggcaggacagtgaaatcacctgtactatttggaaactctcactttacctctctgcctccctttcatacttttctctttttcttggctacttggtttcatttccttgtttgaatcgtgtggagtacacatatttgaatctatcaggtggtatttacttggacttggctccattgcattgtgtttgaaactctggcaga

SEQ ID NO: 187111 - DNA, 102 bp, Homo sapiens
gctggggtgtggagtgggcacactggaggaagggatgggaaggtctgaggcctgggtaaagcagacacggcccaccccgccttccagctcccagcctcacct

SEQ ID NO: 187112 - DNA, 286 bp, Homo sapiens
agtgatacttcagattcaacatgtctcaaatataatgctttatctttctcatgcatacttattttctctctgagtggatatataactatcctctgagttgcccaagctacaaactttataaacattcctgatttctgccttctcaatcttggagttcaactaataatcaagttcgaatggtttaaatttttaactttttttcaatttagattccatctctcattcatttcattttaacaaatttactaaggacttaatctacgtcaggtgttgtgctaagaacagc

SEQ ID NO: 187113 - DNA, 285 bp, Homo sapiens
gaattgtaattaagctagaggacttttattaccagatatcatgacccattataaaattacaataattaagacactgtggtatcagtccaatgataaacatacaaagaaatggaaaagaaggagtacagaaatggaaccacacataaggctacctgatttgtacaaatgctcaactgcagttaagtgggaaaaggatggtcttttcaataattggttctagaaattttatatagcaagagtacttgactcaactaataataattatgtaatattcccttgacaaca

SEQ ID NO: 187114 - DNA, 511 bp, Homo sapiens
ggatgaagccggaaaccatcattctcagcaaactaacacaggaacagaaaaccaaacaccgcatgttctcactcataagtgggagctgaacaatgagaaaacatggacacagggagggaaacatcacacaccggggcctattcaggggtgcagggctaggggagagatagcattaggagaaatacctaatgtagatgatgggttgatgggtgcagcaaatcaccatggcacatatatatacctatgtaacaaaactgcacgttctccaagtgtatcccagaactaaagtataatttaaaaaattaatacagatgagatctggagcatatgtgtataattacataagtcatgtatgttttacatgagcatagaaaatgtaaaaagatatgcacaaaattgacttttttatatactcttctgttacttggctttgaaaaaataatgttcccatttttgaattttaaaagaaaactccaataagatgtgtatatgttaaaaaaatttttttaat

SEQ ID NO: 187115 - DNA, 185 bp, Homo sapiens
atgttgagatggctgcagtggatggactcatcaccataataatattttctctttaatacttttttagaacattaagtgacaaccagagtgtctaaaactgggttacacagcagtaataaaatcagagtgacactttgcagcagcaggactggaattcttgctattggggttggtggcagcaaact

SEQ ID NO: 187116 - DNA, 379 bp, Homo sapiens
ttgtgccactgcactccagcttggatgacagggagagagcttgtcacaaaaaacaaaaacaaaacaaaaaaccaactaaactaaagataaagagagctgaacataaatgctgtcatctagttagaagtatgtgttagcaattctgaaactatattatgtgtatactggtatacatgaataagtaaactatattgtagataatgagaaccaggtttcttactgttggagaaagaagttacagataaggaaaggggattaaatgaatgctgtggtattagatcagaaacagaagtatctgtataaactcatgtttttaaatatacacagatggaaagatacagaaatatagatatgtgtatatatatgtggattatgttat

SEQ ID NO: 187117 - DNA, 265 bp, Homo sapiens
gcctactagtgttgggactataggcacacaccactgtgcctggcctggacatgttttaaaatcatcctatattctgattcagtatgtgtggatagagtccaggaaattatgtttttaacaagtatcccaggtaatttttaccttcagggaagtttaagaagcactggtagtggaagggatggacttgtggagtcaaagcagtgagcttgaagtggaatgagtcgagtctaagataggagattgaagcaaaggattatggaagctg

SEQ ID NO: 187118 - DNA, 1189 bp, Homo sapiens
cccaggggagtggttcgcacaaaaggggacaacagacaaaagtaggaaatacagtccttggtctgaacaggtttaaattcttgatttgggggtaggggcagacagataagatttttagttctgaaagagtagagtcaagtgctaacatatatttcagacttgaaaacatttagaaaaatgagtgataggcttgtattggaaatctctatttagtggtaagggaggggattaacatttcctgcctcaaacttctagaaatcttctggagggtcacatacatgtcagagcattccagcataacaacagttgatggaccgaatgccctaaatgatcagactgagcagggacattcacagcatagcaaacttagagtttctcccccttgaagagttctttattcattggggatcacaggagatacagcttacccttgagctttctcaaaattgtctttctgtggtttgggaagtgagaagtgggtgaaaacacacttgctgtaacctcttggatttctcatattgctggaagagtaccctttctccttatgaaggaagaggaaactttttgttgggcaaattccaggccaaaaaaaaagctcttggattttatttttttttctatctgcctgtggaggagtggggatgatatttggttcttccattgagaagctacctctgccctcaaaggaaggtaaagttactatagttggctccacttttaataacactagtgacctagaagaaacctaatgctttcattttattattgagagaaattgggacccagagaagttaagtaacttgttagtattaaacagctaattattgtccgtgagtccctcaaatttagtatcctgatcactattccagttttttcctctactgttttgagatgcttatcttactaggaaaggaagtttgcaaacatttaaagagacttttctacctctggaatgctagctaatatgattctttccgctaccttatttcctttctaggtgctgaactgcccccttttagaagagttgttttgctctgcggaatgagcagaaacagagacacctcttttaccctttctctttgcctttcttttccttcacagagttctcatcagccatggaaaagtatgctgttaccataacaagggcagcagaggggaactaactgtgatggtctgaaattttgtctgg

SEQ ID NO: 187119 - DNA, 295 bp, Homo sapiens
ttttaacatccctattcctaccaacagcatgttcgtggcagtttaggttgttctagaagatgacgtgttttctctgccctgctcctcacctcctctgagtcctcaccgagggccttagcatctgaattctgccaacagagtgctcaagacaggctagggtttttcttttggagcgggtgggtgagttgtggacagagtcttgctctgtcgcccaggctggagtacagtggcatgatcctggctcactgcaacctcagcctctggggttcaagcgattctcctgtgtcagcctccc

SEQ ID NO: 187120 - DNA, 148 bp, Homo sapiens
gtgtctgatttctcaacattataatataataactcaattataatattataataacattcaacatagtgttcagagattcctccatgattttgcaagtaatagtggttctgaatacaagtccagatacaggtactgaatatatcttctc

SEQ ID NO: 187121 - DNA, 393 bp, Homo sapiens
aaaacaaaaacaaaaaatcaatcactctatgttgtcttgtttttgctattcagagtacaaacactcagaatcactgcatgttgaaagaggcagtcaagaaatatttttgatatgaacaaatcaagaactttatatttcaaataattaagtattcattaggcatcttatacaggactacaaaaggaagaaagacacctctgctcacaagaagctaattttgtctcaatattctgataagtcttcataatgtgctacattttataatgtgttttcacttgttcctcacaacagtccagttattatcctttcttatttacaagcaatgacatggaagctcagaataggcttcatacctactgtgttagttttagattcctaggcctgctgtaacaa

SEQ ID NO: 187122 - DNA, 160 bp, Homo sapiens
ctattttaatatatttaaaagcactttttaagcctacttcaaatttcttgtaggattaggagggataaaatacgaactacaaagaataaagaagctcggtcatttattcaacaaacactggctatctaccatactgtaagtaacattctaggcacctggg

SEQ ID NO: 187123 - DNA, 310 bp, Homo sapiens
tggtattaaatgacagctgtggaactgtaatcttctgtgataacttcccttgctgcacgttctcaaagaggttaagtcccttcctgtgactgactaatgctggtgcatcttttactagttttaacttcttttttgtttcttttactaagtgtatgaacaggaagatttcagaatctggggtaactctgccatctaacataaagcctccagagtatctgtagatgtggagatgagaagggtcagaagtctcatgcgatgtggtgtgtccctaaagtagcaaagcggagtcatttactcaatgcggggaggg

SEQ ID NO: 187124 - DNA, 353 bp, Homo sapiens
gcagtaattaaaaatggtctagaaaagttagtaataggtagatataccacatttatcttactaaaattctcttatttctttaaaggcttgtcccattttttttcattctgaacctgagaaatcatgctaattaagggcatagtctacccaaaccacactgtaggataaatctttttttgtttttttgagacagagtctcgctctgtcactcaggctgtagtgcaatggtgtgatctcagctcactgcaacctccgcctcctgggttcaagcaattctcctgcctcagtctcctgagcagctggggttacaggcacctgccaccacacctggctaatttttgtatttttagtag

SEQ ID NO: 187125 - DNA, 217 bp, Homo sapiens
gtgcacattaaagaaccacttgaaaaatcctgagtctggtgcagccttgtaaacaggcaacttaaatacatcctgatgccatatgaatagtggtacttgcatatagggtataggcggggaaatttcaccagggagctgacattttgatgaggccttgagacgtatctattaaaacctgatgggggatcatcattcttggcaggaagggcaggcactg

SEQ ID NO: 187126 - DNA, 127 bp, Homo sapiens
caccaccgcgtaccatgacaggctcacaggaggcatttattaagtgattgctggctgatgtcctcacgcttccacctatgaccacctgtggcttattcccattttctaggggagcccctgaggctca

SEQ ID NO: 187127 - DNA, 306 bp, Homo sapiens
cagcaccattggttataagatatagtcaatttcagagattaaactgtgaaaaaagtacatcttaaaatcagtgagatacagtgttttcatttgtataaggatatatttgggggttttgattgctttaaaaacatttacctttattctgtatcctttactcctagccccaggtgcatgtcagtaattacccacagactgcctttttcaagatctacttaagagttttagcgcatagcagaaagaaagattaattgccaaagccattaattacagatggctttgcctagttagtgctcctaattagtt

SEQ ID NO: 187128 - DNA, 401 bp, Homo sapiens
ttggtgccactctgctgtgcccagcatccagcacttcctaaagaccaatgcttcccaaagtgtggtcttcggaacagcagcatctgcctcactggggaatttgttaaaaatgcagattctggggctccactcagacttactgagttggaaactctaggagtggggcccagaagtgtgtgttttttgtttgttttggtttttctgagaggaggtcttgctggaatgcagaggcacaatcatggctcacggcagacttgaactcctgggctcaagcaatcctccggcctcagcctcctgagtagctgggactacaggcacacactaccacatccagctaatttaaaaaacatttttatagagatgagagtctcagtatgtttcccaggctggtctcgaactcc

SEQ ID NO: 187129 - DNA, 263 bp, Homo sapiens
attgcctgaggggaaaaaaaacaaaaggatcacctggaatgagtttgtagagattcctggctccaactcacacctactgaatcagaatatccaagtgagaggtctggtctcgtctgatggtcactaagcaagccaggtgactcctattattaaggaaacttgggcaaacactgtgctaagaaaaaaatttaaaaatctatgcacagttcaacagagcagagagaaacaaaggcctaaaatctgacagggggagtgagggattt

SEQ ID NO: 187130 - DNA, 444 bp, Homo sapiens
agggcacggcagtgggagctgcacctgggtggtgcttgttgcccggtggctgcagctccgcacagggctcattgctgtccctggagaggctgagtctggtaaaccaatttttccctttgagtcttgttgcaaatggatgcatttgaactgtaatataaagtattgtgtttatttaaccctgcaaacggatctcctttgtctttgtgaactggctgggcagctaaagacccacattccttccacagttaataaaacttcttatttttctctgtgcttataactttaattacactcagactcatttagtctacttcagtttttcaaaccacctaaattaaaaaagaaacagcctctctcaatgtgcaacataatcatcatctttagattaaaagacacaaattgaaaacgcatcttgtcagttttgtcttcaaggcgtcatcttaa

SEQ ID NO: 187131 - DNA, 166 bp, Homo sapiens
tacatgatggttacatgagtgtttatgacacattgctatgttttccatttttgttttggttcatttctaagtgtgcagtctagctatatgataaaaattattaattaggagaaatggtccatgaaaattattattactctgctcattatatactgaagggaaaaat

SEQ ID NO: 187132 - DNA, 654 bp, Homo sapiens
cctgaaatcaactccatgtttgagagaaagatgtagaagtgttattcatgaccgtcccatcccaaagtggcttctgtgaagtagtctcatgtgggctctgctagcttgtccagggccatttctatttgtgctaaaatgtttgaaaagaactctgggtttacattttggcctggaagatttgtctccttctgaatagtggttacttataaaagtagttcttcccaacttagagaaatgtaaccttttttacctatgtaattaatgccacctctaactcacttctgtaatcaatattgttattttatgtctctgacagcatccacacactgattttgacactacttgagttatctttgtctccgtatctctagcctcaatatacttatgttacagaatgaatgaactggcctagaattaagtaactagataatctcaatctctaaaatgcttccaaactccctaatttaatcatagattcaaacccaattgtttaattcagtcaaatcaattgctttgggagtggtgtagtcaaaacaaccagttggttgactaaaagatcctggtttctgctggtatgtgtacatgtacccacaattgcctctttttggcattggctgctactgggtcattaacaccagttagctaaataaaaga

SEQ ID NO: 187133 - DNA, 469 bp, Homo sapiens
ccacatagccagttaaacaatacatcctggacaatttgatacaaattgtctatgcttctcattttcccctctacttcaggaatttcagagactgcttgatatagtggttaagaggacagaacctagggccacactgcctagatctgaatcctagttctactacttaccagctgtgtgatttgggtaaggtgcttaatgctctgtctcattatacgcagctatgaaatggggacgctcacaggctgttatgaggattaaaggaattattatgtgcaaagttcttagaacagtgcctggtacataagtactatatgagtatttatcaaacaaacaagcaaccccactctcctcccctggctgggttatctttaccctgctcctaactcacagggcacatcgccatcactgcattcatcttgcactgtggtcatctatttaatggtctttgagctacttgaggcagggattg

SEQ ID NO: 187134 - DNA, 340 bp, Homo sapiens
ggaaaatatctaatagaaagtcttcccaagatgacctaactaaaaatatgtgataagtaatgaaatgaagcctggactagacactacgccttccagctcccaagtcttgtgtctgttcccttttaccatactacttacttgccctggcttaatttaagtaggcaaagcatcattatggggttcaggaaaagatacctgaaattcagagatctggagttaaaatctccctctcaacatggaactacttgggaaatttctgatcaaaatttctaaccaaaacttttttttttgagacagattcttgctctgttgcccaggaaggagtgcagtgatatgatct

SEQ ID NO: 187135 - DNA, 444 bp, Homo sapiens
agcatccctccctccttgtgaaaagaccttgaccacttctctcttgctggtctccccgtagcagacaacggctcgcctcccagtgccacaggaagaacgtggctgcctcaacatgagcccagccctgccactccaggtgtgagacctgggcaagcagcatcagtcttgcagccacagctttcttgtccatccagtggacctagggctattgtgactataaatgaaaaaagaacctaagacagccctggccttaagtagttgcttaaaacgtgatggccggcatgatggttttttaaacatttgggtcccctgctctcttcccccatgtttcctagtgtctgggttggaggcagccttagccaccttcttcttaccttgccttccctccttcctacctgtgtccaggacaaaatgcctgaggaatgtctctgcttcattaagcag

SEQ ID NO: 187136 - DNA, 241 bp, Homo sapiens
aaaaagtctcctatctttggcttttataatagagacaactggaaaagctcagaaaagatcctacctctgaaaaattatttttctttaaaaaaatcaagagacaaagcaattgagtttagctcccaatgcataaaaataactcatgatgtcacctccaagttaggcaaaattccttgtcacaaatgttcaatatgtgtagccaggatacgagataaaagtaaaaaccagaatgctaggcagc

SEQ ID NO: 187137 - DNA, 125 bp, Homo sapiens
ggagttgtggtttccagctcttaaaaatttgtcacattgataagcatgtaaagaaaactaatatttctttagcaacctcagatggcttaataaaagcagctgattttgcagggagggtagcaggg

SEQ ID NO: 187138 - DNA, 683 bp, Homo sapiens
attaatagagcagacttttgagaaagtaggagtgtagtagcactggaaacagaatgcaaatttctgttccataattaggtttattgtagctatagcgctcccagataacccatgtgtgctagtaatatctattgtgtgctcttactatggtataaaaacctcgctggaagctacttattttgtacttaaatattttaccaatttttaaaaagtcttaatccaatgcttataccagtgactgtttttataatacttgaagtaactttaagaactgaaacaaccctggaaaactctacatagctagatagtaacaatacttgtataagaaaccaagtttccttattcccagcctggtgtctgtatcgtgacacactactctgtgtatgcttggttttagactaggaggagagtcctgggaagggcaatattacagaagttttcttccacatgaggagaatgcttagtttcaaatttaaatacatgtgtcagatggaaccctgcctaactcacttctacaaataacttccccaaaatcttagaaggttttttagaacatgatataagctttgtgacaaaaacaaatgccattgtgtcccttatttagtcataaaaccttaggattcagctgaatatatattcacacatgtatattacacatatatcactatacagttaacacatgc

SEQ ID NO: 187139 - DNA, 273 bp, Homo sapiens
ggactgatgcaatgaatgacaggagggcagagcagagctcctgcagggaaggtgggttgggacagaagacccccctccccaaaaccaaacaagccagtcaaccttgaactgccgtagaaaggagagggagatgggcgtggtgactcacgcctgtaatttgggaggctgatgtgggtggatggcttgagcccaggagtgtgaaaccagcctggccaacatagcgagactctctctacaaaaaatacaaaaattatctgggcatggtggtgcatg

SEQ ID NO: 187140 - DNA, 570 bp, Homo sapiens
gcatacaatgcataataatcacatcagggtaaatgagtatccatctcctcaagcacttttcatttctttgtgttatagataatccaattatactttcttagttgtttttgtcatttatttatttttaaatttatttttccataagttattggggtccaggtggtatttggttacatgagtaagttctttagcagtgatttgtgagattttggtgcacccatcatccaagcagtatacactgcaccatatttgtagtcttttatccctcgcccacctcccactcttgccctcaagtccccaaagtctattgtatcattcttatgtctttgcatcctcacagcttacctcccacatatcattgatgttataaataaatatttggtgccgccaaagaaacagcactcgaacataaatttaattttctcagcaaggtaattttacttctatagaagggtgtgacttgcggatggagcaatggcaggagcacacctgaacaagggaggggaaggggttcttattcctggtgcaggtagcccctactgctgtgttattcccctattggctagggtt

SEQ ID NO: 187141 - DNA, 216 bp, Homo sapiens
tggtctcctgtttcaggctggaaattgagattaataagattcttgctcttcgagtactgataggaatccttttctttgtggttgttgctgtttactagaatgaatctaggagtgagtgggagaagagttcactgtacattctcacacacgtttggtggaattgtttgcagagctcagtggtttgaataatacagtgttttgttcatccagaatttg

SEQ ID NO: 187142 - DNA, 565 bp, Homo sapiens
gtcacttgtcatccctatgttttgaaatcaatctccctaaactccatgtcccccaaatgtgaacagagtgtgttcactttgtctcagagagttgccacaagtgttccatgaaataaaacatttattactatgcttgactataaatatttattgaatttgaatgaatgatatctatttttaatcatgtctacaagactctaaagtctagattcaaaatattagcttcataatatttaattatagagtgctatatttttcattttgatagatgtaatttatctaagaaggttatattaaataatatttgggggataaagggttaaaatgaacttaaaagaaatttcctcttgttaaatctttcaaatatgttcttttttttccaaaaacaaaaaccaagctggaaattgtgatttcgatccaatttctaatataaattgttatcacagaagcaaaacttacgaaattaaagattacttgttcttctattacataggcataaaacactgaagttgttttgttaattactatataataactagtacaaatccagtatactaaaacctaa

SEQ ID NO: 187143 - DNA, 183 bp, Homo sapiens
aagacataagagggtcagagtccgacataaaggtgttgagtctttctgattacaatgccattgccaagtatataagcagttctgttcagagataattttcacactcaacaaatatattctggtaggtcttcactaaattaagattatttaacacaatatctaatctatttgttaagaaatgag

SEQ ID NO: 187144 - DNA, 196 bp, Homo sapiens
tgagttgtgagcacatgtaggggcggtaatgagtctgaaaaaggatatgagagaggaaagattaccttagggattttgatcaggaggcaataggaggtaaagtgtagtgtttggagacgtttgaaccaaatgaatttggaccaaaaaaaccttttagcaggagaagtaacacaagaaacatttctggaaaattaac

SEQ ID NO: 187145 - DNA, 507 bp, Homo sapiens
taagccatgcaaaccgtggtactttgttatggtagcccaagccagctaatacagaaaggccagcctgtttaccaatttatgaagaccagcctgacagatctattattacatggaaaactctcattaggatgctaattcatatgaaattggcaagaaaggaaatttttgttatgtaaaaatatatgactttatgtacccatgtattcctcagtaaagtacctacacttgataatatttataatatgaaggtttaatttacatctgactccaaacattatctaagtctcagttgtggaacaagaaatagatgacagaagggatccaggagtctcacatttaaaacaggtgagtggaagtcagtggcaatgtaaattgtaaacatctaagatatgatatttatgtcctttccatgaattattatgctcatggatatcagtagactattcattttttctttaaaatcaatagttgtttcctaaactccaaactctgaaaagataaataagg

SEQ ID NO: 187146 - DNA, 504 bp, Homo sapiens
tctgtgagactttttagggatttattaacatgatacacaattagcaaaccatgtgtttatttcactcattttaacaaatatccatgcctattatgtgccaggaacttagctaggtatcagatgtgggattgagttttctactgctctggcagttcatagttaagggcccagggtgaggatgactttgatggcaaatgaatggatacaggattcataaattttatgaacctaaactaaatgagcacttgatcggagagcttaattttcagaaatgcaacttctttatttgttttgatttgttttcttgagtcaaagtctcactctgtcacccaggctggaatgatctcggctcattgcaacctccgacgcccaggttcaagtgattcttgtgcctcagcctcccgagtagctgggatcacagatgtgcaccaccacgtctaatttttttatttttagtagagacggggtttcaccatgttgaccaggctggtcttgtactcctga

SEQ ID NO: 187147 - DNA, 270 bp, Homo sapiens
taatgttcacggtacagaagtagctgcaacgaaagcacttgaccaaggaagctgcaagaatagaatgttttgatcaaaggatgtttctgaattttttaaaaattatgtttaaaggtgaaacacaatcatttcataaaatccagggaaggctgggtgcaggtagttacgtgtggtgaaagcagaaagacatgactacattttttgatggcatctatttcctcagtgcaacagaagcaagttcatcaaatcagatacatacggagagtgagg

SEQ ID NO: 187148 - DNA, 184 bp, Homo sapiens
ggcaaaccagagaatacagtacagtgggatcaatgttataaacgtatgtacattgtactgtgagaacacaggggtgaggaagtgagaggagtcaaatatggccaaactatagagagtaaaggggaaagtggcataaaagtaggctggagagtttgggagaggtcagatcatatgggacagtttg

SEQ ID NO: 187149 - DNA, 439 bp, Homo sapiens
gagattacaggcatgcaccaccatgcctggttgatttttgtatttttagtagagatggggtttcgccatgttggccagggtggtctcaaactcctgaccttaggtgatccacccaccttggcctctcaaagggctgggcttacaggcgtgagccactgcaccaggccatcataggtaccatcatttgaaatactacagagctgtaaacatggttgacagaatggtctgaagtaataactcatgtcttgctggaggccagcaaattttttttttcatatatatatagttttttaaattatactttaagttctagggtacatgtgcacaatgtgcaggtttgttacatacatatacatgtgccatgttggtgtgctgcacccattaactcgtcatttacattaagtatatctcctaatgctatccccacctccccccaccc

SEQ ID NO: 187150 - DNA, 635 bp, Homo sapiens
cacaaagtgccaaatacgtacatcataggattatactcattcagaacaggtaaacttgtcatctaatctaatgctgaagagtgaaatgctattattttaaatcaaaatatttctaggcttgtgatttttttttactgttccaacgaaaacaaacaactctcatcattttgggtggtttcataaagaatggaacttctcaattctatctgcagaattctacatctgtatgataaaatgtaaaatgcccagccttagtagcccttaacttctttctggctccagttacccaatcagaagtgaggcaggtaggactttcctgtataaattcagaggcagttgtgagaaataaatgaaatcctggatgtgagaactggaaaatgtaagggcccggagtgatgagggtggatacgaatgtgctctcaaaatcaatcttaaaaagagattcctggaacctctatggcccctatgcacgcaaacaaacctcttacctccactttgtctattagatatgatgaatattataattccttgcattatttcctttgtctaagtacttgagtccaattttgggagcaaagtgggagaggaaatcattacagaggctgtttagatgctagattctgatgaacgtgaca

SEQ ID NO: 187151 - DNA, 444 bp, Homo sapiens
gatttgaaccaagatccttccattacacaacactgaatgaactcaggagcgtgtgtgtgtgacagagagagagagagagaaggaaaaaagacggagaagaagagacaaggagacgaggacagaagacatcttggagatgggtttaggaagaagtcaaaaagggacatagagatgggagaaacactgttagggactggtatgttgggagacagtaaaagatttcaagaagaaatgataaccatttcaaattctttggaaagatcaatcaattaaagaactgaaaaaagtcttttgagttccaacaagatcttttggtcaccttggaaacagcagtaattagcaaagtagtggggagaagctagtgtacaacaggttgaggaatgactaggaggcagggatgtggcaatgatgaacagactactctttcgagaatcagctgtaaag

SEQ ID NO: 187152 - DNA, 731 bp, Homo sapiens
gaaagatgaaggagacattaactcttcttctgaagcacaaatcagaacagatatttttcacgtgttgagcatgtatgtgccccacctgggtactgggcagcatttctgattgaacactgccacagtgcttgatgcaggtttacgtgagccccaatttcacgagggggtcccctctcctccctccctcggatgtctcatgtctccatctgcactcttagtggcctggtctttctctgagacaattccaggctggttcccctgctttgctaccccccacaacctctcccacaccattgcccagctcccaagagctcactgtggctgaggaaagggggtgccttgacacggagttcccttcccatgagggtccccagacacttctcctggaagagctccaccaggacccctgccacatgcgcctgttggtgcagggaggagaggggagcaggttgtgtctgatgtgggtgtgtctgtgtgcaatggctgcttgtatccttgtgtgttgtgtacctgctcagcaaactgagtcctgtggccaagaatgatcctgggcaaaactgaacacatttaacccaagtttgatttcaactcaacactttcccattgtgcctccttctcatcccaaatgtgccaaatacttctaatcttagtattcgttctttgctttgtctgtcaggtcctgttctctacgagtgaatatcctaaggaccataataaagccagttcccttt

SEQ ID NO: 187153 - DNA, 398 bp, Homo sapiens
aatggcgtgaacctgggtggcggagcttgcggtgagctgagattgcaccactgcaatcttgacaatccactgcaatccagcctgggcgacagagcgagactccgtctccaaaaaaaaaagaaaaaattagccaggcgtggtggtggtggtagatacctataatcccagctactcaggaagctgaggcagtagaatcatttgaacccgggaggcagaagttgcagtgggccaagattgcaccattgcactccagcgcgaaactctgtctcacacgcacacacacgcacacacacacacacacacactccaggaggaaagaaaataaaggacaaaaagtgggagaaacagatgaaacagaatcaacaagctactgacaagtgtggaagcttgatgaggca

SEQ ID NO: 187154 - DNA, 362 bp, Homo sapiens
ttctacgtcttccgtatatttggttcctcttgttttccccaccaaatcaaaatatctctgttgcttcacaacactggagcacttctgtggacagaggtagaatggatccagtccctgtaattccctgtcaggtggcaatccaaagccctcccttcaactatcttgttggggagttcatgaggccaccctactgcctgctccattaactgagacttttctgaatagcttttacagccctgcatcattagcctgattctacctattcaatgtgattttcctcttctccccaacattcatcctctgttccaaaccagctgttcttacttcttcacattccctggtctttcccttccctgtgcctg

SEQ ID NO: 187155 - DNA, 440 bp, Homo sapiens
agactgtggcatgacttttctcagtttgtagtacaccttattcatattctctaaaagcacctcagttacaaagtgtctcagttgttgctttttctcagcactggattttaagaactagtctccttaaaacaagaaacatcaaattaaatgcctttgttaaatgaacaaagtatgttcagctttgagatttatcatttgaataaaattagagtgtcagtgccagacacctacctacgaaatatttaaacatccttgaagtggacttttggcttttggatactccctccataccttggatgggtccatgtcaccgtattcatcgtggagtggattggtctgaggagtgacttgagaagacttcaaaaaatatgactacaaaatgttgtttacaggtacaatcctgtttttaggagattgagaactaggctgtgtgtattatt

SEQ ID NO: 187156 - DNA, 497 bp, Homo sapiens
ttgattacctatttaaaaatcctgtctccggccgggcacggtggctcatgcctgtaatccctgtacttagggaggctagaggtgggcggatcacttgaggtcaggagttcgagaccagcctggccaacatggtgaaatcctgtttctattgaaaatataaaaacgagctgggtatggtggcgcatgcctgtaatcccagctactcaggaggctgaggcaggagaatcacttgaacccggaaggtggaggatgcaatgaaccaagatggcaccgctgttctctagcctgggcaacatagtgagactctgtctcaaaaaaaaaaagaaagaaaagaaaaagaaaaagaacctgtctctaaatacagtcccagtctcaggtggaggtcaggaagggctttgccataggagtttgagagggatacagttcagccatgacagaatgtgatgaggaggtgcaggctgtctctccacctgtcacctgtttacaaagctgatctc

SEQ ID NO: 187157 - DNA, 204 bp, Homo sapiens
gctcccacccccggccagtggtcagtgcatgtgatgtgtaaagccacatttcaccagtaggggatgccattgaaccccctgtaaaagcaaaacacacttcactggctccctgctcttgagacacgaccacgcccagctatttttttgtatttcttgtagaggtggagtttcatcatgttgcccaggctaatctcgaactcctgg

SEQ ID NO: 187158 - DNA, 118 bp, Homo sapiens
gttggttgataattttatggtattccattgtatgaagatactggtctttacttaatcagtcctgtattggtggaacttagtggacatttgttttgtttgttttttgcattaagaaaag

SEQ ID NO: 187159 - DNA, 430 bp, Homo sapiens
atactgaattttctggtcctgggtcccttcactcttggcatacatggcaattataacctggcccttcagagtaaagagtcacttagcatgaaaataagactatggatcttggggccacaatatcaaaaccaataaaaataattaacatacaaaactgcatcttgtccctgatttggagtcaaaaggctggtattcaaatcctggttctgtcagttctgtttcaatttctacccaatgggaaaagtctgtggatgagtatagttgaaatcctggttccttccaagttctaaaattacatgaatgctctctagggaaaatgatttagaaaattaaatataaatgccagattatgcaatgattttaaaatagaaaaggatgtataggtaaatgctaattagtattatcatttaattccaaaaatcaaaatttt

SEQ ID NO: 187160 - DNA, 559 bp, Homo sapiens
aataacaaacaagaaaggatcagaactcctatgcattgtgcattacacattgcagatgctgaaaaaatgtttcattcacagggcagacactcactgagcgctctgtttgttttattatttatttatttttattttttgagacaaggtctccctctgtgcccaggctggagtgcagtggcaccatcttagcttactgcagcctggaactcctgggctcaagcaatcctcccctcctacgtagctggggctacaggcacacactaccacatctggttaattttttaaactttttgttgagacagtgtctcaccatgttgcccaggctggtctcaaactcctgggttcaagagatcctccagcctcagtctcccaaagtgctggaattacagactttgtgtcaagtcagaagaaattaaggcaaggggcacttccaaatctgttaagacccattcacctgcatgtgcagttttgggatttgctcctcaaaaactctgagcactcctagatgaatcaagttcaaaaatattctgttagagaatctggcctgagtaaatagaag

SEQ ID NO: 187161 - DNA, 305 bp, Homo sapiens
acgagaattccttgaacctgggaggcagaagttgtagtaagccaagatggcgccactgcactccagtctgggtgacagagcaagagcgagactccatccctccccccaccccccccaaaaaaaattaacctgaaagggcttgcgtaagcaccacctttctcacctgtggtgacagtagggaaatgaggtgttctgtggagctgtcacaagactttcacaaatcagtttagataaggattctggcttcaacttttggtagcacaaacaagtgtcaccttggtgtttgctgctatatacagctagtt

SEQ ID NO: 187162 - DNA, 599 bp, Homo sapiens
ttataactctagcagcattgctgcattaataatttaagaaattaaaaattaatgggatgtctacaacttgccacagtgcttggcttatagtaggtgttcagtacgtttatgttcaatgaattactccaaatgcatgttgtagaaatttacaaaatctgatgagttaggttttccccctgtagcgagaaggagcaaacaggaggtttatgagatgtgctgcctccttgtgaggtagtcagtagactaaaattgcacatttctggcctagaaaatatcatagatcattaaaaatctttggtccaccttttgagactcactgtctctcccagtacccttcaagttttgcaaagcctcattacgtgaggaatccagacagttttgacagacagtgctattgaggtgggcataactgcctcttagcaagggacagcaggatgtcccttgtagtatagattgtacatatctattgtagatcatatgtgtctgttgtagtatacatctataatacaggaccataactcgaggaatatatggggtatgtgggactttgagaagacagttctgtataacaaacacatgacatttaatagctgtgctac

SEQ ID NO: 187163 - DNA, 394 bp, Homo sapiens
tgtaccccctttcccctccaagtataagggcagagttttggatctgtacacagtgtgaaagatcaagtggtcccagagaatgacaacctggctgtttcccagccccaccaaccaggagacatcactcctagagaaaaaaactccacttcccagggctaccccaggatttcagttcccactttggcaggccccactggagacttccagaaaaatcagagaaagctctttcctttggagttgtaatggtcacaacaccctgcacacagtgcactgagagatgttgaaagctgacacaccaagaagggatggtttgcctattagcttctagctttcttcctattgccaagtgagctgaatgaataaaccagcccaatgaaagtgaccagccagctat

SEQ ID NO: 187164 - DNA, 424 bp, Homo sapiens
tgacccatggggaggataccctagagatctaatgagcctgagagccgcaaggcctggaaagctgtacaacaagggaagcagctttggaacaatttttcaggttttgttcttgtaatcttttatacttccccctttatctcagtaatatcctttatgtttcctcctgcctttatttgctgaatattttattttcactactgttttatagatccctaccaagaagaaggatgaagaacttaatagcaaaagacgagcacaattgccagagatgcgagaagaaaggacctcacacggttcttgacttttctacagagctcactgcacattttcccactaaaatgttggggttccactcccatcacccagactggagtgcaatggtgcaatcttggtgctgaacctccgcctcccaggctccagcgat

SEQ ID NO: 187165 - DNA, 380 bp, Homo sapiens
ggaagtctggcagttgccatctcaaccaagcatcaaatttggcatccctaagggtagggcaagctgccatgctgagcttcccaggtgatgtcatataaggtacacaccatcactcaggaagaattcgcaccacaagaatgtttatgctaaatctaactgagtctctagacccaaattccagttcacggggaataccaaggatagaggaacaagtcaaacaaccccttaaagaaaagttcagacaagttcagaatgtgagacatgctatatgaaaactcccaaggacttgacaaaaagtcttatcacaggggatttttttaaaaattctagattttctagattaagagactaaaaacaacataatgcagtacataaacctt

SEQ ID NO: 187166 - DNA, 313 bp, Homo sapiens
aggtagggattcgaatttaggctgctatgctcctcatcttccttcctctctctctgtgtccctcccaacatcaccctctgcatagattcatgagctgttaattttgtccgtgatgctcctattgctcctctttttttctgattttagttgaagtgtcacctcccagagaagccttcctgattggatcaaatgcccggcccgggcaccaagaattaaagttgaaactttaattctgtccgtgtgatgttgagtaatacccatttcttccactggattgtaaactccctgggggcagggatggcgtctgcttttt

SEQ ID NO: 187167 - DNA, 176 bp, Homo sapiens
ttatcccaagtagctgtcagaatgcctttaaggtaggctgccttgttggagaggccagtgtgctaccaagcaagttacaagaagatctggaatgaggcagactggatttgaatgaaccctgttctgccactttctggctttgagaccttaggcagttaggacctctctgaccctca

SEQ ID NO: 187168 - DNA, 251 bp, Homo sapiens
cttatacatatttgcttattaaattgggtaggaaaagaaaggagaaaaaatgtgccttttttactctctcgtatcattgcctttacccacaataattgtggatttgaactagtgtttgaaatcacttgttttcaccctaaagaacttcttttctttcttttatggttagtgtacttgcaatggattctcaagtttttttggtttctatttgttttttaatttgaggattttaaattttcaccctctgtttt

SEQ ID NO: 187169 - DNA, 193 bp, Homo sapiens
ttttgtagtatccaataggcacacacatttcattagtaaataactgtgattattcctcatgctcataaaagggtttatgagaaggaaatttagccaagagactgagttttccaaatgagactgtttaaactgtcacagcaagatgctggatgggcaggtttaatgtttaagttgtctgtgtcttctccttccc

SEQ ID NO: 187170 - DNA, 253 bp, Homo sapiens
tccacaggaggagagaaacctgagttttaacagataagatagcatgatgtttctcatttttaaaagaggtttacacattaaccattactcatcaattcctaaccttgatgttaacaaagaatagttttctgaccagacagagccctttttctcccccagagacttcatccaattaaactaaactaggtgtgcttctttagtacatacgtagtgtagcataactgctatttcttcgtgcatgtcttgaactaca

SEQ ID NO: 187171 - DNA, 623 bp, Homo sapiens
tgctcccttctactacacatctaaagacataaagtaaccatccgtaacagatggctggttactatggtccaaataatagatggtccaaataaattcaaaatctaggtaatgtatggtaagacctcctaaaacaatcattgtattaattttaagtaaataagagccacaataccaaatttgaattgttaaagaatcccaaataaatatagagtaatcaaatcctatatagctgacatgataaaaacactgtatgaaacaaaaagaaatgaatgtcaattgacatcctatcctaatacttgaaggttcatcaagaaaactgaaacataaattttataataatcatagatacatctatttaacctacaaatcacactcctctagtcaatgtttctcaaacttttttttttttttaggcagggtctcaaccttcgcttccccagctcaagcaattctcgtgcctcagcctcccaagtagctgggattacaggtttgcaccaccatgtctggctaattttttgtatttttactagagacagggtttcaacattttggccaggtgggtctcaaacttctagcctcaagttatctgcccactctggcttcccaaagtgctgggattaatg

SEQ ID NO: 187172 - DNA, 133 bp, Homo sapiens
gacggtgctaggagacaggaggtcgggtttgcgggagaggacggtgctaggagacaggaggtcgggtttgcgggagaggacggtgctaggagacaggaggtcgggtttgcgggagaggacggtgctaggagac

SEQ ID NO: 187173 - DNA, 478 bp, Homo sapiens
tctgccatgccaactgtcaccacagaagaaagacccttacaatgtggaaggtaaaagttcaatttctaagctctgggcctgttcttcagaggctaaagaatctcctcatctccagtgaagccatccctggaatccctcactgattcagctggagtatggaggagcttaagttctaaagacctattcacttcctttaattccacctatacttcacaactgagaataccacaaacagttgggccctagaagaaagaagagctcacagatcttgcacttctaggtctgaattgtccaagtgaagaacgctcatttactccacatcccacagataactatctctcaagtgatcccagtatgaaagtctggagtatgagtataatatactcactgtaatatctgagtacaggaagttcacttcagagtcttcattctctcaaataagacagacacttttgataaagattattttatttaattg

SEQ ID NO: 187174 - DNA, 116 bp, Homo sapiens
agacgtgatggttggtggttgtagtggtgaattatttctaaagtttctggagctatactgcctctatacagaatggtaagttattagttaggtgagttgtttttctgttgttttgt

SEQ ID NO: 187175 - DNA, 222 bp, Homo sapiens
agaagcaatatttcctatcaaagacttttcctttgttgtatgtaataatttcccctgactcagcactataaggatctgaatgtttttcttctgttacaggaagcgttggtaacccggatacagaatcaatcttataaagcatcatataacaagaaagatcagtcagacttagtcatgaaagacaggagccagattaaaaactaggtattttttgttgttgtc

SEQ ID NO: 187176 - DNA, 148 bp, Homo sapiens
aagaagcagcggccacagcataaactatcaagaatgtccccaatattcccaccaaaagccccactgacttaaaacaaacaaacaaacaaaaaaacacacacacacaaatatacacataggttacaaattaaaactgaacagaatgata

SEQ ID NO: 187177 - DNA, 241 bp, Homo sapiens
ccagtccaggcatggtcagggcttcctatggctgagtgatgacgatgggcatttaggagaaggcaccaaaatggcaggtgtgggagacaccttcattcctcccacagctattgatctggtatctaccaggtcctgggcacgtgcaaaagtcatcagccagacatgtctgcagatcttgttttctctttggaaggacgtagacattgcccgaaagctactttactctccaggcagtgaatgg

SEQ ID NO: 187178 - DNA, 465 bp, Homo sapiens
tggttgctcaacaatgtcaatgtactcaacatttcaaaacagcacacttaaagatgggtcagacagtaaatcttatgttaagtgtattttaacacagttgcagagaaaaaaaggcaattacaaactagattatcacgatggctgcatactgtatggatttactaaaaataattcaactgtacactcacagtgagtgagtttcatgatatgtaaagcatatgtacatgaaatggtttttaggaagacaattacatacttggctatccctgtcattgaaaggaccacagttatgtgtgtgtttttttctgtgtgggattcccagcatcttaagctcgaaatgactaaagtagcgaggttgagtcccataaatcatgatctgccactgcaaaagtattgcccctttggacctctgtttattcatgccaggaagcaaagtcgactgacttggtaaccacagctgcttca

SEQ ID NO: 187179 - DNA, 301 bp, Homo sapiens
taatacacttataaaaaattagccggccatggctaatttatttctcacagatctgcagactgggaaatccaagatcaaggcccatggcatgggctggctttctcacagatggtgccttcttcctgtttcctcacacagtggaaggggcaaggaagctcctttgggccttttataaaggtaataatcccactcatgagccctcatgacctaatcacctcccaaggtccccacctaccaccagcactctagagaagatgatttcaacatgaatttcaggggcacacaaacattcagaccaggg

SEQ ID NO: 187180 - DNA, 538 bp, Homo sapiens
tccggctcccatattcaagcaattctcctgcctcggctccccagtagctgggactacaagtgcgtccaccaggcccagttaatttttgtatttttagtagaaatgtggtttgtcatgttggccaggctggtctcaaactcctgacctcaagtgatccaccggcctcggcctcccaaagtactgggattacaggcgtgagccaccgcacccagcgcaaatgtgtttttgtatcagtctgtgtctgggtgaacatgaaacctgggcgcatccagctccatcttatggcgtagatggaggcttggctgtgaggtgtacgcgtcggtgtgtctgtgtctgagcaggtcaaaatgacccttcattgtgtcctggtgtgtatctatctgtccacctcaactccatgtacgctgttacgtggtgtgtgtctctgaatatacagggacatttaagtttctgtgtgtgttggcatcagcctagatgtacattgcgtcgctaggtgtttgtaatcaatgtgtacatgtgtgactgtgtgtttatgtgt

SEQ ID NO: 187181 - DNA, 579 bp, Homo sapiens
tagctggatcaccctattccatacaggggacagcattcaaagttctgtcgggagcctcagattccttgtttggtaatgtaggtgtcagtctcgcttctgaaaaccagggttactgagaggtatcactgcatttaggaccctagtccttcctgaggaccccgatcgtatgttgtggcaatgcaaatgtggacccaaaaaacctgagacaggtctcagttactatttagaaagtttattttgccaacgttgaagacacgcactcatgacccagcctcaagaggtcctgatgacacgtgcccaaggtggtcaggcacaggttggttttctacatcttagggagatgtgagacatcaatcaatatatgtaggaggtacactggttcggtctggaaaggcgggacaactggaagcgaggcaggaagactcaaagcagggaggggttttccaggtcactggtaggtgacagacaaaaggtcgcattcttttgcatttctgattggcctttcccaaggaagcaatcagatatacatttatctcagtgagcagaggggtgactttgaatagaatgggagggaggttt

SEQ ID NO: 187182 - DNA, 622 bp, Homo sapiens
taaattttctgtccttagcgcatatgtatatgtgtatgcccctccccctgtttttgcttttctgtaccagggatcagctttctcccctcttcaccctcctcttccctttgctctagtctgtgtgctcgctcttgtccagggaacttacttttttatcttcacgtatgttactgactcctcactctgacttatagcagccagttagctgtggcctcattgctcattctgatggtgttctttttggattctgccaaatctctttcgcatttgtttttcacctcagtactccacgctgtcagcagttcagcaagccctttccaagctaatttttccccatttactttttaattagttttcttctcctgcttctccacccccttgtcctgcagttttttgtggataacagttgagagccccactctttcttatgtgatttttaagaaaatgtgggtgttgacaaaaagagtcaaactctgtaaaatatttgaagagatttattccgagccaagtatgagtgaccatggcccgtgacacagccctcaggaggtcctgagaacatgtgccgaaggtggttggggtacagcttggttttatgtattttaggaacgcagtcatcaaggca

SEQ ID NO: 187183 - DNA, 299 bp, Homo sapiens
tgctgggattacaggcgtgagccaccgtgctcggccaatcgaaaggatttaagcagaggaatgacctgctaatttgtcttaatacggttactctgctgtgtggagattagactcgaggagataagaacggcagcaagaatacttttgcattcatttggacaagatgaaattgcctggtatggagagaaacaaatatcgatagaaattgtgaaggtagaacaggaaggactggctaatagattgaatgtggggttttggtttaaataagatgttaagaaagtttcttggggaaggactaa

SEQ ID NO: 187184 - DNA, 982 bp, Homo sapiens
tgctggaattacaagcatgaaccacacacccagcctgttctctggcatagtttctaggaatgcacttcagcaataaccaggaacagtctgtactcacagacagctccttatctcaactgctaatcatggattccatttcctgggtaaacagtggtatcatctcacgcactactgcttctctgcagttccttcacactttgctgtggtttttcttttcagatgcccttaaaccatatttagggcattgtggcacagacccacctatctcctccaaccttacatttaccattaagtaggtggccatgtgacaagtcagtacagttgttcagcatcactggaggagtggattggcaatatgcaaagcggcaaaaaatggaaacgaacttatccaagagcttctaacataaacagcaatgctaagttgattcaaagcagaaatcagtaaagccacatatccctatgtgaagcaaaacagattttgaggtacatatacgacaagcctgagtaggaagttcagatgacaataactgatttactaagggattttggcagaattcttacccctgaagccagaaccacagtgggagcactagtaagcagttggggatgcctgtcttagtcattctggctacgaatgcctcaaagtcaaatgagatgctgtagcaccatgattcctaaatctgctgcctaagtagatgaatcagcagaaacacttattaaaaacccagattcccagggatctcaagaagaatccgatgcagtaagtttgagatggtggcctaggtagctatcagcagatgattcttataaccaggtaagtctgagaaagtcgttaataaacttaacagattttagaaccaccgataacaccacgaattttattttatttttttgagatggagttttgctcttgttgcccaggctggagtgcaatagcaagatctcgtctcactgcaacctctgcctgccggggtcaagcgtt

SEQ ID NO: 187185 - DNA, 633 bp, Homo sapiens
ttttcctttcttgtgccaagtgcttcagagttttcaggatatgacacgtaatttctccaagaacccagtaaaacctggtatcctgccgggcgtggtggctcatgcctgtaatcccagcactttgggaggccgaggtacatatacgacaagcctgagtaggaagttcagatgacaataactgatttactaagggattttggcagaattcttacccctgaagccagaaccacagtgggagcactagtaagcagttggggatgcctgtcttagtcattctggctacgaatgcctcaaagtcaaatgagatgctgtagcaccatgattcctaaatctgctgcctaagtagatgaatcagcagaaacacttattaaaaacccagattcccagggatctcaagaagaatccgatgcagtaagtttgagatggtggcctaggtagctatcagcagatgattcttataaccaggtaagtctgagaaagtcgttaataaacttaacagattttagaaccaccgataacaccacgaattttattttatttttttgagatggagttttgctcttgttgcccaggctggagtgcaatagcaagatctcgtctcactgcaacctctgcctgccggggtcaagcgtt

SEQ ID NO: 187186 - DNA, 571 bp, Homo sapiens
tgctggaattacaagcatgaaccacacacccagcctgttctctggcatagtttctaggaatgcacttcagcaataaccaggaacagtctgtactcacagacagctccttatctcaactgctaatcatggattccatttcctgggtaaacagtggtatcatctcacgcactactgcttctctgcagttccttcacactttgctgtggtttttcttttcagatgcccttaaaccatatttagggcattgtggcacagacatctcctcctacacagtgcaagggtggcttagacatggccagagatgttgaatagtttggtgcctgagcttgcgttctctgccaaagccagcaaaccaggtacctccacgcacggcagacttgtgaggggacactgccactgtcttcacgttgtccacagttgtggggcagccaaacactcccacgtctgcggggaaggaggggcttcaggcggcgtttgccctgcttgacgcctcaatgacatgcgatgagcgctgtctcctgctccacagatgtaggccgcagcacccgcagcaccactgatcacgtctaaa

SEQ ID NO: 187187 - DNA, 1011 bp, Homo sapiens
tgagacagggtcttaccctgtcacccaggctggaggacggtggcacaatcttggctcactgcaacctctgcctcctgggttcaagtgattctcctgcctcagcctcccaagtagctaagattacaggtgcctgccaccatgcccggctaatttttgtatttttagtagggatggggtttcatcatgttggccagccaggctggtctcaaactcctgacctcaagcaatctgcctgcctcggcctcgcaaagtgctgggattacaggcgtgagccacggcacccagccttgtcttggtttcttgttcaatcttctttgtctttactcttcctcttttctggtgacataccaagatgacctctcatcagagctatgcctcctttcccacacacccttcctcttttaacacctgctgtcttgcgcacatccatatgtgtttaaacagtccccgtctctgacgcgggctctcctcttgaagaataaactggaagaactctaaagcatggagctctttgtcagatgtggtattcttagacgacctcttttagttagttacatctcccaagatcttctatgatgtgatctcaaataactgttcaatggcacctcactcgctcatattattcccagctaaagagcccttcaagctaagaacttcactgagctgaaacctcagctcacgtgatttgcttcaaaatctaccagacataattttaaaaagagggtgtgtgtgccattagggtgatgaaaacgttctgaaactggattcaggtgatggttgcacaactcggccaatttactgaaaatcattcaattgtacattcgaaatgagtgaattttatggtacataaattacgcttctgctgtgcgtggtggctcatgcctgtaatcccagcactttgggaggccaaggcaggcggattgcctgagcccaggagttggaaaccagcctggacaacacggtgagaccccgtctctactaaaaatttaaaagttagctgggcgtggtggc

SEQ ID NO: 187188 - DNA, 1064 bp, Homo sapiens
tgagacagggtcttaccctgtcacccaggctggaggacggtggcacaatcttggctcactgcaacctctgcctcctgggttcaagtgattctcctgcctcagcctcccaagtagctaagattacaggtgcctgccaccatgcccggctaatttttgtatttttagtagggatggggtttcatcatgttggccagccaggctggtctcaaactcctgacctcaagcaatctgcctgcctcggcctcgcaaagtgctgggattacaggcgtgagccacggcacccagccttgtcttggtttcttgttcaatcttctttgtctttactcttcctcttttctggtgacataccaagatgacctctcatcagagctatgcctcctttcccacacacccttcctcttttaacacctgctgtcttgcgcacatccatatgtgtttaaacagtccccgtctctgacgcgggctctcctcttgaagaataaactggaagaactctaaagcatggagctctttgtcagatgtggtattcttagacgacctcggggaataaaccacttaacacagggagctggagtcattctctttggaaacagcttttagttagttacatctcccaagatcttctatgatgtgatctcaaataactgttcaatggcacctcactcgctcatattattcccagctaaagagcccttcaagctaagaacttcactgagctgaaacctcagctcacgtgatttgcttcaaaatctaccagacataattttaaaaagagggtgtgtgtgccattagggtgatgaaaacgttctgaaactggattcaggtgatggttgcacaactcggccaatttactgaaaatcattcaattgtacattcgaaatgagtgaattttatggtacataaattacgcttctgctgtgcgtggtggctcatgcctgtaatcccagcactttgggaggccaaggcaggcggattgcctgagcccaggagttggaaaccagcctggacaacacggtgagaccccgtctctactaaaaatttaaaagttagctgggcgtggtggc

SEQ ID NO: 187189 - DNA, 681 bp, Homo sapiens
caagcctgggtgtgaacaacctgagcgttctgcgctcaggaaaactagggtgcaccttggctgtctgttccattccctgccagcttaagcatccacccccatcagtccacccctgctgcagtcttcgcttcttctgttgccttctttgccaacctcagcctctttcctcccctgtagggcccttagcaaaggcgcaaggagggtagaggcctgctgattgggcattagaatgtgctaatcccccatctatgacatcacactgggtggctatggggatgtcagtactacaaattttcagtatcctagctctctccagcgctggggttattagaggacagaaggccttagaaatgggagggcctcctgggttagtgccactgaatacagctgtgcaggtcgcacactggacaacttcagggcaacatccatgtagactaggtcacaaatagtgctccccagagttgtagttaacaacctacacagcgccatgtggcagcctaggaggcccagagttcatacagagaaggagaggatggcctgcagaccttggaatcactttgtctgccttctagtctaagcaggaccctgtagagtggaagcagattcttgtctaacattcaagcagctgtcccattgcaagttcccttcttccctcctctctggcatcagcacactcacata

SEQ ID NO: 187190 - DNA, 520 bp, Homo sapiens
attgtaggatagtgctgcttcacagttggaaacaaaaaggaaagctctgaacccaagaaggaaggagaagaagcacttgaaaatggagagccactgaatcaaggaaaagacaagaaaattctaatgctatacaaataaaccaatgaaatgggtatttctgataaacatgtttttaaaagtaaagctgaaactctatttgtaatacagaataattaatcccaaacttcaattccgtattacagctagctgaggagaaggagaaagggggaggaacatggtgacaaaaaaggatacaggctaaaagggggcttgagtaagtacacaggtgggtgtgctaatctgaggggaaatctcaaaccttgctgtttactggccacaagcctaagaacatataatttgttgtatctgccctttgaaatttcagatgacttgactagcattttagtatgattctttttgtgctgggattatttaaatagaggagaaaagaaagcaacttacttgaagacgagagaagtga

SEQ ID NO: 187191 - DNA, 1181 bp, Homo sapiens
aggatcccccagcgaatgtcttctcagtcaaccccaatcaacacacaaggtcttcagcctgcacctatgggtactcagcagggctcagcctgaatggaaatgacttcaggcacgtggtgttggcagatggagccacaattgtggcctaccctattagcaatccataagtgcagcaacaacctttgccccagctcccaccggggatggtcacacaacccaggccccgaccacagcactgcaggcagcacccagcagccatgatgccaccctggggccctcaggaggcacgtcactttccaaaacaggtgcccttactctggccaactctgtagtgtcaacaccagggggcccagaaggacaatggacatcagcctctgccagcacctcacctgacacagcagcagccatgacccatacccaccaggctgagagcacagaggcctctggacaaacacagaccagcgaaccggcctcctcagggtcacgaaccacctcagcgggcacagctaccccttcctcatccggggcgagtggcacaacaccttcaggaagcgaaggaatatccacctcaggagagacgacaaggttttcatcaaacccctccagggacagtcacacaacccagtcaacaaccgaattgctgtccgcctcagccagtcatggtgccatcccagtaagcacaggaatggcgtcttcgatcgtccccggcacctttcatcccaccctctctgaggcctccactgcagggagaccgacaggacagtcaagcccaacttctcccagtgcctctcctcaggagacagccgccatttcccggatggcccagactcagaggacaagaaccagcagagggtctgacactatcagcctggcgtcccaggcaaccgacaccttctcaacagtcccacccacacctccatcgatcacatccactgggcttacatctccacaaaccgagacccacactctgtcaccttcagggtctggtaaaaccttcaccacggccctcatcagcaacgccacccctcttcctgtcacctacgcttcctcggcatccacaggtcacaccacccctcttcatgtcaccgatgcttcctcagtatccacaggtcacgccacccctcttcctgtcaccagcccttcctcagacttctctccttcagacttcggggaccgagctc

SEQ ID NO: 187192 - DNA, 361 bp, Homo sapiens
ctccacaaaccgagacccacactctgtcaccttcagggtctggtaaaaccttcaccacggccctcatcagcaacgccacccctcttcctgtcacctacgcttcctcggcatccacaggtcacaccacccctcttcatgtcaccgatgcttcctcagtatccacaggtcacgccacccctcttcctgtcaccagcccttcctcagtatccacaggtcacaccacccctcttcctgtcaccgacacttcctcagaatccacaggtcacgccacccctcttcctgtcaccagcttttcctcagcatccacaggtgacagcacccctcttcctgtcactgacacttcctcagcatccacaggtca

SEQ ID NO: 187193 - DNA, 1378 bp, Homo sapiens
aagatacggggaccactggagaggctcttctcagcagcccaagctacagtgtgactcagatgataaaaacggccacatccccatcttcttcacctatgctggatagacacacactcccaacaaattacaacggcaccatcaacaaatcattcaacaatacattccacaagcacctctcctcaggaatcaccagctgtttcccaaaggggtcacactcaagccccgcagaccacacaagaatcacaaaccacgaggtccgtctcccccatgactgacaccaagacagtcaccaccccaggttcttccttcacagccagtgggcactcgccctcagaaattgttcctcaggacgcacccaccataagtgcagcaacaacctttgccccagctcccaccggggatggtcacacaacccaggccccgaccacagcactgcaggcagcacccagcagccatgatgccaccctggggccctcaggaggcacgtcactttccaaaacaggtgcccttactctggccaactctgtagtgtcaacaccagggggcccagaaggacaatggacatcagcctctgccagcacctcacctgacacagcagcagccatgacccatacccaccaggctgagagcacagaggcctctggacaaacacagaccagcgaaccggcctcctcagggtcacgaaccacctcagcgggcacagctaccccttcctcatccggggcgagtggcacaacaccttcaggaagcgaaggaatatccacctcaggagagacgacaaggttttcatcaaacccctccagggacagtcacacaacccagtcaacaaccgaattgctgtccgcctcagccagtcatggtgccatcccagtaagcacaggaatggcgtcttcgatcgtccccggcacctttcatcccaccctctctgaggcctccactgcagggagaccgacaggacagtcaagcccaacttctcccagtgcctctcctcaggagacagccgccatttcccggatggcccagactcagaggacaagaaccagcagagggtctgacactatcagcctggcgtcccaggcaaccgacaccttctcaacagtcccacccacacctccatcgatcacatccactgggcttacatctccacaaaccgagacccacactctgtcaccttcagggtctggtaaaaccttcaccacggccctcatcagcaacgccacccctcttcctgtcacctacgcttcctcggcatccacaggtcacaccacccctcttcatgtcaccgatgcttcctcagtatccacaggtcacgccacccctcttcctgtcaccagcccttcctcagacttctctccttcagacttcggggaccgagctc

SEQ ID NO: 187194 - DNA, 385 bp, Homo sapiens
tgattaaaaccttcaattttgccctatctcctaactggagtcctttaatctaagcactattctcacctctttccagccattagattgaaaaccttatagggacagattaccaagagggccaactccccaactccgagttccccaaacttgtctgatcatataattcacctgaaacacttgataaggatttccagatcccaccccagatctaaagaacaagagcctcacaggcaccgcccctctccaaacacacagccctataatgtcccaggagattcttctcttaacagtctttaactccccctgcaaatagctgaggtcattctcctcaagttctttccaaggcatgctctttgaccctttctccatggcttagtttagcact

SEQ ID NO: 187195 - DNA, 384 bp, Homo sapiens
ctatgtgctgggctgcaggctgcggtggcgggcgaggcagctagtccagcgaggcagctagtccaaagggtgcccttcgtctgtggcctcagatggccctgtgtgaggcgcttggcttggttagagttgtgtctcttgtctgctctctctgtgtaatgtcttgtcagccgttttatgggatggatgtgttcttggggtgtatggattatgcttccatcagtctgtacatttagtgggggccttggctccttgcggtagatattacacagggagaagcctctagtgaaacacatactctgtgacttcccttttctaccagtgttgacttccacgtctctcactgacttattgcaagacccttaacagctgtcaattgctttttct

SEQ ID NO: 187196 - DNA, 648 bp, Homo sapiens
caacactcatgctgagacttaactcctaatgtggcaatactgaaaggtggggcctttgagatgtgattggatcgtaaggctgtgccttcattcatgggttaatggattaatgggttatcacaggaatgggactcgtggcttacagaagcagaacaaaggcagctaatcaaactgtgaccggtcttgcaatgcaagcatagctggtgaccttgcagctgcactgacaggaaatcaggaacttaaaacttgaataataagaaatggtaaggggaaaagagaaggtagtaaagggatttgttgttttttcctcttatccttgctaggggcagactgtgttgagagagtctctggaactaattcctcagggctctggcttttcagacagtgttatcaaggatctgctagggctctatctattgctggccttggagtcagtcaagtactgtgaagctcagttatgcagctgagcttcacacattaggggagataacagagaacagcacatctggagtgcaatggatgagcctcaaccttaggatgaaccactattggtgaccataggatttcccctaccaggtaagtggcagtccacatacctctgccccaccacagctccatacgcctcacctttacacgcatggtcacttg

SEQ ID NO: 187197 - DNA, 199 bp, Homo sapiens
gcaaggtgctggggatgtaactgtgaacagaagagtcccctgatctcatggagctgttaaaaatgtcatttggcagagcagggtggctcatgtctataatgacaacactttggtaggctgaggtgggagaatcacttgagcacaggagattgagaccagcctcagcaacatagcaagaccccatctcttttaaaaaaaa

SEQ ID NO: 187198 - DNA, 421 bp, Homo sapiens
agattgcaccaccacactccagcctaggtgacagagcgagactccgcctaaaaataggaaaccctctaggagcccgggaggcctctgcttctgggggagcatgagagaagtggcacaagttgagtatcccttacccaaaatgcatggtatcagaagtgttttggatttcagattttttttgggaatctggaatatttgcattgtaccagttcagcattcgtaataatgaaaatctgaaacccagaatgctccagtgagcatttcctttgagggtcatgttggcactcagaaagtttcagattttggagcattttttatttcagatttttggattaggaatactcagcctgtacttgtaaacccattgaaatgggtaaagttgtggaaagaagcacattattctgagctttcaggtttactg

SEQ ID NO: 187199 - DNA, 827 bp, Homo sapiens
ttaggaggtaaattaaaaaactaaaaatacagtgacactttgctttcctcatagtagaaaatgtcaaatcatattgtagccagtcatatagaaaagctttctcttggctgattttgtctaatgtgataaattacatactttggtatgtaatttttattttaatacataatcttagcagtgttcttcttttgatataacggcgatggtctatatataagatacagttatctctattagagaatagtaaaattgtccttaggagtttttatatccatctacaaattattgaaggaccagttcacagtttttggattattcaagttatttgcttctcagagagtactttttgttatgactctaatatttgttactctgtttttctgttgctcagcctgtagtctcctggaaggctctattctaactttacgttggctcattatttttacatgttcctactacttatactcatctctttgaagtctgacatccacagctctgattatttattcatattctagctttgtttcttctgttgtctgcatgacatcattacttgccccacaaatttagtttaatttgttattctaacccttgtcatttgtgctacttttctttttcacatcttttttccactttgatatatatttcacattctgtcagttcttgccccaacattctcagttgaaaagtaaagaacaacacagtagcagttagtttggtacagtagtccctcctttccctggggtatatgttccaagacgcccagtagatgcctgaaactgcagagagtactgaaccctacagtactttgttttttcctatacata

SEQ ID NO: 187200 - DNA, 711 bp, Homo sapiens
cttgacctagaggatcccgattgcattgtcttcctgagtagctgggactacaggcaagcgcacacgccagctaatttttttatttttagtagagatggggtttcaccatgttggccaggatggtcttgaactcctgacctcaaatgatctgcttgcctcggcctccccaagtcctgggattacaggcttgagccaccgtgcctggcctaaagtgatttatatgtcaacattacaatactacggaagtctgtatttgtctatatatttacctttaccagagagcaatatttttgtgttgctgtctagtgttttcactttaacttgaaagacttcctttagcatttcctgtagggcaggtctagtagtgatcaactcacttggtttttgtttgtctgggtaggtcttttaaagaatttttatttttatttttgagacagggtctcactctgttgcccagactagagtgcagtggcccgatcatggttcagtgcagcctcaacctcctaaggttcaggtgaacttccaagtagctgggactaccggtatgcaccaccacacccagttaatttttgtattttcagtagagatggggttcaccatgttgcccaggctggtctcaaactcctgggctcaaataatcatccatcagagctccaaagtgctgggattacaggctgagccactgtgcccagctgagtctttttttttttt

SEQ ID NO: 187201 - DNA, 349 bp, Homo sapiens
gaagctattggctgatcctcaaacatagttagctactggaagcaaccttgtatctaaaacaccatgttagcattgggatgaggtagctgaagtgaggtgagaggaagagaagctcacagaagagagttggcaaaagacgtttggtggaaggttatttaagatagaatttattctaatccagatcagagaagcagcgagagattatatagttggaaatgtggcccacatcaaccctaaaagataaggacatttttttgcttccctgttggaaagtatttggaattcatggcaatttagttttccactttgcacttggaaacttaatttcgtctttccccaaaggtctata

SEQ ID NO: 187202 - DNA, 550 bp, Homo sapiens
cttttctgtgtttcgggttcatccttcccttcttcccagtctgttacctttatcttactatggtgttatgatggggaggaaaggaagggtgctgacctcaacagggagccagcatattgcttaactaatccaagccagggcttgcatggaggatttttatttcccacaatatcatgggtaccctgtgcagggtggtgaggggtgctgggtgggaccatatcactttacttcgcgatgctggaagtgtttgggctttgggaggaaaggtcacaggcagcgttatggtttgagtatgtagagatattgggccttcactctccagctgcagtagaacgaggttggcaaacagcagtcaaacttatgcttttaaatgagatagagctgatactaatggacaagttggtgctatccccggaggaacatgaactgcctgtatttgagtatgtatatgtctgcagctctcggattatagtgttatggcttgttgtgccagagagttcttctcttttcaggctgcatagaatattttcatggccactgaccttgagaa

SEQ ID NO: 187203 - DNA, 648 bp, Homo sapiens
aatctcaatggttacctgctattaaggtctgccatattagagtttgcactatttgctaccaagtttgattcatacatctaaaacatttgtagttacttgtcaaggacttaatttgaaaatcatttgccaggccacatagttatcaatttttttttctatcagctattctgttgtatttctaaaacattttttagatgactttttaaagtatatttagcagtaaccttatgaggttcaaattggtaaatctcttgtaatttagccttcatcgaataataggtaccagtgtattaaaaatgtgtattttttgcagccccttgaaccagagtaggttcagagaaactcccaaagtttgtactttagacacatcatgcttgattggtaacttccctccttttttggggaacatgtttgtgtcctattaacttaattggatagatttttaaatatttcttatttttggcacacggaaagggtagttcgagtacagaactttgatttttggtgtagatgcagagggaatgatgggtaaatttcctaggtttatgtgaatttagggggtgtatgcattttgaaacaatctactaacagatggtgctgaaatctattacctacatgttttctagttgttcagcattatgttaatga

SEQ ID NO: 187204 - DNA, 527 bp, Homo sapiens
ctgtgctccctattctgtgaaaggggaggtgggacaggaccctgtcagctttgacaccatagagcggtggagggaaggtttctcagtggctccctctcccctcctacccgatccctgccttgctggtcagggcctggaaaatctccctgcaggcccccctcgctcctcgctcctcgctcctcgctcctcgctgagcagcctgatgcccttccccctggcagagccagtacgtcttcctgcacagctgcctactgaacaagattctggaagggcccttcaacatctctgagtcttggcccatctctgtgatgaacttcgcacaggcgtgtgccaagagggcagccaatgccaacgctggcttcttgaaggagtacgagctcttgctgcaggccatcaaggacgaggctggctcttacgcacccctgcctggctatgagcaggacagccccatctcctggtgggccctctggctgtgatcatatggtgctgactggcctcgcagggccagaggagctctgggagctggt

SEQ ID NO: 187205 - DNA, 179 bp, Homo sapiens
atctccttacctacaatgtggcttagtgatcttaggacaaaggtttggcttggagacttcaaagaggtttgtccatttcagactcttcaaaaacagttactggttacttacaaataacactttgtaattcaataactgaaaaatcaaaacaactttaaatagattttaaggctggagaa

SEQ ID NO: 187206 - DNA, 661 bp, Homo sapiens
taaagctatgatgctaagtttagagttctccctgagaaaataaggttcatatttcagcttatttttattatcttcctgccaacaacctcatccagcctacaaaatagggtgctattctgaatacaaaacgttattttataaattttgatccaatatgcagaaatgatattggacttccaactttattattctatcaaagatgctattcttaacactatctcacaattttgtcaaaaatatttaggagattgatgaaaactgcggcccagtgtcatatataagtaagcatattattctctaacaatgcagaattttattttcagatacagaatatctctaaacaccataaagtcaagttcttgaaaggatgagggacatccctccttcatattatctggatgaagtgagtatacctgagacaaaatggttcccaagtcgataggtgactacagttcactgatgacttagaaatatagtattttaataatgacaccaatatcaataaacaaagatatgtcctagaacgaaaaataatattttctagggaatttggggaaaattagtctcatactgcccagagaatcatcagacatattacaggtcctaaaatatgattctcagtaaatatttgttaaataatcaaaagtttcactctaatgtt

SEQ ID NO: 187207 - DNA, 485 bp, Homo sapiens
cactgtctgggaaaacttcagaaaagacttcaagaggggaggtggaggcagaggtcagatgtcaggatccatgtgtataaggggtacagaagaatgaccaggctgctcagggagagggttaggtataaggtgcaggcagggatgagactactgaaggatatgagcagcatccatgatctggggcgttcaggaagatgagaaaactggcccaaaccttgaacttcagaggccttgccatttctacatgtctcagaatcaagagaccagctgaggtttaacaactgtggtgccaagctgagctcagatgtgccaaatgaggaaacactggtctctaacatccacacactgaagtgtcaacgtgttgacacttcagcgagtgggtccctgcctatccagggtgacaccagtgactgcacatgtgttcttgagctgcttttcctccggcaaagactcatgtctcctgtctctttctgtcttgaaggata

SEQ ID NO: 187208 - DNA, 122 bp, Homo sapiens
agtatttttgaatggaatatgtctgggctttgcttcaaaatgatctgcgaagagggggagtaagttggagtatagattaaataagatcaaacatgatatatgaattgttgaaaatggataat

SEQ ID NO: 187209 - DNA, 467 bp, Homo sapiens
agagtaaacagttttttaagtttgggttatgaacaactcccttaatagaaagccaaatgtattgctttctactttataggaaaatctgtctcaaaagaaccaccacaaaacttttatttcttatgaaaatctatgtaactttcagacaaagataaatacaaaatattaaagattaagaaggcaaaggtcaaatgattcctacaagatcacctgacatcatctccctttaaaacaactcaacaggtaaactggaatcctagattaataatttgaccgaatgcccactgctgacagcaataaaaaggaaaaaatctgccaacaaataagatttttgtatgagataatgattcaaagctctaaatgaacatgtagagaaccaaaggtcaggttctataaaacttttcaaaagtatggtttaccttaaacaaccttaagattctcatcactatattcacacctgaaagaga

SEQ ID NO: 187210 - DNA, 328 bp, Homo sapiens
gcctatgaaacatccatgtgcagttttagtaaccagctaaatatctaggcaagtatcccaggaaagatgtctgtactgaaggaagagatttgggagtcatcagtttacagattttgaagctttgggagtggacaaacttaccaaaggtttcttggattcatttaataagtcctagagtgaggtggagaaaaagactagaactgagccttgaaggtcatcaatattttaagtgagagtagataaaaggagtgttcagaggaaaaaaagagaagctggtgcggaaggaggcacaccagaagagagttgtaccccaggaggtaagaaaata

SEQ ID NO: 187211 - DNA, 326 bp, Homo sapiens
aggagtgtttaggtgtttcttatggatatcagtttcatctgttcctaaaagagcctgcctcttctgattggccatcagacatcttcattttagagtcttgtcctagagcagttatcacttgtagactgatatggagactctcaaaatttttactttatttttgcctctctatagtccaaggcagatctaagatttattggtctttatgttggcattttgtgtattatagtttgtaaaatgcatccacagagggggaaaaaaatcaaatgtagtcactatgaaaaattgatgaagatttgggacctgtcatcctcccactacaccat

SEQ ID NO: 187212 - DNA, 415 bp, Homo sapiens
  misc_feature (37)..(37): n is a, c, g, or t
tctctcagcagaggttgcagcagggaggtgcttgctnaatatttattgaaggacccaggcaggagaatcgcttgaacccagaaggcagaggttgcagtgaactaagatcatgcctgggcgacagagcgagactctgtctcaacaacaacaaaaaaagaacacagtgttacccgtgtgtcggacattggctttgaaggtaggaaggacatagcacagggaaaaattctgccacttcccagctctcctgctagtgaggaaggcagatttaaagaaggcaacagaccgggtgcggtggcacatgcctgtaatcccagctactcgggtggctgaggcagaagaatcacttgaacccatggaggtggaggttgcagtgagctgagatggccattgcactccagcctgggcaatcaagcaa

SEQ ID NO: 187213 - DNA, 264 bp, Homo sapiens
ctgttatatatctatatttccccttgtctgtttgacagttctacctcatacaaattgaagcacagggaaaaattctgccacttcccagctctcctgctagtgaggaaggcagatttaaagaaggcaacagaccgggtgcggtggcacatgcctgtaatcccagctactcgggtggctgaggcagaagaatcacttgaacccatggaggtggaggttgcagtgagctgagatggccattgcactccagcctgggcaatcaagcaa

SEQ ID NO: 187214 - DNA, 146 bp, Homo sapiens
ggtagaagatgaggtccctagaccccctacttctccgcctcgtccctcactggccctttaagaaatccccccgcccacaacaacaaaacgtgtttgacggtcgtgactgttgtcccctctggttttctctatttctgatgctgatg

SEQ ID NO: 187215 - DNA, 253 bp, Homo sapiens
ctttcagcaaacatttattgagcctttatatggccagcactgtgctagactgttctttttaattattgtggtaaaaccacattccataaagtatataatcttaaccattttttttttttgttttttgagatggagtctcaattctgtcgcccaggctggagtgcagtgacatgatcttggctcactgcaagctccgcctcctgggttcacgccattctcttgcctcagcctcctgagcagctgggactgcagg

SEQ ID NO: 187216 - DNA, 160 bp, Homo sapiens
acaaaaggaaacaaatagataaacgggacttctctaacatttaaaacttcccttcttgttcagagaatacaagaaagtaaaaaagactgacagaaagggagaagaaaatattcaaatcatatatttgataagggacttatatctagagtgttaatgctta

SEQ ID NO: 187217 - DNA, 318 bp, Homo sapiens
tccctccttcactttatgttttcattatcttccctttctctaagataaaagtcacttctgtttcctaactgtgcaaaaatagttaaactggaatgatgtttcctagaattccttactctttatggttccaagttagggctgcccatagagaactttattcagagggtctgtctaggcctctaggtagtactgcaactcacatacgttgttgctgatcactggctcacctcctagatggggcagcagccaggcccactgctctttctttttcttttctttttttttttttttttgagtcagagtctcgctctgttgccc

SEQ ID NO: 187218 - DNA, 601 bp, Homo sapiens
tcctggcagagttgtcctctggggacaattaaggtagccaagttgggaagggcagttaacttattagttcatatcagattagggaggcccttgtgagaatgatgggcaggaaggcctgtttgtcataggacagcaccagggaaccaggcagaagccctgtattgtagtttcagctctgccaccaactaccagccatccagactgctatgggcccagctctacatcctacttgaaggcctctgaagagatggtttctaaatttctcttagcaataacttttttcattgcttttgtgtcctctttatattattttccttaatgttttcctaaatatgtgtctctgaaaacagaaaaagcacatcaagtgtttgcttagattggtaggtagagttctgatttggcctaattttagatttgattcttctatctagattatgctttgctcttgaatatgagcctcaaatgtaaaaggagagtcttttacttttcagctggcatatttcagagatggagacagcaggttattttcagcagatgtttgtgatgccatggaataaaatgaatagtgaaacaaattaatgtattctggaagtagatctga

SEQ ID NO: 187219 - DNA, 387 bp, Homo sapiens
gatctagaaggggaaggaaatcattccagaaaaaattttttaaaaacttctctacaagtatcctagtctgatgtaaatggctatatgattatagaagcttcaacagtatatgtattaatgtatactttatcattcttaattacaatgattttgctgaaagcatgtagcttattctcaatacatttgtttacagtttagaaaagttagtttttcatatattatgtgatactccatgtttatctttccccacttagtctatctggtataattttagatttctgaaaatatatttgagacatcaaaatattctattttcagtgattcagttcaatccgcaataatcccgttatctgctgtttctgaggatcagtgtagcctattaaacag

SEQ ID NO: 187220 - DNA, 344 bp, Homo sapiens
tgtcattccagtgaaaggcagtgacgtcttagtgctgcggtgagaatcctgttgacctctggacccctggaaggaaggcgctgggccctggggtctgtggagcctgctttcagaactgtaggattagatgacagatgcacggctgagcacagtgcctggcacgctcttggagtccagtacatgttacctgctgccattattatcctttcccccaactaacctgagtgacactgcctgggggagtggaggtggaagccattgggttaagaattcagtgtttgtgatttcaaatcctgctcaaggtgctaacatgtttggtcctcaggagtgagtgaagggcccag

SEQ ID NO: 187221 - DNA, 276 bp, Homo sapiens
taaaaacaatattcatgtatatggggtttaggatagagactacaaggaaacaaaggaaaatgttgaaagtaaaatgatggaaaaacatacacctggcaattttttttttaattttagtgtgtacatagtaggtgtatatatttatggggtacgtgagatgttttgatacaggtatgcaatgtgaaataagcacatcctggaaaatggggtatccatcatttcaagcatttatcctttgagttacagataatctaattacattctttaagttattta

SEQ ID NO: 187222 - DNA, 404 bp, Homo sapiens
gcacttacagagatcaataagaacaagtttaaaaacaaagagcatggacaggcagtttacagaaatgccaacagccagtatgaaaagagactggctttttaaggtaatgaaatgtaatttgagcagtgacattacactgggtgggcaaaggtgactgtcactctcgtggtttatgtccccttgagtcaatgggtaaggctggaattaaactggcaagtggagaaatgacagcagcctcacctggagtctgtttttttgggtggagcaacaactgccatgtccacagtaatgatgaatgcttctcgagccacgtcgctgccaaggtcttcacaggcatttctaaaaatgaagaatccttgactgcagacacgcaagttaaaaatcactaattatgttctcgatcc

SEQ ID NO: 187223 - DNA, 397 bp, Homo sapiens
agagtggtggctgccaggggcttgtgggagggtgaaaaggagtcattcaaaggatacagagtttcagtcacgcaagatgaagaggttctagagatctattgaacaataatgtgtactgtacacttttaaaattattaagagggtaaatctgttatgttttctatcacagacacacgtacacgaagataaaaagggttacatgtgccaacagaacaaagaaaagataaacgccaccttgctgaggtgaaatgacccaaggggacagcaaggagacaaaggcagtagaagctgggctacctctgtgtaggggaggaaaaaagcagaagaggcaaaaagagtcacacgtaccctctgatgcagcaaaggaaaagggcacaatgttaacaagctgcaattc

SEQ ID NO: 187224 - DNA, 120 bp, Homo sapiens
taatgacaattttataccactgtaaattcctgccagtgagagaaaaaccctatgacttggggggaaaagtgtcaatgacatgtatagcgatgtactcaaccaggggcagaaggcagctca

SEQ ID NO: 187225 - DNA, 805 bp, Homo sapiens
gttgctccttataaattaccttattgttgtttccttataaattacccagtcttaggtattctattacaccagcacaaaatagactaagacatgactactgtgtggtgagcactttgcatgtatcatctcatttttatccttacaccagtctacaaagaacatattatctccactttacagatggagaaactgagtcttagtgtgtcaaaatggtgtgcacagttaagtcagtaagactctcagactccagagacccttctcttcccacagtaccccactggctcaagggtcagaatggggcggtgttagaacttcaggtgagaggacatctcctcctcctgttcgtgtggatccagcctgtggccggatgctctggctgtatctgggtggttggtgtgggagagcctgaactccgcctactcactgaactccgcctactcactgaactccgcctacttactgaactccgcctactcactgaactccgcctactcactgaactccgcctactcactgaactccgcctactcagccccaccgtcgctgctgccccacactgtaggaacctctacggtacctttggactgagaaaccatagatctcttctctctagcttgtccgctgctgccagaagtgtgtaccccagacgtgggcagcgcctggggttacttctcaaaaccacagcaagcatttattgtctttaaaacacaatagcatcatgaatcaattttagtgctagagagatatatgtgactctttaaaatggtcccctaaaatttgtaaattacaggcatcagcatcaata

SEQ ID NO: 187226 - DNA, 676 bp, Homo sapiens
gtaatgaagaaacaatttctggaggaaatgtagttcccttggatgttttcccaccttctgctgcaaaagtcacatcactctctaggcaaatactcaaaactttctgtttaataaaagaatttaacctcatttcattgaatcctcacaagatctttatgaaataagcaaaagtaatataattgtctccatttcgcagaagaggaaattaaaccttaggaaaggtaaggaaatttttcagggtctcccatgattgatccaactctttcctaagaaaaaaatgggtctaattaactaagtactagcaacaattatttggaaaatgatagggtcaccggccttaaaagattatgtcaatcatttctccaaacggtatcatacagcaattcctctcacaatatcgactttatctagtctttccttgaacataccaagtgatggtgggctcactgtttaaagaagcaacccattccatcattgaaaatttataactataagaagttctttcttatcttgaactgctatccaaattcctaaatcttctcaccctctggtcataataccgctttctagatcccatttatcaattaaggggatagcctatatatgacagtttttacaaaatgtgaagggaattcataaagaccctcttgtcgtctctgagttcactctttatgca

SEQ ID NO: 187227 - DNA, 491 bp, Homo sapiens
tgtgagcactctagttaatcatacaacccaaagacggggtttgcaagaaccctaatttgaagcaagtcagtcagacgttccaagaggcctggacttgtgactggtaggaagaaggatacaatcttttgggactaagccctcaatctgtagtttctgagtctacctccaggtagagagtgtcagaattgaatttgtagacactgattcaattgcttgatgatttcaagaagtgattgcttgcttggtgtatgaagagaaacccccaaacatctggctacagaagtcttgtgttgactattgtttaataagaaaaattttaaaagcgtcctgagtttgtgttgttttctaccccacacgcaatccctatcctcaaaccagactcatttattcatgttcttcctatagcctcctcttcctacaaatctaagttttgaggaaagaaggaaataaaagcctcactaaccaactaagatgtggaactgatagcaagt

SEQ ID NO: 187228 - DNA, 573 bp, Homo sapiens
gcttgggggaagtgcaccccaggagggcagtgaataaagtgttggggttggtctgaaggaggcggaggcccaggtgggaacattgacaagggactctgaggtgcagcatccccatagccaaatcctgggggagcaggctggtctctgggggtggaaggtggggggaccctataagggccttgctgcccaagaccccaggctttctgcagaggatgcaacagaacctatacttctctgggtcctgcatggacctcttctgctcaactgctctgggccctccacgaactgcacccctgaacagacagtgggggccctgtcatctatagctcctgtggagacctctgtgggctgaaaacccacttaagtcacacaccaagaggatgacggggtcctcaagtatgtcactaaacagaaaaatagtccaaaatgataccgaactgacaagtaactacagggaaggtaaacataattgtgatttccctcatgttgcttttgttttaataaaatgttaagtaacaaattgttttagagcaccttcctttggtgtctttgagaacatgctccatgtgcctg

SEQ ID NO: 187229 - DNA, 314 bp, Homo sapiens
tgtgagccatcaagtccagccgacaatatcttaaagatggagtttaattctctggtcaacaaatacatgtaatgaaattaacaaaaccatataaacaaaagagctttgatatgtttctaaagttagaggagaggataggtaataggaaaagtaactgggaaagaccatcgaaagtttagtagagaaataagtgaaatctcacaaaaggaaaggaagaggggaagagttttataagtaagaggttaacagatttacacctcccctctcagaaaataatttgtttagaaagaaataacaggtgttctgaaacagaa

SEQ ID NO: 187230 - DNA, 644 bp, Homo sapiens
tgggtggcgttctagaggatcccgaggctgaggtcaacgtccatgtataatgtttaataaattaataatacatccatatttaaagtccttcataaaataatgcttcatcattgaaaaatagcacatgtttgctcttctcacctgcgagtcagctttccccaggccctttctgatgtgtcctcagcatcagtgtcttcaccatggctgctggtgagtcccagcgggcccaggtctaccccacctgggcgatttgagatgctcccttcatgggtccgtgtccgggggtcacgggcagctctgccccagcccacgggcccccattcacgcgcatcaggacagctgggctcagtgatgcgttcattcctcttggtggtattggttcctggtttattcaactgaatgacctcatcaccctccttccaacacacacagctgtgaggttcgaacccccaggaatcatgatgcaacacatgtcactttcctttcctttgttttaaattatgaactctgttgggcctttgtaaacatccaaaactagcactggttgaggtcagaaattcattgttgttcatagtaaagttagagagtgttccaatataggagaagctttgcaagagcttgaatataagtcagctttgtctttg

SEQ ID NO: 187231 - DNA, 236 bp, Homo sapiens
ggtaagtcttgatagggaaggttttctcctgaggtaagggaagcaagatgggttttggaagcaaagtcttgggttcacatccttgccctagttattgccatacgatcttgagcaattcacttaatttctctgtacttcaattattttgttctctgtaaaagagatactattaccctcttacagattgcttagcacagtagatagtactggtactgatagtaggctgtggttattgt

SEQ ID NO: 187232 - DNA, 637 bp, Homo sapiens
acaggccagcttaaactctgtcaattggctaaagattcttagtacaattgatgcaccagaaaaaaaaaatgattagccttgaatctagcatacattcttagtgctaataacaatgatgtgctgattatatcattgctatttactttcagggttgtacctgacaaactgcgttctctggccttgggtgtaagctatgtgattttgagaatatttgggactattcctggaccatcaatctttaaaatgtcaggagaaacttcttgtattttacgggatgttaataaatgtggacacacaggacgttgttggatatataacaagacaaaaatggctttcttattggtaggaatatgttttctttgcaaactatgcactatcatcttcactactattgcatttttcatatacaaacgtcgtctaaatgagaacactgacttcccagatgtaactgtgaagaatccaaaagttaagaaaaaagaagaaactgacttgtaactggatcatcattgtattctccaagatttgtttctgtgcccaactttcagaagaggaaaatcacacattatgtttacataagtagcaaaaatatatttatggtgatctgcattttcataataaagtgtcctattgtgaaaca

SEQ ID NO: 187233 - DNA, 346 bp, Homo sapiens
ttaataagcaggagattttagctttctcaaagacaatggttatttctgagggaagataaatgggatggaatcagaaaggaagaatagggggtttctagtatgcctgtggtatcctaattcttaacctagatgttgtcacaaaggtatccactttataacatttttattttgtcacattatcttgcagctacctaatatttaaattaaaatattatgtagatatatggtagagtttaaattttgttttaaagcaaattcttctaagtaagtaagggaaattactcaaactagaggaataaattcccaaaggaaggaaagcatggtgtgttcaggaaactgaaataat

SEQ ID NO: 187234 - DNA, 391 bp, Homo sapiens
agtataataaataacctttttcttaagccaaagaagtccaaaccaaaagaggaataagaaaagagagggagataattgtctccagatttttgtttatttcactcattttacaggaaatgcactagcaattttggctaccatatccagataatactagatgttttacatgtatgagtctgacatctctaggatatattatcattataggaggagagaggggagaaggagaagcagaagcgggggtggtagtaatagttatagtagtggcagtatagcaatagtactggtgatggtaataggtcaaattatggttgcggttattagaaatcgttcattcaaacctatttagagtaaatatccccaggcactaggtaataaaaacaagtgtgat

SEQ ID NO: 187235 - DNA, 304 bp, Homo sapiens
attttgaagtgtacagttcattggtttttagtgtattcactatgttgtgcaaacataaccactaattccagaacttttctaacatctcagtaagaagccttgtatctgttatcaatcagtatcaatcacacccaccttttcccctgtatccatctgtatggatttgcctactctggacatttcttataaatggaatcataaaatatgtggtcttttgtattttctttcacttagtattagtataatgatttccaggtgggctacgtcaggtgggctacgtcaggtgggctacgtcaggtgggtg

SEQ ID NO: 187236 - DNA, 360 bp, Homo sapiens
attcccattaaaatctacttgttggggtttggggcatgtattagcccacaatatcaactccaaacactatctacttgttcggagttgaagtgagtaatgatattggattcacttggcagataaaggaattcttgttctgtttgagttatgtaagatgaggatttaaggttgaatgcttttattcaactgagtaagtaatatcgagcattttcttctatcagatcatgaagaaatatttgaatcagcaagtcatttctctgatctctgttctcactatgatttgagtagttatatgtttcacatttacattacttaatatctacaggaaatgtattttaatacagagtagttgatataaaa

SEQ ID NO: 187237 - DNA, 274 bp, Homo sapiens
acttccctgttcttgacatctgtcctttctggttctcctcttgctctgttgcttctctgcctatttctgttttcgtttattctacttcttcttttcctgatctgtatgttaaaggtccagatttttctctgtgaactgtctggttatgtcacttgtctatttttctgtcaggccttttatctcttctaattttagaagctctttctaaaagttatgtctttgatgaaagttgcaagtattttttcttcagctttttgtctttttactttgcttt

SEQ ID NO: 187238 - DNA, 675 bp, Homo sapiens
agtaggagcagcagttggaaaaagtgatggcaaatgagtgaggcagttatccagtaatttcttgttaattttagtcattgcttacaaagaaaaatataatgtttgttaaatacatgcactcttacttcttttgtcctcattgatgatggaactgtgactggaattagaaattcagcttctgtgtttaaaactgggccaggtgtgagccactgcacccgggcaatgcagttaattataaatttcattttcttctgaagagctaaaactatttgatatatgattcccagtaaactatgaattattgaggaggctgccaggaagaactagctaagccctttgctgctactgtgaccagcaacttttccatcctggccatgcagcttcctttatcgcgtattgccatatgaatgtccactaggtggtgctagttacacgtcatactcagtgttgtaggcacatccagtttaacacagtttttatagatgcagaagcttacctaatggttacccagtgagttaaaactggagttatttcattgcttcatccacagtcagctaagcaattatttcacctcaactgtaaaccttagaaacacgttttaaaagtttggagaacctaatttctatttccctttgaccaagataattttaatctttaataacagctaagagccaa

SEQ ID NO: 187239 - DNA, 379 bp, Homo sapiens
agctcggatccgggagtgcagcgacggaatgcaattaaagagaaggagcttcaaacagcaagagcttactgtgtgccatgatttaagagagacagagagaggaacagagatagggagaaacagagacatagagagaagtagagacagaaagagagaaacagagacagagagagagagagaaacaggcagacagagagaaacaaagacagacagagagatctgggagtcaggacacctgagtctgtttctgttggagcctcaggcaactttcctgatttctccagaactcaggtgtctgatctgggccaccttcctcactcatgaccttcttcccctgtgtgagggtgaccttaagtcctgagtgcttgatactacttgg

SEQ ID NO: 187240 - DNA, 211 bp, Homo sapiens
gggctgggattacagatgtgagccaccacacccagcccaatatcaagttttagactgggcgtggctgggagactagcaggtacctagcttgaggacatacttgtaaatttccagttttttccagtttttcccagtttttaaaatgtacataaaaggaacatgaaactggaagaagagtaagaaagtaggaaaaaaagtggtctttcaatga

SEQ ID NO: 187241 - DNA, 544 bp, Homo sapiens
gcagctcagctgtgccatcaagaaccaggactttccatccttttactctaccatcctcagcacgttggctgttgcccttggttcgtcctctcataattgtaaagtaactgccataagcaccaaatagtatcctcagtcagcagtatgtgaaggaagatggaagaagatagggtcattttctacatgcacctctgttcttttaatagaaaggaaaaacttaccagagccccactccttccccgaagagattatctagaattggctcgtgtgcaactgtgatgaagctgagtaagtggatatctggtgtttctaacctttatggtgagttgtgggtgaggaaggcaaaaagttggaaatggcagtttgatgggaacctatgatgtctgtcacatattttactttctggatattatttaaatcggttactttatccccatttccactaatgcttctcaagttcaggccctcatctctattcatataatagcctccttacgagtttcagtctctagtattacttcattttaatccttcctccattctg

SEQ ID NO: 187242 - DNA, 684 bp, Homo sapiens
tctttcaaaaacacagaggcacacagatgtgccctgatccctccaatgttataacaccaattcatcgacctcattacacatgtgcagtgaaagagagagacacaaggtttagggagaatagtgtcaccagaggttctagtgtcccataaacatccagacgtctccatctctgtctcccacacactcacgcagacagctgtgtgtgtggcaggtactctctgagatggacctcagcgatccatgcctcctggaattcataccctgcatcccttcccctaaagtatgggatggacttgatttgcttctaacagataaaacacggtaaaagcaataggatgtcacttctgagattagcttacaaaaagactgtctctcatattgggtgctcttgcttttttgttctgagagaagcctgttggctttttgtgagctgcctatggagaaatgcacatggcaaggaaccgagggttgcctccagcaaactgctggtgagggagtgaggccttcagtccaacagcctttaaggaactgaatcctgccaacaaccatgtgagtgggcttggagatggatgctaccaccatcaagccttcaggagtgaatttttttgttcttgagacagcgtctcattctgttgctcaggatggagtacagtggtgccatcttcgctcactgcagccttcgtc

SEQ ID NO: 187243 - DNA, 174 bp, Homo sapiens
gaggccaggcacagtgtcttcatgcctataatcccagcactttgggaggccaaggtgggagaatcacttgaagccaggaatctgatactagcctaggcaacaaagtgaagctatgtcttgttcacaggtagggagactcagtattgtaaagatatcctttgcaatcaatatata

SEQ ID NO: 187244 - DNA, 480 bp, Homo sapiens
tgatagtgcatatgtagtgatagagtatatgcagtgatagagtatatgcagtgatagagtatatgtagtgatagagatgaaactccttttgggcttttttgagatgtgactaccctgttttccaaagtaaagcatgaaaagctcacatggattgcctgctcttccctcaatttgactcaattgggaggttttcaaagattctggcaattgtcagtcttagatttcaatgctattagtttttactttttatttttatttttttgagaccgagtcttgctcaggctagagctattgcccaggttggagtgtagtagtgcaatcacagctcactgcagtcttgaattcctggattcaagcaatgctcctgccacatcctcccaagtagctaagactacagatgggtaccaccatgctcagctaatttaaacatttttttagagatggggtctatgttgcccaggtctatggcctcaagcaatc

SEQ ID NO: 187245 - DNA, 263 bp, Homo sapiens
aggaagactgtaaaagaaaatattaagggtcttttgtctgaaaatatttcaaatttgatttaagagattcagagacctgttatttgtggaagggaagctgccaatacaaatatgaggtagatcggtcaacttacatacaactgatttgacaagcatctgttataatactgaagatttgtaaacactaaacaatgtttttacctccttaaaagttttgagaacttgccagtattggcaggaggcagagactctgaaacgtgctt

SEQ ID NO: 187246 - DNA, 300 bp, Homo sapiens
attaaccgggcatggtggcgggcacctgtaatcccagctacttgggaggctgaggcagcagagccgcttaaacccaggaggcagagactgcaatgagctgagatcgtgccattgcactccagcttgggcaacaagagtgaaacttcatctcaaaaaaacagaaacaaacaaaaaggcagctgggttgtcactgatgggcagcatttgagcctgccacactggcctggaagtttcccttccagtctggattttgtctgctccttccttccccctcaccccggtacctcttcacctcccatc

SEQ ID NO: 187247 - DNA, 272 bp, Homo sapiens
ggttttccagggccgtccagaacagagggtggtttggtatttgggccccagaggtacttagctggtgattcaagcggtggctaatggtgtaagtgctgcaggacgctgtggtccatgctgagaagcttgtttcagataatttgctctctgcttccctgccactcctccctgggctggcagcaccctcggccctatggccagcaagtgcgtgttccttttctgtgggcctcctccctgacccacaggagacctgtatcaccccggcacaccag

SEQ ID NO: 187248 - DNA, 506 bp, Homo sapiens
ctagttctctaccctaagtgttttgaggtctttgtacttagaggcgacagagaattttacttcattcagagcaagccttagctgagatactaaaatcatgtgaaagtctgtctaaatgtaagggtggttccatctttgcttctcagttcctctttacctgtcagaggagatagttatcctagacagacctcccaaaagataactttgacttccagattctgacagttctaatctccatttaactgtattttctttcctttttatagcatgagcagtaatatccagaccaacatggaatggaggatgtcccttaatctcctcacatggctatcccttgtgcagtcctcttttaacaagtaattgtttctgtggatatctgttaaggttaaggagtatagtgaacgtctttgggtttaggttgtttaacctcttcacactccatataaatcattcttccaatgtcttttaaatgcaaccaaaagactcaccaaagtgacattggcaga

SEQ ID NO: 187249 - DNA, 331 bp, Homo sapiens
catgccggggagagcattctgggagtagggtctgtgtgcagatgggttttttggaaaccttaagactgccccatttgggatggttagagcatttctcaatctttcctttagcagcaagctctggtccttggagagagcatagaaagatgaggactgaaattattccacaaatacatcaccggacaactgaatacattatgagaaatagttctcaatccatggctccactgtatcaatgtatttcattgtcatttttcctttgaaaatccctcaagcttatcaggatttagttgtacaatgaagaaatacattatccctccccgggatacag

SEQ ID NO: 187250 - DNA, 595 bp, Homo sapiens
gttttaaagagttttctaggaagacctctctgagaaggcaccatttgagccaagacttgatgacctggctactgcatgaggatggaaggtggggaagctgatgggagcagcgagagaggtgggagcagttagaggctattgcagcagtccaggtaagaaggaatggtggcttggacaaggaggtggtagcagagatagggcagagatggccagattccagatgtattctgaaggtagagctgacagatttgctgagcaattggatgcagaataggagggaaccagaggcagtcaaggatgactccagacttgtgagctgaacaatgagaagaatagattgagatggggaagtctggcagaggaaacaagaagttctgctttggccatgttaagtttgagatgcctattagatattccaagtggagatgtcaaatatgcagttggatatatgagttctgggaagagggccagccttgagctataatttggagagtcatcagcttataggtgacatttaaagcaatgggactggatgagatcaccactgagggcggagtacgtgtagatggaagtaatgcttattcagctagcaata

SEQ ID NO: 187251 - DNA, 623 bp, Homo sapiens
caaaagcacactctcaactctgggcaatcattacccagcgttctctgcttggaacacagctcaattcttccaggttgtcccatcttcctctaatgactacatacatacgcaattccaactagaaaggtactcatcatattacagtgaattacctgtacaattagctgtcctttccagactgtaagacagcaaccatatatctgtcttattcattatagaattcccaaggtcaaacactttctaggtcactccacacatgttggctcaatgaaaaagtactcagtgatgtcacagggtttgtccttagcacagcctgaattcaatcatttcatcaatttaagtatgtctgttgtcatcatttatcaaactggcctatgtataatgcatgtttatatgtacgtgtatatttatgtgtatgtgtgtgtggatatgtatatacatgcatttatttccttgctctttccactgaaaggaccaagtagcaaacagggtacctaatgcctgggtcttggtccctaatactactccacactaaaaagaatcaaggatccttggatgccaatgctgggccaggataggtataagataagcctgcatcatgatatgtcaaaaagcaagaaagg

SEQ ID NO: 187252 - DNA, 279 bp, Homo sapiens
gcatgggtgactgaaaagtggagacttagggcaaggggcaagttaggaggaaagatggcgagttccccactggacacaacgaggcttaggtgcctggaagacatccgaagggagatgtccaggtggccgatggccacaggaatctgaatctcagctgagagagacatggccacttgtgacagaagccacaggggtggctgagccatccccagggagagaagactaaggcctaggtctaaatgcatagtcaaatcgcgatcccgatataaaccattctag

SEQ ID NO: 187253 - DNA, 180 bp, Homo sapiens
ttctgcccctcacaagaccctggcttcctgctctgctgcttcctgcttctgccaaaggggtaggcttagaattcaaatgcaggggacaggtcagtagggtatgaagtttgttaaactgatccagagtggttaggttggaagttgatgttgtttgttttgtaggtgcatgtttagacaaag

SEQ ID NO: 187254 - DNA, 503 bp, Homo sapiens
aagaatgcacatgccagatcaatgtccatataccatatatctgaagctatgtgaatttaccctagcaaaagtatcacttctggcacagtagttgcaattgagatttccacttcgttgtttgagatagtccagtgtcatgctctgggatctgattcctttttgtaggggccagactgatgaattaaatgaaaatatgctggagattaccatctctgtatcttttaggtctcaagggaaaaagcaaaaggaaacaagaggttacctggtgcatttgaatgtttaaagaggagtttacatttctaacagagtttgagagtgagttaaatggaaacatggaaaagtaagcagagaaaaaaaaaaatgaaaaccaaggcaactattaacgtcagggataaaacaagagcttgtactagaaaataaatgcaattagagtactctacactgcttagctataaataatattcaaatagtcattaagtattatgactgaatattggtttaac

SEQ ID NO: 187255 - DNA, 415 bp, Homo sapiens
caagagtgatgcataaataataaaaaaaataggcattttcatggtataataaatttgccttttttacctatagagttcagagaaatttttaggcaaatattattagccattgctaatattttgaactcagtttttaagtatcatgatggagtttacccatgttaggggagttaatctattaattatcagtgggactctaattgagtcctttatttaatttttcatcacatccttgttatgttaggagatggttcagagtggaaccttaaaaaacagttggaattcttcaaaattagtcctctacaaaaggttaaaattatttgacttttggatgataaagcaaacagtttttggaacaatcagctattgatttgcttttctagagtattttgaatgagagatactgggaagaaac

SEQ ID NO: 187256 - DNA, 524 bp, Homo sapiens
ctttcaaatttcccatgtttatgattcctctgttcctaaaagaatccttaatttattcccacccagagattccaggaaatatttcctatgaatggcctgtgtagcttttcagtaccttctctccccactgaggagccatactgggggctgccccaaaagagagctgccaacccgtcacccatgtcatctgggtgcagagggtgagaagcagcccttccaggtccctgtgtgatgggaggtgggtaaagtcagggaaaatgagcatgtcctcaatctgggaaggatgttgatagagattgaggcacctccatagatttctatcctcccagtgacccctgcttctcaaggggcaagtccccagccccaggtgcctcagccacccttacagattgtaggtggttacccgacagtctacagagaaaaatatgtctcttttagcaggggtgggtgttctggctctgctttctgactgtttggagacaggactggtcctttggggatggcttagttagggtccaaaattg

SEQ ID NO: 187257 - DNA, 270 bp, Homo sapiens
gtttgatatattttactaccattccctcagatgcagctacttctatgatagataccttatttctgtccagttatttaggttcaaagcccttgtttgtctttgatgacatccttagccatcacttccacaatctcatccaagtagtaaccatagcctatcaggtcgtcctttctgagtgctttcttctttgtttattttgctctatttctgttagcacccacgtcagtcaagtgttccattatttgacctgtccatctctgccagtgtaac

SEQ ID NO: 187258 - DNA, 250 bp, Homo sapiens
tgcaactttgcacttagcactcctctttcagtacattgcactctgcttgcaaactggcaaaacatccttttgtctctaccagtgggacctgcccctacccttggagcagatcttgttttcaaattctgataccacaaaatctaaaaatgcacccagcctgatccacctattatccactgaactgaagccagcattcaaagggacactaaagagaaagcttctaaagatagagaatgtggatcctccccaa

SEQ ID NO: 187259 - DNA, 580 bp, Homo sapiens
cttgcgccggccttagaccagctagctgtctgcaggctttccctgcccacggctgcccctcctttccccttcacagccgtttccgcccacatgcgccgtgcatggttaatcgcaccgtgccatccacttctctgaggacctgagttagcacacaaagtatgttcgttccctgtgtcctcacctctccctgatgtatcttctcccttcctctgctggctgtctgttgggaatcttgggaaaggaatttgtgagtaatgttccaggcagcctagcttttagggtgaatgactggttctgacttatgtcaatacatccttgagtcatgccaagaactgtgggatgatcaaggaccacggaccagtgtcctggaagcatcgatggctccaagctgctggcaccactgtccttggaattaccgagtgtgatttttagagttacgggcacatttctcaggccccataaatgtgatggatggtgaattacaggacttttgagtatatagtgagtggactacaattgtgctgtatgtagcccactgctttgtgcgtgaggcgattttaggccattgaaggagttcagc

SEQ ID NO: 187260 - DNA, 244 bp, Homo sapiens
atgaggataactgaaaaaacattaacgatataaagcaaccaagtttaagactggaaagtgatgctatcacttatgtaaaagaaatagcaaccagttaaaagatgttcaaagtatgttaaaattagcctaacagtaggaatcatatgaaatctgcaaacatctgtaacattgccagaaatacactgttttataaacgccaatttgcagttgggcttccagaaagaaccagataatgcccagagaa

SEQ ID NO: 187261 - DNA, 515 bp, Homo sapiens
cacgtggttctaataatcattggagtataccgtatggtcattctggttgcagatgtccagcctctgctgtgattggctactgcctttgccatagtggttgttaaatattttgaatatcaccattatttacaactaaaatattccctacattacaaatgaaacaaaaaggagaataaagaattcaggttgctgacttaaaagcatccaaaaagtcattggcatggaaggattaataacattcccttgtgttcatggaggacttcagatctttcagactatttttacagcaattctttatgctgaccctcagaacaactgagatagaggagaaagaatgggaaaaaggagggttgggggagagagagagagagaaaccacaagctcctctttaacaaacatacaggcaagttacagaggttttgggtgatctgcccatggtcaaagggaaggtgagtaacggaggccaggcaggatcccagcaagtgttctgtccactcaatcaccaagctttggac

SEQ ID NO: 187262 - DNA, 386 bp, Homo sapiens
ttctctttcccttttctttttttatgcaactaataaaaagattgctaacacttattacataggaaacttgagatgtatacagagttctagaaaatgggatgagagctgtttttattcctagaccagagtaactttgtgagagcaagctgttttttattccctgtcctccaccttcctttcactctgttattattcctgttaataagtaaatgacccttctgaattgaaacagggttgggtctgctctttaaaaacataacctttttattgggattttctttaagataggctaatttattaaaattaaaaaatcttgctaggtattaactttgttgcttatctaagaccaagaaatatatttttatacatctcagctctcacctatg

SEQ ID NO: 187263 - DNA, 336 bp, Homo sapiens
agtgcctgtgcctgtgacaaggtgaaataatcaggacgacagggtgcctgtgcctgtgacaaggtgaaataatcaggacgacagggtgcctgtgcctctgtccgtgacaaggtgaaataatcaggacgacagggtgcctgtgcctctgcccgtgacaaggtgaaataatcaggacgacagggtgcctgtgcctctgcctgtgcccgtggcagggtgttcttcaggcttccatcacgtctgctgttggctgggtgtggcaaagaggtgactgtattgggacaattttcttctttctctagataactaacagtgtttatcagggatgagagttgggtt

SEQ ID NO: 187264 - DNA, 405 bp, Homo sapiens
tgcaaaaaagctagactgtcctagcctcccagcccacatctttctcctgtgctggatgcttcctgcccttggacatcggactccgagttcttcagctttggggctcagaccggcttccttgcacctcagcttgcagacagcctattgtgggaccttgtgattgtgtgagttaatactacttaataaaccccctttatatatcaatctatcctattagttctgcacctctagagaaccctgacaaatacacgcatgtcgccagtgcctatgagagcactagctctttggatcttggattttgcaatgtatccttgaatagttggattttgcttcttactcatgaagaccacagggcaatgtggggcaagccctctactttttggcgcccactgtctctcacggtct

SEQ ID NO: 187265 - DNA, 290 bp, Homo sapiens
aacaaaagtactatccccccttttgccataattgttataagtccttaaagagtgaattcttctcctacggtacaaaaattataggttaatacaggatacaagtgtggccaagcttgcagtaggatgaatcaccccaaaaattgctttaattaggtggccaagaagtgcgttatttgaagtgagaacatctgttgcaacagtcacaatttaggagggtggaccacatccagcactgacatttaagggcaatttacgagaattactgttaaattacaagaatgatatgttta

SEQ ID NO: 187266 - DNA, 244 bp, Homo sapiens
ttaggatacactaggcttggtgacctgtgagatctgttctaagcctgaagatctttcaatgtaggtaaacatatgcagcagtcaaaatcaccaaaaactgagcatctgtatatgaaaatgctacattataacatgattattcatccacatggatttttaaaatacattctacacatacctgcttcacaatgcgagatgaacaacatgttaatatgcacaccccgccctccaagacctcagtgtt

SEQ ID NO: 187267 - DNA, 397 bp, Homo sapiens
tcttgtccctgacaatttaaagccttcaagtttgaccttcccaaccctcaaccttaggtcgtgtgaggttgtagccagccttagttctcaagttgaatggggagtctatttcacattacatgttgttttcttcttcctatcaaatttcttttctctgtaagctaataaattattattgtgttgggggtaatccatatggcagcaaacaatggcacagctaattgttatatacaaatcagggataataaaagttaattggatatgtctgtaaacactgtatatttggaatggatgcatttccagttagtatcagtctgcttatgacaaccaaaacactgctgatagccagttggccagaaattatgttcacggatgcacatagacatcattgtgaaca

SEQ ID NO: 187268 - DNA, 384 bp, Homo sapiens
caggtgaactcttgagaaccttgtcttccagccacagtcctccctctggccagcaatgaagtccacagtaaaaaataatgataaaggcacacagcatatctgttattctagtaatcacagatgcatttgcagctctcatcaaattccaatatggactgagccacactatttcaaatgctgggccgtgaacgtcatagcaatgccctcgagcatctccaaaacaaccaatagcaaacacagcttaaatgtctctttgggaaacagctatgaagtttggggtacatgtaaaatgggaatgttaatcctatccacattttaggatggttaggagtctggaatgaaacgatagacatatagtgttgggcaaaatgcctagtgcagtgg

SEQ ID NO: 187269 - DNA, 300 bp, Homo sapiens
agctaaaaaataaaacaaagatatatgtctaaatttcatactctttgcagcattacagaataagggaagatagttggggtagagaggtggataacccaacaatagggaaatggttaggtaataaagagagtgtcaattttgtccgacagcattaaaatataacaaccaggcaaatattcattatgtaatattagcattcattcattatattgaggatatccattacataatattgctgtgatggggcatgaaatagaggacgggaaccaaattcatccatcacgttacaacatatatgaa

SEQ ID NO: 187270 - DNA, 402 bp, Homo sapiens
ctttgataagtctggctacagagtaaagttaacattctattatgaagcaaggaataaatccatccctgtatcaattaaaggaagagaatatcaatgtgaaagggggcattagaaaccacgcttcaaaaggattcccacagtgacagaacttctcaatgaaacaccacaccccaagtaacgggggcggggtggtgcaccatagaatctgcccctaggaggcacagccacctccacaccgagggtttccagtttcccattcacataaaagaaacaagtaagagattctgggaggcgctgggctaggaaggcatctactcactgtctccaccaacaattccctcagtaaagcagccattgcccaataatgcttctatttattttacccagaagcagatctattag

SEQ ID NO: 187271 - DNA, 702 bp, Homo sapiens
agatcaacccatggttacgattgacactagttgcctgggatggaccaattgacctcttggtggttcccatcagtgtctgggagacagtggtcatgatgcaggaagcaaggacccatgtggagctctgccattaagtcgatgtgggaacaatcaccctcgactgaaatatgggcacttctaattcatctttcctccagaacaacctgcttccataactggcagccctgccccaccagtagactatgtctaaagcttcctgtgctctcagggccaactgaagccacccaggactgcagactgaagatgggaactgtagccagcactacctggggctcaccccaccagccaccccactcccaacccagctcgctaggctttgccaagcaccaggccaggctcagcagcttgcgagccatgtaacatgccagatagatagtggagggaacatgtaactgagtaaccagcaccagagctgggccacacattttttgtttttcatgcagcctgtatttgcgggagggtggtggtattgatggctctgtgtgccccaggggtctctgtccaggcactctagtgcttctctggtggctgtccctctccactggtccatatttcaaacttcagtttggggaatgggccatcagcctagcatgccagagaggatcccttactgactcctgagacccctgggtgcagctcgta

SEQ ID NO: 187272 - DNA, 360 bp, Homo sapiens
taacagcaatataatcctatcatctctcttttgttttgtgtttttcagttggtgtgttaatgagtgttctcacttcattagctgtctcatctccagaacagccatatggacagctaagtcaaatatgaccatttccagtctatagtaagaagactgagaccaagaaagatcagatgaaccgtgtgaggtcatccagtgaataagggacttgactgggacttgaaggagggtttttaaactgtaaggccaatattctatcctctgtttacacgttcattaaagggagctccaaaaaccacatttctgggcctacttcctttgggccagttaaacatgagtttgggttagttaaacatgagt

SEQ ID NO: 187273 - DNA, 163 bp, Homo sapiens
gttgggcagagtttgaaaagattgtagttgaagaggtcaggagctatgtccctactgcagttttctgcagtatctggcatgtcatgcacatgagggaaataccaattatatgaataaataggaggtaggttttcgtttggatatttatagtgggcaataagtt

SEQ ID NO: 187274 - DNA, 621 bp, Homo sapiens
cagtttttcaagaagggtcagactccaagaacaagcacaattagaaataaaggatgacttctaagaattgtgtgccagtcagaaaacactgtcttagttgtcgacatacaatataaagtaatactaaggaatgaaaaatgcaaggaagagaaattatggctttcttactagtgacttagcctctctgcttgaatcatatctataactttttgaggttctttataactgtggggttctcagccacaagcctaatgagatgaatgggcatgcaggaggcaatagcgtgcctctcaagctcaccagagcagcagcagagactgagcctgtgtggcaacaggagtgtggcccaaggtacactttctggaaattaggtaatgagcaaaaaaagcatttggtcagtactagatgagatgtttttaacacatactgacaacagaccataatacgcaaggagataaagtttcacacttttttttcttgtggttggttatagtcgggttggcttgaaatttagagtatgcacatacggttacagaggcccttgatagatttgcatgacagtaatgtctgtgaacccaatattcttcacgcctggggtcatggcctgcacccgtagatcca

SEQ ID NO: 187275 - DNA, 661 bp, Homo sapiens
tattcagataacccaaataatcaccatcacttctcttcagtggaacactcacagtgctcaggaatccttgttttcctttattaaactcctgggaaactttctctaccagcctttctaagccttttctacttttaaagactaatttccatgccctgaatcctttatcctcagatcatctcataaaacaatctcagtgaagcaggatacaaggtaaatgtcatacatccccaacatcttaatttatacctctcaaaattttctctccacccatcttcccttaccttgtcctcagtctcaaatgagaagatggccttcctcctaaggctaaagcaatactttcggttcagcctccttacctcctctctacaacttcgctctatcaattgttctgtatttctcgtattttcaatggtttacgccaggttccttgctattgttttgttttaataaccctaaccttgctaccatcagaataataattatatttctactaactgcaaaatcttataacattggtatatatacttcacactaccattcattagctattactcttttatctaacttcctatccatcactcaactgcaagtgcttcctctaaatctttataaccaaatccagtggtcttttctcagtctttactctttttttttttttttt

SEQ ID NO: 187276 - DNA, 679 bp, Homo sapiens
aggaggaattctgaggaggtgggaggagttctgaggaggcaggaggaattctgaggagggaggaggagttctgaggaggtgggaggagttctgaggaggtgggaggagttctgaggaggtgggaggaattctaatggggggagttctgaggagggggaggaattctgaggaggtaggaggagttctgaggaggcaggaggagttctgaggatgtgggaggagttctgaggaggtgggaggaattcccaggaggtgggagaagttctgaggagggaggaggagagaggcatcctaggtcaagccagaaagaagagtggtgaaattgcttcctgattcctccttggtgactctgaggttagagaggaagctaaactctgaagcccaccttatatacggaagatgatctggggtctgtggcattccaggtcctgctctctccctaggccatcacttcagatctgcaatggactttgtatgtcagccatgataaaccaaggccataccagttttctatttggtcctcaaatgtaccaaactctttcctgccccagggactttgcgtatgttgtctcctatacctggaatatatgttttccaagcctctgtctctgagactcggatgaaatgtcatttcctcagactggcctttcctgaccactccacttgcccctcccaccct

SEQ ID NO: 187277 - DNA, 254 bp, Homo sapiens
tctccaagtcacatagctggaaattaaatgttcaagttctaccttggccccaatttgatgtttggtgctctctggattgagttgaattatgttcaagctttgcaatttcacttgtggtaaaggctctaacattttctctttctatgcaaatttctttttttcttttttttttttttttttttgcgcaacggaggttcgttcttgttgcccagtctgaagtgcaacgacgcgacctcggctcactgtaacctccg

SEQ ID NO: 187278 - DNA, 481 bp, Homo sapiens
acccagagttgaggggccaccggggtccctctcttgagcacaggcgcccggagcgcaaatgcgcggactgacccagcggccggcgcggcggcgccgggcggacttaatcgcgggcgcagcgcgaggctcgggacccagagcaccacctaccggcggcacggtcggcgcagcaggccccagaagggcggggaacgctgtcaagcccaggggcacttcggcgaggagccccacccgccctccagctgaccctcagctgtggcccacatccggggcccagagcgccgcggaaacgccgaagcccggccggcaggtacccgcacgtctccttctgccaccgcggagcttgcttcattaactccgtttcatgtgacttattttatttcttttatttttatttatttcattttattttatttcacttatttcacttcaatattttatttggtttatggttttacttcattaattttacttcattaat

SEQ ID NO: 187279 - DNA, 854 bp, Homo sapiens
tgtttatctacacgagttccagtttctttttgctcctaaaagggtcatttctgcagactacattaaacacaggaaaattctcataaatatcattaagaattcctgccatccaaaggtgctacagcctctcacccgaaactgtcagttactgaaatgtcagctcagctcggcctgggcgtgccacattccttccacaaccgaggctgcatgctgcaagcaccccaccccttccctggcatatgcagcagactgataaggccgacttcacagagaacgttccaggctgttcccagccatatgggattaacgccttttgagagcaccagaaaggaaaaatctgggaaacgtgccattaaaaaacaaactccaatcttaccagcctatctatcagttccactaactgcctaaaaaccacaacagagacgacttcctaggaatgcaatcaactgactgcttatctcaaaggagccaactgtctctgattttgccaatcaagtctgttcacatagagactgaaggaggggaaatgaagtgctaagtatattctctatatgtttgaggacaacttcccatttaaggtaacttaaaaaaaaaggtatatatttgcaaaatattattagaggagactgaagacgtaggctatttataaatgctgcaacgcagcagtcaaacgttagctgcatcattcagcaagtaatgcgaatctcagggggataaagcaggaattacaactatgtcctctattgtaataaataaaatgaataaaatgaacttgtcagcattcttacaatactaccagatctcggaagaagagtggggtctgaatatatgaatcttggctagaaatttctaat

SEQ ID NO: 187280 - DNA, 275 bp, Homo sapiens
atgcagttttgatcttgaggctatgagatgtattttcagatcagatttagcctaaggttacttagatttagcctaggattttctacagctgtatcattgaataaagtactttacaatggcctagtttcttttcacctatatagacaagcctgatctaaccacgcctttgcaacatcacatttatgtaattataggattctattttattttattttgttttttgagacggagtctcgctctgtcgcccaggctgaagtgcagtggcgcaatcttgg

SEQ ID NO: 187281 - DNA, 344 bp, Homo sapiens
aattcatgtcatttaatgaacatgggctatgtgccagaaaccaccaggtgccagaatacaacactgaactacagtaggcctgtccctgggccccagagctcccagacacactaggaagacttgttgatttaatgataaaccttgattgagctcatgattaacatcttcaccaccagacatcattgagtgctctctgtgtgttcaactcagaacatacccttcctgccctcagaggctggaatgtgagagtcattaagggagacaccattgtgggagtgagaaaatcctggacttggagggaactgactagggatcacctcccagctctgccatggacccactgt

SEQ ID NO: 187282 - DNA, 762 bp, Homo sapiens
gccacactggtcatctacaaagtaatgtttaccaattgacgacagggatttaactagattaaaaagatcaaagtgtggtttttctctgctttttaaaatttcactcggaatttgtagctgggccaattcaacacattttacttttcagtggaattgatttttctaatgtttcagaattttaacatatcaagaagaaaacaacgttctcaaagtctggcctctttagcatgatgtaaacctatagaaatgctttgaaatgtgctggtgtaagataagagttatcttgtatgatttaatcatatgcagtgttgtctcagttacgttcagggaaatgtttctgtgtcattcagagatgcttgatgaattaacacctcccaccctgagtgaggggttgacttgttgggagatgatttgggcttcactgggatctgtgacaggtgggggctgggctgggtgtcacaaagagaatagtggtagaaatcgggcgaaggaagaaagaagttactggtaaaaatcattacaccataaagcaccaaggaaataactgagttaaaataggtgaagtttcttttttcccccctgtaacaggagagttttccttatgataattattctgagacttggtcactttgtttttgaatgtggagctgctgaactcattcagaagccatttgctgcctatcaggactttctgaagaagttcttttgcctctgcctaccctctggcaccctcccatggaggcacaggggacccagagctaa

SEQ ID NO: 187283 - DNA, 2273 bp, Homo sapiens
  misc_feature (178)..(178): n is a, c, g, or t
  misc_feature (1575)..(1575): n is a, c, g, or t
atggtttctatcatcattccatttgatgcagtgggctctattcagttcattcacatctgtgtccttcgactggataccacttaagggcagtatccttgaagcttattgtgaacgtaagtgtgactcgtgaacttctactgagctaaacttcacaagagactgccaccagtgtgggagncaacacgtcgtcggatgctcgaaatcaagggtctcacgaattggacgctctctgaggttctactatatctaggcatcttatgctaacatgagagattggacattgcgcatgtccgcatatcaagactagaccaagggaactgaccaactctatagcctaggagggaatttgaaattaaattatatgacagaaggggggaatttaggaccaaccagcaacagtttgagaaaagtaccaaccccaaccaaatagatataccatggacttaataatataataaaaagcattattttgtagaaactgcttctctctttgtagaactagttgcaatgagttatgatcttaaacctagtgatatgatcacactaaacagtatcacatttaggctgtgtgtgtttgtgtatgcgtgtgtgtgtgtgtgtgtacatgtacattccacttttgcctgtgtgactatgaacaagtcagtttctcatgataggactcagttttctgaattccaaagaggacagttgagctggattttgtttagggcatcttccaatgccagttccatttataaacaattattgtttttccattcccaagaaaatgcaagattgtgttttggggaagattctcaactgtgagatgacagcgtatgctatgttcctttcattgcaattggtgttttatagcatcctgcccagcctggcccgcatttggccccgtagccatgctgtcctcaggctaggatctggttagttgttccagactcaagttggtccctccttctgctctgtggagaaaaatcacaacctcaaagggataggtttttttttttatggttgctcctgagagtggcatggtccctctagatgtcagcaaatattaaggcaattaaataaggcaaattaattatgggaaacattagcattgatttctgaagacagtcttcttcttgctgagtctagcctcaccccttcttgccttttaggaagagttccatgttcttagacaagcttgttttcggataaaatattagacttttttcttagaaaatccctttgttttaaaattggtaattttttaaaaatcccaatctctggctacatttgagtttgaggaaattctttttcacatctctaaatatgtttcaatttgatagtattagtaaataagtaaataaaaatgccttattccacaaatgtttattgagatccttctaatttccagtaccaggaatacacacatcaataggacatggttcttatacttcataaagtcatagaaagcaaaaagaactggcagttatctggttcagttatctgattctctgaaagagaagaaatataccagccagtatagtcaatattattttcaaaaatttggtgaatggccattgtaaggtgcatttncacacatataatcatactcctatcaactataaatatatgaattgcttataagcatgattgacatttgttattcttacatagattttgtgagtgactagcaaaagctgttctttgcttctagaaccatgctgtcccaatataactttttgcattgatggaaatgttctattttagcactgtccaataagttagcctttagcaaaacatagctattgagcacttgaaatatggctagctcgttatcctcagcaaactaacacagcaacagaaaaccaaacaccgcatgttctcacttataggtaggaactaaacaaagaaaacacatgggcacatgggggaacaacacacactggggcctgttgaggggaagaggggagggagagcatcaggaagaatacctaataaatgctgggcttaatacctaggtgatgggtggagcaaaccaccatggcacacatttgcctatgtagcaaacctgcacttcctgcacatgtaccccagaactttaaataaaagttggaaattaaaaaaaaaaaaagtattgggcatgaggtccaaaagagaattggtatcaactaagtaccgttaacatacaagatatgacaatgaagaattaatactgattagctgctagatacgaagatgcttacatataaacaagcacgtttttcaaaataaacatcttgaaactaaaaaaa

SEQ ID NO: 187284 - DNA, 701 bp, Homo sapiens
atggcttattcatgcattcatttattcatttgcttattcattcattcactcattcattcaataaacataagcattttttaccttgaggaatgaagctacatcatggtacatccaggtcaaattggagaaactctgatgtcagtcagggtacattttcccttttagtctcattcagcactttgtctgggattgaatttcctgttcctagaagactagaccaagggaactgaccaactctatagcctaggagggaatttgaaattaaattatatgacagaaggggggaatttaggaccaaccagcaacagtttgagaaaagtaccaaccccaaccaaatagatataccatggacttaataatataataaaaagcattattttgtagaaactgcttctctctttgtagaactagttgcaatgagttatgatcttaaacctagtgatatgatcacactaaacagtatcacatttaggctgtgtgtgtttgtgtatgcgtgtgtgtgtgtgtgtgtacatgtacattccacttttgcctgtgtgactatgaacaagtcagtttctcatgataggactcagttttctgaattccaaagaggacagttgagctggattttgtttagggcatcttccaatgccagttccatttataaacaattattgtttttccattcccaagaaaatgcaagattgtgttttggggaa

SEQ ID NO: 187285 - DNA, 647 bp, Homo sapiens
caaacacatgcacacttagtgttacctaatgcatttgtcccaagtcatcacttctctacaaagagcttttaattcactggctcaggtggctctggatgagttaggaggggtcaccaatgtggtttcctctgaggaaactctctccatttgtctttgagccaaccctgaactggccctggtacctgagtaagagccatgcagggccatcagcagaacatggccttgtggttctcacccagtagtgtacctcacaaccacaacttctattacttatagtcccttttccccttatttggttaaaggttacttgtatagtgggctctatgtaactcccatagtcagctgaactctcaattggagaccctactttctctaggcatcctagcacacaggcaactttatataagcctatatttatgctacattacacccccattcttacgacaatttgcttcgcattccattctcctactagcagccgctgctatcacctgtagacctattagcattcaatctattctatcattgacgtcactgctccccgacttccggcccccgtggccgcccgagccgcgcacctgcaatacccccaactaaatcctacatgcccaccatacacctccaaccagggcacaccatccacacct

SEQ ID NO: 187286 - DNA, 315 bp, Homo sapiens
aacctcttcattaatcctgcccatcacataaaactcaaattcttcctactggcattccagaccctcctctccctacccctaatctcaatatcattctttcagtgcttctaagtggctcacccatctccctaataccactttccccatcatagtatctgcttgtaggtactagtagaatatagtgcacacagtgagcttattcatggttgttgactgactaaaaagcacagaaaaaaaaatcacttcctatatgtctcaatccaacatgttcctgcaggttgaaaactataaactccaaaaaacacttcaagcaag

SEQ ID NO: 187287 - DNA, 502 bp, Homo sapiens
ccttgcagctttccctactcctgccccaactgcagtaggaaatggaatcccattagttacccattgtcctgtcttcacatttgtttgtcatccatgtgtgaccatgatctgttgatatctttgaatctcttccctccaaaccccaagtaagttgtccttcaactgttctcagtttttcttcccatatattatttctggactgggataccacgttccccttggactacaatgtagacctcttgcattgattatatatttgtagtgcttgacttttttgcttatcggttggatattatagcacaaaactgagaaaaggaaaatcaacaaagaaaaaaatttttgattaaagcagggaattaggaatattttctttttctccctattttactctttcttcaatctagcttctatatgtgaaactaaaatgcctattacctatcaccaatgtatgtgtttttagtgaaccaagattggcagcattcagtcattgattaaattaccc

SEQ ID NO: 187288 - DNA, 297 bp, Homo sapiens
gcccgctaattttgtatttttagtagagatgggtttttgccatgttgatcaggattgtctggaactcctgacttcaggtgatccacccacctcggcctcccaaagtgctgagattacaggcgtgacccaccatgcccagccaacgatttttgtgctttttgtattttttatttttcccaaggaaaataacattattaaatatgactaaagtattcttctataatctgtatacttttttttttttttgagacagagtatcactctgtcgcccaggctggagttcagtggctcagtctc

SEQ ID NO: 187289 - DNA, 410 bp, Homo sapiens
ccagctgctcacacgcagagctgacacacagccaactgggcccaactcgacattcctgggtttacacagaaagttccgtctcctgggaaacccctcagtcctaggccacctaggatggttggtcacactgcaacgcagggagcaatgggaacaggagcccagacgcctctctcagcagcccaaaacgcagacactcgcaaggaagagaaatatcccaaatgtccatcctttgggttcaaaaagtcaacttcccttaataaggtgagagacgcatctgttcagagcagcagtattcacaatagcaaagacatggaatcaacccatgtgtccatcagcggtagaatggataaagaaaatgtggtacatgcacaccatggaatattatgcagccataaaaaagaacaaaatca

SEQ ID NO: 187290 - DNA, 289 bp, Homo sapiens
aggtgccaggggacggttggtgccctttattctgaagggggatgtgctgcccagggcagcgggacctggaattacattttgagatttccaggaaagtttcaggtggaggcagaggctgggcgcagaggaaaatgtggcagtggcagagtgtggggtgagagccacgaagagaggaggtcactgaggtggacagtgggacagagagagggacggggagaggaacaggagtttcagaaacgtcctggacacattgggcagccgtcagcattgctttccattcatggacaaa

SEQ ID NO: 187291 - DNA, 574 bp, Homo sapiens
gaatacttgagctatttagctgtccttcaatcaattcctaacgtccttttatccaaggaatatttagaaatgtaactgaaactctctcatgaactgtttatggacaagagatgaattgacagctgcttttactctgtcccattgattgtttataaagctaggttaatagcttctgagtaaaattttgataatctgacctctggattttttcaaactctcgagtagatatcagtcagttctgatgagtgatctaaccttggttcgtcaatgcaccctgtgtatgtagtagtctttgattcactacgtctgtcttctcggctccaaagatcaaattaatttttcctggataaaccacaatgactgaaatccctctcctcttcaactttcaataggaacttcacttacttctcaatgatttataatccattattccctatctacccttttatctttgacacaccaaaaaaaaaagtctacttttatagatcatatgtccttgcatgtaaagttcttaaaatgttttttaggtcttcttaattttatctttcccctaccttgctctaggcttttttgg

SEQ ID NO: 187292 - DNA, 2078 bp, Homo sapiens
ccgcgctccacgcccgcagccgccagacggcagcgcctgcgtccgtgcccgccccagccggtgcgcgggagccgcgggggcaaaggcgcagtggccagcggaccatctctcgtgccctcgctctctgcgctccggggcagctgagccccggccacccgctctccaagatgaagaagctccagggagctcacctccgcaagcctgtcaccccagacctgctgatgacccccagtgaccagggcgatgtcgacctggatgtggactttgctgcacaccgggggaactggacaggcaagctggacttcctgctgtcctgcattggctactgtgtaggcctggggaatgtctggcgcttcccctatcgagcgtacaccaatggaggaggcgccttcctcgtgccctacttcctcatgctggccatctgtggcatccccctcttcttcctggagctctccctgggccagttctccagcctagggcccctggctgtctggaaaatcagccctctcttcaaaggcgccggcgcagccatgctgctcatcgtgggcttggtggccatctactacaacatgatcatcgcctacgtgctcttctacctcttcgcctccctcaccagcgacctaccctgggagcactgtggcaactggtggaacacagaactctgcctggagcacagagtctccaaggacggcaacggggccctgcccctcaacctcacctgcaccgtcagccccagtgaggagtactggagccgctacgtcctccacatccaaggcagccagggcatcggcagccctggggagatccgctggaacctctgcctctgcctgctgctggcctgggtcatcgtgttcctctgtatcctcaagggtgtgaagtcttcgggcaaggtggtgtatttcacggccacgttcccctacctcatcctgctcatgctgctggtccgcggagtcaccctcccaggggcctggaagggcatccagttctatctcaccccccagttccaccacttgttgtcttccaaggtgtggattgaagctgctcttcagatcttctattccctgggtgtgggcttcggggggctcctcacctttgcctcctacaacacgtttcaccagaacatctatagagacaccttcatcgtcactctgggcaacgccatcaccagcatcctggctggctttgccatcttctccgtgctgggctacatgtctcaggagctgggcgtgcctgtggaccaagtagccaaagcaggccctggcctggcctttgtcgtctacccacaggccatgaccatgctgcctctgtcacccttctggtcctttctcttcttcttcatgcttctgactctcggcctagatagccagtttgcctttctggagaccattgtgacagctgtgacagatgagttcccatactacctgcggcccaagaaggcggtgttctcagggctcatctgcgtggccatgtacctgatggggctgatcctcaccactgatgggggcatgtactggctggtccttctggatgactacagcgccagcttcgggctgatggtggtggttatcaccacatgccttgccgtgacacgggtgtatggcattcagaggttctgccgagacatccacatgatgctgggcttcaagccgggcctctacttcagggcctgctggctgttcctgtccccagccacgctcttggccctcctggtgtatagcatcgtcaagtaccagccctcggagtatggcagttaccgcttcccgccctgggctgagctgctgggcatcctgatgggcctgctgtcctgcctcatgatcccagctggcatgctggtggctgtgcttcgagaagagggctcactctgggagcggctccaacaggccagccggccggccatggactggggaccatcgctggaggagaaccggacgggcatgtatgtggccacgctggctgggagccagtcaccaaagccactgatggtgcacatgcgcaagtacgggggcatcaccagcttcgagaacacggccatcgaggtggaccgtgagattgcagaggaggaggagtcgatgatgtga

SEQ ID NO: 187293 - DNA, 262 bp, Homo sapiens
tgtggaattccaggaggaagaaacagtaagagcacaggcctggaggagggaaagtatggggacatatttgtgcatcagattgtctaattagttgttgcttaaagtatcaggaggtctctctggtaaagatgggcttacgctgaaacggtgaaatgtgcacttgatttagcagctcacgggggagccttttagagttttggagtttggtggtaacctggtcaaggcagtgttttataaagatgcatcaaggacaaagtgatat

SEQ ID NO: 187294 - DNA, 334 bp, Homo sapiens
gcaaagtcctaggggttggtggagccacaggctggaaatagcctgggtccctgaaacaccatgtggaggagattgcttggcaaccagggacacccagtgggacttgagcaaaaaattacccatcaccttttgatttaatctaccttaattatcattccaaaatttcttttcattatactattatattaatttcactctttcctggatactatgtctttcttttacttggaagtgtttattgaagtattcatcaagtaattttttaaaggaagggtactgaagtaaactttctgaatctttcatttaaaaaaatccccgttttactctcccttta

SEQ ID NO: 187295 - DNA, 479 bp, Homo sapiens
agaagatatacctagcttattcagctttatcttcattcagaaattgatattaaatatgtgtgatagagtgcaagcatactgtgtttcttcacaataggatttgaatttcaggggatttaaactatatataggaaggaaatatatcgttggcacttattgtttatagagaaagtacaggctgagtatcccttatacaaagtgcttgggaccagaagtatttttggagtttgaatttcttcagatattggaatatttgtgttactggttcagaatccctaatctaaaaatctgaaacccaaaatgctccagtgagcattttgtttgagggtcatgtcaatacacaagaagttttggattttggagcatttcgaatttcagatttttggattagggattctcaacttgtattcaggatgcagataagtcccttctctccccattcttcccttctactctctcatttctccaaaagctttagg

SEQ ID NO: 187296 - DNA, 188 bp, Homo sapiens
agattgtatcagggcaagttgcatagatcctacccttcctttgatatccattgcaaagatcacctccttctggggggctttcccaattcctgcagtggaaaatgaactctattccaacaactctccgaagtacacagaagttctttgtgttatatctgtatatctagattataagctttttgtcaaca

SEQ ID NO: 187297 - DNA, 451 bp, Homo sapiens
cctgacgcagagcatttccctaataatgagccctctcagaataacctttgtctccttagtacattaatcaacacagagtgactatggccaagacagtgtgatagtcctgaactcggggaattctggatgaggatatgagaaatctgtccgcatctctgcctaccgcctcaggaacttcttgggcttcccagcctctcagctcaaactcaggtgtgaaggtttatgatgcagtcacagctttgagcagagaccacaggcaggggaggaattagtctgcaaaggtgctgatcgctagggctggacatggctttcccagagaccagtttctgtgggtcccaaagagagatgaaacatggccccagccctgaaaacaccagcgaggacccaagaggatgtgtatctattgatgaggaactaatagcattagtcaaatttcttaccgggctgaatg

SEQ ID NO: 187298 - DNA, 242 bp, Homo sapiens
caatatgggttttgttgctattatttccctcacagggcactgtctattatataatttcagccctacctttttctgttgatatgccaaagcatattctcatattgatcttcatacacaaagcagaaatatggaattcatgataccttaatttcctattataaatcagttcattcagcacagatgggcatgagtaacatccgccatgtacaatgaatgtgagaaacgcttctagtttatttgta

SEQ ID NO: 187299 - DNA, 362 bp, Homo sapiens
agaggatccttaggagatgtggagaagagctgcagagtcagggagaagagctgttgtgcaggcaatcaacagtgtctgccataacccccctctcttaatttgcgcacagtaatattcactctttgtggtatatatggctctagggttttgacaaattcataaggagaaatggagaagaattaattatgagttcaagtccaagtcttctagcaataatactctcacataagaagatcattacattgtgtactatgcaattggaagttctaattaatagctgaaataccaagtgagggggaaaactttgaagtctaaattgtatcaggctttcctacacacacacacacaaacacacacacaca

SEQ ID NO: 187300 - DNA, 454 bp, Homo sapiens
gttagaagtagggttgccagataaaaaacaggatgcctgattaaattagaagttcaggggaaaaagtgagtttcagataaacaaattactttacagtataagcatgtcccatatattacaggttatatgcaaatgtcctaaggacataaaaagtgttgctttagtaagaaggaagccaaagaaagagtacttttagtggaagtagggtggtgtaaaccagattgcagttgaggaatgaatggaagataaagacgttgagtcagtgtttgtaaacaagtctttcagaaattgatttgaaagggaagaaacaaggtatttatttcacttcctctgagaagttcagtggttatttttcttacgtcgctattgttaagccaaatgactatgaaccgtttaattgtaaataacaccaaacatataatgggaccacaaataaaagagaaattattcttaa

SEQ ID NO: 187301 - DNA, 364 bp, Homo sapiens
aaatgagaagtttggaacagacccccagacaggagttcagttgtccaggcattttgatggtgtggcctgaagggctttaactgcttttaaaaattgctagcataaattgtgaagacttgaaggggatgatattgttgctcaggcctagctcaggggaggaaaccatgagcagagttgagtgcaagggacagagtggtgcaagcctgttgagaatccgaggggagaggaaagaggcagcttctagcgcaccacacacggagcaaagtcctggtgctcagagcacagtctgggagagaagtgcaaggagtggggagaagagactaatgcaagcccatcgctggagacagtgatgccagtgcacagg

SEQ ID NO: 187302 - DNA, 519 bp, Homo sapiens
gtgagtccccaagcatctgacgattcttgaatgaggatattgactacaggttacttagttgaccttgttaaagccttatcatatcaggattaccagggtacaaaaacattcctaaaataaatggctctgttactaaacactccccttataacaccattgttgacactgtgacttttaaaaatctctcatatctggccatacctgtctcaccttcctaaagtcacactgacagatgacacaccagggcaagatgaaaactgtagggacttgtgtagaatgaaacgataacttcctgttcttaaaagggactgttgatataatatcctttttgcaaaaacagggaaatgcttaaggttggagtttctgttttcaataatgaagatggatattcacatgaaaagaagacaaaagaaaacagaatgccccagctgtgggctaagcagttggctatttttatttgtcaggacaaaaacatcaaatgacaattctttcttcatttctctttatgaatctagtact

SEQ ID NO: 187303 - DNA, 381 bp, Homo sapiens
tatatgggattatcaacactgaagagagttgttactaaatttggagacagagtgagaaatagaagcagtaatataaggtagggaatgaccttaaagggaaactctaagtaatctcaggactgtatgatttaagtgacttctgcaggggaaaaaaatgctttctacaccaatatgacatggcattattagaattttaagacttgattttggtttttggagacaggttcttgttatgttgcccgggctggtctcaaactcctgggctcagagactacaggcatgagccaccatgcccagctaatttattttttgtagagacaaggtctcactatgttgcccaggctggtctgagactcctgggctcaagcaatccccggtcga

SEQ ID NO: 187304 - DNA, 346 bp, Homo sapiens
gttgaaggagtcacttaaagaagtccagctagagagggatgaatatgctgaacatctaaaaggagagagggcccggtggcagcagaggatgagaaaaatgtcgcaggaggtttgctcgttgaagaaggagaagaagcatgataaatatcgggtagagacgctggagaggagcttgtccaaactcaaacaccagatgggtaagatggggctggcgtgacctggcagcaggactggcatcagagggctgtgagggtggcttggagtgccccagcgaggtgggtggatgggaagggctttgaggcagagggaaagaggtctgtgccaggagacggcaagtcttgtcatc

SEQ ID NO: 187305 - DNA, 313 bp, Homo sapiens
gttgaaggagtcacttaaagaagtccagctagagagggatgaatatgctgaacatctaaaaggagagagggcccggtggcagcagaggatgagaaaaatgtcgcaggaggtttgctcgttgaagaaggagaagaagcatgataaatatcgggtagagacgctggagaggagcttgtccaaactcaaacaccagatggctgaacccttgcccccggagcccccagcagtgccctctgaggtggagctgcagcacctgaggaaggaactagagagagtggcaggagcgctccaggcccaggtggagtacaatcag

SEQ ID NO: 187306 - DNA, 361 bp, Homo sapiens
gcgtgcaggtttctgggatttggagtcctcataggattctgggacttgaggttccttgcgcgtagggtgccgcgccttcccgctggtgaagtctgtctctccagcgtgctccctggagctgtcggggtggaaaacctggatccagcttgggcatctgaaggtcctggaaatgactgggcttcctcacgttctagactttattaactgatgaagtctcccttcttctaattgcataaatcgtctgaattatacatgtcttttgggggaacaagaatttggttacctgctcagcataacctcttttatggaaataatttaataacatatgtaacaaatataataaaggaagaaactcaaccag

SEQ ID NO: 187307 - DNA, 170 bp, Homo sapiens
catactctcacatacataaccacccaccctactgacctacctactggctgtgcttacctcctcaatcctcttgcaacctctgtacagatatctattactacgcctacagtggtcttttataacttgtttatattacttttctcttccaccacactgtgagctccttaagg

SEQ ID NO: 187308 - DNA, 171 bp, Homo sapiens
gattggaatgtgatttccttttcttataatgtctttatgaggttttagtatcacggtgtttatggcacattaaaatgagtaggacagtaagtaatacctcttcagttttctgtaatgatttttttagaatccatattttattttattttatttttttgggacggaagatca

SEQ ID NO: 187309 - DNA, 296 bp, Homo sapiens
gatttcaatatggctgggtacagagaaggccagagccagtaatctgagacatgatgcccattaatagtgaagttactctgggcttggccaaagtaggaccaaataacaagaagcctctggggctaggaagggagcttagatttaacatggttgacaagagcagtcactccagatttctgaagacggctaggatatgatgaccaaagcagtgacttagagagatgtattctggcaatttttcttgttttgcagagaaaaatctgtaacttccactattagaaaaaggctgttaaggg

SEQ ID NO: 187310 - DNA, 422 bp, Homo sapiens
tcgctaataaatggctgtagagctgctttgagtaaggtgtatatagtgtatgtgatgctgtagccatgagtttaaatattaggcttattttgtatacctttttgcatacgtcagatttgatttgagatgtgtaaactttgtttggggataattttaaaagaaggaacctgggttttgagaggggagtagaagtggatagaataaaatagatgttttgtaatgtagctttgggagagagaaaaacctgaggccagtaaagctgagcttcaaagtgcattcttatttttgttgtcgaagggaggtgaggaagtcaagtcagttttggcatacagtttagaattgttttttggctaatggctagggttgctagtgggtgaagtttgaggcacatctttgtctcatatggctattaaccccacagc

SEQ ID NO: 187311 - DNA, 459 bp, Homo sapiens
tcaggcccactgtctctctgttactgcaatgacatacatagacatcataagacaactactctgtccatgcatactggcttggaagtgacactttctaagaccttgcctgcctaaatatgcagcacaatcatttctacttgcataggaatcattctgctgctctgaaagcacaagatccaaggcagactcatccacctaaacatacaccacgtagtcatttcttctctgggatccagccatcttcacaggaggcctgcaaaaatggtgtctgaccaatcagtctgtgattcgcaacgtaagccgggaatccttgctcttatacatcacagcttctcccaagtagtttttctataatagagttctttctgactttttaattcaaagccggaaacagactattacctttgatttatgctgttacgtatcctgaagtgaacagtacacaagggcataattcat

SEQ ID NO: 187312 - DNA, 299 bp, Homo sapiens
aagctgattgccaagggaaaacacaatagttgtcttcactgtttccttagtgataaaagtagggctgatgttttgaagatatatgagccagatttttatgtaatacacaattttcacaatctgggcagtccaaagattaaatgtactgcttctgtgggtagtgagtttctccattgctagatctaagtatcagatgggtaattagtctttgagatccctactaaacaaagtttataattatgattctagaactttctagagtaaaccataatatccctggtcaaaggcaatcaagctat

SEQ ID NO: 187313 - DNA, 722 bp, Homo sapiens
aaaaggatacattatgggtaagggaggatcctggctaaactgacttaagcaagattcttggtaaaattggactatgcagggacaaatacagaagtccaaaagttagggccaagttgagaagagagttcagagtagcctttgggaggctgaggcaggaggattgcttgagtccaggagtttgagactagcctgggcaacatagggagaccctatcttcacacatgtgcgcacacacacatgcacgcacacacacatgcacgcatatgtatgtatgtgtgtgtatctatctatatattcgataaatatatattgaaaaaacaaaagagagtttggtcaaggagagaatctttgtcagaacgtcttatatctgtgatcatcttaaacaacggtcagctcctgcccaatcttgtttgttgttttgtctgtattcttacttcctcccacaactgtgattattttcaagcaaatcccagacattatatcatttcatacatttcatcatgcatctgtaaaagataaaggtattgataatggtataaaaaaattactgttacttgttttaggtggggtaatggtattatggttatgttttataaaaatacagtctgttgaaatttctgagtctcttatatcttttgtttaagttctttgtaagggtcagaataagtctctgcattgtagttggttaatatgtcagtaagtttcttaatctgttggtttcc

SEQ ID NO: 187314 - DNA, 505 bp, Homo sapiens
taggttaaaatcttcattgtagaaagtttttaggaaagcaataaaatgtaaaataagattcgatgtggaaaacagcagtaaatactatgagaaggaagctctcctgatggaccctgtggacggccccatccttgcatctttgttggtggggccctgtgccctagagtacaccaagatgaagactgcagatcacttctggaccgatccctcggctgacgaacttgtccagaggcaccgcatccacagctcccacgtgcggcaggactcgcccaccaagcgtcctgccctctgtatccagaagaggcattccagtggcagcatggatgaccggccatccctctctgcccgcgactacgtggagtccctgcatcagaactcccgtgccacccttctctatggcaaaaacaacgttcttgttcagccgagggacgacatggaggctgtgccagggtacctgtccctgcaccagacggctgacgtcatgaccttgaagtggacacccaac

SEQ ID NO: 187315 - DNA, 1135 bp, Homo sapiens
gcggccgcctcgggtcctgacgtcgggcgccctccggccgtcactcagcgctcggccccgccccgccgcggctgccgcagcagcgccgcggccggaggagctaccgccgccaccgccgccaccgcctcctgggactcggaacgcagcgctcggagccatggcctcggcccccgcgggtaagaggccgctggacacgagggcggcgggagggcagcgcccggcccccgcaccctctctcggctgacccgcggctctcgtttcttgtcccacagaggcggagacccgacagaggctgctacgcaccgtcaagaaggaggtgaagcagatcatggaggaggctgtgacacgcaagtttgtccacgaagacagcagccacatcatctccttctgtgcggctgtggaggcctgcgttctgcacgggcttcggcggcgggcggctggcttcctacgcagcaataagattgcagccctctttatgaaagtgggcaagaacttcccgccggctgaggatctgagccgcaaggtgcaagacctggagcagctgatcgagagcgcgagaaaccagattcaaggcctccaggagaatgtgcggaagctgccgaagctgcccaacttgtccccacttgccatcaagcatctgtggattcgcacagccttgtttgagaaggtcctggacaaaattgtgcattaccttgtggaaaacagcagtaaatactatgagaaggaagctctcctgatggaccctgtggacggccccatccttgcatctttgttggtggggccctgtgccctagagtacaccaagatgaagactgcagatcacttctggaccgatccctcggctgacgaacttgtccagaggcaccgcatccacagctcccacgtgcggcaggactcgcccaccaagcgtcctgccctctgtatccagaagaggcattccagtggcagcatggatgaccggccatccctctctgcccgcgactacgtggagtccctgcatcagaactcccgtgccacccttctctatggcaaaaacaacgttcttgttcagccgagggacgacatggaggctgtgccagggtacctgtccctgcaccagacggctgacgtcatgaccttgaagtggacacccaac

SEQ ID NO: 187316 - DNA, 577 bp, Homo sapiens
gcggccgcctcgggtcctgacgtcgggcgccctccggccgtcactcagcgctcggccccgccccgccgcggctgccgcagcagcgccgcggccggaggagctaccgccgccaccgccgccaccgcctcctgggactcggaacgcagcgctcggagccatggcctcggcccccgcgggtaagaggccgctggacacgagggcggcgggagggcagcgcccggcccccgcaccctctctcggctgacccgcggctctcgtttcttgtcccacagaggcggagacccgacagaggctgctacgcaccgtcaagaaggaggtctctggcaacctggcttctgggagcttttgctagtgatgagcatctgtggcagcttaggcaccctggttcgatgtggtcccttctcaaggtctcactttcctgctttctaagtggacgaggttggacagctccaggattccaagaacctcaactcatctaatttggccagtgtcactctctgagagccaagtctttgttttttccactctgaatttgccaagtatttattcaagactaattaaaactaagtagctggta

SEQ ID NO: 187317 - DNA, 299 bp, Homo sapiens
cgagtgacactggggattgaactctcatctgtggattgtgcgtcctctgctggtctccatccaaacctgcatattctctcctcttgctagtaaatactatgagaaggaagctctcctgatggaccctgtggacggccccatccttgcatctttgttgggtaagttgtcctgtgtgctgagcttcatctagacccgtggtcttgagtctgaggggcaccttctccaggactctctcacccctgtccagccttgcccatggaaatgcagcactgttctagctggctggaggggagggtagt

SEQ ID NO: 187318 - DNA, 1039 bp, Homo sapiens
gcggccgcctcgggtcctgacgtcgggcgccctccggccgtcactcagcgctcggccccgccccgccgcggctgccgcagcagcgccgcggccggaggagctaccgccgccaccgccgccaccgcctcctgggactcggaacgcagcgctcggagccatggcctcggcccccgcggaggcggagacccgacagaggctgctacgcaccgtcaagaaggaggtgaagcagatcatggaggaggctgtgacacgcaagtttgtccacgaagacagcagccacatcatctccttctgtgcggctgtggaggcctgcgttctgcacgggcttcggcggcgggcggctggcttcctacgcagcaataagattgcagccctctttatgaaagtgggcaagaacttcccgccggctgaggatctgagccgcaaggtgcaagacctggagcagctgatcgagagcgcgagaaaccagattcaaggcctccaggagaatgtgcggaagctgccgaagctgcccaacttgtccccacttgccatcaagcatctgtggattcgcacagccttgtttgagaaggtcctggacaaaattgtgcattaccttgtggaaaacagcagtaaatactatgagaaggaagctctcctgatggaccctgtggacggccccatccttgcatctttgttggtggggccctgtgccctagagtacaccaagatgaagactgcagatcacttctggaccgatccctcggctgacgaacttgtccagaggcaccgcatccacagctcccacgtgcggcaggactcgcccaccaagcgtcctgccctctgtatccagaagaggcattccagtggcagcatggatgaccggccatccctctctgcccgcgactacgtggagtccctgcatcagaactcccgtgccacccttctctatggcaaaaacaacgttcttgttcagccgagggacgacatggaggctgtgccagggtacctgtccctgcaccagacggctgacgtcatgaccttgaagtggacacccaac

SEQ ID NO: 187319 - DNA, 836 bp, Homo sapiens
cagttcacgggggcgggttcacactctataatacgttgtcggtggcccgacaatagaatgtgtggataggtgcatgtgtgggatgtgtgcatggagtgtctgcacatgtgtgagtgtgtgtgcgcccacgtggatgagtgtgtggatgggtgtgtgtgggctgtgcatggggtgtgtgcacatgtgtaactagatgtatgagtgtgtacatgtgcacatgtgtgcgtgcatgtatccacatttgtgagttgtgtgcacagaggctactgcctccacaggtgtctttttcacatgcgtcagcgtgacctgccaagactcacagttccacgcgtctgggggcgggactttctgtctttatctgctggtttaatgagtttgactccttataagaaacacattttcttatttttttccaagtgtttagttgggcacctgctgtgacccccaccaggggtcacttacaccaaggtcgtcccttcccgccttcccatccgtgtttccctgtggctaaggtttcacttccactcagcagggatatgaaagctgctcctgtctcttgtgattgagtcgtaagctgggggtgaaaaggagacaatttttactggagttggatctcaggaggtgaggggagaactgggttaagcgggggctttagccatggaaaggagattcccttttcctaggggtttccatgacaacctgcccagaggtttatgggatggctgggttgatgatgctgtggacacttggatgtgcctttggaaggtttactgacacctcaggaattctctgagaagggacttcacctcactcagtaaggaggaaagaaggagaag

SEQ ID NO: 187320 - DNA, 942 bp, Homo sapiens
aacgcgctcacaggctatgactggcacccatctcgactggcggtctactccttaacaacttctgtgtgtgtgtgcccaggtggatgagtgtgtggatgggtgtgtggggggtgtgcatggggtgcgtgcacatgtgtgagcgtatgtgtgcccaggtgtatgagtgtgtggataggtgcatgtgtgggatgtgtgcatggagtgtctgcacatgtgtgagtgtgtgtgcgcccacgtggatgagtgtgtggatgggtgtgtgtgggctgtgcatggggtgtgtgcacatgtgtaactagatgtatgagtgtgtacatgtgcacatgtgtgcgtgcatgtatccacatttgtgagttgtgtgcacagaggctactgcctccacaggtgtctttttcacatgcgtcagcgtgacctgccaagactcacagttccacgcgtctgggggcgggactttctgtctttatctgctggtttaatgagtttgactccttataagaaacacattttcttatttttttccaagtgtttagttgggcacctgctgtgacccccaccaggggtcacttacaccaaggtcgtcccttcccgccttcccatccgtgtttccctgtggctaaggtttcacttccactcagcagggatatgaaagctgctcctgtctcttgtgattgagtcgtaagctgggggtgaaaaggagacaatttttactggagttggatctcaggaggtgaggggagaactgggttaagcgggggctttagccatggaaaggagattcccttttcctaggggtttccatgacaacctgcccagaggtttatgggatggctgggttgatgatgctgtggacacttggatgtgcctttggaaggtttactgacacctcaggaattctctgagaagggacttcacctcactcagtaaggaggaaagaaggagaag

SEQ ID NO: 187321 - DNA, 759 bp, Homo sapiens
gctggtaccggccccggtccttagcatcgtgccattgcactccagcttgggcaacaagagtgaaacttcatctcaaaaaaacagaaacaaacaaaaaggcagctgggttgtcactgatgggcagcatttgagcctgccacactggcctggaagtttcccttccagtctggattttgtctgctccttccttccccctcaccccgttacctcttcacctcccatctcatttcactgtgtagctcagtctctcccacgcacataattggggacagtgggggctctcttaccagcctcctcagcaacgcacgtccatcaggcctggcctcagtggccagccacattgatgtcacactggaattgttaccccagacagggcgaagagataggctatctccccacctcccaccctactccccactatattcccgttttgaccacctcagcccctcagctgccccctctcactttggccaatcccaggcaccaatcagacttcctcctccacctggagcccctagcatttccttgtcccctcttccccaaaacctctgtaaagggtacgagagggaccccctgccgagccgcccgccactcagggcagtccgatctaagaagcagaagctggttggaggctggctgggcctctgtccagtccccagatggataaactgccttttctcacatcccctcttggtgcctgatcttctctgcccccggggccagacccactgtgctgttttctgtcagtctgtggcacag

SEQ ID NO: 187322 - DNA, 495 bp, Homo sapiens
ggtcgttctacacggatcccaatgcagcggactcggtccgcacgtccatcaggcctggcctcagtggccagccacattgatgtcacactggaattgttaccccagacagggcgaagagataggctatctccccacctcccaccctactccccactatattcccgttttgaccacctcagcccctcagctgccccctctcactttggccaatcccaggcaccaatcagacttcctcctccacctggagcccctagcatttccttgtcccctcttccccaaaacctctgtaaagggtacgagagggaccccctgccgagccgcccgccactcagggcagtccgatctaagaagcagaagctggttggaggctggctgggcctctgtccagtccccagatggataaactgccttttctcacatcccctcttggtgcctgatcttctctgcccccggggccagacccactgtgctgttttctgtcagtctgtggcacag

SEQ ID NO: 187323 - DNA, 560 bp, Homo sapiens
ttcccagttcaagcgattctcctgcctcagcctctcaagtagctggcattataggcgtgtgccaccatgcccggctaatttttgtattttgtagtagagacagggttttgccgtgttggccaggctggtcttcaactcctgacctcaagtgatccgcccacctcggactcccaaagtgctgggattacaggcgtgagccacctcgcctggccctccatttcctgatctagtcttatatccacgctcaccacctcagcacgctcagacccacgctgctgtgggctcctctggctcctggaagagtgcgtccgcagatgctgcagtctttgtgtggctcagcaattgccactcacatcaggaactgcctttaccctgtcaggctctactgagacccgaccctggttattaagctataggggagacaaggatggatcttaaagaagacaagcaaaatgtagtgaagcaaatagaatggtggttcctgggggatgggggcaggggacaacgaggagtgactggctaacagatacagcgtttcagtttggaaagacaaaaaagtt

SEQ ID NO: 187324 - DNA, 417 bp, Homo sapiens
gaagacaccgctttctagtacacgtgcaaacaggaacaggggcgagtccaaggtggagccaatgcgaccacacgtggcactggcgtcccccagaacagatggggtgagtgtgtgtcaccaaggccatatggggcgatggcgagacgaacaatggtgtccaggtatgtgcctggtggaaggggggcacaggtgacctccccaacaacgtcaaggaaaagcaaagcacacctgggaaccaggagagggcctgtgcgtgaatccaagccacattttgctacacctgctggaggagcggagaggtttctgcaaagttcacttcacccccacctctccaatgcctaggtagccccgacacaacctcccatgcacccagccccagcccaatccctttggctccctgacattcatggcagccaa

SEQ ID NO: 187325 - DNA, 164 bp, Homo sapiens
attgcatatattccctcacagttgtaattactgtatatcataatattttcttaacagcaaatgcacattttcttcacctttgactttgtacacctctaggttttgaaagcaaatcgacccatgctgcaggattatcacagggttgttgccacccctgaaatatt

SEQ ID NO: 187326 - DNA, 383 bp, Homo sapiens
acatatgaaagggaagaatcctgaaaaataaaaatgctggttaccagtttcagttccctgatgcagactcacctctctaaacctgacacaacttttaaaataaaatgctataaaataacgcatgtctaaaagcatatgaggcactgttttaaacatattgttagcatgagaatatttatattcagggacgctgatgattattagccatagtaatggagtcatataaaagggtttcattttccctatcggatataaacacaatttcctacattcacaataaggaaaaagcacatgtaactgaaaaatgtataagtgattctattccctgctaccttccctggccactctgttagtatagttaataaggaaacagtatgtgcagg

SEQ ID NO: 187327 - DNA, 316 bp, Homo sapiens
gagaagcactgttctcagagaaagctgaccccattcctagctccaagagcaggccctgattgtacatccaaaccaaacatggtaattccattctccttgccagtgattagttcttgaatcagatttaggtttactcaatcagtacctggcatgtccctagaaattcttgtagttcagggatgggcaggtggtctctactggttcaatttcactgaggagaagaagggaatggatgctgggtaggcagccaacagcatccatttcaaaactggaaagacggatagggaccagttcatgaggaatcttgaatgtctag

SEQ ID NO: 187328 - DNA, 752 bp, Homo sapiens
taagaccacttatcccaaagctctgagtcatgatgagagttgtttgctttcatcagagctgttagtttgatcagtaagcacttactgagcttctaccttcacttggcatttttgtagatgctgagaatatcatggtaacaaaacaaaattcttatcctcatgaagcatatgcttcatttggagacaccaacaatgcgcgtgtgtgtgtacaagaataagagtaacaaagggactaaaataggcaaatgcgaaagaggatggtggagaatactgtatcagacttgttgcccataaaatcctttctaataaaaagaaacatggcagagatttgaatgaaatgagtattcagaagagcagccacacatgttaagttcttgataaatactgtgcatgaaagaataataaatggatatgactactgttaaaggcaagactgcaagagcagtagttacagacaggtttgatcccaattttagaagaatacacataaaaggtttgtaattttatagtgagaggcaacagttaatcaaaagtatagtttataaaacttctgggtaaggagttacacatatttttggttgcagtgaggcaaaaataatacagaattgtgggaaattttatgggttttattgaaataattgttaagaatacgttgtatttattgagtgcctactgctgtgtacttgtgctagatgccttatacaaattctcaattaatttttattgcaacatttcaagtaaagaggtagttt

SEQ ID NO: 187329 - DNA, 254 bp, Homo sapiens
ttatgccagatgtcttcattctgggaaacccaacagattatcacctgtgggccccatttttggatgaagaggggccattccctgaaggggacatacctcagttccccgaggggattcagatgttcacctcaactcacaagaaaaacttctggccgggcgcagtggttcacacctgtaatcccagcactttgggtggccaaggtgggcggatcatctgaggtcagaagtttgagaccagcctgaccaatgtggaa

SEQ ID NO: 187330 - DNA, 458 bp, Homo sapiens
ggttcttcaaacgctgcccgttcctaaagcaagtcttgcttcgggtcacctcccacctggtggcagccagggaaaggggaaaggaagaagacactggaaatgcatggccagccccctaggggcatgaggaaggagccttcaggtggcccacaaagccctagctctgggccaggggctctggggggctgaggggaccagactgggtgcagggccttgggagctgccagcctccttcccactgggcttccgcagaactgggactctcacttcaggggccaccacatccctcctctctgcttctccccccagatcaaagggtaccctcccacggttggcagggcctggctgagtgcctctagcaccctttgtgccaccacaggcggtcccaggaagggcagcaaggtcagaccattcctcattgaaaaccgtggctagggcacagggctctgatctgaagg

SEQ ID NO: 187331 - DNA, 208 bp, Homo sapiens
cttgtcctgggagaggagtggccgtgtcaatttttagtgggtatggtcaagagtgggtcagaatcatgtgggggttggcaccaaagtggggagagggaataagttctcagaacatttttactctctcttccctctcaccctaggagacccagaatagcaggacaatgtacaatgtgacagcctgtgtgcagaataaaccctcacttcc

SEQ ID NO: 187332 - DNA, 193 bp, Homo sapiens
ctctactgttttctctgatccatgactaagttcaagggggaagaaatacctcacctcacattttgtgctctaaccctgatgaagcttcaggcctgagtttctaactgttccattatcccagagccttttggttaagacctaaaaaacttgcaatggggaataaggaggagaagggaactgtggtcaggtatag

SEQ ID NO: 187333 - DNA, 509 bp, Homo sapiens
gtagattcttgcaggagaaggatatgactctgtgaggtcaaacaaattcaaacctcaggaatgaaactagggctggataaaacagtaggtgatgaacaaaaattaacatgtaagactcctatcagacttaatttccccatttatgttcactcttagctattaagaaaaaaaaataacctttagattttcttttgagaatacagtatatatgagttgggagtatggtaatttctctattggtgcttccatgtctgctagaaacttagcccttcaattcacaaagtgtccagtggcagcaagaagagacacccaggtccagagagctaacagctggagccatcctcacaccaatgcctgattttccaagggcaacgctgcacggctcagcttggtgattcccagctcactgtggcacaatgtaggcagctacatttaaaaacaagaactctactctcaactgatgaccaggtttagaaactctgatttgccttacccaagaaatattttaa

SEQ ID NO: 187334 - DNA, 210 bp, Homo sapiens
ccttccttccttccttccttccttccttccttccttccttccttccttccttccttccttccttcctctctcctttccttccttgcatgaactagatgctaccctaggcactgagcatacagatattgaccaagatctaatcctgtcctcaaagagttcacaacctcatgattgtcctcagccccctgtagcaaaggaaacttttattgg

SEQ ID NO: 187335 - DNA, 781 bp, Homo sapiens
tccccatatgtaaccaaaaaaatgctatcctggattttatttctctttcacaggaatgggaaggaaaagtgtggagtccgtgtggatttctcttattttatctgtggcttgaatgtacatttctgagagagggagtcagatggtgaaagggagagatgttcttgctgagtttgtttatgttgtgcttcagaggatgtaagacaagcagcaaatcagcagagacaagttaatgttcaccaccacaaaagtgaaattaaataaactgatgggcagtcccttggaagatggagtctcattctgtcactcaagctggagtgcagggcgtgatctcagctcattgcaagctctgtctcccgggttcaagcaattctcctgtctcagccttcctgtagctagctcgggactacagactggacactgcctcccaagcccgccgccatggccgcctacaaactggctgctgatccagcatggagagctgcatggaacctggcagatccacttcagcagctgatacgactccgacctgagcccggcaggccacccaggaaggtgaacgcgcaggcgggcaaggagctgcataagatgtcggctatgaggtctgacattctgcttcacctccagtcgcacgaagagacccgaccggaccctcctggcacagggctcagaatgccattgatccagatgtggcccacctgtctatgcggacttgggcgcctcatgaacggcacctatggcgggtctgcacgattccgccaagccaaacggtggacacctgcgg

SEQ ID NO: 187336 - DNA, 475 bp, Homo sapiens
aagcagcaatctggctcattatcaaggttttcaaatgatttgaaataaaggtggaactggggaagggagcaccatatagaaatcaacagatatcacttctctaagatagttccaccagacaagcccctcttgctccccgcccctctcctggctaaggccctgtcttcctcctgccagcctgctggactgctccaaagcctatgtccctctaagcctgctcagacagagccctgtcccccacccaggggagcagcccttagtaacaggactggagcaagaaaataaaacagtttaaaactttcgcagtttcccaggtatgttctggtaagttctggttgcaaactggcctgcactgggtggagagctaacagggctgggtgtgtgggctgcgggatggaggtgggtctggtccctgcagagctcacaccagctgggctgcgatgccccagcatggaaatcagcagcggcccgagtg

SEQ ID NO: 187337 - DNA, 626 bp, Homo sapiens
ctgcctcagcctcctgactagctggcaccataggtgtgtgccaccttgcccggctcacttttttaatttttcatagagctgaggtctccctatgttgtccaggctggtctcaaactcctggcctcaagcagtcctcccacctcagcctcccgaagtgatgagattaggcatgagccactgcacctgtccggtttttaatctcaaccttttttaaaaaaaaagtccataccttaataaacagtatatcaaatatgacttaatcttgtagaatcaagattttacaggtagccctgtagcacttagcccacttttcagagaagattaatgacttgtcattggtgtcatcttgtgacgtaatggcagatcaaggacttgaacacaattctactaactcttagtagagccgactttccaatgtacagtaatgcctcaggtttttcatttcgtgtcttattttactgtacaactgatccagaagagagagcaatgtgtgacatggaataatcagaatgacttggaagtattgagaaatggcaagtttgtcaaatgcatgagacttgtcctaatccagttaggcagttctttgaagcgtttgaagaaagtattaatttgagatacccatagga

SEQ ID NO: 187338 - DNA, 289 bp, Homo sapiens
gggttggggccaaagatcgagcacgggaaggaggtggagctccaggaagagaagacgcgaaaaatccaaaagaaacacggggagcactaatgctcatgaatatgcaggctgcgtgatttctcaagcaatttccatattttatagcgaagattctgcttcttatggtgtaaaattggtttattcattctgcaatgccatgatttgctgtttttgaattcccctgctaggccattttccacctcattctgttatctcacattacatcacatttgagctcttggttgatcat

SEQ ID NO: 187339 - DNA, 800 bp, Homo sapiens
ttcctagttcattattaacttagctcattgcaatgtcatattctaaactctgtctgtacaataaattaggactggtcatgacttcttggatgtttttgccccacttcaaggtagactttaattcagtctacacagttaattattgctctgaaatatgaagggaactactcttaattgtacaaatttgacaatatgaaatgtttcactaaaaacatgcttaaataacattgtaaattttgaatgttttaaaaaaagttacaaatgttaaccctcatggcacactttagaggactatttaacctttcaactttaggggattcaaagctttgtgaatcctttaaaaggattcttctgtaagagcccatacattgcgatttaagataccacctccctctttttttgttaatagagagtctactatgaaaacaggagtggataatatgaggtattacaaatccatctatcatttacttttttatgtgagccagtgaaatcatacatactgaaaacctgctgttcctcactcttcacgctggtgtagcaaacctccacatgtgcccattgtattagattctcctaaaatgcacatttcccttgggatacttttcttctgagcttttttgaatgggcaagaatggggccgactgacaattttgataaaaatacttgaattttaaatcatgccaacacatttccataatcagctagaggtatttgattgaaagttttaaacagtgatgacattttaaaggccttattaagggcttgaattatctcctttattgtaaagagtaatttgc

SEQ ID NO: 187340 - DNA, 496 bp, Homo sapiens
aagagaaaggtagatgtgaaagagaaaggtagattgagggctaggtctttattgtgcttaggggaaagtgtttttttcctcccaatttttattttattgtgataaaaataacacttaacatgagatctaggtgcttaacaaatttttaagtgtagaatactgtattgttgactaaggtacaatgttgtacagcagatctgtagagcttactcattttggtttactgaaactttatgcctattgattagtaactccccatttccttgttctgcaatctcctggcaaccaccatcattccactcttggcttctacaaatctgattatttaaagtgcttcatgtaagtgagctcatgcagcatttgtctttctgtgactggcttatttcacctcaaagtttatccacgttgtcatacttaatagaattgtcttctttttgaaggtataaatataccacattttctttttccaatcacctattggtgaacaattaagtgt

SEQ ID NO: 187341 - DNA, 402 bp, Homo sapiens
tagaagaggaatgtgggactggctggccatggattagataactgtggaatcaatgcccttttacttgggacatctttccaagtctggattatttccttaggattaactgggaaatcactgtacaaagaagaagcatatcaatagactgcttccttattttcaacccagaataatgcatttttccattgctagaggactgctttaaaatacacacacacacacacacgaaacaccaggatagcacagacagtggctttcagggatgaagatacttcctttcctgtctgttctagtctcttctggttgcgtggaacagaaactagtacaagctagcttaaggagatgaagctttattgcaagaatataaaatgttcttgtgggaatgacatgagtagccccatg

SEQ ID NO: 187342 - DNA, 343 bp, Homo sapiens
tcaactttcacaaaacacctcccagtttgatcttgctttcaactctgcatctatactgaatgccaaaatccaacttccaacgtttccttgacatttgaaaccgtggagcaaaattaagaacactctgcctacctggtgcattcttaaaaagaatcctgaagcaatacacaacgctacagatgaaactaggcactaatggtaaaatttcacaaaggggtgaactcagtggaacatacagattccacagttacactgacatgaggcctattcattagacataaatcacgccaacattcaaaagtatagctgcttatttgggaggccgaggcgggtggatcatgag

SEQ ID NO: 187343 - DNA, 508 bp, Homo sapiens
tggatctccttgctttctatttgtgccccttgtttgtcgttttgtatgaagggggtttttgttgttggattttcttccccatctctgtgtcctgttatgttctttggcttatgtttcaaaaattctgtttcctaccaccaacctctgtacatgccacaacacatacaatttgtactttcacagtttctgtgaagtaggatgatctgcagttaataatcaactgtttgggcattcttggtatccaaggaaggttttacttagaaggaagaacctggaaggacctgttggcaattagactacttctgcgtttattttacattttcccttattaacgtaggctgttgagagttgacttgttttataagagaaaccagattgacagagaagacccccaatcagatagagttattttaaaaataaatgtgtttattatggtaacatttggggtagaatctaaagggcatatttttaaaaaaacttttagttctaaagacaaaagagtttaacc

SEQ ID NO: 187344 - DNA, 559 bp, Homo sapiens
cagagatcccagtcggcatttacatgtaacctgtgcactactcccatatactttaaatcatctgtagattacttataataccaaatacaatgtaaatgctgtgtaaatagtatactgtattgtttagggaataatggcaagaaaaaaaggtctgttcatgttcaatacagatgcaactatctttttttttttctgagtatttttgatccatggttcgttgattctatgaatacagaatgctgactgtgagccacctcgtccagccagatagtgctttttggatgggaaccctatttcctattggttttaggtgggtcatcatttgtcagaggccacaatacttaaccacttagtttctctgtagctccttgtgttcaaataatcatttataagcacacagtcagtgtacagccatccctctgtagccatgggggattggttctaggaaccccacccccacagataccaatagccacccaagtcccgtatataaaatcgcatggtatttacatgtaacctgtgcaccttctcccatatactttaaatgccgactgggtag

SEQ ID NO: 187345 - DNA, 456 bp, Homo sapiens
tcctaaatggctgtatcccaaaaaaacaaaggaacagccggacccagtggctcacgcatgtactcccaaagtgctgggattacaggcctaagcccctgcgcccggcctgtttttttccttaaactttgagaagctagcagtttttggaaggaatcaagaggtgaccctgtcaagtctatcttatcaacatcctacaagcccattgattcttgttgtgttttattttctttaagttacacattggttttggatcataaaaatagtacatatttactataaacctgaaacataagaaatgaacaaaagcccttctaggtagatactcaagagaactggaaacaaaacgtccacataaaaacttgaatgttcatagcagcattattcataatagccatttaggtaacagccatttaggtaacagccatttaggtaacagccatttaggtaacagccatt

SEQ ID NO: 187346 - DNA, 262 bp, Homo sapiens
attataatcaataaagaccttttcagtttctctcctactcttttttagccccttcacatctttatcctttacatgctaacaacctagttagcattcacttaactttcttcatgtttcctgtaaagagccactcacactaggatctccttgactgcttttttttcttttgtttttcttttcacattggttgtagtcaagagtatcaatattgtctccagggtactctcacatcagcatactgctgaagggctaacctgaatta

SEQ ID NO: 187347 - DNA, 426 bp, Homo sapiens
tttgtaatgaaggctacccaaagtcataataccattgctttgtgtcaaaaacaaaaaaaaacaaaaaaaaaccacaaaaaccaggcatgatgccatgcacctatagtcccagctatataattttttaaagttcacagccactgcaaaacatgccaaattgtaaagaccatcgatgctaggaagaaactgcatcaactaacgagcaaaataaccagctaacatcataatgacaggatcaaattcacacataacaatattaaccttaaatgtaaatgggctaaatgctccaattaaaaaacacagactggcaaattggataaagagtcaagacccatcagtgtgctgtattcaggagacacatctcacatgcagagacacacataggctcaaaataaagggatggaggaagatctaccaagcaaatgg

SEQ ID NO: 187348 - DNA, 394 bp, Homo sapiens
gttaggaatcgatgcagatatttgattcaagtaattgatgctaaaatatggttaagggttaacctcaccatgagacattatatcttaaaagaggaggtcatgaatcaatacagaatctctaattagtttaattatgtggaaaaagtatttttaaagctgggcaaacctcttagaaactttttcttctatttgtccattttagacaatggtgttccttccccacccactctgctagagcttacaatatgcaggatcactgggggtagcaaatgcctttccttttatgtgcaagaactactttacctcattgggctcctcagtttttggacatagcaaattgctaatactagaaaccatctgacaagttgttctaagtaagtttctattttcttca

SEQ ID NO: 187349 - DNA, 545 bp, Homo sapiens
gtacagagtgaatgtcaataggtgattcctatccacatttccccagacagctcctctgttttcccttttcactttgccagtatggaacctaccctgtgcaaggtattgtggtagatgttgggaactcaaaggtgtaaagaaagctagccacatttgtgcagtgataaaacaagtaattccccagaccggctggtgacttctgcactgactcttgacgagcagggcttcacatgccacatgtaggtgaggatcgcttttagatgttctcaaaatatggaccccaatccaaacctgtctaacagtaaggagagtctggacatacagatgttaaaacacagtggagatgatcctggactcctacatgaagactacacagaacattatattggactggggattgtttcttccttaaataccaggttcttttagggaacattggcagggctttcattccttgtattgaatattctcaagtcgtgatattcccagtggttttgtttgctgttatggctgagacacacacacacacacacacacacacaaca

SEQ ID NO: 187350 - DNA, 259 bp, Homo sapiens
gctactcagggggctgaggtaagaaaactgcttgaacccgggaggtggaggttgcagtgaactgagatcacaccacttcactccaccctgggcaaaagaatgaaactcagtctcaaaacaaaaaaacaaaaaacaaaacaagaaaaagaaatcaatgtttaaatgatcaacagaaggacttgagctatggctttttcatcacagacaaccatttaccatcacagaaaaaaaatccatctaaattatagcatattatatg

SEQ ID NO: 187351 - DNA, 246 bp, Homo sapiens
ctaggcaagagaatcttaaccaccatcaaatgttttccacacagaataggcagacctagtttattctggaaaattgagggtttggatatgtactatataatcagaggaaacaagcagtaaaggacctgagctaatttggggtaaccaaagacttggctaacagatgcttccttactctggatccctcatatgaatcagatctggccagtgatatgctggacagaagatatctgaggttgagatacc

SEQ ID NO: 187352 - DNA, 145 bp, Homo sapiens
ggagaggatgttgaattcattggggagcatggagatctggagaaactagggagagacccaagaggagagttaatgaaagcaatcggaaattcttgcttggagtcgtgtgcggagattaggactggaggtttagagttagggtact

SEQ ID NO: 187353 - DNA, 686 bp, Homo sapiens
tgtgcagctggcagcaagaacccctaggtgcttacacttatattttaatttaattgcccatattttttccatactttcttcctgtcttgtgttgtttccacaagctccttgtaaatctagtgggaccccagatttccctgtctagtttcctaatggatgcatctcacatttttccatgaataagacgtccttcttgcatccttgaagcatggatctcaaggattaccattttccatgaaactgactgagacactatttcatgggggagatgcttccattcctccaggaaatagagttatcttctacttttgtgaagaaataaaagcaagcccaaagaaacttcagagagggaagagacatgaaaatgagaagagcaagcccctgccctaccccacaaaaatgagagcatcttagaaaagaaaggtgagcagtctgttatgtatgcagcaaaaggtgataaactgatacaatgatctatcaagataaggaagagaaatagagggtgactaaattaaaaatacaacacagtagtaaaagaacacgaggagtaaaaataattacttgaaactagaattatttcattactaccattaccatcaaaaccaatttgttactcatttctatgtggcattgtttgtcttctaatccaagtgcctgctcatttttttacatattatgttctatgg

SEQ ID NO: 187354 - DNA, 275 bp, Homo sapiens
tttgccggagctaactttcgaactaccatccaacatttcaaggttaatgtggtatgtctctattacaataaatattttttagatgagtggtgtatggtcaaaattacatcaactgcaaagtctacaattattatgcataggacaaagggcacacaatttctgctactaccattgaaacttacttacagcatataaaaaggcaatcatttactttttttttttttttttggagagggggtttttttccatcattaagccggaaatgacgaaacccc

SEQ ID NO: 187355 - DNA, 487 bp, Homo sapiens
gcggccgccgctgctgggtgcataggacgaagggccctcgacccaatcccagtccaagcttccggatgacgcacctgggctggggacctctcccacgtgaggggggccaaccaagcatccccagccccggggccacccagcctgctccggagggagggggcagggaaaaagggcatctcggggccaaaacctcatgccggatcctccggctttccccccatttccaggatatcgtttcgcatcagggacactcgtctccacacctcctacctcaaagtcctacgcacctacccttcacgtctctccaaagcaactgaattaaagcgcctactggccttggcggcgcaggtgagtgccaagaggtggaggaggaaggggcccgctctccgccaccccctttcctcgcctccccacgatcgccaagcttcatcggggatgtgtgccttggggtgcgcgggttaagagggagcttaaaaatgccccaagc

SEQ ID NO: 187356 - DNA, 1087 bp, Homo sapiens
gcggccgccgctgctgggtgcataggacgaagggccctcgacccaatcccagtccaagcttccggatgacgcacctgggctggggacctctcccacgtgaggggggccaaccaagcatccccagccccggggccacccagcctgctccggagggagggggcagggaaaaagggcatctcggggccaaaacctcatgccggatcctccggctttccccccatttccaggatatcgtttcgcatcagggacactcgtctccacacctcctacctcaaagtcctacgcacctacccttcacgtctctccaaagcaactgaattaaagcgcctactggccttggcggcgcaggtcccaagattttgactgattggttgtacgactagagttgctggagttcaagtattttcattttaactattcaactgaaagcagtgcgttacaacagaacacgggttccaaagaatttactgagaagaagcaaagtaatacttgggagaactataatacacaggcatctcatgaaaatcatccaacatatagaagaatatatagaataaagcaaaaatcatcagaaactccaccgtcttggatgaccatagttgatattctgaatggcttctgttccgattgaaccttgactgatgtagcacctatcaccaaattgctgttcaggaaatatgtcctaaagaaactcccaacagcagcaatacatcagagtggcacctctttacactggttcttgaacagaaaaaacaaaagtgtccaagtgactcatcttacagcgccactggacagcatggcagaagcttcattagaactaacattttaacaagtggctaaagccagagagcaccagggacactactgacttcttcctgctgatcactctgccaagcccttggtctcccactttaggacggcttctgagggcacacactggatcacaggcaccgaactgactgactgaaccctgaccctgggtctaccctacgctaagagcaaaaaacacgggtcttgaacgcagcgtctgacaaagaattcccacaccgggccagcggccccgtctcacgcccccacacctcccatc

SEQ ID NO: 187357 - DNA, 242 bp, Homo sapiens
cccatctgtaaaaccaacccgctcaatcatttactgacgatcttctgtgagaatgcctggcatgtgtgcctgaagcccctctgcccaggcattcggggaagggaaggagcaccttggggagcccccactcacccatgggattgctcaagtatcaggcctgatgggaagtgattcttccccttggcaagctgcccatgtgctgctgtgtgacctagatcgagtcactgtccctctctgggctt

SEQ ID NO: 187358 - DNA, 237 bp, Homo sapiens
tctgttcctcctcctaaatcctcgctgctgtaaatggcaccatgagccccagaatctgtccaagccacaaatctgctgccatgccactatgtttcctcttccctggcccccttgattttctgcatgggtggattcagacactttccagaaaaacacaacacaacaaaatactcacagatcttgaaaagagcaagcctgtcccaaagaatatcagattactaaaatactcaatgtctg

SEQ ID NO: 187359 - DNA, 250 bp, Homo sapiens
tctttctcttactccctggcctccttgttgttctttaagcatacaaagcatgctcccatgtaagggaatctgcatttgctcaaggatttccctggaacatttttcccccaaagcaacagtttatctggtttgctcacttccttcatgcctctgcttaaaaatgactttatggccgggcacggtggctcatgccagtaatccaagcactttgggaggccgaagctggtggatcacaaggtcaggaaatcaa

SEQ ID NO: 187360 - DNA, 498 bp, Homo sapiens
aaagttcattattttttattgcttttattttcatcagaggatagggtgagggactggcatcttcagatgtttaaaacacttatttaggtagcattattttttataaaggacacgatttcctaaaaccgccagaaaggctattggaaaactcagttactagcctgggaaagagagacgcatttaaactctaatagacgattatacctccagcaccccccacccccaccccaatgggattggaaaagggttgagtttacagaagagagagagcagagaagggtgggtggaaggtggggaaggcgaaggagaggcagggaataggaagttctcggcaatccccgggattaaggtaaacgccggagctcggcggacgcaggaagctcccttacctttctctctaagccccgtttgcacctgatctgcaaccataaatacttcgtggtgcttagtgtgcagccaaacgatggccaaatgttaaacaattcttcacgctccctc

SEQ ID NO: 187361 - DNA, 189 bp, Homo sapiens
aaaaggcagcccctaaatccctgttttcttggagtgcacacaccactggggccaacagtgactatgaaatgaaatttcaggtgaggaatatggccacaaaaagaacatattttgagggggtgccttgctgaagagggaggttcctccagagacttggaggaagtaaggacagactgtatggtcacctgg

SEQ ID NO: 187362 - DNA, 142 bp, Homo sapiens
tcactctagcctgggtgacagagtgagaccctgtctcttaaaacaaaacaaaacaaaaaacaaagaaaaagaaaagaaagaagaaaaaaatagagaagaaaagagaccgagggcctatcataagtcaggagcaaggctccat

SEQ ID NO: 187363 - DNA, 718 bp, Homo sapiens
actgtgcaggaatctagttatttctggccaggcacaatggctcacgcctataatcccagcattttgggaagctgaggcaagaggattccttgagctcaggagttcaaggccagcctgaacaacatggcaaaaccgcgtcactacaaaaaatacaaaaattagccaggcatgatgtgtgcacctgtagtcccagctacttgggaggctgaggtgggagggtcactggagccggggaggttgaggctgcagtgagctgtgttcatgtcactgcactacagtctgggtgacagagagagactctgtctcaaaaaataaaataaattgatttctactaattcccaagcaagtggtagaggctggattcaaatccatgtttcttcaacccacagttttccctataataccatagagattcccaagacatgaattactcagtggaaccatgtcttcctgcttcttattccccattccctctgccacttttaggtccttatcctaaaggaaaagttcagtgaaaacaaggcaactttcctgatacccagctataatgccaacatccaaggctttggagtcaggcagacctgaattcaaaaccttctctctcaccagctgtgtggacctggacagatgccctcatgactctaagcctctatcttaatattccagatgagatagcccacataaagtgatgatcgcagggcctggcccacagcaagtc

SEQ ID NO: 187364 - DNA, 339 bp, Homo sapiens
aaaaccaaattgtcataaaccagggttatagagccaacccctaataattggcagtgaaaagaacctagtcattttatagcagtttcaacatttaaagttttctgttgcctgtcttcatttttcctttgtagttttcacctggaattacgtacctactttgaaatcacctagagcataattctaaaatcattacattactcttaaatcaggcaataaaaatctcttttaggttgatattagctttagtatggtctttctaatgctaattttttttgcacacttcctttttttcctttagctccatcaaactttaaaagagaatttatgtgggaaattcat

SEQ ID NO: 187365 - DNA, 263 bp, Homo sapiens
taaccttttaggtaactgtactacctgtaacagctgtaatatttcttatgcacgccttatctccttattgtccacagtcatggttccaagggggataatcccagaggcatacttctcatctctctaggaatggggatggattttcattagggtcttgttctgtttcctggagttttccccaattgattggcttacttccctcatgcctctgagtagcatattgctacaatgatccctgttatcactggagtcccagtttgggt

SEQ ID NO: 187366 - DNA, 479 bp, Homo sapiens
ccaaattcttgtgaacagattgaaatctttggaggaatgacagtgggttgtgcctgaggatcactgccacccctccctctgtgctccagagtagcttgtatgggattcacatttgaaaaggtgcagttaccaagaggacattttcccggagggcctgtgattgggtagtaaacagtgtccctgccggccatggtgagggctggtggaaagtgacatcagatactgataatccagctctcgacactgtgtggtgatttgaatgttccaaaaatatctgggtaaatatttgacagtgataattggggtgctgtcagtctagccaaggacctgtacttagcaacaagttctcaagggcgtgcggttcaggcagactttcaacgtgctgtgagcacaggacctgctgtggatcgcatgggctcagcagtcaggctttgtagccgtatttacacgttagtttatgcgtgttagggagccaagtt

SEQ ID NO: 187367 - DNA, 303 bp, Homo sapiens
ctacccccaaaatctctcccctaaggtacccattattaacagttcagtgagcatcctttccagattttttcctatgcattgacaatcatgtgtaagttacatgtttatacatatgtattcatatacacattcagatccagaaatgtttttttccaaaagggtatcatactagtcgtaatgttctgcaacttgctttttcacttaacaagcagagtgggcatccctccatcccagtgcagatggatctggatgctccaaaatgtatgcatgccgttccctgatggtgggcatttgggctgattt

SEQ ID NO: 187368 - DNA, 290 bp, Homo sapiens
gtcaggtgtggcggcgggagcctgtaatcccagctacttggaggaggctgaggcaggagaatcgcttgaacccggtaggtggagggtacagtgagctgcgattgcaccactgcacttcagcctgggcaacagagcgatactccatctcaaaaaataaaaaataaaaaataatgtgctcttcaaacaaatttattatgaagaaagcttaaaatgagaaattccatgctcaaagagagacaagaatgaactttggcatctattaatatttctatccataaaaatttgagtgt

SEQ ID NO: 187369 - DNA, 651 bp, Homo sapiens
gactccgaggttccgtagacttgtcagtcagaacgagcttccgggcccagggctgaacgggccaagttccaggaaccgtagagatggcttctgccggaaaaggaggacaggatgctctggtccttttcaagctactcagctatgggatggtattattcactctcttcaggcccaagtggaaataaaaagaaggaggcatcatttacagacatacaaagactgtttcactggttctgatgctgtcgatgtggtcttaagtcatcttatgcaaaacacgtgcctaagtagcaatgacatctcttgtcttaaaggggttcatctttgccaagttctaatgaatcacaaagtatttgaaccagtaggaatgaagaagcttttcaaaaaagaaaaggaattagaatttgaagattccaacattagtctctacaggtttctaggcaataaatcatcttacgattgttgcaaaagacaaaaggatgctgagaatgagttcaatgaaaccttgagaccaggatatgaaatgatttcaaatcctctagcacaggagattggtgaggaaagaattgaggaacttattcatacaataaatgggaatccagctttatgtccaaatatcacagttcagaaaccttttctccggctttcaaaaga

SEQ ID NO: 187370 - DNA, 719 bp, Homo sapiens
gggcctgtcttctttaccactttgctcacttcatgaatgtgggggtgtatgaagagtatgatgaaattagaggctatgttctggagtcagactgatcagtactgggattctggccataccccctccttagctgggtgactttaggcaactgactgtaccatcctgaaagtcatctgtaagccgtgctgaccccccaaccacaggacacttgtgcccgctgcaggtgctctgtcagcagtgacttctcactacctggcatcctctgaattcacaagcagtttgaagaatgagcaaatactgagcaaagctcataggattaaatacacacagacctgtgtaagttaacaccaagctaagggttaaatactttacaaaaattctcagtgcggttggtgggtgagaagggctgtcgtcccctctggctgccttgccaagctggtagaggggccatctcccactacctactgacaaagattctttgcttgacccaattacccaatttaatcagacacttaagtcttttcctaggcccatctgtgtacttcctgtaaaatctagtgttagcaaaaaactctactgagtcagtttggtaaggaccaccggccgtcaatatcttccatatctgatagatagggttcctcatcttctaccaccctccagatgatgtctggtcaccctgcctgcctttagcaagaatcttgataggttgatttaaccag

SEQ ID NO: 187371 - DNA, 321 bp, Homo sapiens
gctgattcatttaattagtaaatatttattgagcttctaatatgcaccaaatatttacatgatgctgggatatggcagtgaaaaaagcagggaaacatccctgatctagtagaattgcattctagtagcagaacgttccagaattgtaaagggcagaaataaaagtgtttattccttggaaatggtgtctactaagcccaaagtacaacttcacttacatttcaagaaaaggtattttttaaataaaaagttgccttttacctcaacattatgcaatctacctggtaagatcatagatatgtctttctacattatgaccaa

SEQ ID NO: 187372 - DNA, 740 bp, Homo sapiens
ctgtcccattgtaaaggtgtaagttatataggcttgaaaaaaattggcgggtaaaaatcacaaaatgcagtcgaatatatatatgaaaacttgcattaggtgataaagtgactattttaagagattcagcatgcatggatattagttttgattaatgtgtacaataatttacacagtatactctagtcaatttatgttaactttatttaaaacacaatttatttggccgggcacggtggctcacacctgtaatctcagcactttggcaggccaaggcaggtggatcacctgaggtcaggagttcatgaccagcctggccagcatggtaaaaccctgtctccactaaaaatacaaaaattagccaggcatggtggcgggcacctgtaatcccagttacttgggaagctgaggcaggagaatcccttgaacctgggaggcagaggttccagtgagccaagatcgcaccactgcactccagcctgggcaacaaagagcgaaactctgtctcaaaaaacaaaccaacaaaaaccacaattgatttgatgaaaattagttttaagtaaatgtttgtaaatagatattggttgaatttttggatatattatgttgatttaacttttaaaatgttgtttaaaagtgtgaagctatgaaaagcctgataatgtgactacagatatttcagttggactagaattctgactttgaaacttattaaattaatgcatactggaagtactttg

SEQ ID NO: 187373 - DNA, 172 bp, Homo sapiens
tgacagtaatcttattcctatcctcaaactcaaacacaaaaactctattcctattaagaacttccaaattcctctagactagacttccaaactggtgagctggagaagctatctcatagtatgttaatagttgtgctgtgaaaaaaggtgttttgtgttcagtacagttaaa

SEQ ID NO: 187374 - DNA, 393 bp, Homo sapiens
gtgagccaccgctcccggcctgaaccaccgcacctggcctgaaccaccgcacctggccagaatcatcttttaacagcttccaaacttggaggtcaaacaaggactttctggggaagcaagtggcaggcagcagctaggcgtgggctgcgcatccagcggattgagtgtgggcgggaccgccagcaaccaggcagaggggctgttctctgggttggggtcaggaacctcttctggcctcagcccaggttggcagacatttccctgcagggatccgggtccaggactcaggaggagggacagtcccacgggggtgctggggggcaggaattcctgggtgggccgaggtaagggcagcacagggtgacctggggccctgggcccggtggagctgag

SEQ ID NO: 187375 - DNA, 397 bp, Homo sapiens
gtgagccaccgctcccggcctgaaccaccgcacctggcctgaaccaccgcacctggccagaatcatcttttaacagcttccaaacttggaggtcaaacaaggactttctggggaagcaagtggcaggcagcagctaggcgtgggctgcgcatccagcggattgagtgtgggcgggaccgccagcaaccaggcagaggggctgttctctgggttggggtcaggaacctcttctggcctcagcccaggttggcagacatttccctgcagggatccgggtccaggactcaggaggagggacagtcccacgggggtgctggggggcaggaattcctgggtgggccgagtcaaggccccacagttgcctgcgcctggcccgtgactgtgacgtgcctgttta

SEQ ID NO: 187376 - DNA, 306 bp, Homo sapiens
gtgagccaccgctcccggcctgaaccaccgcacctggcctgaaccaccgcacctggccagaatcatcttttaacagcttccaaacttggaggtcaaacaaggactttctggggaagcaagtggcaggcagcagctaggcgtgggctgcgcatccagcggattgagtgtgggcgggaccgccagcaaccaggcagaggggctgttctctgggttggggtcaggaacctcttctggcctcagcccaggttggcagacatttccctgcagggatccgggtcccccgctcctgcctaagagattctattg

SEQ ID NO: 187377 - DNA, 374 bp, Homo sapiens
ctttaggcaactctttcctgctacatgtgatcttggtaagaccttgaaccacagtatcccaacatccctggaccacaagagtgggtgggtgtgctagcgagttaaggccaactgtatgaacaactcgcacagtcctcaaatattctcaatttcaatggctttcattcagactctccttcagtatgcctaaaaccacatcttggtgtcaaaaactacaaagagtctaagatcttactgtacttgtaaagtgacaagttagttcaccacagtttcatagatgctggtagaagatgacacaagactcctgcattggacacagaggactttaatactcgtggcaatagcaaaagccagactgttagcatttgcctaag

SEQ ID NO: 187378 - DNA, 329 bp, Homo sapiens
tttacaactccaacttcctcctcaacacacatacacacaatactgaattcagcggtccaaacaacgtttcacactatgtgacttgatgtcccctaactgcaaatatgaaatgcctaatgtgcctttgacttattttaagcaaagtagataaagcagggcatttatcttcatttttccttctccaagtccattcatcattacttagaaaatattgcagcggcctccaaaaagtctcactagttaatcactgaatgccagaacactcttgttttttttgagattgagtctcgctctgtcgcccagcctggaatgcagtggcgcgatctctg

SEQ ID NO: 187379 - DNA, 539 bp, Homo sapiens
gtgtaatttctggaataaacacagctgtgtttgtttctccacgcagcgctccagacagaacggcagcctggcccgccgcgtgcagctggaacctcgcaccttgggacagatgccgtcagggagccgagaaaacactcctcccgcaggccactgggagctgtcatgcaggcggatttgcaaggaggccaattcagggcccctaaggaagcaagtgatgagaccacagaggtgctgaggtcccagaggggaagtgagcattgagacacctccagaggccttttcccttcgggattgggggtcatgatcaggcaggacaacgggccttagagttgtcggccatgggaagatcatccctagtgtgatcagtccatgtgggaggaccgtgaaaaggtcagaggccagccctggaaccttccaggtgggaaaactgaagtccagaaaaggggaatggggggattagggtaagagacatggtctatccagcacctacttcatgccaggccccacaatagttcccagaagcactcacctggctctgc

SEQ ID NO: 187380 - DNA, 559 bp, Homo sapiens
aaaaatgaacttttaaaagtgtacaggttatagatagcttgattaaaatttcactatgaacactgccatatcaagaactaaaactactgcagatacgattttattatgaaaaaatcaagggacaagatgaatgttaagcaaatgtataacttctagcttctgcctggcaaattgaagggaaaatgcagttcacagcaaagtttcgaaaaagcatgtacccaatagaaagttggataaaagacacaatacttaaacatatgaaaagatgtttaacctcattcgtagttagagaaatgcaaattaaaactgtattgagatacttttcacttaaattggtaaaaattaaaaagtaagacagcacattcttttggaagggctgtgagaaacaggcaatcttatacataaggcaaactggggatatttagcaatatctaaagaaactgtatgtacattttctatttgtgccagtaattccacctctagagatttaccttaaaaataagaaaatacttagcacaaagtgactctttgcagtattcattgtaactgagaaatgttg

SEQ ID NO: 187381 - DNA, 520 bp, Homo sapiens
gagacaccttagtcaattagggtgctactttactgggcaggagattgaagggtgatggtttaacgacttttcactattactatttttaagttatattttctattagcaaatcaaagcaatctaccatttgcattttacataattcgtgtcagaaacaaacatctcaattttgaagatgggattggagagcttccagtattttgtggtctcaagctatttttagaaaattctttggtttctgcagttctccttagagcttggtaaatacgggtagaagagagtcaacatgtacaataataacagtgaaggagaagtggacccacttccgcagttaccgtgcatattatgggtttaatataaaatactcccagtgatccacatcggcctgagtgcacatgtcctctctccactttgtgtttccttttcccatcctctcgcttaaaaccgaccatgtgccttgggaataaatctcattgaggaactcacatgctcacagggaggagggcaagggtggttgagg

SEQ ID NO: 187382 - DNA, 771 bp, Homo sapiens
atgactggcctttttatgaaattttgacacctgtcaagaaacctggccctcgcagccctcatcttggctcccactctgtactgggaacagtctgcacgctgtgtggcattgtgtacgttgggtcaatttctggaaacggctcactctactggccaggcatcactagaatttcccccaacagctttaataatgccaagagcgaacataatagatggtctcatttgatccacactacagacctggaagatgcctcttttattatcaatcctacgacttaggaagtattaatagataagtacctcatagagttatcttacatataaaaggagagcagacataatgcagttaggacaatgtctgacacctagtaagtgctcaacaaatgttagctctcattgttcccaatttacaggtaagaaaactgaggtaccaagacctgctcaaggttccaggtttagtaagtgttagggcagaggcaagcccgggcagcctaactccagagcaggagcctttaaacactgcactattcccccatagccaaagggaaaccacagtgaagcaatttgtggtttcgtgaatgactcattattctgtcctggattttctgccagagaggcgtgtgaagttctctggtggttttaaaatatgtccacagattctttggtgcacccctcatcaagaggtggagtctgttgcttcccctaaacctggattggacttgtgactgccttgacttctgagactaggttagaaaaggcaatgcagattgca

SEQ ID NO: 187383 - DNA, 501 bp, Homo sapiens
ttaatttctcaaacatctagtaacagttgtggccacactcaaaaacttaacaacttccaatgccttcaaccgaaactatatgtgtctaatttgggcattcaagatacttataagattacttttaactaccttttctcccttatttttcacccaactcctacattttgggtcacagatcatagaaagcttttgaatggcctgacagtcttttaaaggttgttcggttgtagtataatctaccattttactacttttggctttatgcagttttggtaccacagctatttgaggttatgaacattttcctttccaaacaatctaataacccactctgattaaactagctttactttttttctttttgcctttagagatagcagagtaccttgtacacagtaggtgcttaataaatattaatccactcttgttccttagctgtactcatgcttcttcctgttttgggaatgatctccaacttttctttgtttgcgcaaaaaataa

SEQ ID NO: 187384 - DNA, 418 bp, Homo sapiens
ggtacggcaagaacaaaggatgggacaagccaagctagggcctcttctctgaagtttacagtcatatgtgaggggcagacattagccagatgacagcaaacataacagaacattataacggtaggaagtgatgtgagtgctcacatcagggaggtctggtaggagaaagaaatagatgacagaggtaggcagaaaggctagcacattctcagtcatctcccactcacacacacgctcaattaaagagaaaacttgtggctcacgcctgtaatcccagctcttcgggaggccaaggcagggatcacttgaacccaggagttcgagaccggcctgggcaacgtggagaaaccccatctctacaaaaaatacaaaatttagcctggcatggtggcacacacctgtaatcccagctactaag

SEQ ID NO: 187385 - DNA, 510 bp, Homo sapiens
gtgtagctaaaggtttgtcagttttatattttcaaaaaaacaactgggttatattaatctttcgtattgattttctagtcttcatttcacctatttttgctatgatctttattttgtctttcttctcctgactttaagcttagatttttcttcatttactagttctctgaggtgtaatgttaagttgtatatttgggaactttcttcttttttgttgtagacatttattgctataatctttcctcttaaaactgcttttattacatcccataagttctttgtgtatgttgtgtttccatttttatttgtctcaagatgctttttaatttcccttttagtttcttctttgatcagttttttgttcaggggcatattgtttcatttccacgaatttgtaaattttccaaaatttattctattatagatttatagcttcataccactgtggccagaaaacatacttgtcataatttcattcgtcttgaatttgttaaggcttgttttgtgacc

SEQ ID NO: 187386 - DNA, 691 bp, Homo sapiens
atggctcacatctgtaatcccagcacttttggaggctgaggcgggtggattgcttgaggccaggagttcgagaccagcctggccaacgtggtgaaacgctgtctctactaaaatacaaaaaaatagggctgggcgcggttgctcacgcctgtaatcccagcacttttcagaggctggtctcgaacttctgacctcaggtgatctgcctgcctcagcctcccaaagtactaggattacaagtgagccactgcacctggcccagaaaacatatttgataaaacaaaaattttaaaaattttaaaacccatcaggtttattcataggattctaaattttatatgaaaaagcaaaggacttaaaatatccaagacaaccttggaaagggataataaaggtggggcacttacactactggacttaagacttattctgaagttacagaaatcaaaactttactggaggtactgggataaagataaacaagtaagtcaatggaataaatagagaactcccaaacagatgcataccatggccatttggttcttgacaaggtgccaatgggaaaagaaaattctttaagaaatagttctggaacaactaggtatctctctacagaaataaatgaatctctacccttgcctcacaccatacacaaaaattaattcaagtggagcatagacctaaacataaa

SEQ ID NO: 187387 - DNA, 550 bp, Homo sapiens
gccatagttggtgacttctttcatgtcggggcaattctattccaaccccaagaaccaaacgtggggcctgcgggaagggagggcctcacacacagtcctgggtgagtcccatcagtttctccactgtctgccaccccatcttcccccgatgccccatgttctgtccctctgtccctgtgctctgaggatgtgtgagcctccactggctactataacaaatcaccacccacctaatgacttaaaacagcagacatggttgggcgcagtggctcacgcctgtaatcccaacactttgggaggccgaggcgggcagatcacctgaggtcaggagttcgagaccagcttgaccaacatggtgaaagtccgtctctactaaaaatacaaaaaattagctgggcctggtggcaaatgccagtaatcccagctacttgggaggctgaggcaggagaatcacttgaactggggaggtggagattgcagtgagccaagatcgtgctattgcactccagcctgggtgacagagtgagactctgtctcaaaaaaaaaaggc

SEQ ID NO: 187388 - DNA, 548 bp, Homo sapiens
tccccatcctgggttcaagcgattctcctgcctcagcctcccgagtagctgggactacaggcatatggcaccacgcatggctaattttcttatttttagtagagataactcctgggctcaagcgatctgcccacctcggcctcccaaagtgctgagattacaggcacatgccaccacacccagctaattattgtgtttttagtagagacggggttttgccatgtttgcccaggctgctcttgaactcctgggctcaaacgatccacccacctctgcctcccaaagttctggggttacaggcatcagccaccatgcccagccaggaagcttattcccagtggtctggctctccagagttgccacgctgaaagatgcttgctctggagagagtgagctccctgtcaccagagctatgcaagcagattcaggccagccctcccagagagcatgagatggggaatcacgcacagagtggaccgaaggagggattgaacaagaaggctcaaagggtcccttttgaccctgaagtctaggatttcgtgaagcta

SEQ ID NO: 187389 - DNA, 354 bp, Homo sapiens
cacagcctagcggcggaagagggcaacggagtggatggaggaatatacccctcacactgaggttcaaagctggtaggtgccgaagggcactcactgcagacctactgtgcaccagcactactgagtcaggatctccgttctctgggagctcagctgcagggaacaacactgtgtgtgcatgtttgcaccccctctctgtgggtctgtggtgagtggccagtgtgtgttcgtgtgtgtacagctgtctgtgggtgtggctgggagcttttgcacctgtgagtatgtctgtgttttgctggtagtattgtgtgtgtgtgtgtgtgtgtgtgtgtgtaggaagggagcaggcatctg

SEQ ID NO: 187390 - DNA, 236 bp, Homo sapiens
cacctgggaaatcgcacttatttttcaactgggaaggcaaacggctgaccttcaagttactaacatctacaggacttgaaaagagaagggagtctgtaacctcatcagaaaagactgaaacagtcagatactgttccccaaatattacagatttcctgtcttataggattctaagcaaataaccagaatatcactccggggtacaccttcctgtataagcaatgccctggactaga

SEQ ID NO: 187391 - DNA, 382 bp, Homo sapiens
tgctttctgggggaccacatttgctgaaaattgcctacgggaaatgactttctcagagtgatatagttttgaggactgagattttaaaagtaaatattttattgggagcaattaatttaggaagaatagtattatgcctattcctctgtagttgattaaagtttactaagtgctgaggtcttttcccttaaaacattactttgccatgttaacaatcaggtcatagaggaatgaattcatcttttgtgttttgctaaataatcagttaacaaacatattctgagcacgtttaaagtcaaaggattgtagtaggtcacaagagggagatcgaaagtataattacatagtgtctttccttctttgacatacaattgggttgagg

SEQ ID NO: 187392 - DNA, 117 bp, Homo sapiens
tggaagaatgctggggaaggtccttcagtctgcaggatacaaaagcaatttcagaattgcagacagaggtgagatatgtcacagttatacccagggccagggttagaataacccaga

SEQ ID NO: 187393 - DNA, 558 bp, Homo sapiens
acaaaatactcaggctaagttctgtaaacagaagatttactacatgactaagagaaaattatgcagttaaaagtccatttttattaaagggtggtgtaaggaccatggtgttttcacactgcagtgtggtgtcatatttgcattgttgacacctgttttacatttctcctcatctatctgttgcatgcgcttttacagatacactccaggtctagacctactgtacgacacaatcagcagctaccaagctccaaatgatgacatttcaggctcttatttccctaacctggtggacgccaacactgacattctagccacctcctgggagcatcagcgtgataatgctcaggaagaactccaaagggaacacctacatgaacactacacagatatttttactagcttctcacactttaggtaaagtttgctaaaatatgagtgtctctattctattccaatgaaaactatgaacactttctcaggtttctagtctgctgtggttacaagccaatcaaagcacatgtgtaatgcacagtgttgtgcagccatttaggtaca

SEQ ID NO: 187394 - DNA, 181 bp, Homo sapiens
ttcacctaagttaatggccccaactcagcagctgttgccaccctccctgctgagaatgaactaaacatgaagcctcctaggatttagtttgtgacacatctgatacatcgcctcttttactgcaaatatttattggatgtcatatctgtaagccttttctaggcagagattcattcattct

SEQ ID NO: 187395 - DNA, 206 bp, Homo sapiens
atgaaaacttagggaaatatgacaccaccaaaagaaaccaacaaagctccaccagtggactcagaagaattgaagatctatgaaatgtcagacagagaattcagaataagcctctttaaaaagttcagtgaatctgccaggcatggtggcttacgcctgtaatcccagcactttgggaggccgaggtgggcagatcacgaggtcag

SEQ ID NO: 187396 - DNA, 455 bp, Homo sapiens
catgatcatccctctgtccatgtgtcaagtgactcccaagtgaattgcagatcattggattatagcggtttgcagcaaaaaaaagtcagttaggatgcttttacagtggtttaagttatagaaaattagagtatagagatacaagagtgattgtggaggtacagttaacgacatttgacgactgactgaatgtaagagaaaggaagaagcagcgaggggtggctgacatttctcatctgggtgtctaatactgtcatttgctcattagcctccagagaaggcatgagagaggaacactcttattggaggattgtgatagactcagctcaggtcatcctaaatgcaaggtcccagcaatacagccccgtggaagtgtccaggaagtgcagcaagtgtgagttttgcagtcaggggaggactcagaactatcgatgtggattgggaggttatcagta

SEQ ID NO: 187397 - DNA, 145 bp, Homo sapiens
tttatattatatcccatcacctatttttgcttaacctcaatttctccatttgaaagatttagcatgcaaatactttagctacacaaaatttctatgaggccaacaatcagatattttctcttcttcaatcatgggacaaaacttg

SEQ ID NO: 187398 - DNA, 387 bp, Homo sapiens
tctcctgcctcagcccccaagtagatgggacaacaggtgcacaccaccacagctggctaatttttgtatttttagtagagacggggtttcaccatgttgggcaggctggtctcgaactcctgacctcaggtgatctacccaccttggcatcccaaagtgctgagattacagacgtgagccaccacgcccagcccatttttcttatctttaaaataatttgttgactaagctaatggtcaaatttagtgtcactaatagtgacacaaatcttcagatctgatgcagattttaggatccctttgcacgatttcttgccaaccatgtttaacctgaattcaattgagatctaacttccagtttaagtaaatccgggtcagagagcaacat

SEQ ID NO: 187399 - DNA, 332 bp, Homo sapiens
agctagggctatttcagattgaacaaaccgaaacagtagtaggaatataatatgtattatccagaaatattagtttgaattaacagtataattcaccatccataagacatacacacacacacacacacacacatatatataaaacctcctgagtcaccaaagcaaacacattccacattgcttcaaagtcagcttcacagcttgtagggtagggatgtcagtttgagtctaagtgagattctggtatgtctaggctggtcagataagaaacaatttcactggtggggctcaaggagccctgtaagaagagttgggctctttgactttagcct

SEQ ID NO: 187400 - DNA, 328 bp, Homo sapiens
gcagtagattcactctagaagattcattctgatggctgaaacttccagaacatggataacgtttcaagacactgacatgatggggaatattaatttgaatgtgctattttcctatgatagcattttaagactgtaagtataaacagctacacaaacaagcccttatgtgggttcagatgtccacaacaacataactttatttttctacctgcagcgccacttttactcaagagaagaaaattaaattttaagtaattcatattaagcaagcaaatcaaggattttcagctggtttagtgattctctctcaccctttctcctctgagtt

SEQ ID NO: 187401 - DNA, 348 bp, Homo sapiens
cagcctcagtcaccccgggaccccagtgtccagcggccagtgtgccctcaagcccccacgagggcgcgcatgtatccagctgaaacagacattgaggcctttgtgacgccgccttcacatgtgaacaacgcacagtggcagagcggttgagcaacccacaggtcagtccaggggccaccaccaagctctgtgggtcaggcttccgtctccacacctgcatggatgctcggcccatgaccacccggtgtcaaaactgcaccctggtgcggggggatggacccacagcttgcggctacaccccaaggcctgccacacagcacagcccaccctgcaacccctcccgtgcgt

SEQ ID NO: 187402 - DNA, 1093 bp, Homo sapiens
gacgtccatgacacttacccatggatccatgtgctgacttcatttagaaggccaatctaaaacaactgggtttgtggctacctctttaaagttgtttgtgaaggataatttgttttttaatgcactttagtttgaaagtgagtctcttatgtaaggaccatccttaaaagaccaaaaatgccttgttagagtgttaaggagttttgacatgcagtggttccacaaacacagtggcttactatccttatacactgtcttataccatcattctctccatctctcttggtcactactctctgctgtcactggttaatcactaggtgccaagagcttactgaataaaagcttggcaattagaataaatggggagggaaggaccttatgaatagtccatttagcctaagaaatggcagatttagttcttctcttccaaaagataaaggtatatcctggaattgtacttaaaacttacagatgactaacaaatatatactttatatgtagttaatatttagatctgtcttatttaatacttggaggctagaagaagcatctttaggggaactatataatcttttgttagcattttctctgcattttaaaaaatcatttcaattcaaacatttatcagtgtcatgaaatcagtaatgactctttaacaattcaggtttgaactctgcattagatgtctctttaattttttaatatttaaaatttagttgacatttttttcaccaggtgcctttagcggttactaagataactgacatcagttgtttctctgaaataagtgttgctgtgggaataattttaatgttcaaggtgatatcatgggggagttttgtcttttaaaacattagaagcattttaaatattaagaatcaaatatttatagatcaaaacttgtgttttaagtattatacgggacctgtttacttatagtaaatgtgaatgtacacatgagttgttgctgaagctgacaagcatattacatacatgcattttccctgtgccctcatagttgcagttagagttccagtacctgtaggctcacctgggaggcagattagacccaaaggtagatgtttttccc

SEQ ID NO: 187403 - DNA, 172 bp, Homo sapiens
tggctttgtccctaaacacttcctctctgcctaaccacttcagttgacagctcatttgtaagatctgccacactcttttattcagcgtctcctaaagatgccacctctcagatatcaccttaacacacttcttatctgggagggatttgaaatgctttgggtgtccctggtg

SEQ ID NO: 187404 - DNA, 352 bp, Homo sapiens
acactattttactgacttgttttgagaattggatgaaataatgtaagtgctcaagtttcagaacatgaacactggagttatatagatatagctatgtgttttgagcctctgtatgtcaaaaagtaactgttaccttaatgtttatgatattagttttcatacaatcagtagtatttgtttgagaactaaacttgttctaaaatggatttttctttctatgaatgttttaacagggaatgccttgtttagttttgacaagttttctctatgctagctgtttttagactcagaaatatcccccttatggtggagttggcaacagtcaaagacagacaaaggctgttggatgtgt

SEQ ID NO: 187405 - DNA, 598 bp, Homo sapiens
aggaaagaggtctgctggtcatctaagtgcctttgaatgaagcaacaataagggtagattttgatttatactacaaatataatcttatctagagtttatcttaaattttgttgtgctgacaaaagcagagcagactaataaaaaatgtcaagtgccttctttgtgaatatattaataatcttttgtctgagatttgcaagacaaaattgagcaatgcttgaatgagtttactactgacatcaacaactgctttttccattctgccctaactctacggacaaaggcctgtttaatggctgctactgattgttaaaagtttcaaaagcatggagggtggtgacacatataggaaacctggagctaaaattgagtaaaaggctgttgcaaaaagtcttcactctgacaccatgggctttaaggtggcatttcattgtcagatgggattcagtttaattgctcacaagcaacaatcttgcttttcaaaaaggcaagtagcattaactgaggaaggttgtgtggttctagggagaaaacattaactaactggcagtggaaaacaaggaggatttagtccttagtctgccactaactgattgtg

SEQ ID NO: 187406 - DNA, 1100 bp, Homo sapiens
acacacacacacacacacacacacacacacaaatctgaaatcctgaccaatgaagacataagaccaacctttcagaaagcctaaatcaggcgcatatagatgaccaatttatttctagctcttagtaaacccacagaattccaaatcagcatcacagtctaatggcaaaactcaaaaggaaacatgaatatactgtgatctacttgtcttgagctcactgttggcctcaccattttatgatcggcgtcatggacactgggaaacagaaaagacggagaaatccgggaagcggctgtttcacttcagtgtgaagctcctactcaacaatcgcttagttatttgtgacctctcacaacactcatctgttctgtttctacaaaatgaataatccaagtggcagtagacatcaggacacctgttaccagcctgtcttttgccaagtaggaacctcagaatgagatacaactccatgaagaaccatctcttggtatgcaacaaggtcttcagtcagtcagtcaatcaattcagcagagctgcatgatacaagatcaatatacaaaagtcagctgtatcatcatcatacacaagcaatgaacaatctgaaaaagattaaggaaacatttccatttaaaacagcatcaaaaagaatatttagcaacaaatttaaccaaagaagtgtaaaacttgcaccctgtaaccacaaaacactgttgaaagaaaccgaagacctaaataagtggagggaaaaaatcccatattcatggatcaaaagacacagtgtctttacgacagcaacaccccccagggtgacctgatgattcagtgcagtaactatcagaattccaacggccttttttcaaaagtgatccaaaaatctagatggaattgtaaacctcttacatactacaacttacagaactatacaactttttcttaaaacttttttcagagtagaaaagacataattaaaatgtctaggggccggggtggtggctcacgcctgtaatcacagcactttaggaggccgaggcgggaggatcacttgatgtcaggagtttgagaccagcctggccaacatggcgaaaccccatctctacaat

SEQ ID NO: 187407 - DNA, 762 bp, Homo sapiens
gatcgagccggtacctgctgttttcaatggaaatgtttcctttatctttttcagattgttcattgcttgtgtatgatgatgatacagcctgtcttttgccaagtaggaacctcagaatgagatacaactccatgaagaaccatctcttggtatgcaacaaggtcttcagtcagtcagtcaatcaattcagcagagctgcatgatacaagatcaatatacaaaagtcagctgtatcatcatcatacacaagcaatgaacaatctgaaaaagattaaggaaacatttccatttaaaacagcatcaaaaagaatatttagcaacaaatttaaccaaagaagtgtaaaacttgcaccctgtaaccacaaaacactgttgaaagaaaccgaagacctaaataagtggagggaaaaaatcccatattcatggatcaaaagacacagtgtctttacgacagcaacaccccccagggtgacctgatgattcagtgcagtaactatcagaattccaacggccttttttcaaaagtgatccaaaaatctagatggaattgtaaacctcttacatactacaacttacagaactatacaactttttcttaaaacttttttcagagtagaaaagacataattaaaatgtctaggggccggggtggtggctcacgcctgtaatcacagcactttaggaggccgaggcgggaggatcacttgatgtcaggagtttgagaccagcctggccaacatggcgaaaccccatctctacaat

SEQ ID NO: 187408 - DNA, 171 bp, Homo sapiens
catgtgtggctgacagcggcagcttctagaggtggacaattgcaggggggcacgatcctggctggggagatgggagaaggggtcacggtggaagggtatttcagataagtcctaaagcctatctagattcccctacttagaagtagaagaagaggatccgtcgttcatctt

SEQ ID NO: 187409 - DNA, 249 bp, Homo sapiens
catctcccgtctactcagctgcagcacccaattaaagccttcttcctcagcaatactcaatgtctcaatgattgtctttctgtgtgctgagaacactgaagccctggggttttggtaaaaatacatgtacacttttaaaaaccgcaattaatgggttgtggtatattgagaaattggagtggcatcaacttggccaattctgaggaaacacactgtgcttaagtgtcagggccctgtctcctgacctcg

SEQ ID NO: 187410 - DNA, 460 bp, Homo sapiens
aagaggatagcataaggtgtccagggtacgaaggaacttggcatgtgggagggaatggaaggtcgggagctggagccagtaagcaagggaagcatgacatgaagctgaagaaacagcactggataactgggcactgcagatgatgggagtctgattttcaatctgaataccctgagaagcagttgagaggatttacttgtgggaataatatgatcatatgtatatttttaaaagatcactctggctagcatatggagaaaagactggaaagagacatgaatggaaactataaatatgagaagggtatcctcgagtaaaggatagcagtggttttaagggtgttgtttcccaatatgtgacataagcctaggccccttgctgtgtcacacagtgaggtcctcgaggagctcaacatttcagtggaaagaagaaaatgtatacctccaactcaaaacagagt

SEQ ID NO: 187411 - DNA, 172 bp, Homo sapiens
ctacccttagtttcagttttctcctaatctactttggtatcatggccagtcacttcactcactcttgctaataccctaaaccagtgcttctcacactgtggtcaggggcttccttgggattgatgttgaaatcctgggagtatttgatgttacctatgaagagcttgtggag

SEQ ID NO: 187412 - DNA, 438 bp, Homo sapiens
tctctcacaagcctgcaggtctgacaaccaaccctactcacatttgaggatgttacagcactcagtcatagcaggtgtggtttttgaattccagattacatcattagtacctcatcatctgttttcattaatcaccttacattcttgacttttaaaaatttggattgcttattcctggtcaatttgcaacccatctcattagctaaggacactttttcatatgtaaatcagctgacatcgtggtccagcatattgaatctctgaaaaattattgaactcagatatttattcagataactattgaactattgaaaattctgtttccagtatcactcttatatctgttgtataataagctaaaaaatgccatgccaggcatcccactgattctcttatgggctttaataggactgaagtggctccttcaaatcacacacg

SEQ ID NO: 187413 - DNA, 463 bp, Homo sapiens
agtacattagtgactttggctggataaatttgatacataaagaatggcatcattaatgtgctaactaggtcaaaacaatttacttactttaaaagtgaaaaaacatttgactctttaagctattttaagcttttatttaataaaatatgtcaccaaaatatttgaagtgatacattttttaaagcatgcacaatgcagtagtaacccatctgtccctaacccaacatttattgaatgtctattatattccaacactaggagggatgaataaaaagatgagcacatattcctggccctcaaaagagttgacactccatcagcaagatacatctctaaaacatgatttcaattaccagtagagagtgatttgacatgatatagaaaaatttgaaaatgtacatatcttagtaccatattgtatatacttctcatatatgccgtagagaactcttgaagatgagca

SEQ ID NO: 187414 - DNA, 498 bp, Homo sapiens
tggcttggtgatgcatgcatgtaatcccagctacttggtaggctgaggcaggagaatagcttcagcctgggagggagaggttgcaatgagccaagagcgcgccactgcacttcagcctgggtgacagagcaagactccatctcaaaaaaaaataaaaatacttttcaaaaatccaaacctaaccacaccatatgaaatgttacttctgtgggaagactatatggtttgcattttggtccacattccacttattagcctagacgtctctgatctcacagttttttattttctcctttttgggggatgggccatgatactgctgaaatgctgacctacatctaattctatatccaatacccgttatctacatggctgaatgcagtatacatttgggttcactatcaggggaggggtatggacaggatatcacacagcaaaacaatagcaaagcagtagaaccaagatcttgatgctctgacatcgttgttcctgttctcc

SEQ ID NO: 187415 - DNA, 148 bp, Homo sapiens
agaaaatgactgacaccaattcaagacagtgattaattctgggtaaggaaggaaaagggatgaaaatgaggcttgattctatctctgatttttatttcttaaaagagagagaggccaggcaaggtggcttacacctgtaatcccagtg

SEQ ID NO: 187416 - DNA, 285 bp, Homo sapiens
acctaggtatctcaaaaattttttttaaaaaagagcaagcatatgtggaatattgagtaatttatcagaactgaggcataaaataggaatcatggatcaggagggagtgggaaaatggtaaaacaatgaagctactgagggaagcatagcccatattgtgaggtcagcatcaaataatgaaacaaaaaatgttttaagccctaatagtagcagtaattgaaaagaatagatttgagatctataaagtaaaatcaatgtcttaaagattagaagaaaaaagggaga

SEQ ID NO: 187417 - DNA, 281 bp, Homo sapiens
ttttttcatttttttgtagaggcaaggtcccattatgctgctgaggctggtctcaaactcctgggctcaagcaatcctcccatctcggactcccaaaatgctgggattaagggcatgggccaccgtgcccagcctaaaattttatcttaaaaaaaagttttaaaaaaattctgataaaatacaactaagataaaatttcccaccataacaccttttgtgtgtatagttcagtggcattaagtacatttatgcagcctgtgaatggatgtcgccaccatcca

SEQ ID NO: 187418 - DNA, 359 bp, Homo sapiens
ctgttttcaccaccaccacacaatccagttttccagcctcggttccattccatccacttagctggctcccctcagctcatgcacatactacacgtgctttaaattcccaacactaactaacagtaaccttctctattattagtaccttttgcagttgactgtcctatagtaccaaaatacattttgtggtttattaatacagaccaacagcactttgaaagcagtgacagcatggctgttggggctcccgtggccctcgtgttcctcctattccagggtggcagtcaccatgggcattttcctcactgtagtactgctgatagccagcacagtcctgaattcagtagggaggtgctcaa

SEQ ID NO: 187419 - DNA, 555 bp, Homo sapiens
gttgctggcgtgggcatatggagtgggtcatgcacagaaactgactaggacaggtgcagtgggtcaggcgtgtactcccagcactttgggaggcagagatgggaggatcacttgaggtcacgagttcaagacaagcctgggtcacatagtgagagcctgtctctatattcaaagaacaaattagccaggcatggtggcacatacctagaggcctagctacatggaaggactgcttagcccagaaagtggaggttacagtgagctatgaccaggcatctgtactctagcctatgcaagagagagagcacgtgtctcttttaaaacaacaaaaccctgatgcatactagtttaacagactatcacagtcctgtcaaaaatactactcaggtgggcacagtggcaagggtctgtgcccttagtaattagtaaaactaagatgagagggatcccttgagcccacaagttcaagacaagcctgggtaacatagtgagcacctgtatctatattacaagaacaaattagccaggcatggtgacacatacctagaggcctag

SEQ ID NO: 187420 - DNA, 469 bp, Homo sapiens
aggagactcttgcttgcgagaaaatataccaaagcccacattacttttctccttattggaagaaagagaagcagccattgtaccaagctatcttctggtggaggtctgctaaggatacacggaggtctcagcaaagggaagaaactatgtgatccaagggccaccctgctcctcggccctgcccatgttaactgaccattgcactcattctcagatctgtagccgtcttcctgtctggaagctggggcaaccaccaccagtcagcacttcagggtgacagcataatttgccctccttgtgccaggtacggtcacctggtttgccgcattcacattttcaggtggatgaccaagcggaggaactagaagagtctagtgaagcatccagagactggatctcctttcacatctggtttgataaactccgaatgaaggagacccccagcctcaggaaagcacctgtccttcca

SEQ ID NO: 187421 - DNA, 479 bp, Homo sapiens
ccaaggtcccacttcctaataccatcatattggtgattaggatttcaacatacaaattttcaggggactcacacattcagtccaaagcagttcctgttgattagctgaaataatgtgacagagctgtactgttttccaacagaaaaggtacttttaacttttctgttagaaattttgatatttttcctgagactggagaaggtaaaagagtatccccatttttgtgcatctgtgtattaaattggtatgtgaataaaagaggacctatggtttataaaacagtgaaaaacaaagaagtggagtagagagggttagtatcattggttcatgcagttttttaaacatctgtcctaatctaaccaaattaagtgcaatgtagtaattggacttttgtattaccatattttgcctctcttcctatttcttctgcctctgaagtaacattgcagcttgtaagattgacaattatattcagtctg

SEQ ID NO: 187422 - DNA, 499 bp, Homo sapiens
  misc_feature (420)..(420): n is a, c, g, or t
tcaggtactcaagaaaatctatttatttgaacaacagatatatcaatgaatcctcaggagagtaaataccctcccgtcaagaacagatgactcactatgctgtttactcttcaactattttttttttgagacggaatcttgctctgtcacccaggctggagtgcagtggtgctatgtcggctcattggaaccttcacctccaggttcaagtgattctcctgcttcagcatcccgagtagctaggactatagacatgcaccaccatgcctggctaatttttgtatttttagtagagactgggctggtgttgaacccctgacctcaggtgatctgcccgcctcagcctccaaaagtgctgggattataggctagagccactgcacctgccagattgctttataattgtttgtttacacttcnctattcttcccagaggctagaaaccatgtcttattcatttttaccttacctgttgtgaaacattgaggtaatccgtgag

SEQ ID NO: 187423 - DNA, 302 bp, Homo sapiens
ccaacatgtctaaaacattaagtctgccccttcccagcacctggaaccaggctctcttccagtattcctgtcttagtgaaaggcgatgccatttattcatctccacaaagcagtaatttacctccctctctctcaatatctgcaaattattttttcttccttccttttttttttttttttttgagatggagttttgctcttgttgccccgggcggggggcaaagggccccttttgggttaatggaaccctccgcctccggggggggaccggggctgaaattcgaaaccagggccatagtttt

SEQ ID NO: 187424 - DNA, 340 bp, Homo sapiens
gctttacatacattatctcatctatcctatcaagaaacttgcaaatctggatcttaaccccattttacagatggagaaattgatttgtgaatgttttgtgtcccctgttggccagcaaaatgaaccgacctatctctgccccaccaactcctttcttgcacctgaggagtctgaatctctacatttgtctttctatcttctcatctttcattggttaatcacacctcaggcaatcttttatccatacgtgtatatacacccctctccccttttcatgcctttgttttcaatctctttcttccaaatgctgcccaatcacgtcaagaaaaggtatttgtcc

SEQ ID NO: 187425 - DNA, 461 bp, Homo sapiens
taggggctgggattttaaggccagtatggatgggagataagacctcgggctaatgtgatgtggggagctagaattgatctcctatgtgaagctggaagccgaaacaggactaccatatgtttgtgagaaatgagctagaaaaattccatccactggtccagggaagcagattgttaccttctcagggtcttagatggaaaaagagtggacaataataataaattagaaccacactcttattaccatgcatgaatatgtgtacagtcatctctcagtatctgtaggggattggttccaggacccccactacaggtgccaaaatccactaatgctcatgtctgttatatggagtggtgtgctatttgcctatactctatatagatcttcttgtatagtctaaatcatttctagattactatacaggttgagcatcctaatctgaaatcagaatgtcacaaaat

SEQ ID NO: 187426 - DNA, 210 bp, Homo sapiens
gaaagagaaactaaaacccattcacatgaatgtaattaaagcatttaaagacctaccatttaaatcttaattgagaattttgtcacactggttgaatataaagatacctactaaaaccactgatttaggttactctctggaagcctttctagactcttagctcttataggcagaagtataaatcagagaagctagtgacagaataccaaa

SEQ ID NO: 187427 - DNA, 357 bp, Homo sapiens
attgtgaatgatgttgctatgaacattagtgtacaagtatccgtttgaatccctaccttcaattcttttgggtctatacctaggagaggaattgctggttatatggcaactctacgtttaactttttggggagccaccaggctgcctgattgtagtttgaatttgcagttctcttactgtgaggttgaacatcttgccgcatgattggactctttggcgttctcttaccacacactctgtgtgcatgagtcaggcccgtgtcagggctggggcgttgggttttcccttttgcctttcctgttgggctttccctgccacgtgcctggcgtagtagctctttcatcagttcttctggaa

SEQ ID NO: 187428 - DNA, 383 bp, Homo sapiens
caagctccgcctcccgggttcaagcgattctcctgcctcagcctcccgagtagctgggactagaggcgcgtccaccatgcccgaccgttttctgttatttttataattcaactagaggtaactgcagggttaccaaaaacctcattagactccataaccgtagatttacatataacaatcttgagtgataaaataaaaacttagacaaaataaattcaacagagtttgcaaagaatgactcacaaccaggcaaccctcaaaaccagaacaggttcagagagctcccatccacaatgtgggcagtcaatatagacaggaaaaggctgaagaaagcagaaataaggaacaaaaagcagatgggtccttttaaagttaatttcctt

SEQ ID NO: 187429 - DNA, 330 bp, Homo sapiens
agaggagtataccaaaagcagacattttaaacattgatagtcacgtaagggtgcccagcaggaggaagttactgtaggaagctactgtattgcagaaaaagaaaagaaaagcaaactcactttccaaaggacgtgtgggtgtgtgtgaaagagagagagagtgcacagcctaagtcttcattctctctaatgtaagttaatagatattgtctgatatttataataacttatctaagtagttgaatgggaatgttaataaaaagtaggacggtgagtgccagaaatcacacacacaaaaaaacttaaacaaattgcctataaggagggact

SEQ ID NO: 187430 - DNA, 202 bp, Homo sapiens
ataatgaggctccgtggaggccaagagacagaacaccaactatgtgaaaagcagctgcgaggtcaagagggatgatgatcgaagagtccattggcatgacagcaaaatgttacaaatgaactaaaaagaacagtttagtagagtagccctgggagcagggagagagttgcaggatatgaagaaatgaatggggggtgagagg

SEQ ID NO: 187431 - DNA, 542 bp, Homo sapiens
aagagggtaaatttattaaaataagtcacattcaaggagaaaaggccacatgcatgtgcgtgtgcacgtgcacacacacacacacacacacaagcagaatgaagatttcttttactgaataaaagttcaacatgaccaagaaaaagtgttttagaaatatggcatcatgaataggaatttgcagcaccatttcaaaaggtgtttgctggttaaaacaaagttttgtcaactgtttcttttttcctgtgggggggaaagtgtacctatcaaatattgagaaattggaaataagatttttttaattgttgtatcataaacagtacagggaaaaatgggtaaagataatttttttcaagtttggaataaagttattaaaaaaagacattatatgggtaattctgaataaaggagacactttttaactgtattgacactaaattagttttatatgtgaaggtcaaggctttactgggatgaaaggtaataagatgaagtggttaaccttaacattatctgaacttgagatattaaccaaggcacgc

SEQ ID NO: 187432 - DNA, 416 bp, Homo sapiens
gcagggaagaagacctggaagagctgtggaaataacacatctacagatatattttgagcaaaggtcagtaggtgagggaagtaaatctgtgaggctaaagaacatgccttttagtgggggaatgaaaacatgtgatgaacaggggtaacaaagatgtcagtgcaatacaagcccgaaagcaagtggagacaacacgtccctgcagtttctctaagggtaacacaggtgtctatgtccaaagcagtttcgttggaaaaaaatggttgagatgatcatgtgatttcaacttttttgaacatgaatatatcactcaccgtgtgattagaagtggggatgaacttgaactatcggacctgctggcaaaactgctactcgagggtggctagctgttacatggccaatggaaactaatcaga

SEQ ID NO: 187433 - DNA, 355 bp, Homo sapiens
acatcctagccacctcaggcccaggacaaaactaaacattagcccccagtttaaatatgtcccttggtccaggtgttgggagaaaataatcagcaacctcagctgagtgagaaaaagactgcaggtagggaaaatggataaacaatgggaaacctgtgtctccttgtgtatgccctatttcttcccacattgctatttctccaggacccacagttgacaccccagttgggagaaggttccactggtcccaagaagctgaattaaaagctggcttcttccggtaccagaaacaaagtcaatgcgaacacttctccaaataagagttacaatagtgttgagagtcgccatcttttgt

SEQ ID NO: 187434 - DNA, 415 bp, Homo sapiens
ggtcgctcatgaatcggacatcagccacttcttgtttgaagttgtccacaaccacctatatatttctcttttctggatgcttcatgtaaatggaattgtacagtatagtaaacacagtttttatctactgatttttatattcaactaggttcaacatgtatccagaaccaaatgtttaaattttctttctagaagtttgaaaatatttatcttccttgattcttactactgtttctgctttctgtctctcatattgaaagagactttcttttaaatgatcatattcattcattagcttcttatttttctcttctagtatgaggtctttctttctactctcaataaagcctctttggatattaattactgtctctttatgatcctctttctgatgaacatcaattagttgctgttc

SEQ ID NO: 187435 - DNA, 591 bp, Homo sapiens
acgctatcctacgccaattcaggacgtgattaagtatagactcttaaaaatctttgcccaagaaaataaacttgttcctgaggagaataacttctgaccagtcttaaaagccagctgtaaagaacagcactctctgtcaatatcaaggaatataaatcgtatttgctcaccttagctgctgtacaagctccggacagctctgaaatcaaagaaaattatgttaaaacattaaaactactttagcaactttgaagatatcaaaagcctttctctttttctatagcacatgttttacaacaaaaccattaaaactacagatggtcctcatattaaaatattaaaaagcatcttcttcctacttggtgaaccacaggattagggtgagaaatttaaagtcaaagcatatgaaatagtttttaaaagaatctactttcagtagcttgtttaaaacattaggaactctaatgccatacatggaattcatatcaaattatctggttacacagattttacattcatctctattacataatttttcagatcatctgttcttgattataatctctttgaaggtagtaaccctgagtcatt

SEQ ID NO: 187436 - DNA, 500 bp, Homo sapiens
accctgccacttagaaagtacatgagctatttggaccatacgaactaggggtggttaagcagaaccaccaaaccagccctggaccaccaacctccagataatacaggacagaaaaaaaaaacttccctctcattcacgtcaccactatttttggtatccgttacatacagccaaacccatgtaccaagcagatcatcctacataccaacaccagaaatgtatcgtatgagaaaggaaaattgagacccaatctcacttatgattatagatgcaaaatcctaaataaactgttagcaaatggaatcaagtattatacttaagaaaaattatgactaagttgggtttatgtcatgattgcagggatgactttaacattagaaaatacattaatgtaagtctccacattaagagattaaaaattaaaaccatatgatgatgccagaataaattcaatacccatttataataataacgcttaataatctaggaatagaaaggaa

SEQ ID NO: 187437 - DNA, 421 bp, Homo sapiens
tccccagaaaagcacccctgagcataccgtgtaaagtaaccacgcgccctccagcataatctagcccatccccctagtttattttctttggaggattgcatggtctgaaagcatcttattcgttcagttgtttattgtctctccccctctgacagctatttgctatcattgtccagttctagaaatgtagagctgtaaaggcccttggaaaactcaaagccctattgtccagaggtattaacagaaacgaaggagggccaagacttgctccatctcacagcaaagcaggaacaaggtcaggactagaccagggtctcctggctactcctccaatcaccctatctcagtgggatactcctcagaatgcccacgacaatctttcaggagtcagtgatgttccccaaaagcctctgccactttg

SEQ ID NO: 187438 - DNA, 303 bp, Homo sapiens
gggggctgcagcctggcgggggggtccctgggagtcagaggtcagattggatatctgtgacctggtcaatcaggggccagtgcagggggcctgtgtcaggagggtaacagccctgtctcagggatctctgggggcatttcagccagggttgggggctggagctgctaccaaaggttagggccctctgtagttctgagcagggcttttgcaaccctggctgagggaacatgggagctccagccgtttttgtttttgtttgtttgcttttttttttttttgagaaagagtcttgctctatcaccc

SEQ ID NO: 187439 - DNA, 177 bp, Homo sapiens
gagcctatccagataagtcacttaacagctctctgcttcagtttctgcacaatggacatccgtacactgcacatctgtacaatggggatgaaatcatcggccgaggggagtccgaggcggtggatcatttgaggtctggagttcgagaccagcctggccaacacggcaaaaccctgt

SEQ ID NO: 187440 - DNA, 377 bp, Homo sapiens
agcatctgaccactgattattgtgcactctttagtactaaatatatgtgtgactcttgaacagagtcttattcctactacaacctggcagtttttctgtaaatataagaagaaagcacataatgttaactgagtagttacgtttggttctttctttgttccttttttcaaagaaacatcatggtgatgctaattattgccaacaatggatggggtcactatacgctattcgtctatttatttatcgctaattgataagattagtctatttaaagctctcccccagtttctcatgaacatagagtcttgatttcagaccagtgatgatggaggccatgtagctctgttcttttgcagagatgagtggcacatgccatg

SEQ ID NO: 187441 - DNA, 493 bp, Homo sapiens
agaggatctctacctaatggctgtaccaacagaaacgcgtcttctaacggcatatttccttgcattttggttctcatatttttgtaaaaaacaaagaaatgaaaacaaagtgcccttatggtactgttctgaactagaagatttgaatttcagggccgctaggagagtttcctctgccccccttttaaaaaatgtcttcaggcctaacaaatgataacatctattgttatgaattttttttccttccacagtgtgaccttggagatacctcatcatatcacacaaaggtgagctttttagaaacctgtcttgttattctagctaattactttgcaagatatcaagctcagtgttaggtcacagctctagacatcataagctgtattgtgcctactaaaatatcgaagcaaattatttgtattttctttgttccttaagactctcataattcttaaatgattgagaatctcaaagagtatatgcttatattgat

SEQ ID NO: 187442 - DNA, 392 bp, Homo sapiens
aaactgaaagaaaccacagaccttttgaaagacgcagtggacagtagcaccatgaactgaatggaaaactgtcttcagacggtgacacacactcccgcaggggagcgggacaatccaggccataggggaaggccttaaccctacccagtcctggagctgatgaactgagcaatgggaagtctatgagaaggaaaggcattcggatgtgtcttgcgtgcattcccagactccagtgggatgggagcgaagccattcctgatcctgtctcacaggggacctcacggaagtatgtagtcagaagtatgtagtcggaagtatgtagtcagaagtatgtagtcagaagtatgtagtcggaagtatgtagtcggaagtatgtagtcggaagtatgtag

SEQ ID NO: 187443 - DNA, 272 bp, Homo sapiens
cagaaggaagagagagagaaggggtagctgctacatacttctaaatgatcaactctcatgagaactcattcactattgtgaccaaggaagacggtgctaaaccattaaaaaccgtccccatgatccaatcatgtcctatcaggcctcacctccagtattggggattacaattcaacatgagatttagtggtgacaaatatccaaactctatcaacctctaatgctgacctcactgcctttcctcctgcccaccatcagctttctcctcctct

SEQ ID NO: 187444 - DNA, 304 bp, Homo sapiens
ctctggactggcaggccaatcactgcaatggacagcaaagagaacggaatcagtgttgctgccagccctgcagttctcctcagcataaccactaaagaggaaatttgagtcagatgttactttggtcagctccttataagcccttgttctcttcagcattttgagctcttagaaagacaggaagtcactccttcttgtattgctctggtgggaactaagcaatcaatttaccactaaagctagaagatgtagtataggataccatggaaatctttgagctggatgactaaaagattaggcatag

SEQ ID NO: 187445 - DNA, 231 bp, Homo sapiens
aaaccatacgaatcgagctcgtacccctttgcaggcctcaagagaaccccttgctctggggagtctgctccagccccactggggctcctggagcagtgcccaccttggggaagcaacaacagctaacaacaacaggcccttcctactgccaggcacagcacaaaaccccccaaagtgcacagggttcaaggaggtgatgccctttgaggggttttgtgctgtgcctggcag

SEQ ID NO: 187446 - DNA, 238 bp, Homo sapiens
ctttcaaaattaacactcattaaaaagtatgtgatttgcattagcacattcttattttgtgataagagtctacaagaatcactcttaaattatggcagcagcctatccccagttcctgggcttaaacacaatatgacaaaagaatcataagcaatgtgttaattagcctgtttctgattttaccttcaattccacatatttcatgattttcaggaaatctgtttattctttattattc

SEQ ID NO: 187447 - DNA, 411 bp, Homo sapiens
gccctctggtattcatgctcttgtgtaatgctctccccttgactgtgggctggaccaagtgacttgcttctaactaaatttagcaaagatgatgggatctcacttctgttattaggttacaaatgactgacttgttggtattctccactgcatgatcagcttgcaagctttgattgacaagctgccattttggagaggcccatgtggcagagaactggaggaggtctcagaccaacagacgggtcctcagtccagcagcccacaaaaaactgaatgctgccaattacatgagtttgcttggaagcagagccttccctagtcaagccttcagatgatacacccccaagcgccggctcgtggcgtggctcatcgggtggctcttggggggctcttggtgtggctcttggtgta

SEQ ID NO: 187448 - DNA, 455 bp, Homo sapiens
taactgggactacaggcatgcatcactattcctgactaattttatttttgtgagatggggtctcaccatgttccccaggctggtcttaaactcctggacgcaagcaatcctcccacttcggcctcccagagtgtggggattacatgcatgagccactgcacccgatctgtttattttcctttacctcttcaactgtttctcttctgtccagcctctgaaatgctaagttccccagggtttacttctaagcttacttctgtgtatgttctccctgagcagtttcactctcatggctttaaatactatctgtaagccagtgggactccagtgtatattgtttgagcccacatttctagtctaaggtatctccaactccctgcttggcatttctgttgagacgttttactagcatctcaaatttaatacctgtgagactgaacttttgatttccaacc

SEQ ID NO: 187449 - DNA, 332 bp, Homo sapiens
tgtggacttcagttctgctctcatctcttatctaccataccaatttttataattaaaacaggaataaacaaggtgcttaatgtaatctgcaagggagaaacagggcgattgaacagaagggctgcattctggtttcaagcacagggcgggagagtctatatatggtgcagagggtgctaaaattgtaaatataaattcttaaatctgccaaataatggtctgtaaatagtgtaaaataagaatgttctcatttacatttaaatagtttagatttcttgtttttcactacaaaaatataatattagtgcaaatattatctggcaatgaaagta

SEQ ID NO: 187450 - DNA, 345 bp, Homo sapiens
gaaggtctgtgcagatggctggtgctgctgctcaagcagaaagagaaacttctttgtggcttgtgtctgctcccaacacaggagagacttggggtgtccagtcagctgtggtgctcctactttggattctcattgaagctgaggcttcctctttaaggacacacctgccaggccagcatgctcatggtccttgtcctcctggcacattctttggtacagaggttaagatcctgatgatgtgagagtgtgcctcctagagttggtcctgttgacacatggcccctgagtgccacggaggtttggagatctcttttgtatgcagggcctggatgagctggtgcattg

SEQ ID NO: 187451 - DNA, 551 bp, Homo sapiens
accctaatggaactctcagtacttaaatacatcctatattgacatggtagtctcatttctttcacaggtttaagaaagaactctagggttaaagaatcaatatataagaatattttgaaaagatcaagactatcagcagatccagaatagaaccaagtatatactgcaacagagagtattattaatctccatggccaaacacactctgcaaaggtacagttagcaccacagaagtaaagcatttcctgatatgcaaaggactggaagaaattgtttaaaggtcattttgttgcctaggaagcactgggaaaatgaagagaaaaaaatgtgatataagaaaatattaacaaaataccaaaagcatgaatttcatttaacaaaatgaatttttaatatgttgcaagtaaactgaactgaaaaccaaactctactttcttcacttaacttttcaagacattttatcttcattttggatggaacttctatgggcatttgatcctaatttttttttttttttttgatatggagtttcactctttgttgcccaggct

SEQ ID NO: 187452 - DNA, 466 bp, Homo sapiens
tacccagttgaatgcgatcttaaaaagatcactcccttccccaaccagcaccagagacctgcttctttaatagatgtaaccattcctttccttccatattagagaaatttaaaacatgtttgttctaacagcaaaatgaggcctcattaacagctaagtcaaacgtaagcaatagatttaagagtttttcttgataacggaggaatatgagatatatgaagtacagagacaaatagatactaaaggatagactatgatgcaaatactaacataatccagactgcatgtgcaacacacttcaaattttcagtgtgtatactttatctttcaaaaaaggaaaacatattagatgtggctatctctaggtagtaagacaactttttctgtatgtgttcctatatttcccaaatgtattacaatgcatatatactatatattatggcaggggaagagttaatgctccttg

SEQ ID NO: 187453 - DNA, 643 bp, Homo sapiens
gaagaacaaaagttaaattttgatgaagtccagtttattttttctcttttgctgctagtgcttttgtgtctcatctaaaaaaccactgcctaatccccaagatcatgaagatttatggctatgttttcttctaagagttttatagtcttaatttttacatttagatctttgagttcgttttcgtatatggctgaggcagaagtccaaattcactcttttgcatgtggatatctagttgttccagcaccatttatctcatttccttaataaatatttaatgaaataaacagccttttttttttttggagacagactttcactctggttgcccaggcttggagtgcaagggcatgatctcagctcactgcaacctccgcctccggggttcaagcgattctctggcctcagcttcccaagtagctgggattacaggcattgtaccaccagtgcccaaaatttagtatttttagtagagagtggggtttcaccatgtgggtcaggctggtcttgaactcctgatctcaagtgatgtacctgccttggccttccaaagtgttgggattacagcgtgagccaccgcgcctggcgaaacagaactaattttaagaagcctaacaaacccaactctgaggttctagtttga

SEQ ID NO: 187454 - DNA, 538 bp, Homo sapiens
atgtgcacatgtaccctaaaacttaaagtataatattaaaaaaaaagattgtcacaatgatttttccatcgattcaactatccatccgtccattcatccataactttggttgttcagaaagcaaaggattagaagccagaggttttaggagaggagatagaacagaaagttggataacagtcagaaagctgctgaagtaatccagacaagagataacagttgctttgactgtgcaggtgaaagtggagatagaaaacagtgggcagaacaagacgtatttcagagatagaacagatggcacatgctggtggattgaatgtggaaaacgagggacagaaaggaaggaagggtgactcctgagtctctcgcttgaccaattagaaatccagcattttctatcatgggaaaggcaggaggaataaaagatgtttggaacttaaaagatggtattcaaaatcatgggaatgaattatggtatccagaagagaataagagaaagaagagagcccaggaactcaacatttagaaggcagggata

SEQ ID NO: 187455 - DNA, 732 bp, Homo sapiens
cccttattcttgaggagtttatagtctcacgggggaaataaaaaaataaagtttaattaaatcacagtaaattaaactctgtgataaatataatacaggccccctcaaaaagaggattctgtaaaaaagcaggtactgaatatttcagaatatatgttggtcattattttcttgatgatgccaattctccagtcagagatggtttacactttacaacatttgaaaaaagtaccttctacttaaggtagccagtgtgcacagggattaaacaatgattaaaactgtgccaagaaatgaatgtctaatagccaatgtatccaaattcctaatctgtattcctaacatggcaagctgcacacaaataatacacaaacactatatctctagttccccagactctcttaattctcagcattcttttagcatttgcacatcagattgtttacattttctgatttgttgattataaactgcttattctcatctatttcaagacttagaaatctgtgccatatttaatcaaataaactcatgctttctctttaacagagttgtaaaaacaatgattagtttggcccaactgccaaagcaaacctggctatattttcatttcttagttctcgaacgattacctgaatttttcattgttctgaggaatgttagaaaataagcagctgctaaaagcaggggccgcaatttgtcacaacaaatgttgaaaaaggcacggaagct

SEQ ID NO: 187456 - DNA, 370 bp, Homo sapiens
accagagaaatgctttcttccttggcttgaagatgatgtcatcaaccttcagggccctcagaatcccttaaataataaaacagtcagagcacatgaataccgggatgctttcagcactgcatatgtcaagccctgaggctcccagaatccctggagacgtatttgtgtgtctacacttcccacctgcactagcggtgaccacacacacagtccggtgaccacacacacagtccgctgaatctgccggtcaaggtatctatcttcaactgccctcttccagagggagctcccacaaaaaggaccagaattaaaaggaggaggaagaacatcatcggagctgctgagtgtgaaaagaccagctctcttgcag

SEQ ID NO: 187457 - DNA, 251 bp, Homo sapiens
agcctctgtctcaaataaaataaaataaaataaaataagaaatagaaaatagaaatgaatgacaacatagcatctacatggaaagcgtgcactgccctgtaaaactgcttgactgcttctgctttccttgactgccactaagcttgtccagagtattttttttttacatcctctgttctccctagctccagagcttaagaatttattttctgtgtcctccgtccaaatatcagcttggccgaagcagtatc

SEQ ID NO: 187458 - DNA, 320 bp, Homo sapiens
cctcagcctcccgagtagctgggattacaggcatgtgccaccatgcctggctgatttttgtatttttagtagagacagagtttcaccatgttggccaggctggtctcgaactcctgagttcaagcaatcctcctgccttggcctcccaaagtgctgggattacaggcacgaggcactgcgcccggccaggaattcatttttgtccttgattaggtgatgtcaattgatggctgagagaaaaaagtctgtgctaaatagcctggcctgggctccctagagagcaggctcttgggctattgggagagcgcagggtgggaaca

SEQ ID NO: 187459 - DNA, 489 bp, Homo sapiens
gattacaggcatgagccaccacgcccgtcctattctttttattcatgtgtatgttattgcatgtatgtgtgtggggggcaggtggtagtgcatattttatgtatctttcacttctctgttgtttgatgaacttcttccatactcctctttggtatcactttcttcataaatctttcctgactccccaaatcctttgctgtattgctttttactcttcaaacttctattatagaatgtcacactgtattgtaatttactgtccatctggactgggagcacctgagaggtatggccttgacttgtttatgtttatgttttgaatgcctctatagtgcataatacttaataggttctcaatacgtatctattaaactgaactgttgctagattgtcatttgacagtgctgtttcacaatccacagatctgaagcaacagattggaaaagtggtggggagaatagcttcctgtattccttcacttccttgaat

SEQ ID NO: 187460 - DNA, 300 bp, Homo sapiens
caactgggaggaaagtcagctcagtcggagagaaaaagacattagtccagcctggatgttaaccttgagaagagtgggaggtgggagatggtagactaggtgaacttcaaggtctgtgcgtctctccaggtctttgaagtaattctttacagtgagtctgactttcatagaagtttcatttctgggaactaaaggagcttttacatactcttcttgttctcctcttattcatgttgctcttaacatccgaatctaaatttagttcaatttttatccattctttatgttctcctctctaca

SEQ ID NO: 187461 - DNA, 251 bp, Homo sapiens
cgacgcttaatggctgtagcagagaatacaggtatctaacttgcacggcagaaagacaaatggagagaccaggggactgggatgaaataaggaaacacttaagtttaaaatgctgggtcttaaaaaatgtgatgatacctacttgttagtaagatccattttcgatctttcttaagacatatcaatccgtccttagagggtggctatgtcaaagccaaactgggtctatgtgacagccattcaggtaacag

SEQ ID NO: 187462 - DNA, 256 bp, Homo sapiens
gaaggaggaggaggaggaaggaataatggaaaacagaatgagagtattttcctagtatctatacacttgctattagaaccctcctctcccatctgaatcaggaaggcttgtcagtcaatgtaaatatgcatttctagtccagtgactcattggtctgagaagcaggcatcaaaggaactaaaagaaaaatataatttcttgtttgttcccgtgtttggtgaatttactgcactagaggtcggctttctctatccgt

SEQ ID NO: 187463 - DNA, 712 bp, Homo sapiens
ttacaacaacaagatttgttttgctttcacaatttctgtgacgtttaccaaaagggcattgtcgattatgcctgtaacttttttcacctaaaggcaccttgtgttaacctgatatatctagaaagggtcagggaaattgaaatattatttttactattcctttgcttatgctgtactttaatgcacatatatttttacatttattatgtagtataatgtataagtatttgtacatatagttcaagtataaatgattttattttagaacaagctttgaatatatttttgtcaaagcttagagcaggaaatttagctcattcaatctgtgtaacagatctggaatataacctaattaacaaagctagtccttattttccaaacatcagtcaaaccagactctggcttaggaatattccaacaagggccaaactatcccattccagtgtcatgccttaacaggaatatggatgacagagggaagaaaagtcattcttgggatgggcgttacagcatcttgattatcactaaaaaaagtgggaaacaaaatttcagaattccccttgatttcctggtggttttacaacttggcaatgtaccagagtaagattctaaggtaaatgaaggacaagcctttctttgatcaaacgggaaaaaactgccgtgaaaggtgaaatgagaaagcggaacatacgaaaagctggcaaagaacatg

SEQ ID NO: 187464 - DNA, 312 bp, Homo sapiens
cacaaattctatcatattcattccaagaataaaactttcacttttctgcataggagtaagtggaaaatggactttcattccttttcccaatttaggatgaatatttattcagtagctacgttgttttggcgccgtgtcgggatacaggtgcagttcctttctagatttcacattgtctggaatgttccatgtgttgatccaaaatatactttatgttccgcaaatgagaggaagagcttggaggcctggattcttttaccacagtagtttttaaacaattatttgaaacaattcagtgttttgcatatttta

SEQ ID NO: 187465 - DNA, 121 bp, Homo sapiens
gcaagaagccaaaagaaggcccctatagtaactgctgaatcttcaggtaaaagacctcttgcctctaggaagtcttcccaactgtatgaactccagagaaacgctgcaaatggtttggcag

SEQ ID NO: 187466 - DNA, 195 bp, Homo sapiens
tcaaacacttgtcactctccagtgcaggttactagaggctctaaaactccaggaacctccagtgattttcacattggcattgccataaattccacactatgtactttctcctaacaccaagagtatatatgaccctggctggataggatgacccaagcatatggagtgagaagcgcgagaagtgtgttgggaatt

SEQ ID NO: 187467 - DNA, 390 bp, Homo sapiens
cttagttagctcatttctggtcttccaaagtgttttagcaaaaggaacattgaacaaattataggtactgaggaggcttagagtcaagacatttccttgaccttgttcaactcagctgtttcccttttacttattctgtaactgtagattccattggatatttgagaaatgctcaactaataatattactggaaattctaacaataattgaatttctgaaatttatgattttgagttagaatttctattttatttaggatttgtgtattactgtttataaatcaacatgcaatttttttgtcctctgtgtgttattctgttagaattgttatgaggattatgctagctttctactataaacaaggaagctttatatttgtttataagctc

SEQ ID NO: 187468 - DNA, 489 bp, Homo sapiens
aaagtgtaaaatatggccaagtcagaaattttgtcaaaagagcctatttttaatggataagccagatttctatctaaagtagttgatttgccctggtactatttctacagccaagtttcctcagctgtttttgattgttaaatatattggtatcactagggttaagaattgcttgaacatattgggttcttttaaatccttaaaataaccatattatgtatgaaggctcataaaattagagctggtagaaacttaggtagatcaagggattcttagaaaagtcagttatcagctgtaccagctccaaagtgacactgtaccatctgctaagtctttctacagctactgaaggacacatgtactggataaaaagatcattccttagaaaagccaaaaagaaaatttcctgtgctaagttgggtctagcaaagattttctgttttgcactttcatttgacctaaaatactattttagaagttttttaaatc

SEQ ID NO: 187469 - DNA, 447 bp, Homo sapiens
acatataaacttataaaaaatgaaaatgctaattgttttcacacgtactgtttggtagcctccctttggtatgttcccagaccaaaaattattattcttccccatgctttttttcagctacataatgttctattttatggaagtacatcatttccataattgaatttcttattaagacatattatttgcaaatctgcaacaaatgtgcatgttatttttagacgtatgtttggttatttctttacgatagagtcctagaatcaccggctgaggcaagggagatgcacatttgaagcctctttattcatcttgccaattgtcctcaagaaacattgtttcaagtcccattaatgcaagcaatgaacaaaagtttttatttttctggatactggatgcctctggcttatttttctttctattctgtttctttaatagacaaaacaaaag

SEQ ID NO: 187470 - DNA, 534 bp, Homo sapiens
agagaaggtctatgcctctgagacaaggtgtgtggtctcagtgaacccaaatccctcctagaagactcacttagcaaagaaaagagctgcttctcaccagttgtctgagacagtcactagatcctaaacacaaggagggttgggtgtgtatatgttcaggggtgggatgtgtgctattaaggagaatcactgggtttctgtcttgcataactgttctgtccatggtgccatcaataactgagataaggaatatagaaacaaacttatcagtgatgataataaacttagctgggaatatgacacataaactaaacatttctgtaggtagttaaaaataggttttggagttcaggaaatagttggggccagaggaacagtttgagttgtggtgtagaaggtgtctgttgaaagcttggggatgaatgaggttctgtgacagttttctgccatttgcacataacttctgtggggtttcaattttgttacatttggggaagataaaaacaatttattcttttttcagcaaaaccaaat

SEQ ID NO: 187471 - DNA, 568 bp, Homo sapiens
tactggggagcagtgttgctggttcatattctaagagtatgtttaggattatgagagaccaccacactgtcctccaaagtagctgtaccattctgcattgccacattttggatttggcattctaataggtatgtagtggtgtcttgttttttttttgtttttttgagacagagtctcactctgtcttccactgtactacagcctgggcaacagagcaagactctcccccaaaaaacaaaaatctgctgttccagccagtacattatttatttcagacattgtaatttctatctgttgatatccagtttgagtttttttatatcttccgtatctgtaaagaacttttggaacgtatggagtacagtgatcgaatagttgttctaatgttcttacctactaattctaactcctgggtccgtttcagttgaatgatttttatcctcatgatgtgccctattttcctgctttttgcatatttggtgactttgttgttggatactagacaatatcagtattaccttgtcgagcactcgttacttttgtatgcctataaatattcttgagcttt

SEQ ID NO: 187472 - DNA, 413 bp, Homo sapiens
gaggtggaagttgcagtgagccgtttggtcgatcactgtactacagcctgggcaacagagcaagactctcccccaaaaaacaaaaatctgctgttccagccagtacattatttatttcagacattgtaatttctatctgttgatatccagtttgagtttttttatatcttccgtatctgtaaagaacttttggaacgtatggagtacagtgatcgaatagttgttctaatgttcttacctactaattctaactcctgggtccgtttcagttgaatgatttttatcctcatgatgtgccctattttcctgctttttgcatatttggtgactttgttgttggatactagacaatatcagtattaccttgtcgagcactcgttacttttgtatgcctataaatattcttgagcttt

SEQ ID NO: 187473 - DNA, 283 bp, Homo sapiens
gctgaccactatgcagtacaagagccaggccttggagacggtgttcatgctacaagcagagcccgtcaagaaagcacactataactaagtacaaacaccctttcctcctacaatgcctctccagtgcagcctactgacaaaacttaacattttgcccagtggcaaaagaaaaacgtttaaaggacctagctccacttccacagagcatgcaaaaagggtttacaaatggtctctgacttgtgatgttgtaaaagcaacacacattcagtagaaaccatacttc

SEQ ID NO: 187474 - DNA, 134 bp, Homo sapiens
tgttgggatcacaggcatgagccacggtgcccggcccacacagtagttttaagaacatggcagtagttgccaacatttaaaaattgagagagatcctataaaattcagacttgtgggtctcctgggagggtagg

SEQ ID NO: 187475 - DNA, 401 bp, Homo sapiens
  misc_feature (390)..(390): n is a, c, g, or t
aaagatggccactgatgtgatgaacacaccacctacgatgtatctttcatttttattttgtttaaatttttctttgttattatatatgtttcaagacaaggtctcgctctatcacccaggctggagtgcagtggcactagcttggctcactgcaacctctgctttctgggttcaagagattctcctgtcttagcctcccaaggtgttgggattacaggcgtgaaccaccgtgcccagccaagatctacactattatgtcactccaacctggatgacagaatgagaccttgtgtcaaaaaataaaaataaaaaaatgaatatgtagctggaattctgtagttttccgtcatccgtaaggctattccgtttcttttcttattggaaaggcanagtaaaggctt

SEQ ID NO: 187476 - DNA, 177 bp, Homo sapiens
ccacacacacccactcacatgcacacacctgctcacgctcatgcatgcacacgcctgctcacacacacacacacacccactcactcatatgcatatgcctgctcacacacactcgctcacacctgctctcatgcacacacccactcatatgcatatgcctgctcacacactcgctca

SEQ ID NO: 187477 - DNA, 446 bp, Homo sapiens
gtcctgttttcttcagtgacagaagagaacttgggtcacaccgctgccctcccctcccaatatagttatgtcactatttaaacttaatttttatcaaagtaatacatgcaattagtttaaaattccaaccagggacaaaggcttatgcgggcagtaaaacacagaagttgtgtcctatctcttccttccctcccgtccttcccaatcctccttcccactcaggtaggttggcttatggaaaacagaactctctgtttagtcccccttctaatccttttctgtagcactcatcaccttttctagaaaactgtataatttacttattatgtcttctgtttgtcttgcctgctaaattgcaagcttgggtaaggatctttgctatgttcactgatgtatcccaaatgcctagaataatgtctggttcaataaatatttgttgaattgat

SEQ ID NO: 187478 - DNA, 381 bp, Homo sapiens
cccactcatcctcaaagaattttatagccacatccctgaaagtccagcatccctgagtaagagctgttctcgactctttttctttcctcttcctcctcttccaggcttcttcccaagtaacatcggtctttatgtcaatcacactgcagtgtgaccaccccttgtgatctgcttccgagtttgcaggacgctctattttaacataacttttgctctgaaaattgatcatactctatctaaattttgcttttcctcaactttatatatcctggaaatctttccttttctatgaatatagatcaatatcatctaaaattggctgggcgcagtggctcacacctgtaatcccagcactttgggaggttgatgggggaggatcac

SEQ ID NO: 187479 - DNA, 358 bp, Homo sapiens
gtggggcagcaacaagatataggtgtttgcatgctgttctcaacctgactactaaagtcatcacctaaggaagatggaatgtcaacatggatccatgttttaaatttttttttttctttgaaaaagctctgcaacttcagcataaagtgtaaccttgcagttgctgaggtaactgtttttctccccctccttaggaatagcagaacaaattaggggaagaaaacgtttgtaaatcgtcagtacatggacaccctaaggctgcaatagctaaatgtttcattggaatcctaggtaaccaaaatgtggtcagctaaaaggtgtttctgttttcaatctgatttgtttcttgagcaattta

SEQ ID NO: 187480 - DNA, 603 bp, Homo sapiens
aagtccacatggcaatatttccacccctcacatctagatggaaaattcttacattttctcaacaatatttacttactgttttctttggccagatgaagtactgtgtatttttaaactttccaggaagacagtttattaagataatacagtgtaggataatcaaactgtttatttttgacttttgatttaatcttcctttctgtaatctactaaagaaaacattagaatcatgcatttgcctttcttggattgcgagaatcagttcaattagcagtggcgggtttttttcctgtttatttctactacaaatgtaacccctcttggctctcattcttcccttggggtaatttttgttttaatgtgtaatgcctgctcttcaaattaacatcaaattttattctgaagtacccacagttgaattatcagtggaaaatgcacccgcaaattctcaagatttgaagggtgagaagagactccaggatcacctggccaagctgcacatttatgcagctgaggatggttttgcttggagaggagccacacagcacatgagtggcacactctccttttccctttgaacttctcatagaaccttgatcaagc

SEQ ID NO: 187481 - DNA, 354 bp, Homo sapiens
cctggctaggctcaagcccatccctccagaagtgagtagcaggagagacataaaagtaattttctgagatcaaccagtgctggatgggtttggatatgagccatgtttataaagatgggtgagatacaatcttaccactgtcctctccgagggtctggtggggactccatgcaccaatatgaaccgtaaaggcaccaggtggggttagctaagtgctctgtgaaaggcagggcagcgagttacctggagcaggaagagagcacatccaggtggggtgatctgggcagacttcctggaggaggcagacaccaagctgggccatgaagaatggatgggcaggttgggatgggggag

SEQ ID NO: 187482 - DNA, 265 bp, Homo sapiens
gggggaatttctgtctagttcttctatcaactaaaagaattagttgaaaatactaattctagttttttgacagagggattctgaagtctcctagtaaaattatgtatttgtacatttctccgttgacgtctgtttttcttcacatattttgtagctctatgtttggcgcatatgcatttaggattgcagggtcttcttgttgaattttttaaaaaataatttaacgatgactttttcttccttctctgataatttgtgctttttt

SEQ ID NO: 187483 - DNA, 214 bp, Homo sapiens
cataggcaacatctgttagttgatgtagaacatgactgcaacacattatagcaataatattttggattttgttttctgattcaaaacagtgtgtacgctaagagggttggttgtttgtctttgttttttgttgtttttgtgtttggcaaagcagaaattatgcttaatttgtttcaataaataaagcttaagcttctctggaagaaaacctcaa

SEQ ID NO: 187484 - DNA, 590 bp, Homo sapiens
ccagcctccccacaccagccagggcaagcttcccaaaacacacatctgaccctgcccctcacctgcagagacccttccactgtgatccacagcgccccacgctccaggaataaagtccaaaccactaagcatggctggcctggccccagtcaacaccctaggcactcacctacctccaggcttctgcacaagctattccatttctgcagcccataacaccaacctcttcccactggctgtcgagaaaactaaactctctgacccgcatccctccttatagccaaaggcatcagcccctcctcctatgatcatagttctccccttccagacaaatgcatatgttcacaaagactttcagggcataaagtatccccttaaggatgtggctgctagcctcatctttgacacagtgtcttgaaatatttgttgaaggaacaaatgataaataaatgaatgaatgcacatataaaatatccctgtgaggctctgtttctgagttggtcagagatgtagcctggtgaggagaaatgctcagagccagacaactggctccttcattctcctgccaaggtcagccttcaataaaaaac

SEQ ID NO: 187485 - DNA, 944 bp, Homo sapiens
  misc_feature (845)..(845): n is a, c, g, or t
  misc_feature (848)..(848): n is a, c, g, or t
  misc_feature (850)..(850): n is a, c, g, or t
  misc_feature (852)..(852): n is a, c, g, or t
gtctctttttactagatcatggctgttcttcccacctcatccctctgaaaataaaaatgtattgccctccccaccatccatcatagccaggccactaacttgacttggtgcaagagattcttgctgcgaactttgtagagccagtgtgcagatagaatttggctttgagggttcctgatggctttttagtctttaactgtgtgtgtaccagtctcacatttggcccaaacctcaggattctccctctgcctgtcttacttcatggtactagaagaccttcctcgccactctctccacatgagagagtcagctgccctttctcctgtgcctctgcaggaagaactctcttgcatggcacatctcagctcctcattgagggatagttttctttgataagaaacctggagtccatttactctgacctctctttaaatctatatccagagccactagcccaggaaaaacttgggtgacccgtaatttctcttctcctgctgtccttttgctcttacgccccaccccaactccccttaaattttacaggcttatgacagtttgtatgtgctcagccaatgagcagaaaacctggaaagaatttctggactttagcccaccagtttgtctggttgactaacctgctgagagctaaaattggcacccattgccccgtgccttcaggcagtctcctggggcagagtatgccaccatccgaatatcaggcactgagtgggatgtgggtgatgctcacatgactggctagagcttgggggtggggtgggggttaactactatttttttggccatgatctctttccccttcctttttttttaattaaataaatggntcnantnaaataattcaagcctgccttcaaaatgaaattgttgttgtttttagctaattatttagtcaaaaagcaatagaaacccaaagttgttgtgtt

SEQ ID NO: 187486 - DNA, 740 bp, Homo sapiens
aatcccagatactccggaggctgagacaggagaatcgcctgaacctgggaggcaaaggttgcagatcatactactgtactccaggctgggtgagactccatctgaaaacaaaaacaaaaacaaaacaaaaaaatctgttgcatttggccgatcgctttggctcatgcctgtaatgggatggattttatccaaatgtcccccaaaaagcgctgtagtcccacctgcgtaccctctgccttagaacctcatcaatgctggggatactaaccctttatatttttcccaatgtgaatggagaatgtgaacagggcttaaagaaaatgtaaacggtacctaaaatgcaaccctgtggggctctgagttggccggcagggtcctgttttcccaggtgggatgaagtggggagtgaaaggggagtgattctggtcttcaacatgccaagtgggaggaagaggaaacactggcaggggctccaggtggttgtgtgtgtgttggcaggtgaggtgggggggtttagtgacaaggggagcatgaagggattatccatgccagcccaaggcctgggacccagcagcccactgagggagctagagaggcaggagaatgcagtgggaaggatgcggccacctgaagctagactgtctcagttcaaatcccagtgtcaccacttacttgcagcataattttgagcaggtgatgtaacccctatatcttccatttccccatctctcttttttttt

SEQ ID NO: 187487 - DNA, 849 bp, Homo sapiens
tattccagcacttagggaggttgatgcgggtggatcacctgaggtcgggagtttgagaccaggatggacaacatggtgaaaccccatctctactaaacatacaaaaattagccgggcatggtggcatgtgcctgtaatcccagctataatttttgtatttttagtagagatggggttttgtcacgttggccagctggtttccaactcctgacctcaagcgatccgcccacctcagcctcacaaagtgctgggattacaggcatgagccactgcgcccggcaatgggatggattttatccaaatgtcccccaaaaagcgctgtagtcccacctgcgtaccctctgccttagaacctcatcaatgctggggatactaaccctttatatttttcccaatgtgaatggagaatgtgaacagggcttaaagaaaatgtaaacggtacctaaaatgcaaccctgtggggctctgagttggccggcagggtcctgttttcccaggtgggatgaagtggggagtgaaaggggagtgattctggtcttcaacatgccaagtgggaggaagaggaaacactggcaggggctccaggtggttgtgtgtgtgttggcaggtgaggtgggggggtttagtgacaaggggagcatgaagggattatccatgccagcccaaggcctgggacccagcagcccactgagggagctagagaggcaggagaatgcagtgggaaggatgcggccacctgaagctagactgtctcagttcaaatcccagtgtcaccacttacttgcagcataattttgagcaggtgatgtaacccctatatcttccatttccccatctctcttttttttt

SEQ ID NO: 187488 - DNA, 800 bp, Homo sapiens
tggtagacatttgcatatattatactaaataacattaaattacctgaaaggaaaggaaatgagaggaaaaactagtgtaatgatttctcaaaagagcctgttcatttcatctggttgtctgattctgatgccagcctggattgtgggtgttttatttttctccctatttcaagtaatcaaaagttcaggtcactgaaattggcaacaaaattaaaataattttagagtttgatgaatctatacatggttaattttggactgagatgaatgggaagttaatagatagcagatatctgaactttaaactcttgaaagaagatgtatggacaagaattgactttgatcttaaaaccttttcccctgagcattgcttagaatggtgttgcaacgctgtcatcagcagcagattaaatgccaatttaggatgcacactttgactcaaaacattagtgtaggctgccattgcctcaaggtggtgattactcaagctgttagttctgctctgcccttttgtttgctatttccttttttgtagtgtggtactgtttgttcataaggttagaagttttagtccttatcctgaaggttgaagataatgttgtaacgcgtgagccaccacgcctggcctcacctgggactcttaagtgatctattcagggacaaaatcaggatggtagtgcacagacaggatcttgacattgatctggaataacgaatcatgctattttgttatccagaattctttgacaatttttgtcttgccctttccctttcaacccttcctttaaaaaaagaaaacg

SEQ ID NO: 187489 - DNA, 474 bp, Homo sapiens
atttgattacctcagtacaaacttatttccaactaaggtcagattctaagggactggggattagggatacaacttaccttttttagggaacacaattctacccataatagatgggtgcaaggatgtaggtcgaaggctggcaagtgagcctagataaagggagtgagagaaaatgaagatgctaatgagaacatggggatggctgaccatggggcccacactggaagagaagcagattctggagaccaagagtttgggtgatggggtaaaggctaaggattagcaggcaggaaattacagagcaagttggttcagcagcagtcatggtacgagacgagcctgggagagtggggacttcaggatctaagatctcggattcgtgatgaggctggaggtttggctgtgactatggcaggtcagctgcagaaggtaatttgttactgggagatgatccagttgaggtaatccgtgagg

SEQ ID NO: 187490 - DNA, 515 bp, Homo sapiens
ctgtcccttcctcctcttttcctccttcttcctacctcgaatgtggttagggtggctagaagtgacaaggattagggctatttgcctatgtggtgacaaagacgaaagatgaagacgaaaaccatgtctgaacatggctgaacagaaagaaggagaaggaattgtgtgttgtcattccagccctgggctacctgccttcaaacttgttattatatgaaggtggtgagatgttattatctgttcatttggggatgtaacaggggtggttaccctatttggttaaacctctatatttgggattctattacatgcagccaaatgtagcccacaagtaatatgctgctcaaatatttgttcaattaatgaagattataataataaccgctcatttgctgagtggttaccacaaattaggctccattctaagtaatttacggcagattctaataggaaaattctggagaatactaagccctacatgaagaaataggcagaattgtgtggaagaatttggg

SEQ ID NO: 187491 - DNA, 408 bp, Homo sapiens
aggaataaggtggtattgtgttgtatatcttcttttgagaaatgcttattcatgtaatttgcccacttttcgatgggattattattatttttttcttgttgatttctttgagtgccttgtcaattttgaacattagtcctttgttggatgcatagtttgcaaatattttctcccattctgtgggttgtctgtttattctgctgattatttcttttatgtgcagaagctgataatctgctgattatttctttttatgtgcagaagctttttagtttaattaggtttcatctgtttgttgttgttcttattgcatttgctttagggttcttggtcataaactctttgcctaagccaatgtctggaagagtttttccaatgttatcttccagaatttttatggtttaaggt

SEQ ID NO: 187492 - DNA, 375 bp, Homo sapiens
agaagaggacagaataacttggattccagaatcaagagcttggctgaggcagagcatttgtgtggcttatatggcatggcccagagggagcgctgggcaaagagggatttaaggtttgaaactggattaagaaaagccttgaatgggggcatggaagagtgtgggatctcttgttgaccatggacagccacggatggttttgaataaggaagtgagccacagcagtggacaagagtacatcactatgagggaagttggcatgggaagagggaagaggggaagtgaagcagggaagacaagttaaaagacaattgaaatgtcctaaacaatgatcagtgtcagaacctcttccatggttttatgaagaatccacac

SEQ ID NO: 187493 - DNA, 381 bp, Homo sapiens
tgacctaacccaggtagactgaaccaggtaactaagcatcgagatttaattgctctagaatcttttgaggaatttttctttccctccattgaattgcatggtgcccttgttgaaaatcaagtgcctgagtatgtgtgtctgtttttgaactctaagttctatatccttgttctgttaggtctacctggccaggtagacctaaccccaaagtgacttgcctcaaagagatcaaaatccaagttctatagtttcatctccatccccctaacctgtaaatggctgcctgagaaaatgcttccaactacaaaatgactccgtcacttccgtatttctttttcttttctttttttttttttttttttattatactttatattctgg

SEQ ID NO: 187494 - DNA, 419 bp, Homo sapiens
gtatttttagtagagatgggtttcaccatcttggtcaggctggttttgaactcctgaccttgtgatccacccaccttgacctcccaaagtgctgggattacaggcgtgagccacggcgcctggccagtttgctcactcttacacattccactgacttccttaaaccttctggctaaaaggcgatgctacctctcaactagttctctacacaaatagcattttttgttagctccttgtatttgatgaacttctttaacaaagatgatagtatttctattttcctaatgattttgagagtggtattgttagtatttttttgtagtctgcaatcctatcacaggcacttcctctagtcgctagccttttatttcctccattttcccagagttctccctgctcccctgtgcttacttaactat

SEQ ID NO: 187495 - DNA, 817 bp, Homo sapiens
actcttgtgtgtggcaatgttggagtggtcccaagcatttttgggattcagctgtgggaaagttaagctgtggatatacactttgtttgagtttactgggatatatctctgtggttgcagtcactttgatgtatagttattggtggccatctcactgcataaatgatatccaacaatgtggatgtcactcaaaggtacaagccctgcattgtattgagacaggagtgtgttctaacacatctggcactggaatctgcaagtagaagagcatgaaatgtgtgaaaccaaaaagtggctggtggaaaaactttccactcacccgatgtcttagcctgaacatcagcctggtagaaagacttgcatgcagggaagtttatatggagtgcagtcccaggaagcaggagttcaggacaaggaaagtgaaatgagaaggagggaaagaaaatttaaggatctgatagcgcctaggcagcaggtgttcaattccactagaacctttttaggaacctatggaatggaatgctctcagaactgtctgcttaagtacaaaatgcggggggggcgtgaggggatttatcccgttgatttctccctcttgtttgcatatgcataactgcagaataagtttcaagagaaatcctaaggcaggaagtgaaatattgagcattagcaatgaggcagtgtctgcctgcactgatgcacgagcatgaagccactgcaagcctgcgtgaactagtcactgcggcagtggagggagtgagcactggggcctagggggttggaagtggctttttagaggtgtccaacactgtcagag

SEQ ID NO: 187496 - DNA, 762 bp, Homo sapiens
actcttgtgtgtggcaatgttggagtggtcccaagcatttttgggattcagctgtgggaaagttaagctgtggatatacactttgtttgagtttactgggatatatctctgtggttgcagtcactttgatgtatagttattggtggccatctcactgcataaatgatatccaacaatgtggatgtcactcaaaggtacaagccctgcattgtattgagacaggagtgtgttctaacacatctggcactggaatctgcaagtagaagagcatgaaatgtgtgaaaccaaaaagtggctggtggaaaaactttccactcacccgatgtcttagcctgaacatcagcctggtagaaagacttgcatgcagggaagtttatatggagtgcagtcccaggaagcaggagttcaggacaaggaaagtgaaatgagaaggagggaaagaaaatttaaggatctgatagcgcctaggcagcaggtgttcaattccactagaacctttttaggaacctatggaatggaatgctctcagaactgtctgcttaagtaccatatgcataactgcagaataagtttcaagagaaatcctaaggcaggaagtgaaatattgagcattagcaatgaggcagtgtctgcctgcactgatgcacgagcatgaagccactgcaagcctgcgtgaactagtcactgcggcagtggagggagtgagcactggggcctagggggttggaagtggctttttagaggtgtccaacactgtcagag

SEQ ID NO: 187497 - DNA, 346 bp, Homo sapiens
ctttgtaggagggtataaccatgatcaatttccccaatagatttaggactgttcagatcatctctttttgggtgagttatggtattttgtatcctcaagtgatttgttcatttccctgaggtagtgccatttattggcgtaatattttcttattgtcttcactgtccttttaatgtctgtaggatgtatttgatatcacctccttcatttctcatattcataatagtttatgctgtaatagtttatgctgtaatagtttatgctgtaatagtttatgctgtaatagtttatgctgtaatagtttatgctgtaatagtttatgctgtaatagtttatgctgtaatag

SEQ ID NO: 187498 - DNA, 135 bp, Homo sapiens
cttcatgtacaaataagattcttggtctctacagccccttgtctgggttcaatattgggaaaaatcaaagatcttccttctattgattccaggtctttagataataacttcactctttttttttttttgagatgg

SEQ ID NO: 187499 - DNA, 553 bp, Homo sapiens
acacatggagatgttagtacagtctatggtctagtcactttgctacctgggccagagttcttgttggtgaagaaaatagaggtcctgacagtttgaggaatgtgaaagagggtcctgcacaaccatagcactgtaatttatttcctgtggtttgtactgttttggacactgtatgtgcctaattggagtagattcgatagcatatgagaagaaagaattagtaagagtgaatcttcagaacttttgaagggttttctcaaatgcgaggaagatatggcccagtatctgggagatgtaggggcaatagatagttttaaaatcatatatttttaatttatttttgaagatgacatgaataacagcatgatatattcttttttaaaaacatttatttaaattgacaaatgaaaattgcatatatttattttgttcaacctgatattcagaaatatttatacattgtggaatgctaaatccagataattaacatgtgcattatcttacttttttttggtggtgagaacaattaaaatctactctctcagcaattttc

SEQ ID NO: 187500 - DNA, 739 bp, Homo sapiens
caggggcattcagaccacagcacctcctgtttaaaactcctaaaccccagctagccctgtttatacttctccataaaacgtatcccttgacgttgatgttatttacttatctgttttgttttattttgttttgttttttgagacagagtcttgctctgtcacccaggctagagtgcagtggcatgatctccgctcactgcaacctctgcctcccaggttcaagtgattctcctgcctcagcctcccaagtagctgggattacaggcgcccgcctccgcgcccggttaatttttgtatttttagtagagacggggtttcaccatcttggccaggctggtctcaaactcctgacctcatgatccacccatctcggcctcccaaagtgctgggattacaggcgtgagccaccgtgcctggactacttatctgttttgattattgatctgtttccctcatgagaatagatgagttataggtaataataagcggatctaagctaaatgttttgaataaatacctacaagctatgccaggctatcttcgtgggctgcagatcaaccattttgtccataaaacagaaaatagcatctccagacaagggctggatgcagtgtttctcacatggcttagtcccctcttcaaggctctgccttcccccactggcataagccacagtattttcttcttagagagttctgagatcatgtagtcaggtgagataaatgatgcctttattctc

SEQ ID NO: 187501 - DNA, 338 bp, Homo sapiens
ttgacattacctaggggaacatatcacagggaagagaactaagacagagcagtgtgccagttaggtttgagtagaggaggaaaagtctgcgaaagagactgagaatgcatgggtagatatgtagaggtaaacactgtagaatggtgctgagatgagctagagcccatagataatttgctgtctttcgctacaaggtggtgatttgtaacctgaatgagaatagttttagaagagtagttgggctagatgaaagtaggcttttgagtgataggccaggaaaaaagtaacagtaagagtactgttcattgagtttcaattgtgattgggacggaagatga

SEQ ID NO: 187502 - DNA, 411 bp, Homo sapiens
agaaaaaaaactggggccaggctcagtagtgaaagcctgtaatcccaacactgtgagaggctgaggtgggaggatcgcatgaggccaggagtttgagaccagcctgggcaacatagtaagaccccatctctaaaaaaaattaaaaaatcagtcaagcatggtagcactcacatgtagtcccaggtcttctggtagatgaggtagggaattgtctgaatccaggagtttgaagctacaatgagctatgatcacaccactgcattccagcctgggggacagagcaagaccctgtctctttaataacaaacaaacaaaaaaattggtctcagaatgtagtagaatgatggcatttcaaaaaggaaattccaatagttagatgaatcctattcattctttcctatgacgtagccc

SEQ ID NO: 187503 - DNA, 265 bp, Homo sapiens
ccaggtagacctaacccaatctgatgagaaggatggaaaatgcagggtgatccctcttgtaggtcaaaggaagtgggtctgatgaatgcagtggggacacagcctgcctctgtgtcagatgatccccaggcctacggctcggcctggaaacttctctgctcccctcgatcctgaaaggaggactgtgagcacaggtcacctcatcctcatggtgataaaagccaccaaaatgaagactgtgccttcttccagttaggtctacctg

SEQ ID NO: 187504 - DNA, 441 bp, Homo sapiens
agcagggtttatgttcaactgtcacggatctctaagtcgaactgaagtgtcatctaccgtgcatctagtctctccgttttacaaagatgtgacccgaggaaatatatccttgagcaattcctttagaaaaggaatttctagatttaaaccattttcctctcaaacatttaaagctattcaattcttccgtgtattctaatatccagtgctatatttaagagggaatcggattctttcttacttgtaggtggtctggtttttgccttttaagcttctgcaaaaaacaacaacaaacttgtggtattacactgactctacagatcaatttggggacaacttccatgtgttccaccaccaatactgaatctttcaatcgactgacgtggtatctctctctccatctatttacgtttgtcttgattttctcttgacagcgtttag

SEQ ID NO: 187505 - DNA, 345 bp, Homo sapiens
taaggaaggaacatgatcagcactgttaattaaggtatattatactcagatccttgcaatatgtaagctacactttgagaggagctaaagtgcttttaggggctacaaattaatgccatctccaaaagtgctgaaccttatccccggcctcacatttgtgctggggactctgaccttcatggtagcatggttattttgaagaccacctatcctatcacttacatttacatctgcaaacagggatgtctggcagccctgaaacttaatttcccactttggggttgaccagtcttgaattggctccaaagctctgtggtatcaatacagctggacactacaggccag

SEQ ID NO: 187506 - DNA, 312 bp, Homo sapiens
tctgagggagatggcctgccattgtgagaagaatggattgctgcttacgaaggcactttgaaatttaatatcccataattgaaagggatcactattgttttcttgtccccgctaagacctttttattttaaccaactaaagaaaataccaactttgaggatttccatttgcaagcaggtccacggatgaagttagagttcaagtctcagatctgatactaactaactgcatggtccaagacctgtgtttgatactctccttttccctctcttgcttctttcttcctttttcactttcccacattctttctct

SEQ ID NO: 187507 - DNA, 743 bp, Homo sapiens
aggaaagtttcataaagtagtaaaactgtaatttagatcttaaagaataggtaagctagtaggtaggtacataaatgatttaaccttttgaaaattcagacttaggtgtttaaaaatcatattggaggcttgcagcagttacagatattttgtcaggacataaggagatattgacagaaatggtttatgtttaagaaataaccaaaatgattagtatttaagaatgaggagtctaaagtcctgttcttggtggatttaaagggataaagaaaggaattaagagaactagaaaggagcttggaaataaatcttgcccatcttttccctgctgtgtaccccacttccacaccttccacaagagaaaggagagccagataatttgtatgttgtgtatagttttacagctaatcaggaaactaacaatgaatgtgctaaaataatccaaacagacaaagtgagtttgttgtgatttatgttttggtgagactaaggtgcttttggctgagaagtattcagagcctctaaatgaaaattctgacatgcatttggacattgaaatttcactccaaagttcacatttaaattattagtcttaagtatgagcacaggtttagttgaagtttagcttcttttctctcaacctatgatttgaacacatgatggatgtcagaggaaaaaaaatttacattatttaatatatgtgatgttaaaggaccattaactattacaaattgtgattaaca

SEQ ID NO: 187508 - DNA, 919 bp, Homo sapiens
atgaatttgttcttcagaataaaattaaaatatttaagttggagtataacctgcctaaatcacaatatgcttcatcaagactcatggcctagtctttttctcttaattgcaaaatatataatatatggatttaaacacagtgaagttagcacctcataacacagaatttgagtaacatgacaaagaaacatccaatgcctattaagactcttgctgtttttgagaatcttcagttgagacagctatcaaaataaatggccaatccttttagtacttacattctcaatattgacataaaccatcatctgaccctttacttcacaggttggcatttaaatacattctctccagtatcctacttctgcaatgacaagctcttcagtcaagatttttttctagccaatgttggtagaatacctaatgccatcagttttgacaactctttaaaaatcctacaatacttagatttaaacggatcacacatggtagaacaagctaatacctaccagctttggaaaagccataaatgaatgattacagatgaaggcattttctaataatttagatatcaagtgcagctcacctgccaaaaatggttctgccccagccattctgttcctaactcagagcaacagtgttcacagatttttacagcccagtccagataacatcatactagtcaagaacataaaccaggaccactaatctgttgcaagaagtcatagtttaccaaataatcaacaattgtgatgatgtcattgcctaaaccttgaaaaagtttaaatcagttaaaacaaaaatcaactcatcaaaaacagggaaagttttcaacgatgtattttaatcaagtatgaatggttccaagcattaactaatgttgaaaagacaaactccctgaagtttcaacgtgaaataaata

SEQ ID NO: 187509 - DNA, 559 bp, Homo sapiens
tggccgtcgtagatatcgatcgcgacagtgaaaaactgcggcggtgggatagaatacctaatgccatcagttttgacaactctttaaaaatcctacaatacttagatttaaacggatcacacatggtagaacaagctaatacctaccagctttggaaaagccataaatgaatgattacagatgaaggcattttctaataatttagatatcaagtgcagctcacctgccaaaaatggttctgccccagccattctgttcctaactcagagcaacagtgttcacagatttttacagcccagtccagataacatcatactagtcaagaacataaaccaggaccactaatctgttgcaagaagtcatagtttaccaaataatcaacaattgtgatgatgtcattgcctaaaccttgaaaaagtttaaatcagttaaaacaaaaatcaactcatcaaaaacagggaaagttttcaacgatgtattttaatcaagtatgaatggttccaagcattaactaatgttgaaaagacaaactccctgaagtttcaacgtgaaataaata

SEQ ID NO: 187510 - DNA, 449 bp, Homo sapiens
tctaagtctgatgacttttttttttgagatggagttttgctctttttccccaggctggagtgcaatggcgtgatcttggctcactgccatctccgcctcccaggttcaagcaattcttctgcctcagcctcctgagtagccaggactgcagtcacacgctaccacgtccggctaattttgtatttttagtagagacggagtttcacaatgttggccaggctggtcttgaactcctgacctctggtgatccactctcctcggcctcccaaagtggtggaattacagcgtgagccactgtgcctggcctctgatgaaattttttttttctttttttagttggagtctcactctgtcgcccagactggagtgcagtggtgctgaaaatttgaattagaaaatatcactattttggggggcaagggcctagttttccaaatgtttagtgcctg

SEQ ID NO: 187511 - DNA, 386 bp, Homo sapiens
gactctagaggactcccctcattctcctgacatcttaaccaaaaaaaagtccatttttagtttttaaaattaaaacttctgtttttaaaaaactcactgttttccaacatacatgggcaaagtgcatggttacacagagaagtaaatatgaggaggggctttataccccgtcttgaaatgaggcgcccagcaggttcttccaaaaccttaagaagcaagtcatggtttcttcttgctaactgtgtaaaggacaagtgcttcagggttcattctcaatagtgacctgaagaagaggcgaggatgcaggaagaggacaaagggcatctcttcacttcgtcctatattctcagtgggagaattaattacattatcactatatatcctta

SEQ ID NO: 187512 - DNA, 313 bp, Homo sapiens
tggcctggggcacgaggacagcggcccagagctccggtgagcctgcagcccagtaggtactgctagacatggcttcaccgcagtagtgcttttattattaaaatcactggcgtagtatgttttcaaactactcaaacgcgccaccccacactccagcactttgtgtttgtgctgcaaatgtcacaagattgacagcttctgctgtgggtgacaggagttacaggttctaagccagggacagcaggaccagatctgctatctcagaaagaatggtagtgtggttgctcacgcaagtaatctcagcacatgagaa

SEQ ID NO: 187513 - DNA, 498 bp, Homo sapiens
tcattcttaggagtctggagcatctcagctttcaaaggctctgcctgtgacttgttccctccaagcacagtctttaatctcgtgtctaccttaacctttccccaatccctcactaaggttgctccctgcagtcctttacaaagctgagaagatgactcattacttacaatgtctttccctttccctctgtgccctttgctcttggtcatttatttgtggacaaaattttaaaaaggtggaaaggtgggatagtatttctttccaaatcagagtcattcatacattcacttatgtatttgttcaaatatttatttagtgtggagcttgtgccagacactgttctaggcatagggcaataaaccaaacagaaatttcttcccttttgtagcttacattgtagtgtgggagataacgaaaaaatacaataaatggctgggtgcagtggctcacgcctataatcccagcactttgggagttccgaggcaggtggatcacgag

SEQ ID NO: 187514 - DNA, 470 bp, Homo sapiens
accatgaagtctccccagacatagtaggattctaaagtgtttcagagagaaagagtggcttaattgtaacagtattaattaaatgctgataaaaaccatcctctcaaaatttttctaattttaattataaatctaaatcctttatttaatcacactactgctgtgcttgttaatgttgcagcgaacaaggaaactagttacctaaagacatcaattagaaagcatcctcacaaaatgacacttcaacatttttttcttcacctgtgaaaacttgctaaatgcctatgtgaaattaagcaatctctaaagcaagaatgtctttgaactatagtgaatcaaaataatttaatgtttttaaaaaaaatttttttttaatacagacaaggtctttctatgttgttgcccaggctggtctcagactgctgctggcctcaagcaaccctcctgccttggcctcccaaaatgatggg

SEQ ID NO: 187515 - DNA, 229 bp, Homo sapiens
gttattaacgaaacaaaacaaacaaaaacatgcaagatatcaaaggaatactggcatgcagcattaggtctttggctcaatataagtgagtctaacttcattatgatttcacagttaatttaaaagactgcaagtacccattaaaactttaagacctaggaagccgggcacagtggtgcatgcctgtagtcccagctacccaggagacagaggtgagaggatcgcttga

SEQ ID NO: 187516 - DNA, 390 bp, Homo sapiens
cccctcagattccactcagtcacacagcccaggcctgattcagccttacaggcacacagtgagaaaggtgtacgactttttattttcatttccagctctccctcccactgggtacactagctcatgttgatgataccttcaagttgttaacactagagtgcagggaattaaggaaaagaaaccttacatgatacataactgatctggtgttggcaccttctggtggtggcttaagtccttaaggatgatttgggttctttgctgatcccccttgccaggacctcccaatagcacgtccctattgtagtccacttctgattcctttcctcaaattctctcttctagagatccactcattcaatatattcttggtgttgagatcaatgcctc

SEQ ID NO: 187517 - DNA, 389 bp, Homo sapiens
agattttggatgccgtcatcgagtttggagtacaactgtggagttgccctggagattatggtggggttttctgggcttcacactagggttgctctggggtttttatagggttactccaaaaggccacaggcctgtgctactacctggcccagaggaagggagggagataaggctgtaaaagaaagctagggagtttggagggggaaggacggaggtgacccagcttcctagaggaggggataatttgaagttgcagagcagcaaggctctgctctaccccatcttggtattcaagtcccaaaccctggccaacagcctcctttgttggcagtgagggtctgggaatgaagaaggctgcttgctccctggagtgatgacagtaccgggat

SEQ ID NO: 187518 - DNA, 263 bp, Homo sapiens
tactatgtagccattagaaaccaggttgtaggagaatacttaatgacaaaggaaaaggatcaggctgttagggtgaaacaagcaaattataaaataacttatagtatgattccaagtttggaaaaaaaaaggagtcaggagaggcataagaaaagggagagactgtgcaggagataggttttctttttttttttttggatggagtctggccccattcaccaggctggagtacagtgatcgaccacggggtaccggagctcaga

SEQ ID NO: 187519 - DNA, 549 bp, Homo sapiens
aagggacctaagagacagtttgatcaaatgtccttacaccctcaaagagggtttcctgatataacaggtccagcctctgtctacttgcccttttctattccaacttgtcaggagaagaggggccataccctgttaagtccagtgagtagaatcacttcattcatcaaggcgggacgtggcttgtttatgcatgaggtagttattccactctggtttaatttcttttaaaatggggatgatgacaattgtggttgttgtacagataaaaactcatgtacagtgtcaagcataggacccatggttaagagctattaatattcagaatattaacacatcacagggtacctgtaaaacacttcttaaagaactacagtgccttcaacctagcctggctcttatttatttgacacttcagtggggaacaagaattcaattttggccaggtgtggtggctcacgcctgtaatcctagcactttgggaggccgaggcaggtggatcacttgaggtcaagattcaagaccagcctggccaacaaggcaaaaccacgt

SEQ ID NO: 187520 - DNA, 247 bp, Homo sapiens
atgtaagctcactgactttggaatctgtcctgctggtcctacaaagagccctcgaagaagtgaggggacaggacctccggcctgagtcaccccccagaggcctctgcctgggaactaggctgaggaccttggactcttacttgagcgagacctgttagacagaggttgagtatccagggctaatctgttccccttgcctcacatagatgctgtgagccacaacacactggctggaaggtctgcctat

SEQ ID NO: 187521 - DNA, 316 bp, Homo sapiens
tgacacatagaatgtagagagaggaatgcatcacctacgcctccctaagaatggtagtactttcagtaacaatagggaggtcaagattataagggaaattaatgacatctgttttcaggtatcagtacctcaagagattaaacatgataattaaagtgagagccaaaagggttttgaaaaagttgggcaacatgatttgtgagtagtggagaggcatgtcctagttacgcagtgataaatagtcttgcatacagttcgtgctgttcaattctgctcacccatgggcatgttcggaagtttgtgttgaaacatgcat

SEQ ID NO: 187522 - DNA, 193 bp, Homo sapiens
ataattttcaagaattgaataaaggcatcacagtgaaactgcaaaagatcaaagagaagaagaaaatactttaaactactagagtagagacagattatgtaaaatgtacagttagactggtagcaaacttcatcttagcgataagagctgccaaaaaccaatacagcaatatgttcaaaatgcataattatca

SEQ ID NO: 187523 - DNA, 348 bp, Homo sapiens
tagggtctcttgggagggtgatagagaggagacagttccctatgtcaacaccttatctcagtcctccccagaaccttggccttgtcactgctgcagtctgaagttctcattttcccttcaggttgttggatttcctcatacacccaaacgtggggatcatctcccactcctaaatacttttgcaaagctgaagcttgttgttgctatttcctctctatttcaccttcacatcatcagcagacagtatcatcgcctgcctgtgggcttagctgcttttctctaggtctgaatgtgtgatgaaacaagagctcttccctctgactttgtgaccatctccctaagacccta

SEQ ID NO: 187524 - DNA, 351 bp, Homo sapiens
gtaaagtaactttgcatcatatttggcctaagttgaagtgacttgtttccatgggtagttctccattaccaaaacggttgggcgacctcgtccaggaatatattagagagggcttaggtctcagttgggtgagttgtaaggtttcttctaaccttgaaattctctacttttggtttgtacaggagttctctaaacatttctaataattggtgattcagtccccacctgagtattttccttcagaggtagcttatttcatggagtatcatgactatgatgtatcttgcgtgtgtgtgtgtgcgtgtgtgttttaataagagtctgggtcttgcgatgttgcccaggctaatt

SEQ ID NO: 187525 - DNA, 340 bp, Homo sapiens
ttgcgaaaccattctggctcacttaggggccagccttgtggattgtcattattcatagaaagacacagtgtctgctcccaacattgacctcacagtatgagagttgagtaatatgaatgaattatttattacttattcaaattttaagactcactggcctctaatagaaccaaaataagaaatttttttcttccttcttttccaataagttgatacctctatctatgcttctcacaaatggattctctacaatcaagtgattcctttcaatactgtggactcacaaactggctaattatacctgaattaagggcagttccattcaggtgattctacattt

SEQ ID NO: 187526 - DNA, 641 bp, Homo sapiens
aattttcttatatgttatatggaggtaataattgggttattacaagaattaaatgagacaatacacataaagaatttaactcaggacctgagatataaatgcttgatagctacttgcaattattgcattttctacctgtaaaaactctcccaatgctatccctcccccctccccccaccccacaacagtccccagagtgtgatgttccccttcctgtgtccatatgatctcattgttcaattcccacctatgagtgagaatatgcggtgtttggttttttgttcttgcgatagtttactgagaatgatgatttccaatttcatccatgtccctacaaaggacatgaactcatcattttttatggctgcatagtattccacggtgtatatgtgccaccttttcttaatccagtctatcattgttggacatttgggttggttccaagtctttgctattgtgaataatgccgcaataaacatacgtgtgcatgtgtctttatagcagcatgatttatagtcctttgggtatatacccagtaatgggatggctgggtcaaatggtatttctagttctagatccctgaggaattgccacactgacttccacaatggttgaactagtttacagtcccaccaacagtg

SEQ ID NO: 187527 - DNA, 822 bp, Homo sapiens
gtgaaatcctgtctctactaagtacaaaaattagccagacagtggtggcatgggcctgtaatcccagctactcaggaggcaggagaatcacttgagtctgggaggcagaggttgcagtgagctgagattgcaccactgcactctagtctgggtgacagagtgagaccctgtctcaaaaacaaacaaatacctcactgcatggagccactgagatttggggattgtcgttactgcaccagaacccaaatcatcctgaccgctagggtgtcctaactagggtttcttcccaaaagcaaaggcatttttaaagttcgtgacatttaaacaaaagagcaaataccaatatctaccacttcgtcaggctaacaaacccaaacaaagccaacagccagaagttaaaataaacagatcattaggttgaaaatagaactgtcaaaacaggcacaattgacttcatttagtgattgcaaagaacatcaggcaagacacacgtgtggtcatcataacatttatcacatgcttaattgcacatgtttgactaagaaaaacacaaagtatttaagctcatctgtagttcaaagtgcctatccgtgtatttatctattcatcctgatgtatttattgagcaactcttttgtgccaggcactgtgctgtgttgcgggaagtcagggaccccaaacggagggaccagctgaagccatgacagaagaacgtggattatgaagattttatggacatttattagttccccaaattaatacttttgtaatttcttatgcctgccttcactgcaatctctaaacataaattgtaaagatttc

SEQ ID NO: 187528 - DNA, 869 bp, Homo sapiens
gagaagtcagcctcaaagaaagagctggccctgaacctgtgcagatcactccaccagctcccagtgcccagagtcctgggccaggcatttggtggcatgggcctgtaatcccagctactcaggaggcaggagaatcacttgagtctgggaggcagaggttgcagtgagctgagattgcaccactgcactctagtctgggtgacagagtgagaccctgtctcaaaaacaaacaaatacctcactgcatggagccactgagatttggggattgtcgttactgcaccagaacccaaatcatcctgaccgctagggtgtcctaactagggtttcttcccaaaagcaaaggcatttttaaagttcgtgacatttaaacaaaagagcaaataccaatatctaccacttcgtcaggctaacaaacccaaacaaagccaacagccagaagttaaaataaacagatcattaggttgaaaatagaactgtcaaaacaggcacaattgacttcatttagtgattgcaaagaacatcaggcaagacacacgtgtggtcatcataacatttatcacatgcttaattgcacatgtttgactaagaaaaacacaaagtatttaagctcatctgtagttcaaagtgcctatccgtgtatttatctattcatcctgatgtatttattgagcaactcttttgtgccaggcactgtgctgtgttgcgggaagtcagggaccccaaacggagggaccagctgaagccatgacagaagaacgtggattatgaagattttatggacatttattagttccccaaattaatacttttgtaatttcttatgcctgccttcactgcaatctctaaacataaattgtaaagatttc

SEQ ID NO: 187529 - DNA, 544 bp, Homo sapiens
gaattcacaatgctgctcaaaggtcctctctgcccatgaggcgtccccaaaccccaaatcacctgggccacaggctccaagcaccacagacatgataagcataaagcttttaggcgagtcagcattctcaatctcccctccttctgtgtcccatgaaaacagaggcctggggttttttttacttttttctttaaattctattccactccttacacttaaaaatgcctcattattctttagtaaatgctaggagcataaaatcttcttcaaagaagcaaaaactggcatctgttcctgctctgagaagtccttgaagatctcttgaaaggaaggtcatttctacctgcacctcaaaatagaaacaaactggctccctgttccagacatcacccttaccagagttgccccgagtccgggtttgcaaaagtttgggagaggtgtaagaaggagctgactagggcaccagccttccaagtcgcgggaaggtccaggatactggccccctgcctccacctaccagcagggcaaggctggagcaggcacg

SEQ ID NO: 187530 - DNA, 719 bp, Homo sapiens
tatgaattgtgtcatacatatttgttattttaagccattaagttttagggtaatttttaaatggaaaaatacatgatcataggtaaactataattaatagaaaaatctaatgccaataatatttaccattgattgaccgtcaaaactccattaattatttgctttccatttatatttatttttggatttcttttttaagagaatggcacctgtgacagcatactgttaatattacccttttatcgtactttaccatgccatctctgaagaatattacagaccattttggagcatggtgaataagaaattttcaccttaggagttcacttgaatagtcatttttatatttgtgactgcaaatcactcttaggggctgtacttccttagtactggtagcattattatccaatggacttttatagctttcattaggttttcttttgtttttgttctttaaagaacgttttacttatcttagtatttcatttttcatctatattatgaggcagtaagagtcttctgtttttccaaagtggagactgctttatatttatttcgtattgtctacagctgtagtgttcaatacattagccactagccacatgtggttatttaaataagataaaataaaaattggccgggcgtggtgggtcacgccggtaatcccagcactttgggaggccgaggcgggcagatcattaggtcaggagatcgagacc

SEQ ID NO: 187531 - DNA, 236 bp, Homo sapiens
tctgacccctcccttctttgacctctgggaggaacccaagttcctgtttctttatctttctttttaaatgtaaactagttatgtaaacctgtttattgtctcatttaaacatgtcattatggcctcccattccttggaaaaacagcttatcaaggtatcttttctcctagaaaagagctttaaaataagatattttgatttccatctgctagcttggaggctgggtaagagtatga

SEQ ID NO: 187532 - DNA, 124 bp, Homo sapiens
tctgccagcagagacgcacgttgcataacccaggcgtagggtcaactatcccctctgggctccatctccactgcactgtcacagagattccagcgtctgctcaggatacaggaactagcgagag

SEQ ID NO: 187533 - DNA, 443 bp, Homo sapiens
cagatttactgaaaaacaaaaaattggcaatgccaattatgtcactcattgttgtcccagggctcatcacctatgaagatgacaatagcaaaaatatccaccaatatttttccccaaaggtcccttaagagatgagccagacccctcaatgcctggtgaaagattttgaacaattcttaatactaaagccagaataatctttctaaaactcaaattgaatagcatcattctcttgtgaaaattcttcctattgcccttagagtaaagccctgatacctccttaacaaaacccacaagacactgcatgaccttgctaccactgactacctcagcctcatctcaagcaattctcctctccattttctgagctcatggcacaatggctttcttttagttccttaaaaacaacatgggcaatcctgcctcaaggcccttgatcatgg

SEQ ID NO: 187534 - DNA, 318 bp, Homo sapiens
cagagggcgtgcctgtgacagggcgggagctacaggactggacatgatcaccgattcagagggagggagggatgcaggcagaggcctaactccagcatgttagcatgtgctatggaagtgctgtccacaatggtggccaccagtcatgtgtagtactttaaataagtctgttgtggctgaggacctaatttgtaattttaatttcattttaaatttaaatatccgtatgtggctcatggctgctgtattaggaagtgtagatctagagaaacagctagaaaaaggagagagcactggagtcacagtaggggaagaggt

SEQ ID NO: 187535 - DNA, 567 bp, Homo sapiens
gtgattcaggtctcagggcactgtcgcccctactcactttgatgaagccagtgctgggttgctgctgaggtggggaggttcatgggccaggaactgaaggcagccatgagagccagacccctccaccacccccaagacagcagggaactcactccaacagccaccctgggatgctgccacagctgagcctggaggtgaccgtgaccctggctgacgtcggactgcagctttgtaagggagactgagccgggacccagacctacaaaagctgagatgataaacactgttttaagctgctgtgtgtcgcagtgactcgtgtggtagtggatttctagcagagccgtcgttcgtgtctgccttctctcagctcaacactctgtagggccacccatgccgttgtgcatgtcaacggtggattttttattgcgagtaatatttcattccattgcatgctcacacctcggtttgtttaactgtctacctgttgatgagctctgggacatatgcagttctgggctattatgagtaaagctgcttttaacatttaaatacaagtctgtgtatgga

SEQ ID NO: 187536 - DNA, 301 bp, Homo sapiens
tgagagttttacgttgaattttaagtttgaccacaaatatttaaacttccctggaccacaaatacagtatcttccctgtggtttatctggcagcaagtacatatttacaaatctctatatgtctgcctgttatttaaatttcttacagaagtgccaaggtctttagttgtgatttatcccctccccctccgtactggtaggtatagtcttcattaggcctaactcttgggaaaaggaggtatctttacaattgaagcttagaaatcttcctgattaaatttcctattaccgcttccctctt

SEQ ID NO: 187537 - DNA, 147 bp, Homo sapiens
aaatatgtaaaggggaagtcaaaatatcgctgtttgccaatgatatgatcgtatacctagaaaaccctaaagactcatccaaaaagctcctagatctaataaatgaattccgtaaactttcagggtacaaaatcaatgtacacaaat

SEQ ID NO: 187538 - DNA, 405 bp, Homo sapiens
atgtaagcatgatgctgataatagctaatctggagtgcttgccatgtgcctggcactttgccaagcattttcctttcattgactggtgagttcgctctacaatcccattcacttacctctctctggtaagccatggtgctagcaatggaatcagaatctgtctgcctaaccctcacaagtgtgtacactttacagtgagccatttatacctgtccggctggcaaaacagtccacaactgtctccttagtggctggatccctgctggctctgccccgatggaaatgcttttgccttctctgctcagtgatcactttagagcactaggacagaacagagcccagcttcgagggtgaaacctgatgctgaagaattcacagccacacatagtgtgtcctcttatccca

SEQ ID NO: 187539 - DNA, 268 bp, Homo sapiens
ggagttcaaatccagcctgggcaatatagcgagacactgtctcttaaaaacaaaaacacccaacacatttatagagcctctactactactatgtaccagcaaaattgcataaagcatgctttgtctacaatcttaggttctttcactcagtattaccttcagataaatcagttcttccagagataccctctgacttccctttcccacatcattatttatatactttgaacccaattaattctattgctgatttttcctcatttcatag

SEQ ID NO: 187540 - DNA, 266 bp, Homo sapiens
agtcatcttgttacaaagcaaaactaatctcatcattcttcaactggaaatctttcaatggcttcacatgacactcaatgtctaaactctagaaacccctgcatgaaatggccctggctcccttctcagccccatttcctgtgactctcctgcttgaatgtcacactcaagccagacaccttccttccagtaactccagtgtgccaagccatttcccattgtgttggaagaccatctgtgttgcttcctttgatagaaaggctttg

SEQ ID NO: 187541 - DNA, 365 bp, Homo sapiens
caaaatagtcctgattacagtctttttgccatttcaataagtgtcaataattttttcattaacagtatatttaaatgtgtctatgtttaaaaagcttcacaagcaaatctaatatagttccatggttgaaaattctgatagacactggttaagagtatggattctggaatgcgacagacctagtttcaaatgccaactctgcttcttgcagctgagtgactaagcaaattacctaacctgagcatctctctttctctgttgtctctctctctctctttctctctctttcactctatctctctcaagttagtgaaaagatccaatgaaggcccttaaactactaagcacagtactagtacccaaca

SEQ ID NO: 187542 - DNA, 1017 bp, Homo sapiens
  misc_feature (944)..(944): n is a, c, g, or t
gagatgaagtcacgctctgtcgcccaagctggaatgtagtggcatgatctcagctcactgcaacctctgcgtcctgggttcaagcgattctcctgcctcagcctcctgagtagctgggattacaggcccttgtcaccacgcccatcttaatttgtacttttagtagagacggggttttgccatgttgcccaggctggtctcaaactcctgacctcaggtgatccacccgccttggcctcccaaagtgctgggattacacgtgtgagccactgtgcccagcttactaggtaattttttcaaagtaaggtacctttgtgctctaaggctcacccctctccaactactcaatgaaaaaacaaaaaaatgctagtaccatgtgtattttgatttcatgttaattacatattttatttgctcagagtacaaattagataaaattccttttattaaaatattccttagtaaagaatctagtaatttgctattttatccatgttttatgttctaaattgataagttattttctcatttttaaaaaaactgatcatgtatttagtcattctttagtgtatagattgtttctacatataaagccagcaggttttctgtttgtttctctgttccattgtgtagagccaaagaggtttttattttaactgtgtgtcagtcacaggaaagtagttattgtttgggctccactatgaaatgtcatacttgattagagctacaaatagaatacagaataaaattagcgtaagtgcttttagttataaacagactctgaaaaaactgtttgcatcatactctttcagagatattctgtgcttcataaattgagttccgtttttcagtgattgaatagcaatcttgattctttaattcttcaggtgcttttgtgattttatatataagtaagagaatggcacctcaagcagccatttagngtaacagccatttaggtaacagccatttaggtaacagccatttaggtaacagccatatcagtaacagccattg

SEQ ID NO: 187543 - DNA, 594 bp, Homo sapiens
caatccaagtttggttgaatcctcacatggattccacagatacagagggctgactgtactttctaggattattaagtaatgagctcatttaatcttcctttaaacacagccctacctcatcttacagttaaaaaaaaaaagaaaagaatgctcagaaagggaaaggaacttatacaaaactcacaaccaaaaagcagccacgctgtgtttgaagccaagtctgtctcattttcaaacccatactcattccaaggttctctagtgcttccctagtaaagggttgcaggttgtgagtttcaaataagcaccacaagcatccagcaacagaaagaatgacctaatgtggtctaaagcagtgtctccaactgtagcatgcaacagaatgacctgcagggcttttaacagcacaggttggccaggcgcagtggctcacacctgtaatcccaacattttgggaggacgaggcaggtgtttcacttgaggtcaggagttcaagaccaacctggccaatatggtgaaacctcatctcttctaaaaatacaaaaattagccagatgcagtggcgggtgcctgtaatcccagctacttgggagg

SEQ ID NO: 187544 - DNA, 2264 bp, Homo sapiens
aaaatgagaaacccctacacagggctctatgtcccctcgccctctccagtcaaggccaccacaagccaagggaggtctgggcgtgagaggtgagaccctgtgctccccctgccctgggtggaggaagggggtgccctgccaccctgagaacaatggtgtgtgcagaagagaagggactgaaactctttgaagatgttccaggatttagcacccagggagcggcggagactcagccccaccagcctccggcacggagggaggaaagcgttccccaggctgctcaggagaacgtttgttgctgtagtgggcagtcaccttccaaccggggacagtcacccccctgctcggggacagtcacccccccgctcggggacagtcacccccccgctcgggcacagtcacccccctgctcggggacagtcatccccccgctcggggacagtcaccctcccggaatggggcttcctttctcggggctgggaatcaccctggatccctccccactcggggtgctcttgggccatctgagggctcctgggtcactcttgggccttctcagggttcctgggtcattcttgggccatctgagggttcctgagcccaatgacacttctgcctaggctcgcgctgcgggaggaagaagccaggcgaggtcccctccgtgccccggtgcagcctggcctgggagagaggagcccccagcgacaccgagagccaaaacagggcagagtttctcagaggtggcacccggccagggagcccctcgcggctacagggtttctccacggactcggccatctggggagagcagcccagagccctcgagcctcctgctgtattctgtggcctgggacttggggggacccattgaggacactgggacgcagccaaagggaggtgcagacagtgtgtactggcgtttccggggaccaagcccagaaggagcaggacggccacctcctggcctggaggaaaatcctgcttcctggcaagaaaaccacccctagaggaataggactggggtgcaggacgctttctcaggcaaccgcccctttccttctccaaaactggggcaggaaaagagcattcaggccaggcagcgaaaaccccagctctggtacctcccgccccagcagaggccgcctggaggcacggagttccggcctggatgaggcctgggaagcccagcgactcacaggccacggccgcttcccctctccgaggaaggaaaagtccctgcagcgcggcctcggctaaggctccggtgcccaagcaaaggaagggagcgtgcttgcagacgcctcctgctgggagcctgccacgcccgccacaccctgcgcggggacaaagctctccgtggctgtggcagggacacaccgcgtgtgggtggctgcaagccagcagccccgagcggcccctcccgctagactcccagcctgggccctctgtcctccaggcaacgagaacatggatgcctcgcttttcagagactcgcgttcttggaacttacaccctcttgggtttgctatttttacccaccctgagccttccggtctccatggcgacgcctccaaacagcagattccaggcggcaatgacgtcatctctccctttcctgccgcccaggccttggaggtactgctgcctggggccgggggtgggggtgggggggctgcagggcttccctggccccctcccatacccacctggtgctcccccaaccagagatccaaggcctgtgggccacggctgcgcctctcctgactccagcttgcccgtctgtccttgggggcagcgtccttccttctctcggccccttggagcagctctgcgggaaccccacagcagcccagcggattgaacgcaaaagacagccaccctcctgctccggatcctgggaggaggctacacgctggcgctgagacagcaacctgcctggcctgggaagccccccgcagcccctacatcagaagcttgctcttggcgcagtggctcacgcctgtaatcccagcactttgggaggctgaggcgggcggatcacgaggtcaggagatcgagaccaacctggctaacacggtgaaaccctgtcgctcctaaaaatacaaaaaaaacaaattagctgggcgtggtggcgggcgcctgtagtcccagctactcgggaggctgaggcaggagaatggtgtgaacctgggaggtggagcttgcagtgagccgagatcacactactgcactccagcctgggcgacaaagcaagactccgtctc

SEQ ID NO: 187545 - DNA, 2174 bp, Homo sapiens
aaaatgagaaacccctacacagggctctatgtcccctcgccctctccagtcaaggccaccacaagccaagggaggtctgggcgtgagaggtgagaccctgtgctccccctgccctgggtggaggaagggggtgccctgccaccctgagaacaatggtgtgtgcagaagagaagggactgaaactctttgaagatgttccaggatttagcacccagggagcggcggagactcagccccaccagcctccggcacggagggaggaaagcgttccccaggctgctcaggagaacgtttgttgctgtagtgggcagtcaccttccaaccggggacagtcacccccctgctcggggacagtcacccccccgctcggggacagtcacccccccgctcgggcacagtcacccccctgctcggggacagtcatccccccgctcggggacagtcaccctcccggaatggggcttcctttctcggggctgggaatcaccctggatccctccccactcggggtgctcttgggccatctgagggctcctgggtcactcttgggccttctcagggttcctgggtcattcttgggccatctgagggttcctgagcccaatgacacttctgcctaggctcgcgctgcgggaggaagaagccaggcgaggtcccctccgtgccccggtgcagcctggcctgggagagaggagcccccagcgacaccgagagccaaaacagggcagagtttctcagaggtggcacccggccagggagcccctcgcggctacagggtttctccacggactcggccatctggggagagcagcccagagccctcgagcctcctgctgtattctgtggcctgggacttggggggacccattgaggacactgggacgcagccaaagggaggtgcagacagtgtgtactggcgtttccggggaccaagcccagaaggagcaggacggccacctcctggcctggaggaaaatcctgcttcctggcaagaaaaccacccctagaggaataggactggggtgcaggacgctttctcaggcaaccgcccctttccttctccaaaactggggcaggaaaagagcattcaggccaggcagcgaaaaccccagctctggtacctcccgccccagcagaggccgcctggaggcacggagttccggcctggatgaggcctgggaagcccagcgactcacaggccacggccgcttcccctctccgaggaaggaaaagtccctgcagcgcggcctcggctaaggctccggtgcccaagcaaaggaagggagcgtgcttgcagacgcctcctgctgggagcctgccacgcccgccacaccctgcgcggggacaaagctctccgtggctgtggcagggacacaccgcgtgtgggtggctgcaagccagcagccccgagcggcccctcccgctagactcccagcctgggccctctgtcctccaggcaacgagaacatggatgcctcgcttttcagagactcgcgttcttggaacttacaccctcttgggtttgctatttttacccaccctgagccttccggtctccatggcgacgcctccaaacagcagattccaggcggcaatgacgtcatctctccctttcctgccgcccaggccttggagagatccaaggcctgtgggccacggctgcgcctctcctgactccagcttgcccgtctgtccttgggggcagcgtccttccttctctcggccccttggagcagctctgcgggaaccccacagcagcccagcggattgaacgcaaaagacagccaccctcctgctccggatcctgggaggaggctacacgctggcgctgagacagcaacctgcctggcctgggaagccccccgcagcccctacatcagaagcttgctcttggcgcagtggctcacgcctgtaatcccagcactttgggaggctgaggcgggcggatcacgaggtcaggagatcgagaccaacctggctaacacggtgaaaccctgtcgctcctaaaaatacaaaaaaaacaaattagctgggcgtggtggcgggcgcctgtagtcccagctactcgggaggctgaggcaggagaatggtgtgaacctgggaggtggagcttgcagtgagccgagatcacactactgcactccagcctgggcgacaaagcaagactccgtctc

SEQ ID NO: 187546 - DNA, 759 bp, Homo sapiens
cttcccacccctcccccctcctgcctcttggggtttcctccttcacatttacacacatacaatgcaggaagccttgtatgcatttaaggaagagaggatttggagatggacatttcttctgtaagccattcagtatgcctatgaagtacttgtggtcctctttaaatatatgtttgtttctggaccttatttctgttttactcaatcaggatttcagaatgcaggacctagaaatttgcattctattagaagactcaggttgatatgattcaggccactcgcagaacacagtttgagagactgcaagcaacaccttctccctgttcattgatcacgtgggaggcttagcaggtcactagacctgctagaggacaactcaagtagacatatcccccaattatgaaaaagtgcatttcaaggtaaaagtgacctcaacataaattggaattttgcagtgctgaattaattattgacacatttgctgagaagcaagcatggtttaaaaataaccacagtcacaacaaaaccacaaacctctgacttaggctttctaaatataagaaacaaaagacgaaccagaacctccagtaacttccctccaggccccagctttcactggcccgattttacctgaaagcatctgagcatgggctctctaggatctctcaatatgccccgtcccttcccagctcccagctcccatttccctgtgtcctttggctgcctaactctatacatcacaaagagctacagaaataa

SEQ ID NO: 187547 - DNA, 827 bp, Homo sapiens
tggtggcctcacagtaaatgggagcgtcaactataatcccagctctgaccagtgcactaactgtcttttctcagaactcaccctgggagctctcgtctgcggggactgaggtctcactcagcacttgaaagtacctttgagaatgaagaaactacaacagctttccaggaccctgtgtgcagtttcttccattctgtcctgaagggtcagtggccctacctagggatctgcattggctcttgtgcaagtggtggccttcattgggctgcttaccaatgtttattgagtgtgtccatttacacactatgcatagacacagccaccattagcacagacattgaacttcagctctgggatcacaccctaaggaatgtcatcaaatcaaggcttcaggaagcacaaataggcccccttcatcgtggaagggtgggaaacaggagaatcctccctttttaggatatatggaggagattttctgctccttctcccatgaacttctcactaatacagcccttagggttgtcccacttgatgaagtctcctgggataagtgtgctttcaaatatctttttcgctggcataattgcatgactgataaaagtttgcctctaattagtaattccacaagaaaatcaaggcaatcaatagctaatgtacaaaatttttcatagcaaacaggacaggtgtaggaaagcttgagtacttataatgcactgaaaatccacaaaactgagtttggtcaatactctcatgatccttcctcattacttaaatttcttttaaagtgctcgctggctaagattcagtagagtggcatctgataaaca

SEQ ID NO: 187548 - DNA, 458 bp, Homo sapiens
gggtattaactgggtgctgctaaggtactgtattaaataaattccatgaattaatagtcttacagacatcccacttttctactgaagaactgaagataacaaatatactagcataaaaggactgataaaaggggtaagacttgcctcaactctaaagtacagaaatcagaatgcagaaaaggctatctgaagaaagtgagaaaccacaaaccaagtgtaaatataactatgcaggtaagaacaaacaaaagtttcaaactgaagaaattaaggctagataaacagaatggaattggatagcaggaggcctcaagtatccagcaaacggatgaaagttttgtaaaacagctataagcaggacaccactacgagctctttatatttaaaatgcctttttagaaatagaacctagtaataatacaaaatgagtgggagagaaatgagaagcaagaaactat

SEQ ID NO: 187549 - DNA, 362 bp, Homo sapiens
acactatccaatatatgttccctggcatcttcctgtcttttaaatattctctgtacgctacagttctttgtaagtaaaaataagcttaatatgtctacttagcaaacaaagtttttccagatacctataataatgaggaaaacagtataaagaatgaagtatttgaagaataacttataatttgggggatttctgagaattctacttctttgtccctaatttccgaaggtaaatgtttgttgtgaatttggaaacactagactacagaaaagcaggcactctctagcctgggaggcccactgatcttaggagggtccatatagctgcttattgcagaccttgcactagaacccaggtctttt

SEQ ID NO: 187550 - DNA, 480 bp, Homo sapiens
aggatgtggatgtcatgagagcaatgtgataaatgttcaaacatgtggaactgcacgggtaaataagggtgacttatgagaggaagcgacagctgaatttgaagtgggaagaaggagcttgccagataacaaggagagaggaagtggccttctaggtgcagggaagtaccaaaacaaaggtgtaggagcaggaagggtctttaaacgttaggttaggtaagggctcttcacccagagtggccagaatgcaggactcggatttagagtggttggaggaggattcagaggccctggagacttatagcccgaagggctcgtatgaagactaagggggtaggactttatcttctgacatgtagttggctctgtaacatatttcctctgaattactttccctcctgattaaatcataaaggctttgaggacatctaagctcttcttattcccacctggatactcttccatatagaaagggagtca

SEQ ID NO: 187551 - DNA, 209 bp, Homo sapiens
attacacagaaaactcagacaaaaacacataaaccataggcacataccccacacaaagctatctatacacaagcacacgctcttccatcttgtgtacacttaccaggggaagccaacatgcaacagaaagctcattcagtgcctcccaatatactgcacacccaggctcactcaacattcatgcagccatccttctaatgacctactcg

SEQ ID NO: 187552 - DNA, 329 bp, Homo sapiens
gaccaaagagctacctctgagctagctgttacattaagttgagaaagtttcccagcagcttattgactgggtaagcagttgttcaggattgcttttcattgttgggttttggagtccacaggttagtgtgcaggagagtaaggcatgtgctggctctctttctcatttgagtgagggtgcttttgatttttttgtgaattgttctgtagtttgaagaatctagaaggacaggctatcaacagaggcagtctgcttaagcaaggtcgtcttggagtcctttctaacaatttgatgagcagtaaacctctgcaatcctgtctaatatttgt

SEQ ID NO: 187553 - DNA, 743 bp, Homo sapiens
cgcaacctctgcctcctgggttcaagcaattcccctgcctcagcctccccagtagctgggattacaggtgcgtgccaccacatggggctaattttttatatttttagtagggatggggtttcaccatattggccaggctggtcttgaactcctgaccttgtgatctgcccgcctcggcctcccaaagtgctgggattacaggaatgagctaccgtgcccggccctatacatctgtttagatgggaatgttgacgtggaagtgtatcacttcctgttttacgtccctgtgtaaaacaatcacatttccttattgatgactgtcttccaacagaaacgtaatcatcttcaaggttagaaaatgttttttaaataacttcaaccagcgttaaccaaactggttaattcaccaaaatgttaaccaaaattaaccaaatcaaatttggtttattttccaggtctcttttttcttttcttttttcatttttaaagagatgggatcttgctatgttgcccaagctaaaatgcaattgttattcacaggcatgataatagtgccctatagcctcgaactcctgggcccacatgatcctcctgccttagcctcctgagtattccaggtttttcttaatagtttaaacaggtagttctggtttggctatcagtagtgttgtcaaatagcttttgtttgcttaattttatttttattttttttgagacaagtcttgatctgttgcccaggctgg

SEQ ID NO: 187554 - DNA, 504 bp, Homo sapiens
tatttctggtctagatccttaacgaatggtcacactgtcttccacaatggttgaactaatttacattcccaccaacagtgtaaaagcattcctatttctccacatcctctccagcatctgttgttttgactttttaataattgccatgctgactggtgtgagatggtatatcattgtggttttaatttgcatttctctaatgatcagtgatgttgaactttttttcatatgtttgtcagatgcataaatgtcttcttttgagaagtgtctattcatgtcctttgcccaaaaagtagacattcttgttttaagtcttccctttgtgcttcatcttacagtgtctctaccccagaagtttagtgttggcattgattattcattgcttgctagcttggttttgaggggtagaagtgttcatattttccattctcggtgatcgttttcctacctaagcagtaagggacctctaaggatctggacccagttcctttttctgtctttctc

SEQ ID NO: 187555 - DNA, 501 bp, Homo sapiens
agagaagatgctgcaaatcctccctcctctctttgctggagatttaaatcttttgtgtcgtaaacaggtggaggaagtcagggcaggggaaacatggggaagagtgaatttgtggagtggggcgttttcataaaacggaggcctaggtagaaaatagcatcgagtgagaaaaggtgtgcgaagaaggtttgtgggcattattctcaaggcgcctttagagtaagggatggtggaagcccaccaagaagtagaaatgaaatgggtgtttctcaagaaaggtaagaataatctagaggaatatttctttatcaagtatcatgataaaactgacttgaatatgaaagagaaaaagtttctgattgtcaccaagtcagaatttatgaaccaaagtattgtttttggggttggggaataaacattcagaaaagacgactgactaagatgcaaatatcatgatttcacataaatgtcctttgtaataaaaaaggtaggaagtgggag

SEQ ID NO: 187556 - DNA, 483 bp, Homo sapiens
cattacatcccctcttccctcctggacacagcagtgtgatgcggtcaatgggaattagattttggagatggggcagagtggcactaggggcaggaggaaatgtacgaatacctgctgagaagacagaatcgatatgtgacaactgtaattctcagcacagtaattacaccatgtttacagggctctgcagagtcaccctattgatttcggaaaagtatatttactgcatcagaaacacaggtgcaatccctgatctgcactccagtctttcattgatcttgaacatcatagccagatacaaggtgctttagcatgcaatcctgcatctttgcctctgtggtttggctcagcaattcattatccatttctgtctatcttaccacacccatttttactctcaaaaggtggcaaacagaaacattcatttatttactcaaatcaccggttcctactttatgccaggtgctcacccaggtgctggtg

SEQ ID NO: 187557 - DNA, 400 bp, Homo sapiens
atgtgggagatgggagggaatcagggccctggagggacctgggtgcagaatttcagaaatatgaaggaactggggggccccgatgagatttgaggaaatctgggggcgctaggcatctggcaaggacagggtctgagatgataggagcaaggtctagggcgatcctaagtgctattgagaaagggttttcggagtgggctgagggtgagattgagggggtggggtgagttcttgagggactctatcttgttagcagaaagaagggagctggctgaggtgtgaaggcagcacatgacattcagtgcataagaggaaggagcagggtatgagggcagcacagtgcccgatggaatgcaggagatgggggctcagattgagggagagcagaaatctggggtga

SEQ ID NO: 187558 - DNA, 442 bp, Homo sapiens
tagcatccataaattatggaagagggtatttcccatcttcttaacacatgcaacacttctaaggggcctgcaaaaaccccagcagcctttcaatgtcccccacatcttagcacacataaatatttacatctgtcctatcaagaaacaaatatgcatgcatatcattattttggagatatagcgtgagcactttgtttgcaagaaaaaaatatgcatgcatatcattttggagatatagtgtgagcacttatatttgtttgcaagaaacaaatatgcatgtatatcattatttttggagatacagtgaatgcacttttccagttacatgctcaaaatggtatgctaaactgaaagtggttgtcattacccttaatttctgcaaggaataaacaagtatgtcctggtggcacattgctatgaataaagcagactatttcagggc

SEQ ID NO: 187559 - DNA, 138 bp, Homo sapiens
tattagtctgcaaaacatgagaataaaaggactaattaaaaaaatttaaacccttcgacttttatttcactctgttccttatgaaatagttgttttctcagctacatcgagacactcaacatagtaatctgcttagtt

SEQ ID NO: 187560 - DNA, 332 bp, Homo sapiens
cctttggcaacaattcattgaaacaaacattgattgaatattgtttacacacccactgatatcctagatgcgaggctaacatcaatgaccaaagaaagatttctgtcccccaccctccatggagcttatattctagcaataaaaacaaagaaaaaagtaaacatactataggtaaattacataatatttttgaaagtgattaagtactaggggctaacagaatgggataaggagaatctgggaatccaaagagaggagtgggggttcatgatattaaatagaaatgacactggggagaggcatgaaagagctgtgggtgccagccaggagga

SEQ ID NO: 187561 - DNA, 383 bp, Homo sapiens
cactctgtgtaatttccttaaatataaagcagaattcaaaatagggcttaccacatagggtgtgtgtgaagatgaaatgagttaatgtccacaaggcacttagaacagtgtctggtgcatagtaaatctcaacaaatgttagctattagctgttattatcacatagctactaaatgttaggacttgtacccgaatctagaccttctgtctcctagtccagaacacttcctagtaccatgtgcaatttaccttttagtaaatcattgattggatttccgcctcacattgaccttgttattcttgaagggatctttttctactttgtttactttgactttaaatttttcaagatcaaaagggaaatatgttcgaaagattcttcc

SEQ ID NO: 187562 - DNA, 205 bp, Homo sapiens
tagtcactagggaaatacaaatcaaaaccacgacgggataacatttcacactcactaggatagctagaataaaaaagacagtgacaagtgttggtgaggacatgcaggaagtggcacccatgtgcactgccagagggaatggacagtggtgcagccactttgggaaacagtctggcacatcttcagaaggttaaatccaaaggta

SEQ ID NO: 187563 - DNA, 103 bp, Homo sapiens
cacgttagcgttgaatatcaaaatagtacgttttgcttattaatgtctgtgggcttttttaggttaatttaaaactcttctgattaatacctttgctcaaata

SEQ ID NO: 187564 - DNA, 294 bp, Homo sapiens
gagtagcagttgtttgagaaaagataaaatacattcctgaactacactgtatgatgttagaaggtgtctttgtagcaggtctacagaaaagaatgtttgagaccttgaagaaaagtccttcagctgcccataaaaagtataaatggtagaaacataaaataaaataagtattaactgaagggaaattataaagaaaagtaatcatagttttctatatggctaaactgcattttatggtcatgatgagtaaatattgatctacgtggttggaaaattataactatattaaaagaa

SEQ ID NO: 187565 - DNA, 221 bp, Homo sapiens
agaagataagaaagaaagaaaataaatagaaaactaaataaaatggaagaagtaagtcaaatatgatggtaactacaataaatgtaagctgattaaatgtgtctattaaaaattggagaatatcagattagaatttttaaagtattcagttataagctattttcaaaagacccacttaggccaaaccacacaaataaagagatgacaaaagacataccaca

SEQ ID NO: 187566 - DNA, 558 bp, Homo sapiens
ggagaagaacaggcaaaagagctgaaaacgtagaagaatgagagtctgataaattgggggaagagtgagcagctgtggatttctcaagcaaaggtacagggtatgggggttaaggctatcaagtaatattactgttatgagtctgcaatgatggaaattccaagataacagttctatgatcagaaaagatggttatgaattgtcaattcactggatatcagattatccatcagttacctcagccctggaaaattaaatgacctagtaggacggtatctatcagacaggaaaaaggaatctacgtagtccttctaagagacatatgtgcttcgaaactggaagacgactactgccatgcttctggcttttgaaacaaagcagatataaaacacacaggcttgaggaggaataaaggcatcaggtctgccacttggccacttgaaagagaaggcttagatccactgctagaaacagaaaaagcagctgttagggttatctatggctttataacaaattactgctttattatatttcatgattgtatgggccagaaatatc

SEQ ID NO: 187567 - DNA, 346 bp, Homo sapiens
aaacaaaacaaaagttcattctggaacagacaaaactctagacttcagtacagaggatcacatcatgcttggagtgaatgagattccatacagaaaagtcctgatcagaaactatggatttgaaagtttctgaaatggctttaacactgactctccctcttgggactaaggacctgttatcaataatcaggcttttacaacagatccttcttgtgactagctgggaactagagatgattttttttttacaacaacttatactgactttatgaggagtatgaaatgactaaaatatctgttagtagacataaatatctcttgtaaaaatttcattcaccgaagtaaa

SEQ ID NO: 187568 - DNA, 248 bp, Homo sapiens
cactccccctcctgttcaatttgatccctatcattcttaggatgttcttctgaggcccattaagcaaaagcttatcctcagcatttaacactggaaattagagttagatgaagaagaatcaaaactatttcaggtaaatgaacattttgctacaccactactctgaattttctggaaacaaaatcacattaaatggcaagtcaccatttaatcaaatgatctgaaataaagctttccagaaacatcaa

SEQ ID NO: 187569 - DNA, 196 bp, Homo sapiens
gaacaaaaaaacgttttcaatggtctaggcacttcctttttcttccaaagaaatggtaataacaggacactagaagtacctttctgtgtaaagcaaacatcttgtcagttttccttactttgtacttttcagtctctgctgtttaccatttttgtccaggatcagagacctccagtaaaataaaaggaatttctgt

SEQ ID NO: 187570 - DNA, 548 bp, Homo sapiens
tttgctcggatactacagtcctgaagcaatcctgttactatttattttctttctttctctctctctcttccttccttccttctttctcttttctttgtttctctttgtttctgtctctctcgctctctccctctctttctccctttctttcgtttctttcttcctttcttcttctttttttttgtttttttgcgacagagtctcactctgtcacccaggctggtgtgcagcagtgtgagctcaagcaatgctcctgcctcaacctccccagtagctgagactacaggtatgtgccaccatgcccggctaacttgttactattaatgaggcctcacagataccttgatctcatggaggaactgccttgggaagtagatattaatattccagccactggaaaagtacatcatattccccaaagtaacttaatacactggcacctgctttatacatcggtctcatggtcagcatgaatcacaactcctaaactcacacagttctgaagactgatggaaatgaagattctggtttgtttttgtctttgtttt

SEQ ID NO: 187571 - DNA, 525 bp, Homo sapiens
agaaaatgaacagttttaaatctataaaacggaattcattacatttaacagattaaagaagaaaagacacaagatattctcaacaaatgcagaaaagcatgtgacaactgaaaagacttccctaacttaatcaaaggtatctacaaaaattcacagcaaatgttattctcagctgagaaatattctctttaaaattgagaacaagaactctatgcccactataatcgcttctaatgaacaaccctaatcacttccattgaacgtaagtataaagtatgccagcacatttaagaccaaaaaaatgaataaattaaaagcaaaaataactagaagaactaaaactgtcactatttgcaaatgatataattatccacacagaaaacacaaaggaatttcagaaaaaatattagaagtagtaagtttatcaagtggatgactaaagggtcaatatttttaaaaattcattaaatttctatttaacaataagttaaaatatttactaacaataaataagttaagatagaa

SEQ ID NO: 187572 - DNA, 489 bp, Homo sapiens
acatattttgcctatcttataggtgacatttataaacaaaggatttaaaaatatcatagctagataaatattccaaaatattatttcaactgagtgcttaggtactcatactggaaacagactgtgcccaattccaggtttaccacttactagctttatgactttggacaaggtacttaacttctctctactttgatttcctcatctgaaaaaggaagttgataacaattataaaaatatctaccttggctgggtgtggtggctcatgccagtaatcccagcaatttgggaggccaagttgggaggtttgtttgagcccaggagtttgagaccagtctggacaacatagcaagaccctgtctctagaaaaaaataaaaagttagcacaagctacttgtgaggctgaagtggtaggactgcttgaacccagatcaatgtcacagtgagctgtgtgtgtgccactgcactccagcctgggcaacagagcga

SEQ ID NO: 187573 - DNA, 725 bp, Homo sapiens
tatacggtgcgggttagcccagagccaggccagttgtaagtggtccatagatgtcagctgtgactgttctctcgctctgaatgtagacagagcctggtgcataaaagatgcccagtgaacatttattgaattttccttgatgggtctatggcttattaatcttagtgaactaattaaagagacttatctatctctcccatatgttggagagggacaaaccataaattagagaggaagcttccaagttctaatggagccccgcccttccatgcatggcacgaagaggataagaaaggcagtgtccctgtctgctaggcctgcccgattaggtggtaagcaaggcaaggacatatgcgattggccgttgtgtggcaacacggggccaattttgagataaggagcctagaccctgagtccttaagtcagggtcccagtgtagcattaagtggttgagagccccaggtcagaggtcagacgacccaagttcaagccccagatccacttatcaactatgccaccttgggcatgtgatttcacctctcctgcctgcctcgatttcctcatatgcaaaacagaaatagtgatggtctctatttcctaaggggatgggatgattcaacaagttaatccacgtaaagccctttagcactgtcagacacagaataaaagctcaatgggctaggcacggtggctcgcgcctgtaatcccagcactttaggaggcag

SEQ ID NO: 187574 - DNA, 187 bp, Homo sapiens
cctgaaaaagccagtctaaattctcctttataagaaatctcaaaatttttattgtaaaattaggataataactgcttactgcaggttgagtgagaggtagaaggcaacagaacactaaggtgagaattaattgccaaatatctgagacagtgagaaggctaccctggtatcagtgaaagaagaaggg

SEQ ID NO: 187575 - DNA, 379 bp, Homo sapiens
gaccatggccactgagaacttcccttagctcagccttcaagttcccttgtagtttcagttatcattacatcaaatgctgcaacaaacaaaaacaatcacatcttgaactttcctggtttcttatcatcattcatactcttcctttggcttggaatttattgcacagtcaaaatcatacatatctcttaaaagctgaggccttaaagccactttttccatggagcttctctaagtacttccagaagtagaaagcattttcatgtactttagaggtaggtagttcccttagtctccatctaacttgtgttataaatgtacagtgaatctctactaaagtgtaagtgtatgtgtctaatgaactaatagggcatttagcttt

SEQ ID NO: 187576 - DNA, 292 bp, Homo sapiens
aatgtcggtgtgtcttatgtcggtgtgtctaatgtcggtgtgtctaatgtcggtgtgtctaatgtcggttgtctcaaggtccttggagtcttcccggggcatgcacggtttgagagttagctaaggatttaaggagagatcatatgcagacaggaagcctcctccatttctgacaccttcatttctaggatctgctgctttaattttcagttcttctagcggcctttaattccatcctaacacctcaagccagtaagattgcaactttctcttgagttctagccacgcctta

SEQ ID NO: 187577 - DNA, 337 bp, Homo sapiens
agctcgacccaaatataatacttacaaataatcactggaaatcacacactcttccaaggggctgtctgttatcaccaaaacaagcagcattctgcacagcggggaccacaagagtttgggaacatgccctctctgtgcagtgttttcctgataacatacagcccttggaaggagtgtgtgacttccagtgattatttgtaagtattatttttctcttggggggcgctcttgatatacaactaacaattaataaggaagtcgaaacaaataaacttctttctttaaaggagccgaaagtcacaccaaaaataatgcataagcccaacttggacttctg

SEQ ID NO: 187578 - DNA, 687 bp, Homo sapiens
gtgaccaggggtccagggggcctgtatcaagttctgctcttgctactcactcctttggctcctagatctcagcttcttcttctgtcaattggggaaaaagactggacctatctgacttccaagatcttcataatgggaaatgagaatagatacgagaggtgctctttaaaaatggaaaatgtattaattataagacattgttctcactgaattggaaaagggatttttcttggagatgatggtgcttctgagtttaaacaattcagttttcaattttatctaaaagtcaggttatgggactggtgagaagagtatacagtggtcattgaaacgtggccccaaaagccacccttcatttcgatcacacctttctgacatggggtagagcccacgtggtaactacaggagcaacaatcagtatttatgcaacttataaatggttgatgcatcgacagcttcaagtttttgttttatttaagaacttgcaagttatgaactgatttcaagctaatacagaagtgttcagatgatagcataatgaatagccacgggcctacaccagtgtggtcagatctcaacattttgccttatttgatttacatttttgattatttgacttacatgtaaaagaatacataatttctgatgccactgcagcatcctgtataccccacctcaattccattc

SEQ ID NO: 187579 - DNA, 854 bp, Homo sapiens
  misc_feature (743)..(743): n is a, c, g, or t
gggcgttaggaatgactgcgtctgctggcccaacctgcgtatgcagatacacacgttgatgttttcataggcaagggttaaattcaacaaatgcccacagacgctgtgaaacttaaaatgggggaaatgaccaccaggagaattggttttatgaatgcagaacttatctcaagaataatgaactcgtggatggttgtcagtgtaccgtttttgtagtttgatacatctgccgtgacatcccaaggatacatctcaaggaatcaaaaagcttatttcgctcttgcgtgctagaccttccgatttaacaccgtttcttcattcacagatttatttgctctcgtgatccttcatcaatattcattgattttctactccatccgaggcactgtgtcaggcacagcaatgaaaataccaggtccattcatgcagtccttgtccacgtggagcttagattctagtggaggatacagataacaaccacaaaatgcacagttcacaatgtcttcacatttgtggagggaatgtagggtgctgtgaggttgttgaactggatgggagcatctgataaagatggaaggaccttggttcttaaagatctagtagctgatatttggcagtcctaatacattacagcctaccaaattattttagacctttcttgaggacctattcttataaataggcttatgtggcttgggtgttcctatatgcaaagggccgatcaaaatacactcttctcattncacaacacccaggcggcgcacggccaactctacagaagaaacccactgttgacaccataagcatccactcagtcttatagaacctgtgccagtgaatacgttaagcaaaac

SEQ ID NO: 187580 - DNA, 550 bp, Homo sapiens
cccatagagagccttggcactctgaaagcacccagaaacaaaggtaattgactgcactcaatataaactatggtcaaaccccaagagaaataaggaatatagaaacaaaaaaccccatccaattgacagcaacttcacaaagataaaggaacatcagccctctcagatgagagataatgaacgcaagaattctggcaatggcaattcaaaatgtaagagtgtctccttacctccaagctgtcacactaggtccccagcaatggttcctaaccagactgaaatggctgaaatgatagacagaattaagattcaggagaaagttgaaacacaatccatgtaagccactaaaatgatacaggagttgaaagacagcgtagccatcttaagaaaaaaccagttgaactctggtattgaaaatttcattgcaaggatttcataatagaggtggaatcagtaacaacagaatagagcaagctgagaaaagaatcttggagcttgcagaccagtccttcaaatcaacccaatcagaccaaaaaattaaaataaaaat

SEQ ID NO: 187581 - DNA, 453 bp, Homo sapiens
aattaatatatgccaagtgctgggcatacacatctggcacttcataagtactcactaaagggtagctaatgttattgtaccttgtaatcatattgtctcctttaacttcccacctttcttacactctcttcctcagttttctcatctttacaatgagaataatgatacctacctcattgagtttatgtgggatgaaaagtatcaagatcttattgtatagctcttagaatagagcctgacacagaatactcaataagtgttagcattattattactgtttatatctcagattttctctctttctctccaaatttacacatcttttcttcatgtgaaggaaaacttttttttttttttaagagacacggtctttctctgttgcccaggctggagcgcagtagcacgatcatagctcactgtagcctcaaactcctgggctcaagctatcctccc

SEQ ID NO: 187582 - DNA, 914 bp, Homo sapiens
ttgtgtatgcgacaccaaatgaataatctccaaaagtaaaaattgatataaattggattttcaaagaccaattaaagtatagtattggaaaggtaccagtaagataattaaaagacaaatcacagactgtgagaaaatatttgccaatcatacatctaataagagatcttgtattcagaatatataaacgcatttcaagacagaagaaaataacccgatgttttacatagacaatgactgagataggcacttcaccaaagaagttatgaagctgggtgtggtggtgtggtttcaattactcaggaggctgaggcaggaggattgcttgagcccaggggtttaaggctgcagcgagctataatcatgccactgcattctaacctgggtggcagagtgagagtatctctaaaaactaaaaaaaaaaaaagacatgaagatggtaaatgcaaatgaaaaggtgcttgtaatcatcgtcacttagggaaatgcaggctaaaccacatggagatactcctgaatatttattaaaatagctaaaatttaaaagcctgaccataccaactgttggctatgatgtggagcaactggaattttcatactctgggaatataaaatggtcaaacattttgggaaatgtttcgacagtttcttcaaccattgagcatatacctaccattcacactaggcattctactccttaaatatgtatctacaagaaataaaagcacatatccacacaaagacttgtacatgaatggtcatagcagatatatttgtaatagcccaaatgtggaaataatccagtatctgtcagcagatgaatggataaacaaattgtggtatatacagtgtaatgccacccagctatatgaaaggaataaactatagtatgtaaacaacatgaatgaatctca

SEQ ID NO: 187583 - DNA, 575 bp, Homo sapiens
acaaaattgctcctacctggtttggcagctccacgaccctgaaactagaacaagacctctcctccctgggtcgccagctttctgaccctcgaactacagcaatgttgcttctgcctgggtctgcgctccacgaccctcaaactagaacagcaacaccggttcctctctggatctccagctaagtgactctcagacttcaaaggcagcaccagctcctccgtggatctccagatccacaacattcaaaccaacatggctcctccctgggtcttctgtttcacgatccttaaattagaacagcagcaccatcttctccctgggtctccagctccacgaaactcaagctagaatagcagcaccggctcctctgggatcttcagctccacgaccctaagacatcagtggcagcaccggctcctcccctggactccagctccaggaccctcaaacttgaacagaaacaccagctcctccccaggcctccagctccttgaccctcataaacaatcccttctcatgaaatgtagcagtcaggaaaactgtagaggaagtaaataaataaatgttttcctttc

SEQ ID NO: 187584 - DNA, 572 bp, Homo sapiens
cctcaggcaatccacctgcgtcgtcctcccaaagtgctgggattacaggcgtgagccaccatgcctggctccaacatgtttctaacaggactctcataaaagaatggagacaaaacaggagaaaaaaattgcaaaaataatagatgaaaatttatctgtttttttcaaactgaaagggtcttctgagtggcaggcacaaggaattaaaaaaaaaaacaaaacaaaacaaaactcaacatctaaccactaaggatatacaaaagaccacaaaagtttctagagagaaataactggttacctacaaaggtagaagaatcaagttggtatcaagcatttcatcaataatcctggaagacagaaaagaacacaccaaaaccttctaaattctgaaggaagttattttgaaccaagaattgcataagtaggcaaggggttaactaagtatgagggataataaaggcatctttacatataaataactcagaaaatttactatctacagaacctcaatgaaaaaagtatcagaagctataaggacaacactagcacatcaacaagttattcaccacaat

SEQ ID NO: 187585 - DNA, 345 bp, Homo sapiens
ccatacccctgacagtggcaagagaggaaacaataagaaagaaaagagaagagaaaaaagaaaagaaggaaggaagacaaatggtcaatgcccttatggaacttaaatgcatatagtggaatagtaacagaagatttattaactgaccatctatctcatacaaagtgtaaggtattttatatgtaaatgaataaagaggttgaaataatgtctccttggtgaagttaaacagggacagtttcaagtaattggtgagttctaagaaaatgttaaaggaaggaaaggctgggaaacaaagcactgggaggggcccaagggcatttcaggcagagtgaacccataagt

SEQ ID NO: 187586 - DNA, 621 bp, Homo sapiens
ctccagcccccggaaaacgagctcctccgggatgcaggcgtcttatccaaaccctcctgtgattgtgtcggccaaaggcattgggagacagagcagtagaaaagctgagacagagaaaagaatgagaaagacccataacagagggcaaagtagagggtgggtgatggatttgtcaagagacagcaaaagtgaaaagaaaaaaaaagaaagcaggaggagaaaagtaactggagaaacgtagagaaacctagatgtacagagagatgaaggacagcaaggtagggagaggggcagcaaagagggaatctcatcagagtgagggagaggaggagggatttggagccagggcagacagagcagagtggtgctggtggcaaggagaacagagggagaaccacagcagggaggacacctggggatctgtggttccacatattggggacagggggtataacagggaagacggaatttaacagggagagcagaggatgcacagagatgggagaagaggcggaaatatatcaagattgaggacgatagaacgattggggagaaggaacagcaagaagttaggtaagttgcgaggatggagcagaagaggtggaagagaaggaatagagg

SEQ ID NO: 187587 - DNA, 357 bp, Homo sapiens
attacagttcatgagctgaattctttccagtctgtttctgtaatgccaataaccttagaatggtgataagagttttcaaagtttgtagaaaagaggaaaggaaaaaaggaagaaaaacagaggaaaatatgcaacagagaccatatgcaatcttcagagcctataatatctactatctggtcctttacagaaaaatttgcctcttttgtgattttcagtgtataagtcttgtacagtatttactaatttatccttatgtgttttataagttttttgtatgctatcgtaaatggtatcttttacattttagttttcagtattcaccactggaaaatacagttgatttttatatattca

SEQ ID NO: 187588 - DNA, 415 bp, Homo sapiens
actcctaggctcaagtgatccgtctgcctcagcctcctaaagtggtgggattcaggcatgagccactgcgcttggtctgtaatttattttaatgcaaaatgccacatcctaacatttcaattttaattttattagatttttatatccttgatagatcccactgcatcatgaggctgatagtcactggtgtaaagatgcaagcagttggtgactggtcttaatctgtaaataaaccacctctttttgcgtgtgtgtgcatttcagaatatgacacttttaatgaatgtccattgagttggtaatagtacctccttattttcacgtgtagtagttatcaacactgtacaataaacaaaaaagttaactactaataaagtaccaaaagtggatatttcgggaaaagaaagtaatgaat

SEQ ID NO: 187589 - DNA, 587 bp, Homo sapiens
tctcagtcactttgtgtccccaagaacctaacacagtgcttagcatggggcaaccactcaaatgtcaactgaatgaaagacccactgacacaccctttcgtatacttttctcacttgttctttattcattgagcctatttatccttgaaatactgtggtgtaagttgaaagaccttgggtttaaattttacttctgccatttgtgtgattttgaacaaattatttaatatctgagttgcagattcctcatctgtaaatggcaatagtatttaatctgtgagtagtgtatgtaaaaggatcctagcttgatatttggtgggatctaggtgaacaacaaatgttcccctttttattgtattaatagtaaaatgtatataacattcagttgtggaggacacttgggttgtttccataccttggatattgtgaataatgctgctgtaaacatgggtgtacacatacctgtttgcatccttgttttcaattcttttggatatatacccagaactggaattgctgggtcatgtggtaattctatgtttagctttttgagggacttccaatcattctctgcttttgttttttag

SEQ ID NO: 187590 - DNA, 571 bp, Homo sapiens
acatttagactaccaagttcttcgggttcagctgtttatggtctttcttgtcacttatttaacagtttcagaccataaggagcgtatacttttctcacttgttctttattcattgagcctatttatccttgaaatactgtggtgtaagttgaaagaccttgggtttaaattttacttctgccatttgtgtgattttgaacaaattatttaatatctgagttgcagattcctcatctgtaaatggcaatagtatttaatctgtgagtagtgtatgtaaaaggatcctagcttgatatttggtgggatctaggtgaacaacaaatgttcccctttttattgtattaatagtaaaatgtatataacattcagttgtggaggacacttgggttgtttccataccttggatattgtgaataatgctgctgtaaacatgggtgtacacatacctgtttgcatccttgttttcaattcttttggatatatacccagaactggaattgctgggtcatgtggtaattctatgtttagctttttgagggacttccaatcattctctgcttttgttttttag

SEQ ID NO: 187591 - DNA, 237 bp, Homo sapiens
cttcacttgtacacatgcttgctgacaaagatcttaaatcttcataaaatttaagatggagtagagaattttaaaatatgtacaaagacaaaatgtcctaaaaatactttgttttaattggcgatagcatcaacactgcagaacatcaaaagcagaacgtttcaatctgaaaagtccacaccataaaaaagacgatgctacttcagtccagacttgttaaccagaaatatcttcctg

SEQ ID NO: 187592 - DNA, 600 bp, Homo sapiens
gtcatattatttattattggagcacctgaaggtttggtaaggcattatatcaaaatatgcctagaatgggttgcacatcagtttcatttttaatcattgatgctattgcattaatttgtctatttggtaaaccaggtttcctcaaatgaaatgtgacaggtaaattttgacgtgactaagatgcaaaggaaagctctggaacaggggcttctcctctggatggggaggtggaggaggaatgtggtatgtgggtctgtgtggacaggtttacacattaggatgatgcaggaggaggccacagaaaggggcttttgagtactctctaattcagaggtttgatggctctctgggtaacctacgtaaagttgaaccatcctgtggcttgtcccagcatggtgctacaattagaagaaatgccagatcaaagtcaaaaatccttgaaaaacaacttaaatcttcactgaagtctcttgaaaaatgtccaagaaagtttgcatttataacacaagtaacacatgttaagtcctctttcacaatctctgttagttgcactcaatgttctttttctcctcccaaacttcttagcactttctaaaaacc

SEQ ID NO: 187593 - DNA, 315 bp, Homo sapiens
caaatcttaagatttaaaggcagaaggaaaggaaccggtagagaaggatgattgataatgaaggcagagcagaagaaaattcataacagaataaaactctggatccagttattataaacacgtggtacctcattctcaccttcatagctctttcttcctgtttggaggtagccgaacataaatatgttcggtgtaaatttggggtttttttttacttaatcaaaaatatacctagaaacgttgataacttgcagttttgtaaagtgtttccaaatctatggccttctaacacctggagtctgaaggcagtctgga

SEQ ID NO: 187594 - DNA, 365 bp, Homo sapiens
gtacccggagtgcatgtcacggaattgatttggatttatgattggtattattttcctcatattacatattcacagttgccgcctcggcctcccaaagtgctgggattacagatgcgagccaccacacccagcccaatctgtcactttaacatgtcagcataattttacaatacatccctgaaaattaataaatgccatttaatttactactatacttactgctcgttagctgttaaagttgtatctgagcagtatgtctgctcgcagtgggaacatggtaccagcctgcttcattcccacctcagaacctttgtgatgactctttgctccacctggaataaccactccccagatatatccccagt

SEQ ID NO: 187595 - DNA, 360 bp, Homo sapiens
ggaggccgaggtgggtggatcacgaggtcaggactccctgtctctactaaaaatacaaaaattagccgggcatggtgctgcgcagctgtagtcctagctactccggaggctgagcaggagaatcgcttgaagccgggagacggaggttgtcataggccgagatcacgccactgtactccagcttgggcaacagagcaagacttcgttgcaaatcaaaaaaacaaaaacaacccccaaaccatctaccactgctttccttctgatatatttagcagtaaagttaaaaacagttaacaatgaacacatactacacagaagcaagcatagtcctaagcatctgataaagagaattctcattta

SEQ ID NO: 187596 - DNA, 403 bp, Homo sapiens
tgaagcctggatttgtcatgtttgaagtgccacgttttagttcttaaggactgaggagtgggagggggctgaggtgagaccccagcaacctgctggaattaagtaaggctcttcagtggtatttacacataagttctttggaagcatgtacttaaacttactaaatccatgatttggtatgcccggtaatggcccagatggcttctgagatacagcatgacctctcttccgtgtccccaccacactttttgctttcctcgtgtagcaccatcacattcattttgtgctatggatttcccaatccagggctgaggatgtgtccttgaggttccttgggttctcattagattacaaactcagacgttttggtttcgtgttaatgataattgaaaatgttttacaa

SEQ ID NO: 187597 - DNA, 380 bp, Homo sapiens
gtgggagtacatcaccttatttgatatttgacagtgtgaagaatgtgtaactattgggattattcccattttacagttgagaagatgaatcattggaaagtgagttgtgaggacagaattggaatatggaacttctatcttctgttaagaaagcaaaatttgacctctgccttgttaggatttttggttgggcctaagaattacattgacataagatacattaacaagagaaagcatacaaatttgtaaaagtttcatgtgacatgggagactttataaggaaataaggacctgaagaagtggcaaaatctaaatgcttttatactaggttgaacaaagggaggcatttgtggaaaagcaaccacattttgtagggaagc

SEQ ID NO: 187598 - DNA, 899 bp, Homo sapiens
cgcttgggtccccttccacactgtggaagctttgttcttttgctctttgcaataaatcttgctactgctcactctttgggtccatgctgcttttatgagctgtaacactcaccacgaaggcctgcagcttcactcctgaagccagcgagaccatgagcccgccgggaggaacgaacaactccagatgtgccgccttaagagctgtaacactcaccgcaaaggtctgcagcttcactcctgagccagcgagaccacgaacccaccagaaggaagaaactccgaacacatccaaacatcagaaggaacaaactccagacgcaccaccttaagagctgtaacactcaccgcaagggtccgcagtttcattcttgaagtcagtgagaccaagaacccaccaattccggacacattttggcgacccagatgggactttcgcctatcaccaagcggtgagaccatcacctatagctgagcggcgagaccatcacctatcaccaagcaaatcaaggccatcaagctacagatgggcttacaaatggaacccaaaatgagttcaactaacaacttctaccaagggcccctggaccgacccactggcacttcccctggcctagagttcccctctgaaggacactacaactgcaaggccccttcttcaccccatccagcaggaagtagctagagcggtcatcggccaaattcccaacagcagttggggtgtcctgtttagaggggggattgagaggtgacagcgtgctggcagtcctcaagccctcactcactcttggcacctcctctgccgggctcccactttggtggcacttgaggagcgcttcagcccaccgctgcactgtgggagcccctttctgggctggccaaggccagagccggctccctca

SEQ ID NO: 187599 - DNA, 1594 bp, Homo sapiens
cgcttgggtccccttccacactgtggaagctttgttcttttgctctttgcaataaatcttgctactgctcactctttgggtccatgctgcttttatgagctgtaacactcaccacgaaggcctgcagcttcactcctgaagccagcgagaccatgagcccgccgggaggaacgaacaactccagatgtgccgccttaagagctgtaacactcaccgcaaaggtctgcagcttcactcctgagccagcgagaccacgaacccaccagaaggaagaaactccgaacacatccaaacatcagaaggaacaaactccagacgcaccaccttaagagctgtaacactcaccgcaagggtccgcagtttcattcttgaagtcagtgagaccaagaacccaccaattccggacacattttggcgacccagatgggactttcgcctatcaccaagcggtgagaccatcacctatagctgagcggcgagaccatcacctatcaccaagcaatgggaaacactcaggcatcaacaggctcacccttgaaatgcatcctaagccattgggaccaatttgatccacaaaccttgaaaaagaggcggctcatttttttctgcactatggcttgggcccaatattctctctctgatgaggaaaaatggccacctgagggaagtacaaattacaatactatcctgcagcttgaccttttctgtaagagggaaggcaaatggagtgaaataccttatgtccaagctttcttttcattgaagaatcaaggccatcaagctacagatgggcttacaaatggaacctttacaatccctgagctagacataaatacaccaatcggcactctgtatctagctcaaggtttgtaaacacaccagtcagcaccctgtgtctagctcagggtttgtgagtgcaccaattgacactctgtatctagctgctctggtggggccgtgaagaacctttatgtctagctcagggattgtaaatacaccaatcggcactctgtatctagctcaaggtttgtaaacacaccaatcagcaccctgtgtctagctcagggtttgtgagtgcaccaatggacactctgtatctatctgctctggtggggccttggagaacctttgtgtggatactctgtatctaatctgatggggacgtggagaacctttgtatccagctcagggattgtaaacgcaccaatcagcgccctgtcaaaacagaccactgggctgtaccaatcagccggacgtgggtggggccagataagagaatgaaaccagggcttgggacctgcagcccgccatgcctgagcctcccacaccccctccatgggctcctgtgcggcccgagcctcctcgacgagcgccaccccctgctccacggcacccagtcccatcagccctcactcactcttggcacctcctctgcccgggctcccactttggtggcacttgaggagcgcttcagcccaccgctgcactgtgggagcccctttctgggctggccaaggccagagccggctccctcagcttccacactgtggaagctttgttcttttgctctttgcaataaatcttgctactgctc

SEQ ID NO: 187600 - DNA, 866 bp, Homo sapiens
aaagggttttttttaacttaaagtttccagaacagtcctaacaaaaaaattttctagtgatggatacagtggaggcatataagtgactttttaaacttattaggcatagcaaataagtctttatgtacttggtataaatttgacttttataactgttcacctttcctgatgtattttaacagacatatcctgttgcaatgatccttaataaaatgaaagagatcttagcatttggtaagaccaatgaaactgcttttgtgcccagatcacagaaaagaagctccctgggtatccttccttagaatttacttttatgtctgaaatcaggatgcttcctttttttggttgtcttctttgtttttgttttaaatgtgtaggtccccagaccacattctgttttagggcttctgtaaatactcttaggaaagtaagtcatgaaattctgcctcctcgaatttcataaaggatttgtttgccatgtgctctgtcctgatttttgcaacatatcaaataagccagactgttgaatgacaatctggttttaagtgtattacatacgcatgtataaatatccttgttcggggtcaactctacagtgactgtcagtagtgttattggttcaacttgaccttcagaggtttccctgcttcacgaccaaatggatttggcatctgacaggaccgcagtgtcagtaaaagcttcatcccaagaggagcagggttccaagaaggaaacttcctggagggcaaatctccataatttgagataaggaagaatacagtagcaatttttgaagatcatgtggtcagttctctgaatctcttggaactatctttgatattttagtttcttggactgaatgtcac

SEQ ID NO: 187601 - DNA, 357 bp, Homo sapiens
catgcctggccccctttgctgtttctaaacacccagactcattcccactttagaatttgttgtttcttctgcttgggatgttttgtgcccggtgcctcgtggtcacttaagtcatgctcaagtgttacctcctcaggcatcccttccttggccaccccaactaaagacaccttctatggcagtgtcacactaccctgttttatttttttcatagccctcttcaccagttgaaaattatctttcatttttttacttgcttattgtccatttctccctgcccagaatttaacctccatgaaagcacggaaactttctgtctcattcactgtcacacccacaacacttaggacagggcct

SEQ ID NO: 187602 - DNA, 497 bp, Homo sapiens
ttgcctaattgccctagctagaaggtcctgtatgatgttgaacagaaatagttaagagtggagatccttgacttgttcctgatcttacagaaaaagcatctagtctttcaccattcagtatgttagctgtgggtttttcatccatgtcctttgggttgaagaagtttttctcctagttgtttcagtgcttttattatgaaaaggtattggattttgccaaatgctttttctgtgtctattgagatgatcatatgtgtgcaattttgcaacttttactgatatagtgaattacattaattgatttgcagatgttaagtcaaacttacattcctaggagaaattggtgattatatattttaaagtctaatttattttttctttttccttttagatgaaaggaaaatttgggaaaattttattttttttattgtgataatatatacataacacaaaatttaccatcccaaccatttttaggtttataaagcattaagtgt

SEQ ID NO: 187603 - DNA, 524 bp, Homo sapiens
acatatatagaaatcttaatatttaatttccgggaggctgaggcaggagaatcgcttgaacctgcgaggcagaggttgcagtgagccgagatcacgccactgcactccagcctggcaacaaagcaagactccatctcaaaaacaaacaaacaacaacaacaaaaaaaattaatatttaattccaaaggattcgcagcatcctgaggtccatctgtgaacactcaggggtctgtggacctcagagtgagaatgatctggaagtaggagggcgataactggcagatacactggttgaggggctaaagcaactgcccacgccagtgacggcaacagcctcaacttgggtaaaggctatgaagacggggcacacagaaagtgtctgggacagtcttcaggaattagtgatcaatataagtaataaaattatgaaaatcgatatgctgtctgacttataacaggcatttaataaatgtttggtatgtgactgctggaaagacatccatctcctattccaagtgacttct

SEQ ID NO: 187604 - DNA, 608 bp, Homo sapiens
atatactagggatggtgtgggaaagggagatattatctcggggggagatattagaatgctgtaagggcaagtgggatttgagcccaaatttgaaagtggggcaaggttagaacagcaggttatatagcagaagagaagttcaaaacagaaggaagaagttgaaggtccagaggtgggaaaggacacaggatattctgggaatagctattaaacaatataacttgtgtgagtttagtgtgtatgtgttgagagtcaggagaggatatagtgaaagcataagggtaaacatagaccaaattatcgcaagacctgcaaaatcttggtggcaaaaggtttggcagttgattcgtgtgcaagagcaaactaaaaaatattttggagcaaggagcagggggcagatctctgttggcaggcaggatgactgtgtcagtttgaagatggactaggtgcattttctacagtttagggtttttctgagtagctttacaaagtcttctgggttgtgtttctatggcatttaaaatttcgttcctgtgtgccatggtctatacaatgacatttaaaaaataccttttaaactatcaagaacatttagttcctgaaaacag

SEQ ID NO: 187605 - DNA, 144 bp, Homo sapiens
accctcaccgctacaaaatattcaagaattagctaggtgtagtgccatgcacccatagttccagctacacaggaggctaaagagggaggattgcttgggcctgggagattgaggtaccactgcattccagcctgggcaacacag

SEQ ID NO: 187606 - DNA, 134 bp, Homo sapiens
ggcaggccaccccgtggggttcttgtgctcagtggcagcacacacccctccatccacctacaccttccttcgtacagagttcgtatcaagtttatccctcttgataaacacgctccctgcctcgagcactactg

SEQ ID NO: 187607 - DNA, 222 bp, Homo sapiens
gtttcttctgggcattctaccactctagtctagccccggtcccagaattagggggacgctgacccccaacaggcatttttcccctctactccttagaagtcctctcctaaatacatctgtactttttgcatcaggagtttcaaatacttgggctcaccacagacagatagaaggtagtcaaaagcagatacttcaagcactatccatcacaattgccttagg

SEQ ID NO: 187608 - DNA, 239 bp, Homo sapiens
actgtcatgcattgctgatgggagtttaaaatggtacaaatactttggagaactgtctgtcatttcttgcaaagttaaacgtatatctaccccataacctagcaattccccttccaggtatccatccaaatgaaataaaaacatacgcctgtgtaaacacttacagatgaatcttcatagcagtcaaattcataatagcaaaaaaatgaaataatcaaatgtttatcaatgggagaatg

SEQ ID NO: 187609 - DNA, 400 bp, Homo sapiens
tagccaaacttatttactcatcttttcctccctggtcctgcccttcttttactgtccctgttcaactatccttcctccaattctgtctcacttccttttgctgtaaatcatctctcgttctgcacagcacgttactgcccctctcccaaggcacctatgtccctttcaatattctactacaggcacgtgtgggcctgttacacctgctctgttagaaggagagttgtgtgcacagagatagtatgtttcctatccacgtttgtatctcatctccctctgtcagtcatagggccatacattaaaagaggtttactaaacattccttgaataaattagtagtcaacttttaaagattttgaattttatgtctgtaattttcttaatattttctcataaattt

SEQ ID NO: 187610 - DNA, 260 bp, Homo sapiens
catcatcatgatttactggattaaaagagcacaaatttattgtttcaaagttctgtaggtcaaaagtcaggaatggatctcactgggctaaaatcaaggtgttgggtcatctggcttgattcctttctgagggctcttgagtttgtttccttgctcatgcagatattggaagaattcagttccatgcagttaaaggactgaggtatgtttcctcactggttgtcaactgggagctaccctttactcttagaagctccttt

SEQ ID NO: 187611 - DNA, 233 bp, Homo sapiens
tggtcaaaagttctttctctggaattcatgataaatgaaaagaatcttggcagtttctatgtcattctgcatctcacaagcaacgtgcaattcttcatgtcactacaacttggttattcactgaaacaactgatcttattacaaaacaagttaaagaaacaaacaaagcctccttcagttcctgccttgattcattattagaattcacctttcctttcacctcacccacaatc

SEQ ID NO: 187612 - DNA, 362 bp, Homo sapiens
aggttgtagtgagctgagattgtgccactgccctccagcctgggtgacgagagtgagaccccgtctaaaaaaaaggtccctgcttaccccactgccttggggaaccccctctgtcccccacacagtctccgtatatgcctgagtctgtgtttggtcttcctcgtctctccacagcaggtctgccccgtgggttgttggccgcggtcggatgctcagccgcttgagaatgctgtctcctgcctgggtgcgtctggctcccctctgcgcgtcctgtttcgtgttattttttagagtttgtgcatttctctgtgtactttggtacacaaatgcttctttgaagttaatacgtggcaatcaagctt

SEQ ID NO: 187613 - DNA, 363 bp, Homo sapiens
tgctgtgaaataataaacatcaattgttttaagccactgtgttttggggtaatttactatataccaacacaaaattgatgtaaacgcccatgtaactcatgttatataggctttaaaagaaaagaagccgtttaataagagctatgcttggtaacaaaagacattttcataaaacacacacagctccccactcttacatgctcaacagaatacagcattgcaagctctttgcaagaaagacgaatgtgtcgcttcctttccacccgcatcgcaccatggaggaggcagtgaatgaacggacatttaatgctggcaggaagctttaatcaggactgtgctttcctttgcccgcactggagaatc

SEQ ID NO: 187614 - DNA, 579 bp, Homo sapiens
tctagagtgtaaaaggacttgcagcctgcacttctaccttaaaacatttttggaagtttaaaaaatgatattaataactttctctgctatcactgatatggttataatgcttgctatggatgtttccatgttacctttctaaatattttttaatcttttacctttctttgagtaacatagctctttaataatttattaagcttgtttttttattacctttgaccaaatgtgttattttttccattcaaacacatttcttcacaggttatatttttctggttgtttcaaacacttaaaggtagaaagatgtattttttaagagatgtggaaatttgaaagataagggtgaattttcaaagtaaaatcagtatgttttttaagatacttaagaattaaagttttttgttgacatttggatataagtatgttgagggtagataatttagaactaataaacaaatattcctcagtttatttaggaaagggaaacagatgggaatattggactttattgaggtaagtttggcagtctttgttatttttagaatagttatagttatgagctaaacagtaattgtg

SEQ ID NO: 187615 - DNA, 576 bp, Homo sapiens
gccaaaaatattttgttgcttcctgcacttctaccttaaaacatttttggaagtttaaaaaatgatattaataactttctctgctatcactgatatggttataatgcttgctatggatgtttccatgttacctttctaaatattttttaatcttttacctttctttgagtaacatagctctttaataatttattaagcttgtttttttattacctttgaccaaatgtgttattttttccattcaaacacatttcttcacaggttatatttttctggttgtttcaaacacttaaaggtagaaagatgtattttttaagagatgtggaaatttgaaagataagggtgaattttcaaagtaaaatcagtatgttttttaagatacttaagaattaaagttttttgttgacatttggatataagtatgttgagggtagataatttagaactaataaacaaatattcctcagtttatttaggaaagggaaacagatgggaatattggactttattgaggtaagtttggcagtctttgttatttttagaatagttatagttatgagctaaacagtaattgtg

SEQ ID NO: 187616 - DNA, 480 bp, Homo sapiens
aagagccctgtggttccatacaccaatacttggtgctgcccgacttcatatttttggcagaatggttgctggttaatgatgtcaccttgtgagtttaagttgcgcatccctcattactaatgagtttggacatctttttatttgtctattggtcattcaccttttctcttttgtgaagtgtatgtgaaattccttcttttttattggatggtcttttccttaataatatttctttatgtattttggttacaagtctttttcttagttatatgtgttgcagaaatcttctcccaagctgtgattttgttttgctttctcttcatgatgtcttttgataaacagaagttcttaattttaaagtaatagaaagtagaagtcgtttcctttatggacagtactttctatgtctagttgaagaaacctttcccttctccaagatcatgaaggtagtctcctaaatcatcttctaaaagctctctt

SEQ ID NO: 187617 - DNA, 489 bp, Homo sapiens
ctgttttctagagctaactcttgtatgcctgggataaacccagtttgcaagtattgtattctgtagcacttgctagatttgattgctgggttttgttcaggatttttgcatccatgtttaatgacactggcttgtatttttccttcttgtattgctctagtatgacttcagtagcaagtctgtgcaagcctcataaaatacgttgaggagtcatcccactttttctctcctctagaataatttctgaaagattggaattaaacgttcattgaatgtttagcagaactcacatgtaaagccttttggacatgtggttttctttatgagaagatattcaacaactgattgaatttttaacaactatagtattattccagttcttttctactctgttggtaaattatacttttctaggaatttatccatttcttatgacttaaaaataattgtcatgaagttttttatgacatcatcttgctcttaaatttc

SEQ ID NO: 187618 - DNA, 286 bp, Homo sapiens
tttgttcttacaccaaatgctttcaccaagccaacacagtccatgcttggatgaagataaaattacaactgtctatctcacacaagcgattaattgcacaagctgccctgtgcccctgtgcctttagcaagtcacttgtacataaataataccagatacgaaaggcctgtggaaatgaaggcagaagttgaaaccatctcaaacataattaactctaaattagctgagtgaactcttagaataacagtccatttataaatcacactagtttttctgtcctccagtt

SEQ ID NO: 187619 - DNA, 156 bp, Homo sapiens
gcctgattatttaatagtcttctaactgcttctgccctgctcctcttcagtctattctcaacataacagccagagtaattctgttgacaactaactcagatgacatctctcctctactcggaactcttcaaaggctccccacctcactcagagtca

SEQ ID NO: 187620 - DNA, 616 bp, Homo sapiens
ctgggcaacacagcgagattccgtcttcaaaaaaacaaaaccaaacaaaacaaaatccacatgctcatggtttgccttctcttagggagccaaatactacctaagttttgtcagctggcaggctctgctaatagaatgtcacttaaaacaccactttgaatctaagggcaatgcaatgcattattctgaactattactaaattagttattcctcaagcagcaatttgcctatttttgctcttacctaatttttaggaggaatgatagacaaacattaagcattggtttctctctagatcccgtcagtttcctcaaacacagtagtctcctctgttagaccctggtgtgctgctgggaattactgggactcactggccagctgctgtctcttctctgcggacctctttgcttttagggagcaggaaactaattcctctaagtgttatacacttggagaccctttagcatgaacaacggtgaagaaacagaagctctcgttgctttcctgcatcagacaaaaggctgtggccacttaaataccacatttttacttcctttttagttcagttgagggagcaggtgcaaccctgcagcaagataaagctgacccttgcta

SEQ ID NO: 187621 - DNA, 427 bp, Homo sapiens
tgaagccaggcatttgagaccagtatgggtaacaaagtgagaccttgtctctattttttaaaataataaacaagtaaataatgttaaaagaaaaatcagtcagtatagttggtcatattaataaaagaaaaatgatcatttcaataaattcaggaaatgtgtttgacaaaattcaacactcattcacgatcaaagaaagtaaaaaaggagaaacttttaagcaaacaaggaataaaagattactctcccaatctgataaaaggcatctgttaaaaatctatagctaacatcacacttaatgcattccccctaatattggggacaaggatagggatcaagtgcaaggaatcacactctcatcactacattcaacattatactgaagttcatagctagtctgataaggcaagaaaaagaaaagtaataa

SEQ ID NO: 187622 - DNA, 388 bp, Homo sapiens
gaacgaacagaaaaggcacagaggatttttagggcaataaaactattcactatgatactgtaacggtgattacctgtcattatgcatttgtccaaacctgtagaatgcatgacatcaaggtgaacctaaatatcaagtccctaaactagggactcaggtgacgaggctgtgttaatgcaggttcatcaaccataacatgtgcatcactttgctgggggatgttgacagcggggaggctatgcgtgtatatggtgtatctctgtaccttcttctccattttgctgtgaatctgtcactgctctaaaaaagaaactctatgaataatttttttaagtgacctgctctgtctggcgagctggttcttgggtgttgtatgtctcactggggt

SEQ ID NO: 187623 - DNA, 223 bp, Homo sapiens
cctagctcaaggcttgggacagaataggtactcaaaaatattcactgaatgaatgaaaatatattatactgaatgaatgcccaatttttgccttaaagttttttgtttgttcatttgcttcctctagccctctgggccagttaattataaagtcacttttagtttctatatttgatgatcttataatctactagtccacaatgcaagatatagcaggcctcca

SEQ ID NO: 187624 - DNA, 205 bp, Homo sapiens
gatggtattttttccggggtgggggtggggaaggcttccattaaagaaagagacatcagcagacccaggctgagtgggcactcgataaacagttactgaatgaatgagtgctttccctcaaatgccagcgctcaagaaggtaggattagagtctttgttttgatttggttcattaaattactagtattttaatttatgggagaaa

SEQ ID NO: 187625 - DNA, 289 bp, Homo sapiens
tgctttccccccacgccacgcatgccaggttgcccttcctttcagaaatggtggaagtcctgcaaaatgcaataaactgaagtaatgtagcttctattaatacaaagtaaataactcagatttactggattttaaaccttattccttgggtaaacaatctgtgactgacttcacaccaaatatttgttggcggaggatttggactttagggataaaagtggatacattttttattttacaaactctgtatttgaacttaattattggctcttcaattttacgttaccag

SEQ ID NO: 187626 - DNA, 315 bp, Homo sapiens
aaaaggggcttacatttccatatacttgatcctcttctaaatacttcgctcatttctagctcatgatagggcagtagaaaagccccctggtatctctgagccatgatttcagtatcagtataactgttatctctacttacttccaaggaacaatgaaaaggtgaattccctaatatttttaaaattattttaggaaaaagccatgcacagtcatgcatgcctataatcctagctacttgggaggctgaagcaggaagattgcttgagcccacaagtccgagaccagcctaggcaatatagagagacccagtccct

SEQ ID NO: 187627 - DNA, 197 bp, Homo sapiens
gaggatcccactatacaccctatacacctatacaccaggtaaaggaaatgcgttattaattgaaatctgcatacaccaaaacgatttggtctggcttctagaatagtcagtttcctgatactcatcattgcttccatcagttcttgtaaaatacaggaaggtgagttcacctgtagggaatgggaagtggtatcaca

SEQ ID NO: 187628 - DNA, 109 bp, Homo sapiens
cacataggtgggttatatgtgggatgaactgtgctacctacactgcccacccactcccctcctcttcaatactctaagagaacacctgcattatctgcttttgttaaca

SEQ ID NO: 187629 - DNA, 279 bp, Homo sapiens
gaactcctgacctcaagtgatctgcccactggggcctcccaaagtgttaggatttcaggtgtgagccaccacgcccggccaacctttttgtttttttttagcagcattcagctctctccatgcaatctttccccccatctttcttcattccttttccctgaacttcatttattcagcctatcttgagtatataatgtagcagtattagaataggccttaaactattcccacaaaatgtattgtgaagaattatgaattgctatgacactctcagttacc

SEQ ID NO: 187630 - DNA, 243 bp, Homo sapiens
tgtaaatgtaatatttttacatcttatagaaacttagaaagtttcaaactccacatatcacttatttatctcattgctacccctctttttcctcttctttgggtacattagaaggaatacaacttttgttctggatttatacaaagaaacaaactggtgttttctcatatcattcccactcttagagtcttagaaggtttcaaatttgcaaacagagatgcattggatatggtaatgagatta

SEQ ID NO: 187631 - DNA, 533 bp, Homo sapiens
gttttactaggtttaaataacttctaaagaaaatacaagtgggcaaattagctatgtaataacctacatagaaaacagttgggcaaattacctgtggatatgcagattctacttttgcaaccctggacctggactttttatttttttttttggtgggtcacaaataatcttggttatcaataatgtgaaaatattaaaaatgaattcattttaccagtacatagtattactcttagaacataaattagatatcacgtggtatcaagagctgtgcttactttggagtctagggcctgctttttggactttacagcaaaaagataagaaatgtactcatgacatgtcagacaagacaatgtgaggcactttgtggggagaccattagatgatcccccttgcctgctcttgcagacatagtactagtatattccttatcaaaagttggcatttcatctcatataaaatattatctggacagtttcattttttctatttggctcttcccttactgtgccttcctgcattattggcag

SEQ ID NO: 187632 - DNA, 984 bp, Homo sapiens
gctatatctctgccagttatgtttctttcataatatgtagctcacgctagttctgaaaatgacctatcctcaagagtgtgtgtgtgtgtggggggggtcttcctcaagcagtggctcacaggagactagggggtctgtgaaactggccagagggatgtgtcaacacccctgtcttaagcaggaagtggctgtaaggacaagactgggccgagctttgacaacccacacatgttatgcccaaagaactggatcccagattctagaaaataaagtgtggtctccattcactgggttctgagagcttggcagctccgggtaggggctagggttttccttgggaaagtggacattccattgtcagtcaccctgggaaggggcaaatcccggcacagaaagtgaggagagggaaaggggcggacattgggcccagaaccctgttgtgagctgagcgctggtggagggaggtggggcaggcagctgccaccacaaggaggctgggaggcacccaggcatcaggtgggtctcccagaacagcctgggtctgtgagctctgagcatatctgacctggcttctacctctgcgcttctctgggtagcaatttccagcctccagtgaagtcttgccaaagttcacagccttaaggaaaattaacagaaggacctaggccacattccaggtcacagggggaacagccttactccattccccaggcctgtgtggaggggacaaaccgagggcaaaggaggaagctgctttgggaacccaggacatggcaggaagcaaagcgaaggcttgatccacgtgctgttgccatgtaagccaggcgctcaaacactcccaaggagcttctgaaagaccagagctctcagctcctggaggctggaccttgtgacagttcagtctctgcagccttggatcagtggtttaccttctgatctcttattggcgtctggtggtggttgtggggaaaccaaggcaggaaa

SEQ ID NO: 187633 - DNA, 953 bp, Homo sapiens
attttgcagttactttgttcttcttgctgttagcctgtaaaagtccttcagtcctttctaatccactggggatctagaaaccaggtcatgaaatcgcaggattgaaaggaaccttcaaaggctgtctgggggggaccaagaactctgtgaagtaggagggtgagtcacctcgccttaggggactctggagatgggaggctggcgaccacatgtgctcctcaaccatgaaaaggtggaactgctgacaggagtgaggcatgtgtctaaaatgggaaaagcaatgacagtaacaggaacaccccactcaactggagaagactactcgtaccgtgacaataatcttgcccttacgacacatgggtccggagctgagaaggcggttcatggcaatgggggagcatccagtagactggattaaagggtctcgcctttccagcagaggatgtggactcaggtggtgtgttctggattctaatcttggtcatgagttttttaaaaactctaaatacagggcttgagtcacacagggaacctgccacaaaccagagacactatggggccccagatgcaccagacacacagatgtaccccaagactgaaggggaaagctgggacaaactgatcaagagtattccatttaaaagcatcaccaaaattctagtttgcaagttttaaagattaaagtaagaaaatttctccaaagtgtcagattagcacattcacaactcggcaagagctccttgagattccaagtgtctgtccagtctgggagcaaaacagggcagggcactccaggctaaggtgccccaacaggtgtccagtgacacttgcctctggtctcccgcatccaccctccgccctcccacgcttgcttgctgactctcacctggcatggtctctcactcaaggttgtcccgggctccaatgtcacttcttaaacccagacacccacc

SEQ ID NO: 187634 - DNA, 869 bp, Homo sapiens
attttgcagttactttgttcttcttgctgttagcctgtaaaagtccttcagtcctttctaatccactggggatctagaaaccaggtcatgaaatcgcaggattgaaaggaaccttcaaaggctgtctgggggggaccaagaactctgtgaagtaggagggtgagtcacctcgccttaggggactctggagatgggaggctggcgaccacatgtgctcctcaaccatgaaaaggtggaactgctgacaggagtgaggcatgtgtctaaaatgggaaaagcaatgacagtaacaggaacaccccactcaactggagaagactactcgtaccgtgacaataatcttgcccttacgacacatgggtccggagctgagaaggcggttcatggcaatgggggagcatccagtagactggattaaagggtctcgcctttccagcagaggatgtggactcaggtggtgtgttctggattctaatcttggtcatgagttttttaaaaactctaaatacagggcttgagtcacacagggaacctgccacaaaccagagacactatggggccccagatgcaccagacacacagatgtaccccaagactgaaggggaaagctgggacaaactgatcaagagtattccatttaaaagcatcaccaaaattctagtttgcaagttttaaaatccctcgaattgatgtagtcttggcgcgtggtcttgtaaaagcaaatacatgatagggatcacatttttggacagtgtatctttaaggaatatgattgtccatagaatgagtgtccgaaactctttctcaagacctgactagatggtgattggggtggtgcctctgtacctcgatcattggcaggaataacg

SEQ ID NO: 187635 - DNA, 556 bp, Homo sapiens
cctctgtcccctgcattccatatttcagtaaaagatatcatactacccaagtccgaaacctaggagtcactagtgtgaccatcctaagcactgcccaccaactacttccaaagctctttctaggtacacaataaaattccatttttctgttcctttaagttaggtgtggccatgtaacctgctttggtcagttaaatatgagcagaactgacatgtgtcactattctgaagaagctctgagaaccactgtttgactcttttcctccaccacaacgactggcaacattcaaaagatggctgggactcatcaacttcatcccagagtgaataaccacaatgagtaaagttcccacccccacgaatttagtctaaaaaatattttgtcagccaggcagggtggctcatgcctgtaatcctagcactatgggaggcagaggcaggcagatcacctgatgtcaggagtttgagaccagtctagccaacatgatgaaaccccatctctactaaaaatacaaaaattagctgggtgtggtgccacacacctgtaatcccagct

SEQ ID NO: 187636 - DNA, 536 bp, Homo sapiens
cgctgacagattttagaaactggcgggaataaagaatcagacatttaatttggcagggcagtcttgtacttcagataaatggatctggatttgtgatgccttcttcaaaatattaatttctcttttgaaaccaaatcatatttggcttcaatatcttatttaaaatgcatttttacttacatatcatctgctttgagctcttaaatagcctgggagttagatcatggactttgagcttctcaaggattagaacagtgttcttctcacggtttgttggtacttgcccagcatctggtaattacaataactccctgggagattcaagggaaaatttcaagccaagtaagaactggaagggaaagacctccacatccaaataaagatacattttatttaagtaagatttgttgagttgctatgctgttgtgggatctgtgctaggtagtgagtttatgaggatgaatgatacagctcccggcctccatgtttcccatgtattagggaacacacaacagcacgttgtcaagggtgatcca

SEQ ID NO: 187637 - DNA, 168 bp, Homo sapiens
ggcctgtatttttattcctttaagtaatttgtaactaactacaaaggcctctggtaagatggcttttgtttctagttggaacatggagaccaagagaactctctagaaaacagatttggctccactgctatgggacttcacacttacctccacagaggggctcttctg

SEQ ID NO: 187638 - DNA, 430 bp, Homo sapiens
atggcaacgtgtctataacatagatctacttccgttgtactatgacatagttccccctccattttcctatagcacagtcccaacctcccttttcctctgacatagttccatcctccctcctcctatgacgtcctcccttctcctctggcatagctccatcctcccttctcctatgacacagctccatcctcccttctcctctgacacagctccatcctcccttctcctatgacacagctccatcctcccttctcctctgacatagctccatcctcccttctcctatgtcatagctccatcctcccttctcctctgacacagctccatcctcccttctcctctggcatagctccatcctcccttctcctatgacacagctccatcctcccttctcctatgacacagctccatcctcccttctcctatgaca

SEQ ID NO: 187639 - DNA, 412 bp, Homo sapiens
aagctgtgatatgtgtccatcccagagcatgtcttctgttactgttaatcagagtgtgtgtcacacttcctggggccactgaagtcactaaccccggcagaaaggatcggaattttcctactctaaaaggagaaatggcaaaatatagaagctaggctggtgggaaatagagaagagggctatttctctataaacatgttatcgaaaaaaacaatgccttggcggggcacggaggctcatgcctgtaggcccagcactttgggaggctgagacagaagaatcacttgagcccgggaggcggaggttgcagtgagccgaaattgtgccactgcactccagcctgggcgacagagcaagactccgtctcaaaacaaacaaacaaacaaaaaacagtagtgttattttttgaagt

SEQ ID NO: 187640 - DNA, 239 bp, Homo sapiens
cgcaagtgggtgggagagaaagaaatgggttaaaggtgactccaaggctcctggcctgagcaactggaaggagaaaggtttgtatgctcagacagagaagaccccggggagcacagttcaccagcacaaaaccaaaatgcaccatcacagaaagaatggctgcctttggggatccttgctggcagcaacactgtaaggaggtctcccttcctttgcagtcagcttggcagaagccacct

SEQ ID NO: 187641 - DNA, 442 bp, Homo sapiens
ttccttaaaggggggaaggctcggaagaggggcaggtgggctgtaaggcgaatgattacattcttgtgagactctagttagtgccagtaaatctgcattttacataagataaggtgaatgaatgtttgaagagaaaaaagggcgtaaaggaagaatcaattatgcagatgtctctgggcaggtggaggaatgactgatctcatcttgtcttttttctgcacctgggaagcgaagcttgtaatagacatgatcaatgtggaatggaacagacttcagttttaacctagaatcagattgtagacgtgaagttacaatgagatgttcttgtttatgggatgccagcaaagaatttacttaggaatgatctatggggcaacccttccagacccctgaggctttcacttttctgcggggtttggctgatgcctgatgctcctaacag

SEQ ID NO: 187642 - DNA, 159 bp, Homo sapiens
aggaaattatgtaaaggtattttccactttttctgcatcagagttatatacacttcaggagaagtaggctccaaaagctgcacttgaaagaaaggactcttccttttaattgcaataattgacctcctactgcatcttccaggagactgaagtttaggc

SEQ ID NO: 187643 - DNA, 171 bp, Homo sapiens
aaactaaaagcaaactgaaacaaaaacaactgtattttaaatgaattacttaaccacattaagtaattaagtataattacttaagtatatgtgtcactataacaaagtacctgagactgggtacttataaagaacaaaaatttttttttttttttttttgagacagtctcg

SEQ ID NO: 187644 - DNA, 641 bp, Homo sapiens
cagtaacagcagaatacacattctttccaagtcatcatgcgtaccatagaccaatacagatcatatcctgagccataaatctcaaaatatttaaaagaaccaaaatcatacaaactagaaatcagtaagattggtaacaggaaaatctccacaacagttggaaactaaacaacacagttctaaataatccatgttttaaagacaaaatctcaagggaaattaaaaattacatacattgaactgaaagaaaatacagcatatcaaaatttgtgggacacgtcagctaacacagcactgagagggaaatttaagcactaaatgcttatattagaaaagagaaaaactatcaaatcaataacctaaacttcacctcaagaacctagaaaaagaagagcgtaatacactcaaagcaagcagaagaaggaaaaataaagagcagaaatcaataaaattgaaaacaaagaaatagagaaaagtcaagaaataaaaagctgattatttgaaaagaccaataaaattgacaaaaatggacaaaataaagataagacatgtattattaatatcaagaatgaattaggataccactacagactgtgcagatatcaaatggataagggaatgctgtgaacgattctacatat

SEQ ID NO: 187645 - DNA, 348 bp, Homo sapiens
agatcatatggtgactctgcgtttagctttccatatatgcctgggagtgaagtttctggatcacatggtgactctgcgtttagcctttggtatatgcccgggagtgaagttgccggatcatatggtgactctgcgtttagctttcgggacctgcctgggagtgctgttgccagatcatatagtgactctgcatttagccttttgaggaactgctggactgttttccacagtggctgcgtcattttccattttcagcagcagcgtgtgatggttctgatttctccacaccctcaccaacacttgttattgccttttattgcctttatttttcattgtggccatcctagt

SEQ ID NO: 187646 - DNA, 472 bp, Homo sapiens
gtgctgcggtgatcgaggattatcataaaattaatctggtacgatatgtcgttcctacagcccctgctcctaaagagagatgatccacacaacagcatggggtgagtagggagatttataaagtgtttaaaaaacagcatccccagagcacagggaggaggcttgcctccccagttatgcagcaaattaggtcacagttccccaccccatcctctcccaagcttcagtggctgactcatccttcgtgggaagacctctctcccattcaagactgggcagccagccaagagacaagagggtttctgcctgcctctccaacccagctgggcacagtctctgtctcccccataacctccttccccatctgtgctccgaggtgatctcagcttcctggctactggcaaaggcttcaggatttactagacagccctaggaaacaggcaagctgagaagtcctcaacagccttagcta

SEQ ID NO: 187647 - DNA, 394 bp, Homo sapiens
tcatttaatcttcacatcataggtacaattgtcctcattttacagatgccgtgtctgaagctatagaagcttatatgagttgtcctagtcacaagaatctagtgaacagtggagctagcactcacattcaggtctgcttcactccacagactgctcttagctgattcagtgttcttctgtctaggtctaaattaaggaaggagtgacattgatccttgagctgaatttaacttgagtaaataaagggaaactcagaaaaattaacaaggttgcatgctggaacttgggcatctcatgacagtttatgaattgccagatattagaatgtccatgtgattgaatttatggctgaatagcaatcaaggcagatgcttattttgagtgtttatagcat

SEQ ID NO: 187648 - DNA, 580 bp, Homo sapiens
agcgtgtgtgcactatattggctgactcttgccgtgctcaggctcatgctgctgacaggggagagaggggacattttggagtccaaatcttgcatcatttcattgaagtgttcaatgtcatggctgtaagaagtaacccattttaataactggcatcaaaggatttaggagagagaaacccagtatccagacccatttccgtcagtgacactctcctcgtattgggaggattggccagaatcgtctgattcctgtttctgatttccttcctcactggcatcagagtattgcactataggaaaactaatatctaactgagctccaagtgctaaataacagcatctcatgttcattccgggtcaccaagaggttcagggtgaccaagtcacaaactataaatttgaacatttgatgatttttgcaggagactgggtgaacaaaggaaaacccgagagatacataaaggtggaaactaggatttctcatttgaattatttaacatgcctcactctaatggttataaatataaaggaaatgcaggttcttcaagaaggtgaaacgaagttactgaatttaagtt

SEQ ID NO: 187649 - DNA, 318 bp, Homo sapiens
gttggtcaggctggtctcgaacttctgaccccaggtgatctgcccgccttggcctcccacagtactgggattacaggcgtgagtcagtgtgcccagcctagaagttaccattttgttggtccaaaatagttattagtggtttcatataattcatcctgtacctagaagtagaattgctggatcaaagggtagttgtatgttcagctttagaagataggtatttataaacatttttttggtgtgccctgccagctgtgtgtgagagttccattttccccacattttcaccaaatacttggtattgtcagtcttttaaat

SEQ ID NO: 187650 - DNA, 484 bp, Homo sapiens
gaacatcagaaatatctacattttgtcgtctcacctgcaacataaataactgaagtagtttaaagcatctctaggttaaggcagtcagatttcgcagacctcttgtatgaaatgtgaaaatcaaagagggaatacaagcaagattattgacaggagtcataatgcataaatggaaaaggtcatgagatttgtgtgtgtcattaaaaatgccttggagatctcataatctggctgactctatacttgttgatttaaagctgtataacctgttttgttcctttttcaagtgatgctgcttaatgctacaaagtgagtattgttttttctgtgatgcctttgtaagaggaagttaattctgtgttcattattgtagctcccactgatgaagtatgatttgggccatgatagtttaaccctactggttcttcacaagtttaacatccccatgttacctctaatacatgttatttcattttcacatctt

SEQ ID NO: 187651 - DNA, 312 bp, Homo sapiens
cgaccttgctgatgctcaaggtatttgtgattccctgcctcattgtgattaagcactgccacctggcttccatactctgggatcaatcaatcctcaaggatgttaagtccaattctgtatcagccgaacctactgtatcagccatgtcctgtagaaaagagacaccactgaattttctcatactgcataagcccatctcagcagcagattcctgaaggccttcatgaatggcatacaatctattccagcactttttttttttttttttttggtgtggctttagtctaccaggtaccagggtgattcggccat

SEQ ID NO: 187652 - DNA, 2923 bp, Homo sapiens
  misc_feature (2112)..(2112): n is a, c, g, or t
  misc_feature (2270)..(2270): n is a, c, g, or t
  misc_feature (2389)..(2389): n is a, c, g, or t
agctaaagcccactctcccaggaaatgcttctgctctaagactcaaacattccctgttaggtgaggtcactgacatcagaaatggcctccccctttagagctggccctctatacacaggtagtgtaattttgtattttttcttattctctgtggtagagattgttggttgactgccaacatctattggcccatttctctaaataacagaatgtttatctgggcacacacctgcatggaattagaatgatatttcccagtgtctcttaaagaaaaatgtggccactttattaaattcaggtaatggcatataagtaaatgatgatgtgtagattgcaggagccttctttaagagacagctggtgtacctctttttcctgtcccttcctttaatccacagcctggaacatggatgcttgcattttgaatcctgaggacaaggactacttgcctggatagtagggtgataggattatgtggaacagagttgccgtattagcctattagtctagtaggactcacttttagactttgtttatagagataaataaactttttgtttgtattattttttaaagcatagttattttgagttttgcttttggagacagatcttttattgcattcccctccttcccccaaaattcttaggttgaagcattaacccaaggtacttcagaatgtgactttacttggaaatagggtcattgcagatgtaattattaacagttaagatgaggtcattaaagtggtctctaatccaatatgactgctcttcttataaaaaggggaaattggggtacaaaggcagacacacgcacagggacacacacacacacacacaaacacacacacacagaatgctgtgtagatgaaggcatggatccaggtgattcctctataaacaaagaaacggcaaagatcgccagcaaatcacaagaagctaggaacgaggtttggagcagattctctctcacagctctgagaaggaatcaagcctgctgacatcttggcaagcctctagaactctgagacaataaatgtctgttatttattttctagccttagcaaaccaatatacaatcttagccaattaaaggctgactagaataaccttagcttaatctagggcaattttcacaccattcagacagcagaaactacatacacatatccatgtacccatctgaacttctgtcataatttctcagtctatcaattttagcagtgtggccaaatgtcagtttctctggaatgccaaaataagggaattttgttgtggctgtcctatgaaaatgaagctctgtcacagagaagtgtgtgagccaaatccaaatactgagtttattttactgtccaaatagaatattttcaccccagtgaagcaattgtaagcatctcatccaaagcatattcactatccttgagtattcttggttgcttattgaatgaataagtgaatgaggtggatttggctgacactaacctttgggattacctcacagcttgccagtggcaagcttagtaagtactgggccatagtgtttgaggataggtctctagagtcatatgtctctaagttcaaatgctagcctcctgtattagtctgttttcatgctgttgatgaagccatacccaagactgggtaatttacaaaataaagggttttaattggacttacagttccacttcactggggaagcctcacaatcatggtggaaggcaagaaggagcaagtcacatcttacgtggatggcagcagacagaaagtatgagagccaagcaaaatggatttccccttatgaaaccatcagatcttgtgagacttattcactaccatgagaacagtatgtggaaaactgcccccatgattcaactatctcccactgggtcccttccacccacaacatgtggggattcaagatgagatgtgggtggggacacagccaaaccatatcacctcctttcctagttgcttggtttggaagagttatgtaatctttttgagcttcaatttcctcatctataaaatagggaagatgctagttactctcttatagggtagttatgatttattttatgtgaaatgtttagaatggtccatgccatgatgnactgcagttggtttgtactggctcacaatgaccaatagtacaccttttttctgattctgccaatcttcccatcctcacatccagtgacatcatattggtagtttgaaattaattggccatggtgagaatatttacactacagatatttgcaaatactntacaacaggggctagcttgccagcacaccgttggttagatgacatccgtaagttctgtataaatcttaacattattattactcagtaggtactcctgctcccttatggttttgagaagnccttcttctagttaaataaatcattttgaattaaaataacactgatgggactcttagcaatgttttacctcttgggaatcactgcctacatttgtggtctataaatctgaatccttaattcactcggattgatttttggctccgtgaaagcaggagcttttctcactgctgtagcccccacacatggcacaggcctgggacagagtaagcactcataagtatttgttaagtgaaaaaataaatgaatgaaagtatcccaaacacttgcattttcaaaaggttttgacatccacttccttttcttctcaaagctacgctttgagatggataggtcctattttacctctattgcatcgatgaagaaactgcaatgcaaagaagtgtctaattagtcatttgcttcctttcatcaaatatgtccattacaccagtgtttctcaaaatgtgttccatagatcataaatcctgaaggatgttaatagttattatgtgccaggggacccgtggatatataagtttggaaaatagtgaagt

SEQ ID NO: 187653 - DNA, 264 bp, Homo sapiens
ttgaccccatcttccgtgcccatattgaagaagtagtctgtgaaaacttgttggctttctgacgccttcctaagtgtactggaatactctctataaatatgcagcagctgagatgggtgagagcaaggtgagcagtcagagtagtatagattgaattcaaaaaggctgagagaacatgggacagcattataaacattgagggatgatgaacaaaaacgaaatgagtgatcatggtgtattctggggacagggacggaaggatca

SEQ ID NO: 187654 - DNA, 627 bp, Homo sapiens
attcataatagccaaaaagcagaaacaactcaaatgtccatcaatagatgaataaacaaaatgtggcatatccaggcaacggaacattattcagcccccaaaagcaatgaaacactggtccatgctgcagtgttggtgaaccttggaaacattatgccaagccaaagaagccagatacaaaaggccacaaaattatatgagtccatttctatgacagattggaacaggcaaatccatagaaaggaagacgaatggttgccaggacttagggggagaggagaatgaggagttagtgcttagttgatacagggttcctggtggggatgatgaaaacgttctggaatgagatcgtggtgatggtgacataactctatgaatattttttaaagtattgcattgtacactttaaaattttttttgtaaaggcagtttgccaggtctcgaactcctggactcaagtgacccacccatcatggcctctcaaagtgctgggattacaggcatgaggcaccatgcctggcatgtatactttaaatggggaaactgggtgaagggtacatgggacctccctgcactgtctttagaacttcctgtgaatctatcacaactcaaaataaagacaaacca

SEQ ID NO: 187655 - DNA, 276 bp, Homo sapiens
gaagccaggagttcgaggttgcagtgagctatgattagtaccaccgcacttcagcttgggtgacagagcaggaccctgtctcagaaaaaaccccacaaaacagtaatagagaagccacataagcagatgctcgttaggagccctgactatttaagaatgtaaacaacacaattttagaaccagtggcaaggagggtactggacatttccatcttccccacgtgcctccttatctttcacatgttgtttcactctgtctcttctcagcattgggtct

SEQ ID NO: 187656 - DNA, 271 bp, Homo sapiens
cacacccatgggtctctatctcacacccacgggctctatgtcacaaccagaggctctatctcacacccatgggctctatctcacatccacgggctctatctcacatcctcggtctctatctcatacccacaggttctatctcacacccatggactctgtctcacacccatgggctctatctcacacccatcggcggtgacgccgatgggtggggaatgtggtttaggtaggatgaaatgggaggatgatgatgaggtacccatcgcgtgtg

SEQ ID NO: 187657 - DNA, 254 bp, Homo sapiens
acgagatacaatctaggagacgttataactgtgggtcgaaaattaaccacttccttatatataggagtttaagtgaatatttccagaagagtacgatccaacttgataaactcaaagcaatgattatcataaaaggcaagttttagaggtttgtatacaccatgatcctttatatataggagtctcccctccacccctttttccatggcttcactttccatagtttcagttacccattgcaacacggtctctca

SEQ ID NO: 187658 - DNA, 281 bp, Homo sapiens
tccctgtcgttaagcaatgtattcatagaatgaaattctatataggagtgtttttttctttttttaaaattaaccacttccttatatataggagtttaagtgaatatttccagaagagtacgatccaacttgataaactcaaagcaatgattatcataaaaggcaagttttagaggtttgtatacaccatgatcctttatatataggagtctcccctccacccctttttccatggcttcactttccatagtttcagttacccattgcaacacggtctctca

SEQ ID NO: 187659 - DNA, 338 bp, Homo sapiens
cacagctgtggcgtgtggaatcctggttggacccagacttcctcccaagcagatgaaaggattagggggcagagatgggggtggagggcagtcctgagatcaggatgagctactttcccataatcctgaatgtccatcctgtggcctgtggatcttctgcaacttattctatgttagtgcagtcagtcagatagtgcttatgtattgaacacctcgagatgacaacattgagcagctgccaagcggaaggcagagtcctaggcactgtgtaaatggataagtctatccatttaatcctcacaatagctcctcattaaggtaatttttactatccacag

SEQ ID NO: 187660 - DNA, 237 bp, Homo sapiens
aaaaataaatgtgtaaaaggataaataaaattatttgggggttgtaaatgctctaaataaaatggtttacagaatgatgtagaatggttttagtggtgaaactctcttaaagtggccggggaacttaactttgaagtaatgatttttgagacataaatgatgaaagtgatgaaaggaggcagctacaaaatatttgggtaaagagtgttgctggaaaaaggaatagcatatacaaat

SEQ ID NO: 187661 - DNA, 357 bp, Homo sapiens
ggactatgtggaaaaggcagcagacagaaatctttgatgtttttccttggtgccatgtgatacctaaggcttctttcacttgactctgtcccatcctattctcaaaattaaagtcctagttttacaagggaaatataccttgtaaaaaagtcctagttatacaaggttaatatgtttgtcaatttctgtatgtcttatgccacatcctctgtctcctcagcaggataaggctatcttgcttaggaacatagccatgttgaaaaggaggaaaatatttgctaatttccctttcctccggaaacacacagtattaacgaaacgtgtttggccatattgttctaattacactatgttctt

SEQ ID NO: 187662 - DNA, 397 bp, Homo sapiens
agtgaatcccccggatgagacataagaacccagagactgattaaacagtcaacaacccttggctgtgcacgtgcatggtgtggtaggttcgctgggttgggaagcagcagggagggccaaagatcctccactacaaagaacttgcagcctgatcacgtggatatccacccatgtaggcttagactcacacactagcaccaacctgtgtgaaaacaggaaggcaacatggtgtagtatactggttctcaaacatgactgcccgttagactcagctgggggcttcacaaaaatcccaaagcccaggccacaccatggagcaactaatgagaactgctagggtaagacccaggcatcagaatttaataaaacctggctgggtgaggtgggcagatcactt

SEQ ID NO: 187663 - DNA, 458 bp, Homo sapiens
ccagaaccaagagttccatgaggtggaggatcccagtatctatgacattaattgtcaacagctctgtaattttgtgagtgaacgtgatttctcacgtgtctgtcaggactttggtttggtttcttgaggttttgttgtaaggagtgaatgtgaaaatgtgtgtgtggtgccaggtacagcatagctgtgtaataatgattaatggaggtaattttcgaatgtgtggtgtagtgtcctactctactgcatctaggacattgtagagaagcccttagtctgtccagaaagccctgattatccttcaggtactgatactgacaactcatggttaggagactcctgtctttaaatgttaccagaggttcaagtgagctatattcattgctgttctattagattttgagattacagctgttttggatatcaggttttaattgtctctgccacatacgatgtta

SEQ ID NO: 187664 - DNA, 298 bp, Homo sapiens
gcctcatttctacatattacggtctccagggcatattgttaactgcaaaaagccaggtggcagaaaaaagtgcataaaatatgctattgtttaagacagatatattgataggtatccaacttacaggttttaaacaatggaaggagaagccatacataaaagttgcccactgtgggaagtgacagggatataaactaaacttccttcaatatactttttttggtagatctgacttggtgtagaaattgaacactctagtctggcacggtgaagagacatgagaggtgtagaaattgaa

SEQ ID NO: 187665 - DNA, 168 bp, Homo sapiens
cggccaacataagcaactttttatttaaacttgacctttggcacaggactctgacagtctccctgaatttacgttttagatctggcattgccatttatcttatctaggcttagtgatacaaaaattcagcggtgttactgtcccggaatcctctatattccttcctta

SEQ ID NO: 187666 - DNA, 584 bp, Homo sapiens
atgccacacggcatattcagattctcgagattaggacatagacattttaggaggtcattaatttcctaccatagcatgtattattttattttggcacagttgtggccagaggaccactatcagagacctgagtggatgggaccactttagcagctagcagaaatccatgtatcactgcccagtgtgtcttccttgcccacgtgaagcctcaaagcagcattgccgtggatctgcctgattgggaaagaaactgtatttccctcttgctttattacagttctctcttctatggacttgggcacctgtcccacagtaacctggccaggggtctgtctgcgagtgcctgtgctacagtgtattcagtctttcctcatcatcatggaagatagtcttatgctaacttccccagtctccatgggaacctcctcttcagtgcatttaaagacagttattccttccctggttgagggatctgtatccaagggtgagaatgagatggctgaaggcaatagcatttttccttcatatcaaactcatgttttccatgcacccctgttggtcccttcccaaagccttcctggtgt

SEQ ID NO: 187667 - DNA, 442 bp, Homo sapiens
aaagattcaaaagtaaaaaaggaaagcacaaaagtactaaaaagaaaggtgggaggtctatatatttttttaaaatcttggagaaggcaagtcacaaaacaaaagccataaatgaaaaatttataaatctgactacatgaaaatttaaaatgtctacaagagtgaagaatgccataaggaaaaagacacattgaagaactcactggcaatcatgccaccgtgtttggaattatatttaatagggaataaagacagagtgatactcgtctaatctctgtcttttaatatcttatacttcccacttcattataattaataatcaaggtacactctagcccagacagaggcaataaaacagtataaattggatgactcttttggagagtaatttagtcatttgacctttaaatttataaactgatctatcaactccattttgggg

SEQ ID NO: 187668 - DNA, 429 bp, Homo sapiens
agaaaacaaattcatgcatacataggaagttcatatggcagagatggcattagacatcctgggagggagggattattcaactgatgctgcagggacaaacagctttccatactgtaaaattaaaccctacttcagaccatacagaaaatttcagttggaaaatatatatgtattcattacctcaggatctgaaaagatatcctataaatgacatacacaaaaagcacaaatcaaaggaagtaattagtaagtcatgtagcttttttacaggttgctctaggtattacattatatatacataacttatcacagtgtacttgtgtcattgttttaccagtttgagtgaaatataaaaactttacctctgtctatgcttctttatcctcccccatttataatataattaccttaaatattataattgtctta

SEQ ID NO: 187669 - DNA, 423 bp, Homo sapiens
tggcttcaagcaattctcctgcctcagcctcccaagtagctgggactacaggtgcacatcatcacatccggctaatttttgtatttttttgtagacccggactttacatgtgccatgttggccaagttagtctcgaattcctggcctcaaacaatccatctgccccaacctcctgaagtactgggattacaggcatgagccaccacacatggccaggggcttaagtttcaacatgagttctgcagggacagacatttaaaccacagcaaagaggatgagccctcaaaagatactgagaagcagcaaccagagagatgggaaaaacagctggtgagtgtggtgggccagagctaccaccaaatcagaaggaagtgtcagcagcatcccaggaagaggagggagcctgtatagtaactgtgggaa

SEQ ID NO: 187670 - DNA, 281 bp, Homo sapiens
atttcaagagcaagactgggagggaaaggtttttccaggacttctcggagaaattgacccaagtgttaggaatttgcgtttcattaagagatgaaaagtggatgactacagtaagaactgtaggtgaaatgtttcatagggctagctttatttagccatcattccaagaagcaatgatacctattcttgttgacaaattaggcagaaggataactctagggcctgccaccatgggaggtaaattctcatgaacattagttcctaatgagctatcacgtttt

SEQ ID NO: 187671 - DNA, 502 bp, Homo sapiens
  misc_feature (26)..(26): n is a, c, g, or t
gccgacctagaggacccccgctgcgnctcacatcactttcttctccatatatgtgtctgactccctctaccttcctcttctaaggatacatgtgactgcacttagggcccacttggataatccagaatcatctccctatctcaagatcctttaatcatatttgtaaaattaattaattttgatcatatctgcaaaaattctttttctaagtagggtaacagtttaagttccaatgattaaaatctgatatctttaggggtcattattcaaactactacaaataatatattttatttgacccaatatatccaagatgttatttcagtttgtaatcaacattctataataacttttctaaatctaggtgccttttgatgcttacaacaaatctcaattagaatcagtcacatctcaagatagagagcaacaaaataattgtgggggacttcaatactgaaagcactagttagatcatcaagacggcaagcggaagaaacagtgg

SEQ ID NO: 187672 - DNA, 618 bp, Homo sapiens
ttgacctaatcctggctcttgggccaccttggttaatggactgctcttctcagagttcctcaggcccttaagacctgggatggctcctgcctcacatgcaacagtggcgagaggcacccatgatgatctgatgccggatgaaatatgcagacttaggtactgtattactgcttagacttaggtaatgtattctactgctgtcccctccactgtggcagacatctgtcatcagttacagcttcctcaagtggacccagattccttcccctggcatctgttcaagcagccacagccagttggcaaaaggtggcaaaaaagtcaggatggtcctcaaaggccaaggcagaaaaaggacctgtgacttctggatgcttctgcagggaactgactgctggtatggtgcctttaaacataaatgcctgccccttaggccaggcatggtggctcacacctgtaatctcaacactttggaaggccgaggcgggtatttacttgaggtcagaagttcgagaccagctggccaacatggcgaaaccccatctctactaaaaatacaaaaattagctgggcgttgcggcacatgcgcatagtcccagctacttaggaggctgaggcaca

SEQ ID NO: 187673 - DNA, 312 bp, Homo sapiens
ccctcccctggcagctgcctctctctctctcttttatcattcctcttgatccgtcatccagagaatgctagaaggcatgagaatgtaagttccaaataggagttggtgcctgttttctatcttggtttattttcaaaaccctttttgaacttttgaactgttggtacccagggggcaatgtgcaggggagttgataaataaagataatgttgatgtaagtacagtttctttcatatgtaactagagaagcatgtgagttttcagataagcttttcttagaaaaaataaaattttaaatgtcaaagttttttg

SEQ ID NO: 187674 - DNA, 404 bp, Homo sapiens
tcagaaactggcgatatgtacaacatacatgacagacaaaagtttggtattcagaatgcattatgaactcttacatatcagtaagtaaatgatgaatgcttagtagaaaaatggagaaacctgtcaaagggcactcaaagaacaacaaacataaatggccagtaaacatatgaaaagatgctcaatctcattagtcatcaaagaagtgcatgattaacatccgtgagctagcattttacatttaccaaaccggtaagaaactacaagtttcatgatatcaagtgttagtgaagataaagggcagcagaagtgcttataccctgctggtaggagtgtaaatcagcacaaccactttgaaaaatttgttcatatttttagtcaagttaaacacatatacctcctat

SEQ ID NO: 187675 - DNA, 129 bp, Homo sapiens
agacaacctcaggatctaaaaagaaaaatcttccttccctactatttaataaagaacgtaaactttcactactcatataatcatctttaaccaaggactcatacctaattctttaaaataaaagttaca

SEQ ID NO: 187676 - DNA, 359 bp, Homo sapiens
cccaggtgtgctggtcccaggtcttggtgaggaccaactctagtcactaggtggagggaacgaagtaccgtaagagagcaaggggctgggatctcaggattgttccagattgctctgcatctttcccctgcccctccccactggtaatgttgctgtcttatgaaatgaagaaaattgttaagtgtctaggtcactatgaagtctctggtatttcatagtgtgtcctcatggtgactgctcagggatttgatttagatctggattagcctgcctttatcttgagtcttccctccctactgtctgttctctactagtagtcaatgtgatctttttcaaactgtaatgagagcaagattcta

SEQ ID NO: 187677 - DNA, 178 bp, Homo sapiens
cctcccaaagtgttgggattacaggcgtgagcccctgctcctggcctggcatgtacttgatataggagcagtgtctaaagctggctgattgccccgcaccgtcattttaatcagaatgactcatttttcccatctatagctagtctcaaaaattaataataaattacttaaccctcca

SEQ ID NO: 187678 - DNA, 410 bp, Homo sapiens
aaatgatcctttccatcccctccagatcaaaaatcaaggatctgtgtctgagccacatgaaaatcaattgtgtcttgtggcctatatgatgaatttttcaagtgggaggtatgacaaaagtggcctgttttcctgaaaccctgagtggtagtcattgtgaaagccgataaaatatatttttcaggctaattgttatatttttcagaccaattatgtgctgttaaaatatgttgcaattgacaagtttataacacagcttgaaatttttcattgacattgaaagctgttgagatttatttatcagtgatgcctcttcttggttagaactggctcttcgtagcacaggacaccctgtcatatgaaggcagacccaggcaagaggatgctggattcttgtaatcaggataagt

SEQ ID NO: 187679 - DNA, 350 bp, Homo sapiens
ctcaccaaccctccaaggatcaacttgattctcctgcctttctttgctctcctgggaccctcatcctggccctgcggcttccatcgcagcctcctcccagcatgttgagctgcgctcttcctcttggggagctgctctcccacaagcctttcaccagacccgtcgtgccctcagcactggacatctgacacccttggcctttgacaccctctcctcctaccctgacccagtagagaaccccatggtctcagtggcctcaaacccccaggggcacattctcaggcaaaccatcactcccctccaaagagcctaggactcctcccgtctaggaggaggaagagataaaggag

SEQ ID NO: 187680 - DNA, 430 bp, Homo sapiens
tgactctagcgcatcccacaggtgccagcgtgcgtgtttaccgcgccctcctcggaagcccctctgggctcttcttctgctggtggattcttctgctcctcttcccacgtggatttccaccgcgaccttgccacgtaccatggcttcgggccccatgagtttcacacccaccatgggtgatgcacgcctgtgaggtttggtggtggtgagagctttgcagcaggaaaggcgggtctggaggatgcctcaacccagggcgattctattcccagggggtgtcaacacggaggctccagaacacatccttctaaaactccctggaagccctcacgtcccccgaggcacagcacccagggcaaaggccaggccttggatgcagggaggtaggaggagcttcccatggacacactggagaagaacatgctccttc

SEQ ID NO: 187681 - DNA, 486 bp, Homo sapiens
aattaaggggtttcttaattgattcagatgtgttctaaataccttgtacatacccagtgaaatatatacttaagaatcaatgtaattatcttaatactctttcagatttatgcttattcaacattcatgtaagaaatattgatcaagcatctgttgtatacaggcacattgctaagtactggttgtgagctatgactgagaccgacatggtccctgcccggccaagtattttgtaacttatagaaataggtatccctggccgggtgcggtgactcatgtctgtagtaccagcactttgggaggccgaggtgggccgatcacaaggccaggagatcgagaccatcctggctaacacggtgaaaccccatgtatactaagaatacaaaaaaatagcaaggcgtggtggcacgcgcttgtagtcccagctactcaggaggctgaggcaggggaatcgcttgaacccaggaggtggaggttgcagtgagc

SEQ ID NO: 187682 - DNA, 536 bp, Homo sapiens
tagctgggattacaggcgtccagctaatttttgtatttttagtagagacgggattccaccatgttggccagcctgttcttggactcctgactcaggtgatccgcctgctttggcctcccgaagtgctgggattacaggtgtaagtcaccgcactcagccgatttaggcttttgaaaaagcaacacttgttgatttcttttagtgttagtttgccagttggtgtggaaaatgactgttgagtccattttgaccacacatgatacttcacacatactgacaggaagtgttgcaggtggctgtatacgtgaatgtcttatggcaagagagcaaacccgtgttccatagaagcatacctccaacagtaagcatttatatggcactggcttatagtcttccttttcattcactgtgctcccagtcaactcttctgtaaatttttttgagaacagggtcttgctgtgtcacccaggctggagtgcagtggcacagatacttggcttactgcagtctcgacctcccaggctcaagcctcctgc

SEQ ID NO: 187683 - DNA, 381 bp, Homo sapiens
ggacagtgcttgtgtcttactcatttttgtgcccctcccttgtcctataatatacccagtgtaggtatctattgaataatgctgaaggttgtgcacagatgtcagctgttattatcttccttccccctgccaccccaccccagctacctggcttcaggtggtcttgtcttcatctcagcagggactgggagcttatgctgtcagtgacttgctgcacagtgctatgatgtggaaacctcctgctataactatcgtataacttcttacatctttgtggcactcagatgttccttagcttcctcaagtctccaacagcctactgatggttgacagaaaagactggccaggcgcagtggctcacgcctataatcctagcacttt

SEQ ID NO: 187684 - DNA, 161 bp, Homo sapiens
ggaggactttttttccatttatctgtgtatgtctaagttatgtacgattattaaatactaagtagacaaatttacttactgtttttaggaagcatataaaggaacaaaggcaaatagttagaaaatcacttaatcgtagaagcatagatttctataaaact

SEQ ID NO: 187685 - DNA, 307 bp, Homo sapiens
acgtgattccctcaatacccatgctgggaaggtatgaggagctgtctacattttatggatgacaaaacagacacatagtgcctgtgtggctagtccggatttaaaggctagtaataagtggagatggtatttggatcccaacgttgagttactttctagtactaagtaggcaatataagcccaacctaaactcgttattttagttttgaaaaggataacaccataggttattcaagtaacatatgttactgaatccaggcttcatttgtcatatcttataagtgagtgtgttattatctgtgcatgt

SEQ ID NO: 187686 - DNA, 220 bp, Homo sapiens
gtggtggctgatgtcaggatggtggaatgtttttgagtatgttctctttctctccatatccctctcaatttttctctctttcccttttatcctccgcctgctcttgttgcaaaaagatttcatgatagctgagtgccaagtacgtcccacacattataggggatgcaaagaggaatgacacccttcctgctctcaactttctttcattcactcaacaaac

SEQ ID NO: 187687 - DNA, 733 bp, Homo sapiens
ctttgagcattggcctcagctgctttctgcttgtggctgcccaaactcactgggtttttgtttcctccaaagtacagtgcttcctgttggccttccttctgcctgatgtactcttctgtagttctttacttggataatttctactaattctcagttttcatagtaaatgtccatttttcagggacactttccctgactacctctaagctaggttaggcccttctatcatgtactttctatattttttccttattatgcttatcacaattgtaattaattatttgtgtgattattcactgtttaacatatctccccaccagagcctcaggggcaaatattggctctgctgtgtttgtctctgaatttttagtatccatcatagtgcttggcatatagtaggatcttgccttgtggagtaaagtatttgttcaataaacaaataggaaggccattttctgctgcgatcaaaaactgttttaagcttctttggagaaatatatatcaggctgtggttgaatcttggtgaaatttaactgccaattaggaaagtagctgtaaataattgcttaacacagggcattgcatgcaaaaggaccatctaatttgtgttctctgagtgaaaaaaatttaggcacagagtcctggggtgcagatggggataatcctgcacagcccagcacaggattatacagaatatgtaagtgtgaataaaaaaataaacatggatgtagaa

SEQ ID NO: 187688 - DNA, 728 bp, Homo sapiens
gtctcttcatctttatgaggaattaaaattagatagtatatttagttcttaaattctgtgattttattaactgtcacttgtttttacttttgactttaggttaatcagatcttaaaactcagtactaactaatgctgggaacttatacagagaagtctgctgagttgtggtgggaggacacagtttccatgtttgaacattagaattccttgcctcttaatcaagactgaagcattatctgaggaggaatcaggaagcccaattttatacatagttttaatgctagataaaaattaagtgtaattgtagcttagactagatatcatgatagctttcagccaagtgagggtgaaataaataaaatttgtctaaatagtactaattagagtgataaattatactttttttctaccctcatacatataatttgtggttgtgattcttatttgacattattggcatatttaatagtttccatgaattgaagagtcacatggctgtagcttataaatatatcatagttttctaatgtagcaattagaagtcttagagatattttgcaaatggtgttagaaagtcattgattatcatctgtataactagaactccatgaatcagcggcttatggctccagagcttaacacagtgcctggcacttaataaatatatgttaaatgaatcagtaaacatttggaatgtttatgtgtaggtgaagtcatagctgtaag

SEQ ID NO: 187689 - DNA, 374 bp, Homo sapiens
acagaggaagagcaagcaatcgggttagaaaacacagtcagagtgcatctcagtgttgtgggaactctgtccaggaaactccggccagaacttgaacagagcgaactctgggccaaaccagcatctaaacagtaataagaaaagccaccaagcagccaccccaaagaacaaagtggagagaacacacagggaagggcagaacacgctgtgttgatatttttctgctcagagagctataaatttgtaacttattaagcagcacatggtgagtctgtcattggcaactatgggaaggagaagagttccccattttttattagaccaaaaaacaaagtcacagaggaggtgatgcaccctctggccttactcgacac

SEQ ID NO: 187690 - DNA, 870 bp, Homo sapiens
gcgagttatcgcttggaaattagaggaacaataaacagaacaaatgcctgcaacacggttctatgggcccttttcctttttcctgtcttctgtctcccccgacctgttctattcttcctcctctgccccctggccatggtatcgactttgtgcatctccatctttggaggacttatctgatcagaaagatgctgcaggtcttaggattggggacatgatgcccccagaattatccatgatggtgagagtttgagatgaacaacaacagcaaaccagtaattgctcttattaaaatgagtcagaagaagtattgaggggcaggtgctagttttactgcagcttcacctccagtcccaggaaaaactgggtttggtacaagcgggatgggcaggagtccggtggagagaaggggcatgtgaaaccctgggatatgagactgaatgaacagaaaagaggagagaagacagtagtgggcagattctgtggcctaaatactcaggcgggagctgttttggctgggatttggctgtcagtatgaaagtaatttgatttcatagagagtgaaaacaaggacgagattccttgagctctttcccttctccttatttcagctcaagtggcaaggcctcaggatggatgcccacagccctggcactggggagcagagaggctttctcggggcacaggcatggcagggagcagcgttgctgtggaagaggtcttaaacaagcaaacaaacaaaccaaaaaaaaaaaaaactctgtaaaatctccttttccttttgtgttccaagtagttctgcttctcttcgcttttccagttttaccctgcattttgggtcagggtggtttagttctcctcctctgttcc

SEQ ID NO: 187691 - DNA, 505 bp, Homo sapiens
ttttcttcccagcccttctccctgttctgcgacatggactgactcctaaattcttggacgcagcacttatttttttcccgatacccgtctccgtctttcactccctttgtgaggatagggcgctagctcggctgcctcacagctggcccttcagtccctacactgtgaatggttgtttctagggaaaagtccaggctttcaagcccaagattcttgttctttgttcaattttgcagtaacaacacctaacatttgtctgcagagccttaaactttacccctttttgcctaccttgtttcctgttacctttgaccccaaccgcgaaaaatcacagtcctctttctagtgggacacttaaattttacttactgaaaaccaacattttaactcactccaaagctagtatattctaacgtaatgctcctatattaccctggacaaatagttgagtagtcagggataaaatctagaagtacaacataataaaaagcaaacgtgacaaatc

SEQ ID NO: 187692 - DNA, 536 bp, Homo sapiens
aaaaatcacagctacaggcaaaaatagagcagcctgggaaaagtcaggctgcacctggacagatgagcaagcaggattcagcacagaagccttctgttctttgtgtgattagcgagctcccaggaaaaatttcctccctttttcaggcatatacccagtgggctccataggaactcacacagggaggagggggccttcctaaaacaaatccacagttatacaaacaagagaagtggtgctttgtacttgcctagggacataaccacaacaacataaataaggggtagttatgcagacagctttacagattagaaaagtgactcaaacagctagagagataagaggagtttctcataaaagctttgtaattcagctgtcaaagcagcaacccatttgagatcccctctgccttgtgaaaagctttcttctctcgcttattcaactttcactccaacctcaccctttgtggccacgccccttaattttcttggtcatgagacaataagcttggataacaccttagacaaccagaccac

SEQ ID NO: 187693 - DNA, 626 bp, Homo sapiens
ttaatcagcaaccacaactgggtccccagaactgccgggtaaccctctctgtgctgccagtcacattccctccccatctctctgtgtccctccctcactgtcactcatagcagctctttccagccttttccactggtctcaagtcacctgccccagtaccagatcatctctcctcttacttcagagacaaaacagccactcctaatccacatctccacctgtcatgaggaaggggctgtcccacctcccattcctctcggtctcagtctccagcccttgtaggtgagccctgggggtgccacggggggcgcagccctccctctccactcccaggccccctctccctctgtctgcagcagagctggctggggcagtgctgtgtcttggggcagatgcaaccttggctttctgatggaaacaggctcatgtcagggaagcacactgaacagcagcaaatgaggctcaacctgcaaacggcccatgctttccttgacctcccagaaccctgttgctcaattctgctttctgccagtcactccacagcaatggctcggtaaagggatccacttaaccctgttgaatccatgttttcttttgtttcatggtttcagaatgttccgcggaac

SEQ ID NO: 187694 - DNA, 560 bp, Homo sapiens
tagatttgtaaaataccaatattgatgaatgtgggtaaacagttcatttcatgatccacactgctgtgaaccaaagaagcagaggtaggcttgtgtttactgaaatccagactaggaaagagaaacctatagctcttcttttcccaattcttagactgagacacaacctagcaaataaaatactatcttaaaatgcctctctttataacaatctacagaggtgattcaactgtgatatctgaaaatggaaactctgtaattctggcaactcaattacaacaacctttgaatttttgacaaatattctccaactgtaataaaaggttctcacctttttcagaaatcaaaaatcactaacttctacatcactggaactattaatatccatgctcccaagcatggagacagtgggtatagagagtgaaagaatgagtctgattacaggtaaatcttgacatataaaaactataacctatttactgctataactggcatctaacaaaacgcattattttgaactatggatgaaagccatatctatcctaaatatcttctatcct

SEQ ID NO: 187695 - DNA, 581 bp, Homo sapiens
acttggaaaaacgttacatgtctcattcatcttagggaaccgacccagtcccaaaatatgaactagcctgcctcaccagttattaacaaataagatttccttttgaaaacctcagggataggataaaggactgtgttgcagtgtaaccagacctccccctcaccccccagttcccccaacacatctcacatctcactggtggcttctcttttctttttcccttgccttttgtgtcagttttttttctttcaaatatcattatgggtaatttggaacatatacataatatggtggttacttatatctattagctatttacatattttattctgtagattgtcagctcatggtctctgctgaattttgatgtacaggtgtttcccttgttgatttgtatgagttttacatatataaagagtgttaatcttttatcacttttgcagtaaatgttttccccagattgtcttctaactttttaatgatgcttttgataatagatttggtttacatttttattggtcaaattgattgatttctaaacccccttcagatcatggtaatttcttccattgcttttacac

SEQ ID NO: 187696 - DNA, 246 bp, Homo sapiens
agtgagccgaggtcttgccactgtactccagcctgggcgacagaacaagactccgtctcaaacaaacaaacaaactaaaacaaaatttaaaaagcgttttcaagggaagtagatgatttgaaatgaactgaagatccaaacgtaaataagtagaagtcttacatctaaatattttaagaatttttacatcagaggtgtgaagaaacagatgttaacatgactacagagggccacgagggagaccaa

SEQ ID NO: 187697 - DNA, 312 bp, Homo sapiens
ttgacctcaggtgagccacccgccttggcttcccaaagtgctgggattacaggcgtgagccacctcgcctggcctctctatagacaattctttagctaaattgagggctgaggcttggggagtttcagtaacttgcccaaacagcttgtcaggggcagaagcaggatttgactctaggcctaacagatgcctttaaccagtaagcccatgtgtatcttgcgtcagcccaagaagctgtaggatttttggaggagtttctatgaagttgtcagtagggtgatttttctcctctgatctttgccaatggcctct

SEQ ID NO: 187698 - DNA, 723 bp, Homo sapiens
aagaaaactttcttaattagcagagtatcatctctgtgatttttgtgattatttgatcagtgtgctgagatggatacaatggcaagtaatgacaaaattaaaataagcatgcagatttttttaaattaagtgccaaaaaataatgggtcgtgcaaagcccttaaaaacactgtggcctaattctaaagttttttgctactatgctacatcacacccaacatcagttaagtgctcattctgtgacaggtagtacattacactttagcaaactacacaagacccctatgtgataatatgcttcggggttgtaaggttgggtgcgtttagtagtcttgaattttctgggagtatacaaacccaatattagtctagatgcccaaagatctatttagacgtcaaagtagaatggagagaaatcttgaccacaggaagctgtgttgtggcatttattttgaaattattttttcttgatttttttgccttttaattcttttgtgagttttataatgcacagaatatttttaaattattatatatataaactgattagtcttcaatttaaacttacacctctggggtcttacttgggtttctcctaacaatattatacacatatttgcaataatttctctcatactgcttttaactcatttaatttttcaactttttaagaataacaaaagtgatattaactgtaaaaatgctgaagtgacatatgaattt

SEQ ID NO: 187699 - DNA, 771 bp, Homo sapiens
atttcaggctttgccctccatgcagtctcttgttacaactactcaactctgcccttgtaatacaaaagcagccagagacaacaagtaggtaaatgagcatggctgtgttccaatagaactttatgtatgaacactgaaatctgaatttcatgtaattatcacatgttttaaatatttttattcttttgatttttttcaaccattagaagaaattataaaaaccattcttagctcacaagctgtacaataaaacaggcagtgggccatatctggcccacaggccaaatgtttgccaacccctgttttagaatattctatgtaatacagagtgtaaacaggtgacatctggctccaatgaatgatgaaagcacctcaaatttatataaggattcagaatcatggagaaaaggttagagaattagcaacagatttatttcatgcaatggtgacaaatacaaacacaaatatttatctcatgcgatggtaacaaatactgtactgtactccagcctgggtgaccgagtgagcttctgtctcaataaataaatcaataaataaaataaaataaaaaataaaaagttaactagcattcctgaattttacccatcctggatctctgctattcacattggtgtcaccaagtgcattttccaagacaagacagtcattgcctaaaacaaatttcacctgttgtatgcaattatttggttctcctgtgctgttacagaattcagggatcctaatcactcgctcaggcgggaataaaaaaag

SEQ ID NO: 187700 - DNA, 821 bp, Homo sapiens
agttcctctatacactttcctgactcaagaggaaggactgtccgtcccatccccacaatgccccttcctccaagggagggaacagaaatgggattgggttgggggcaaacactgccctttgccctgatatggagaggagagtaaagaccctcggcccgggaaggtggaccctgcctccaggcatggcctaaggccaggtgaggagtggggggctgtcccaaaagtgtgacctggagctcctgggcacctgaacacccgcgggctgctcctggtgactccctgtgtgcccctaccccctgcagagggtcacctccaggagcccacttgaggcactgaaggagggccaggcacctgcctacggccccaactatatttgatttttataccatgttggaaagttcacatttctactcactaaatacagcagtttgattttgcatcataacctaggctttattttataagttctaatttataagtagcatattacttgggattttaattgagtaataaacacattattttaaatgtgctcagatgcagccagcatttcacactcatctgagtttgcaggtgttttactaaactcaaatggcctttcttaaattcaatagaaacatgctcagaattataatacaacaataatttaatagttaaatataaattcatcagtaacagcacaaataaataggtttcctccttagaagaaaattaatttttatgaaagtcagaagcttggttttacttttctttttaatgtggaataaactgaaatgtgtcaaaatctcaccttcatttttttctcaataaattaaacaccg

SEQ ID NO: 187701 - DNA, 199 bp, Homo sapiens
tcacacctgagtcaccctcagttggtttttagagaccaccctggcagtagaacaccagctcttcaaacctgacctggttgctgccaggtttttaacacagtgctctgcatactgaggtaagaacagaagcaaacaaaaaggaacactatcttggcttgcggaagggctcattcttggttcttcttccacctctgttgag

SEQ ID NO: 187702 - DNA, 182 bp, Homo sapiens
gactctagcggatccttaatcttccgtgcccacagtaagattcttggtaagtatgtataaaatgagttaactaggttcggagtcatttcaaaactcataattttagtcatttaaatgtacatcagctattcatatctatacataagggggactgataaaacaggcctgagtcatttggcttt

SEQ ID NO: 187703 - DNA, 421 bp, Homo sapiens
tactgacgatgcttacaggaagaacaaccactgtgtgtgaagctttgtgccagctgcccgatggacagcgtaaggcataacagcctcaggcccagcagcgcaggcaacgaaaagtagatgaacgagtccatgattttaacaaaatacactgaagaagtcaacagggggctgtagtggagaaggctaggagttggggtgggagtagggatccctcttttagcatcagggaaggcctcactgagtaggaaatagaagctgaaacctgaaggctgagaagcagccagccccgtgaacagggaacagcactgcaagcagagggaacggcatatgcaaagaccgtgaggtggggaaacgttaggcaagtttgaagaacaggaaggaggccagtggaggtggggctgggtaagggacagtgagagtg

SEQ ID NO: 187704 - DNA, 326 bp, Homo sapiens
gactgccgggcactccctggagttgggtggggaggtctgaggcccatcctcccactctcactgtcgttgggccaaggccagagcctggggacttggccaggtctcggtgttggccccatttgcatctctgtccccaaggttagtcggggctagaagggaccttttgggcccagctcttgcttcattcctggggccagcatccctcacacacacacttccagggatgaggagctcacgcagcccctccatgggacaggaagacccttcttccatgcagcttgatgtcactctctcactgggtccagcccctctggggcttcaaatct

SEQ ID NO: 187705 - DNA, 349 bp, Homo sapiens
aggtaggattttatgactctgcaagaactatagcattattgggcttggagtgccctctaatgcagaaatgactccggtggccgaaaacatagatcaagacgttcaattcccatcaaaacacctggaaagctttccaaagaaggactggtacagcaaagactacaataaatactactaactccccagacattgataggcatccaaaggcatcaaggccgttcgagaaaatatgatctcaccaaacaaactaaataaggcaaccatcaccaattctggagagagagagatatgtgatctttcagacagagaattcaaaatagctgttttttgtttgtttttttggcttttt

SEQ ID NO: 187706 - DNA, 423 bp, Homo sapiens
gctcggcacctccttactggcttcctcagaaaataatttgggtcacgatagaaaagacaaaagagttaagcaggtttgtattgaaagaagtgacaaattgcagttaacttaaaatagtttctattcttgctaatcttccaaaatagcgacccatcaaaaaatcaataggttttgagatgcattttaaaaatgcagagtgtgcaaaatatataagcgaagatcatgggatacataagggaccaagaaattgttctgagttgagatgataaccatagtaggattgtggtctgtttagtggaaagcctaccggatgctgagattgactgtctagtacctgtataagtaatttcagagatggctgcagtttgaaattactcttttaaatactctgtagttaatccttagcattgtctaatgtggttc

SEQ ID NO: 187707 - DNA, 703 bp, Homo sapiens
tacaggaaaaatagttactgtacactggagaaacatgacaaacaccatccttaaccaaatgatgaaggttaacatcaccagtgacatcatgcaggcatcgtatactcccagatatgatgcgacaagaagggcaccggaactagtggtattccttctcaaaatctgtaaccacagtcaaatcacaagagaagcaacagactgagcctgtactcctcaagactgtcagggttatgaaagtcgtctggcagttcctcagatgaataaacagagatttaccatatgacccagaaatcccaatcctaggtacatagccaagaaaaatgaaaacctatgtctacataaaaactcgtacataaacgtatataacatcatcactcataacaggcaaaaagcagaaatcatctaaatgaccatcaatagacagatggataaacaaaatgtggtatatccttagaatagaatattattcagcctttaaaaaatgaatgaattctgctacatgctacaatacacatgaaccctaaaaacatcatgctaagtgaaagatgcaaaagaccaaatacggcatgattccatttatatgaatgtccaggatgaacaaatccacagacacacaaagcataactgtggttccaagagctgaggataggtgcaggtttaactgcattgaagcacaatgggagttttggggacaattgaaatt

SEQ ID NO: 187708 - DNA, 436 bp, Homo sapiens
  misc_feature (324)..(324): n is a, c, g, or t
gtgccactgcacttcagcctgggtgacagagcgaaactccatctaaaaaaataaaataaaataaaaagttaacaggaagagggctaaatttcagggtttcttaacttaggttaaagtacttagggtccaaggataggcttcacctggtccacagacccttaaaattataagtgaaattttctgtatacagatgtggacatggttctggcaagagagactctgatcttcactacattttcaaagatgctctgaccaattgtgaattagtcacttaagattttggaagaatggctcctaaagcgggtgatcatctgccctcacganttacagtgcctcagcatcacatgctattcattttgcacagcaaaaccaggaagtgaatatgactgttatccctacttcacaagtagaggacactgaggccctgagaggttaa

SEQ ID NO: 187709 - DNA, 499 bp, Homo sapiens
tggaggtcaattgtatagcaacatgaatagacttatcactactgaactgcccactttaaaataggtaaaatggtaaattttagtgtgtgtgtctgtgtcctaccacaattaaatttgtatatagtaactgtatggatgtgtttcaccaagacttatcaaggtaacttcatgtgcaaatggtgcagaaagacactagatgcagagaactgagtatcacgatgctcgtacccatgcctgagattcacaaacactaccattttcagtggatgcagacagagtgattacaaagggtgtgtgtttgcatgtgtgtgtgtgctgcccaggaatggtcaatccacatgtttggacatatgtataaatataaataataacatacatttcaaaagtaggtatgcttcatattaatatcattttaaatccaagattactcacataactgctgttttttttctcccctagcaccaggaattctaaagacagagtattcatcctgtatatc

SEQ ID NO: 187710 - DNA, 246 bp, Homo sapiens
gatccacagaaacagggaactcaggcctcagagactacatgaacatgtcctcccaaatcaataaaaaaaattaaaagtttctacatgcaagtatttttgtgggtcaatatacaaaaacacttctccatttattttattttatttcatttcatttttcgagccggagtctcactctattgcccagggctggagtgcagtggcgatttacaggctcaaacccactgctgatcagtccacagaacagtt

SEQ ID NO: 187711 - DNA, 245 bp, Homo sapiens
gatccacagaaacagggaactcaggcctcagagactacatgaacatgtcctcccaaatcaataaaaaaaattaaaagtttctacatgcaagtatttttgtgggtcaatatacaaaaacacttctccatttattttattttatttcatttcatttttcgagccggagtctcactctattgcccaggatggtggaggacgcctgtagtccgagctacttgggaggctgaggcaggagaatggcgtga

SEQ ID NO: 187712 - DNA, 446 bp, Homo sapiens
tactattatgacaaatccttaaggataaagcaactgacctcaagacatagagatatccccagttaaagagagtattttcgagacaacaggagaaagccctggagggagaataaagcaggcccaggactacagggcatatggcccaggcatggcttgctctcccagccctgttcctcccgactgtcaacaggtggccacttcagtgcaggctggggatgggctccgggagcagatttacacagtcctctaaccccggggcttccacaccacatggagaatgctgtgacacactttcctagtgcctcccttctggggtctacacatttacagtcttgcttctttgaactctaagaagttcctgactggtgattctatattttaaaaaaagagaggtaatataatgtgtcagtgctttgaaaatagtgattgaataagacaaaatagct

SEQ ID NO: 187713 - DNA, 433 bp, Homo sapiens
tcctgtttcatttctaaatatatatttatttcaaaatggaacctgtgtatctattttcacataacaccatattatgagactttccccatgacatggaatattctttgaaaacaaaaagtctttgtctgttttctgttgctattacagaagacctgaggctgggtaatttatcaagaaaagaaatgtatttggctcatgattctggtggctggaaagtccacgattggacagttgcatcaggtgagggcctccgctccaggcagaaaacaggagggaagtggaagtgtgcaaagatcacatggcaagaaaggaagcaaaaaagaaaaactggggaagccagacttttgtttttttcagggtctcacactcacccaggttggagtgcagtggcatggtcaaagctcactgcagcctccaacatctaggcttaagc

SEQ ID NO: 187714 - DNA, 464 bp, Homo sapiens
tcacacacacactcacacacacacacacacacgtgtctccaggcatcccctgcagcctttggcttcacacataccacatcataatgctgctgggaatggggaggttcctccgctaggtccatcgaagcacccagattaaaatatggtgaccattttattattttatcagaccagaaaggagaagccacggcccttaaaatataggtgcccttaaaggaaaattgaatgaataattttaagctgaatacgagtgtggaaatccaagttacatgataaccgctggcctgatgttctcatggcacagtcttgattaatactttttagcctactgctatatgtttactgaacccctcaggacaactttaattggttctgaaaaagcctgaatatgccacattattctagaagatgacagtaacaggttgggtgacctgtgaagcagattcgcaatcaaaatgaatgat

SEQ ID NO: 187715 - DNA, 675 bp, Homo sapiens
aaagcttaacatcatgccagctggtgagagagaagtgtttgcagggtccagctctagtatcacaagcagcacaataaagagtggatttggaagcaagaggcaatgaattgataaacaacacatccttagtaagtgctataagaatatttgatcaggccaggtatggtggctcatgcctgtaatcccagcactttgggaggacgaggtgggtggatcacctgaggtcaggagttcaagatcagcctggccagcatggcgaaacctgtctctactaaaaatacaaaaattagctgggtgtggtggcgggccccagtgatcccagctacttgggaggctgaggcaggagaatcgcttgaacccatgaggcggaggttgcagtgagccaagattgcgccactgcactccagcctgggcgacagagtgagactgtctcaaaaaaaaaaaagtgtttgatccatagaataaatagctatgcagcatacagaagactttaatcctatctagctcatctctgggaatgggagtaacaagctcctataagagcagacctagcgttgtgcttaggggcctggactctggagtaagatgacatggatgtgaatcctagctttgccttctgctagcagttaggcagctcatctaacccctctgtgcttcagtttctccatctgtaaa

SEQ ID NO: 187716 - DNA, 381 bp, Homo sapiens
ttttttcaggttagacagagaaaaggagtaaaaatattaaaaagttttgaggcaaaagcttgaggtttctttggtctctattgtctcagtaaaatagtagaaaggagttcagatgctaaagatcctgacaaaggtttagaataagcatcagaagaaatataataggaaaccatcacaaaaggaacacaaaggagagctgagctgcggtaaagatgccaggactttgctggaatctcagatgggcagactttgagattttccccagcaagataataaagttcaggcttacaaactacgattggtgtgaattactgaaatgtaatacaatgtgaggtctggcaaagaaatatgacagagggtcccgggttgttaacaagctca

SEQ ID NO: 187717 - DNA, 453 bp, Homo sapiens
cagcctcccgagtacctgggattacaggtgtgcaccaccacgcccagctaactgggaaactgccacttttaaaaccatcagatctcatgagaactccctcgctatcatgagaacagcatagaggaaaccgcccccatgatccagtcacctcccaccaggttcctcccttgacatgtgagaattacagtccgagatgagatttgggtgggaacacagagccaaaccatatcagcttatgattagcacgtgaaagaaagaaacagtgatgaaatagagagtaacaaggggaatccactttctataggagatgaggaaggtgacccctgagcggtgacttgatagatgacaacagcccagctctgggaaaaagaaagcagaaagaacaagggcaaaggcctggggtgggaaagagcttggcatatttgatgaactgggaaaaaaacccaggaggct

SEQ ID NO: 187718 - DNA, 760 bp, Homo sapiens
gagtattccaagatgcagtgctgttttttattggtatgctgatccagaagtttgtgtgggaaaactctcaaaaataaactctctttgtagaatttctctttatttcaaaaaaggtacttttgtcagtagtatttattcagcatctgatatttatacattgtttttcttgatgcactggaggaaataaagagaggatgggattggttgacctgagcttacattctaagagaggaaatactatacggtactcatctatactatatgtggacatttgcaattgctgcgtttatgtttcgctactggagaatattttcttacagttatcttattgggtaaccaagtttactcctttaaactactaggaaaaaagtttgccattttattttatagaggactctactgtcttttaaaatagtgaatattgtctgaattttaagattctggatcattagcaggactgtcattttattggtgcacttttgagctcctgtactatttagatttactggaatccttttgacttgtcagcatttctgttttttcctgtttttcttttttctttatgttagcagatgggaaaaatagaaaagtagatgttttgaaattctgttaagaggaaacagctgtgcccaaggctaggagagaaccattgaggggcagaagcaggcaggcacgcctggagcctctacctttgggattgaagtcttcacccaacacttctggcatctcagatgtgaatccagttggagcacccctaaga

SEQ ID NO: 187719 - DNA, 265 bp, Homo sapiens
agtctcggttatgtctttataagcagcgtgaaagcagactaataccccaacacttaatacagatctctcatttcatcatgcaacaatcccttaaaggtagatacttttttctccctattttaaagatgtggaaactgaggcttagagtgattaagcagcttgggaggctgaggcaggagaatcagttgaacctgggaggcggaggtttcagtgagctgacatcataccactgcactccagcctaggcaacagagtgagactcagt

SEQ ID NO: 187720 - DNA, 297 bp, Homo sapiens
agtatctaacatatagtagacacccattatctattcaattgtcatcaaaatactacaaagtgactgcacagtggtaaatcaaaatatctattttggggtgggaaggggaaagacaaaatcttgcttacagaagaattctaaatgacgtaggtaaatactccccagtccaggaggtgatgcctaacaccccacccaccacagacacagatgcacacacacacacatacacacacacacagagtccttcagggtaggctacacttaggaacttgcttccaaggaagatgggggaaaagg

SEQ ID NO: 187721 - DNA, 489 bp, Homo sapiens
tcccccaagtcagcagtctagtctatccagcaaagtcaacctgtcattgcttccaaaagtctcgcaggaacctcaaacacagcatagtcctaacacttcatagctgaatctgtttacaaaatccacccaatgactacccaccacactcaaatccttccaatgacaagaaactcatcaactcccaaagcagcaacccttttcacctttgcacaactcctgagaattagacagttcttccctatactcatgaagatctacctctccaaagggctgatcttagccttgccttacccctttgagctatttagaaaaggctcaagaacagcagaaactacgatttgcagaccacttccaatgtacagtgtaagctttagtttactgtggcatttaaccctcacagcaatgcaagaggtagaaactgttatctccatttggttgataatggggtctacagagctgagagagataaaagtgatctggctaggatac

SEQ ID NO: 187722 - DNA, 439 bp, Homo sapiens
tctgtctcatagttgagatccagttttgaagatgtaaagcaaaaagcacaccgctgatttttctcccctcttgcatgtcaaaatactatgtacataccacataaacactagggtatctgttaaatatattttatgttgataccgtttttacttggcaaagttggatgcacaaagaatagtagtctcatattttaacaatgctgtggatttcttctgtagacatttatttcctgttacctgcaaggtgtttaggatttggatttttttttgatgttttggtctttttggatagttgctaaagttcttcactattttacctaggctatccttataaataaataccatgaatttttaaaaccacacaggtcacttaaagtctctctttcttggaggtacctaggctgtaaaatgaattttgtgagttatctagagtaagtaa

SEQ ID NO: 187723 - DNA, 338 bp, Homo sapiens
aggctgcaaggcaatggcgcgatttgagctcaccacaacctccgcctcctgggttcaagcaattctcctgcttcagccgcccaagtagctgggattacagacgtttgccaccacgcccagctaattttgtatttttagtagacacggggtttctccatgttggtcaggctggtctcaaactcctgacctcaggtgttctgcctgccctggcctcccaaagtgctgggattaacaggcatgagccaccacgcccggcatgatttgggaaatattttaaagaaaagaaaatgaatgctgacctaatagagagtggagagcaaagcgaaagagcagttatg

SEQ ID NO: 187724 - DNA, 530 bp, Homo sapiens
gttagcttagatttagggtgcagaagacacagtgccttacacctcagtagtactgaaaactgaaaatgcatgattttcaacataaaacaactgagaattaggccagcaaggcaagaatatgaagtacttatttttcataatcaaacaaatgttctttttaaaagctattgtctcaattcacattacctgtaaagcttcagaacttttctccccttgtacacaaaaatgcatttaatccccaaggacgtaacattaggattcattgaatctaggggactggtgatcccatgtggctgaacagttgaatttagcagttgaattagcctgaatttattatagtttctgtgagtttcataggtgaggaaggccaaacttgagatggttaataaggtgagaagttggaagaagataaattgggaaacgctggtctggtaacagttttggaaacaaacgtatcctagctataagcagtaacttattagagagatgtattccatgtcattaatttcctggtactactgaggtgtaag

SEQ ID NO: 187725 - DNA, 269 bp, Homo sapiens
gttagcttagatttagggtgcagaagacacagtgccttacacctcagtagtactgaaaactgaaaatgcatgattttcaacataaaacaactgagaattaggccagcaaggcaagaatatgaagtacttatttttcataatcaaacaaatgttctttttaaaagctattgtctcaattcacattacctgtaaagcttcagaacttttctccccttgttaaccatctcaagtttgccttcctcacctatgaactcacagatactatatat

SEQ ID NO: 187726 - DNA, 539 bp, Homo sapiens
agatgttctttatgaggttgaggttcccttgtatgtctagtttgttaagtgtgtttatcgttgaaagagtgttgaatttttgtcaaatgtgttttctgtgtctactgagatgattatgtgtttgttgtgtgtgggttttaatttagtgtattacattgattaattttcatatgtaaaaccaacatattcattctgggatatatcccattggttatggtgtataacccctttttattgctggatttggtttgctagtactttgttgatgtttttttccatccatataagatattggttggttgtttttactcgatgtgtttggttttggtatcagagtaaaactggcctcataaaatgagttgggaagtatttaatcctcttctatttcttggactagtttttgaaggattgtacaacctttaaacatttgatagaatttactggtgaagacatctgggtatgggctttgtgtaaagttgtgtttttgcctttttggggtgtgtgtgtgttagttattttttgttactaatctattatag

SEQ ID NO: 187727 - DNA, 416 bp, Homo sapiens
gagcaagcagacacatctgtgctgatccttcgaccttccttttttcttcgtgggttccagaaatgagagacaggaaagttccctctggtttgattcccggcctgacttttctgctgggggaagtgaatatgcttgttctcactctgcggggtccccctggcctgcccatcccagtgactgcgaaccagggtggtgccagggttggctccaaaagctggtgatccagacccttcctgggcccctggagaccccagtccctgtgatgtccttgcccaagttctagggctgcagtggccgtaggtgactggcccgggcaccctccctttgcgggagcctcgtgaaaggatactgtaagcacagccgcagggaggtcaccactggccctaccacctctcgctcggtattgaatggctagc

SEQ ID NO: 187728 - DNA, 439 bp, Homo sapiens
aggcaccagtggattgatgctcatgaatcaggtcccgcccccaggccaatcgtatgagtcttgggatggcctgccgggtaaggagcaccaccctgtgtggctgacccctcggcactagcatcagtgccatcgtgaccagcttttctggagtgctgactgtgtgcccaccgccacctcgagagtccccatgatatctcagttcctcctctctgcaaccctgcgaggtggctgctgctatcacccccgcttcacagaggaggaaaccgaagctcagggctgttgtcccccagggttcgacagcctgcgtgtgctccctgccttccagctttccttgtgggagcccctccacctgtttctccccatctaaccaagcaggttacaccccagggcttctgggaaatggacctcaggtttgcagctgatcttggtccaaatatgt

SEQ ID NO: 187729 - DNA, 613 bp, Homo sapiens
ccattgtcttccaattcacaaacatgtggtatctttccatttatttatgtccttttttatctccttcatcaatgttttctagttttcagcgtacacatctcttacctccttaaatttcctaagtaattttttgatgcaattataaatgggatagttttcttgatttctttttcagataattagcatatagaaacattgtatgttaactttgtatcttctaattttctgaacttattaagtctaatagttttttggtgaagtctttagagtttttttgtttgtatctttttttttttttttgagatggagtctcactctgtcacccaggctggagtgcagtgctacagtcttggctcactgcaacctctgcctcccgggttcaagtgattctgctgcctcagcttcccgagtagctgggattacaggcgcccgtcactatgcctggctaatttctgtatttttagtagagacggcatttcaccatgttggtcaggttggtcttgaactcctgacctcaagtgatctgcccgcctcggcctcccaaagtgctttgattacaggcatgagccactgtacccggccattgtttctttcatttctatgtctttgacaa

SEQ ID NO: 187730 - DNA, 294 bp, Homo sapiens
tctctctcctgccaccatgtgaagatgtgcttccccctcaccttctgccgtgattgtgagtttcctgaggcctccccagccatgcctcctgtacagcctgtgaaactgagtcaattaaacctcttttctgtataaatgtccagtctcaggtagttttgtacagccatgtgagaaaaattagagacctagggttagaattttagagtacaaggaaagggtttgttaacaataggaacaatgatgaagacttgcatgacactaacagagcatattttcttctttttttctagatct

SEQ ID NO: 187731 - DNA, 271 bp, Homo sapiens
ttatagaacatacaaatctcttgtttcacttagtgcatctgtgaaatgagagtagtcttaaatccttcacaataaaaaaaaaacctctgtctctgaacttctcactctggctgcaaaatggaatccgataattcaacattcattctctcttttttccttaaatgcaactctttatcagggacagcaatgtgccaagtttaaaacatttccagactcttctagattgaggatagagagtggctaaattatttccaattctggccaataacaa

SEQ ID NO: 187732 - DNA, 304 bp, Homo sapiens
cattcatcagacaaactgataaaagacactatctggttagcctgtccagatccattagaaacctcaccagaagattaggtcttactttcagataggtagttatcaggtaatgaagtctctcctcaatgcgcctggctcccgagcgaggttggcacttcatcctccactacatcttctatgagtatctaaatcctctctaccctcttctgactcttctgtcctctgctggatggggttcagtgagagaaatgcatcctagctgagcagacgaaaaaaaaaacaacatggttgggcaatcagctat

SEQ ID NO: 187733 - DNA, 422 bp, Homo sapiens
ttctttgcctttttaaaaacaagtgacaactctgcctagttcttaaaataaagatgaagtgatacttttctttttttttccctaacacacaagtaaaaaacatttgttcatttaataaaagtccatttgaaaatatacacttttatttttcttcatgacacttgtcaacatataacataatgaatattttatattttatttcattcagaatgtaaattgcttaaagacagaagcgtttgttttgttcaccctcgtatccctagttcttgaacactgcctaggttaaagggatgcttatgagctgagggaaagaaggaagtaagggagggagagagggaggaaggaatgaagggcacaactttaaataattcatcttctattaccttcttgggtattaatcaaatttaggctcagaaaaagtc

SEQ ID NO: 187734 - DNA, 395 bp, Homo sapiens
ctttatccatccacccatctctccaaccagctgacatttacggaatcctactaagcgccacagcctgtgctgcatgcagggacccacgatgcatgtatcagcagtgcctctggggccagctgttggcacagagcgggtgtgcagagccccggatgtgggaaagtacgagatgttccagagatgctcttagtcagcactgactgagtatttattgtgtgccaggtgctgccctatgagcctacagttcctcacttcatccttatcctcaccacacaaggcgcacagaactctcacattcccacgcagcagatgagggaataggcacagagaggttgtgtcagggctgaggacacacaggcctggaagggatagaggaggcctcaggtggcggaagt

SEQ ID NO: 187735 - DNA, 637 bp, Homo sapiens
cctcagagtacacttcagatgcaaactagaaatatgtcagtgtaaactatgaaagtgcagagcctttgcttcagtaaaactagatgcagcaaaaccacgggctttatgcatgactggtattgtaagagaggccacagggagtagaattaaatatgacacctccttgacatatgatcaaagctccttctaacctcaatttggggcaccatatatcacaaaccagacagcaagaaattaagtaaatgtaagtcttttttttatgccatcccaattacatcttgctcagttcacaaacatgttccagcaaatgctggaggagtttttctctctttaggagtcctccctcactttaccctgtttaacaaaagacctcacacacttagaaagaggatggaggcaggccagcttcaggacatgctgcacagggaggactgactgtcccaaagagggggctctacacccctctgacaactccacaatagaccagctacacacaaatgcctgaaataaggaagtccatcaagaaaatgaacagttggcgagatcaaggcttctggcccaaagggcctgcagctggtctggccattcatcaaaaaatctgaatttaaatggagacacattcgactgtgacatgtaa

SEQ ID NO: 187736 - DNA, 729 bp, Homo sapiens
aagaaaacaaatggagacggggagtatggtgccagtcctttaaatctcctggacatcggccaggtgcggtggctcaagcctgcaatcacagcaccttgtgaggctgaggctgaggtgggtggattgatcgggcccaggagtttgagacttgcagtgagctatgatcacgccactgctctccagcctgggcaacagagcaagacgccgtctcactatacatatgtagataaagggaaaagagagatgggaagtatggtgagagatgagactgaaaaggtaaactgggcccagttttgaagagttttgggagccatgttgaagagttagcactttatcatgattgcgttgggaaaccacggtgccccagccaacactgcattctttaccctaagagtgaaaacaatacggctgggcactgacgactcacgcctgtaatcccagacactttgtgggtccacggcggcggattgcttgagcccaggaatttgagaccagtctcagtctggacagcatcccaaggcctcatctctaccacagaaaatactaaattggctgcgcatgcgtggcacacacccatagttccagctttctgggaggactgaggctgggaggatggcttgaacccaggaggctgaggctgcagtgagtggtgattgcgccactgtaccccacctggcaaccgagcaagaccgtctgagatgattaagagatctcctctactggtccgcc

SEQ ID NO: 187737 - DNA, 597 bp, Homo sapiens
aagaaaacaaatggagacggggagtatggtgccagtcctttaaatctcctggacatcggccaggtgcggtggctcaagcctgcaatcacagcaccttgtgaggctgaggctgaggtgggtggattgatcgggcccaggagtttgagacttgcagtgagctatgatcacgccactgctctccagcctgggcaacagagcaagacgccgtctcactatacatatgtagataaagggaaaagagagatgggaagtatggtgagagatgagactgaaaaggtaaactgggcccagttttgaagagttttgggagccatgttgaagagttagcactttatcatgattgcgttgggaaaccactgaagcttaataaacagagaagggacatttctagatttaccttttaaaaaagttactctggctgcaggttagaggataatgataaaaagctagttatcatgcctgaggagggttgaggctaagtaaactgggtgtcttcggctctgcatatccttagaaatacaaattactctctgtctataaaagacacgggggcacatacatttctgctgtgattgcatcatcaggtctaactggtac

SEQ ID NO: 187738 - DNA, 247 bp, Homo sapiens
tgctgagattacaggcgtaagccactgtgccctgccctttttccaatttttaacacaactgactccattttgattctgataaccttcaaaagtgcttgctcatgaccattcaacagtcaaagcaagcagcttgttatgagctttgacactggatttggagaaggaaaaatttatactaatgacttaatattagtagccacacttctaaccagaatggtcattagagataagcacagataataggcta

SEQ ID NO: 187739 - DNA, 200 bp, Homo sapiens
ccatttccacactcacacctattaggtaagaagtaaaatagtactaaagctccactccctgccagcatggggccaggtatttacatacacatcactcttatttaacaactttatgagggcatgaatggccctatttatagatgagaataataaagctacagcatgtacatcgctcaccaacatggagaacacgtccgata

SEQ ID NO: 187740 - DNA, 351 bp, Homo sapiens
catttaactgaataagtttaatgaggagcataatatgtttcatgaagggtcattagttttatatttcccatttggaccattacccctcttccttaaccctctaaaaacagtttactcacaagaagaaaaggtatcgggagagatagaaataatataatttccagcctttacacagaaatacaaatttctgggccataccagagtagtgctacagggtcataggaaattgtgcagtgcgtgggtgttgaaaaagattccttcttttagcaaaaaagctctgcgtaattatcatgtctttgcttgataattagcactactccaacaatggcacaaagactcacaaaggcttaa

SEQ ID NO: 187741 - DNA, 351 bp, Homo sapiens
gcagctgtcactcatttacttacatatgatattgaccaatctctagttattatcactttgaggatctatttatttttaagctgcatttaaaaacctcatttactgtgttaaaacagtaatgacataaaacatacatacacatagattagcaaggatgctgggaacctggcattacactgctcttggctaagtaattttgtgattaatttgtgtgcgggcctacctgcaaaataattaatcaggcacccctggctgtgcaatctgccccactcttatttcttcttcatttttccatcacccacttcttgttcccttttccatgcatgattaagaaactgttatttatctttt

SEQ ID NO: 187742 - DNA, 296 bp, Homo sapiens
aggactttcctggacgcaggttcttggagaccctgactccaggcacctgtgaagaagatgaaagtctttctctggtaggccaggcattcagcgcatgcgccgtcctgacagtgcggagcccaacagctatattccccggtgtctgcgccagaggagttcaccagcagcagctggctgcactggctgaagtgcttgattctgaaagacagatggtaggggcgggacgggcaggcgatggggatggcccgatactcctagtgggcagcatttggtctactgacagtcctccctcccat

SEQ ID NO: 187743 - DNA, 177 bp, Homo sapiens
aaaaatgttccattatagttatttcactaaattgctatggtaactgggtcgtagccatttaagaacatatatacattagaaatttgaccttaaatgattaatacttaaatccagctcaataataaataagagcaatatcaatacaaaggatatcagaataactctcctcccttaaaa

SEQ ID NO: 187744 - DNA, 328 bp, Homo sapiens
cttgatgccctttcattcagctaacgttaacctgtttggtctcctgactgatgctgggaaaatttaagtttgaggcacttaataacaatgagcaatgggtagccccaacaaattgggaggaaaagataatggaggaagaggagagagggagaaatagagagagggtgatgcatgggagagaggaagagactgacgtcaatgctgggctgaccatagagtggtttacactgaaaggtgcccagagctttctacgtgttctaacaggctcccttgctcctaagcatcattttttactatggcagcgtctccttactaggcttctcaagtt

SEQ ID NO: 187745 - DNA, 753 bp, Homo sapiens
catcctcccgagtagctgggagtaaggcgtctgccaccatgcccagataatttttgcattttcagtacgagaggggtatcaccatgttggccaggatggtcttgatctcttgacctcatgatccgcccacctcggcctcccaaagtgctgggattacaggcgtgagccactgcgcctggcgctcctggagcagctttctaagcctcagagtttgcacttagagaacagcattttaggcaaaggggattaaacatttacataccctggaggcggtgggcgtcatgatctccctaacccaggaattctcaaactcagtactatggacatttggcaggctctgtttgggggaactgtcctgtgcattgtaggaagtttagcgacctctctggtttctatccctggatgcaaacagcccctccctccccagtcatgataaccaaaaatgtctgtagacactgccagatgtccactgggggacaaaattgccaccggttgagaacactgccccctctccctcagggaatttgtgagttgtacatgctgagtaggtctcctggtccttacccaggagccatggacttacctagcagaggagctggtgagggaagaagcgccccccaccgacctgcaaatttttgccatgtcccaacctgcccatgtggcctggacatgtggaaatgtgtcaacaatcatgacagatctgagagcagtacctgtcccagtgcgcaggcagccaatggctggggcctgcag

SEQ ID NO: 187746 - DNA, 460 bp, Homo sapiens
actgtgaaaggtccacacaacgggagaactggccttggctccacaggccacaacacgttctcagggaaacacccaagggcatctgtaagaggcacgctcagatgccacacttcttcccagcctttgcagggacctaatctcgaccaccatgtaatctccagcatttaagcagttgatctcactttagaagaattaggaggtagtgcaagagggacctggagaacaagactgctgaaagtcacatgcggcagttggaggctggacggctgtggctccctgtatgggtctctgtctgggaaatgcaacccattctaataaagagctttgaaagctggcctcgctttgacaggcacgagtggccctgaatacaaacacagccacctgcactcctttttatttttaaactggaagctaatgctcttgaacatccacatttatctatgttagaatattcacttat

SEQ ID NO: 187747 - DNA, 664 bp, Homo sapiens
tgtttgatattccggactttgcatctaaatttatacttgacaagttaaacttttcatcgtgtgcattttcccgtaatctctcaacagccaaagacaaggatagacggattagtgatgggtgaaaccaattcaacccaaaatggcaacacttaattacaagtcttgttgtttataattaactgtgtaaatcactaacttgaaagtttcttttcaaagtatttaaaaccaactcttttcccagggggatttaatactgtatattattgcatagttaagtattattttgtttgctctatgaacaagatgtgaaaatggcacattttaccgactatcttgctagcaaatttggaaaatgttcatgaattgcattactagcaccatttggtgcttctcagtatttttggacattttttgccttatatatgaaagccaatggaaagacaatccaactacccaaatgactatgagtaatttctgagagtggagagtgagggtcaaattctcaatttcagaaaataaaaaaaaaaaatgagcttccaaatgtatcttctgagatgcattcatttttctgtgaccaatatttagaataaaaaattactgagaacatactctgtgctagataccatatgttttctaatattctaatttagtattttctattgta

SEQ ID NO: 187748 - DNA, 280 bp, Homo sapiens
tgaagcggcacatggtcaggcttcattagctttctcaaatcattctgaagcagtggatgaattcttcccttaattcaaagaaattattgtttcctattgtcctcagtgagaagcatctttgctattactcagactagggaaactaccaggacacccattcaacttgtttctttctcaatttgtggttatgaacaagaattctcagtaagtttggactcaaccattgacttggaggaggcatcagtgttaggagtcagtgacttgctctgccctagaaatt

SEQ ID NO: 187749 - DNA, 457 bp, Homo sapiens
tcagtcggacctaaagcaagcccgacactgtccgcaacataggccaggtaggagatgtctttttttttcccctttcttttagagacagggtcttgctctggggcccaggctgaagtgcattggtgcaatcataacttactgcaaccttcaactcctcaagagatcctcctgcttcagcctcccaaagcactgggattacagattgagccaccgctcctggccagtacctgtttgggtccatttctgttaattctaacagctgtatcaattcctgattggtttccattgattgatttcccccacccgtatgggttgtgtctttctgcttttgtgcgtacctggacattttttattgtgtaccagccattgtgaattttcactttgtcgggtgccgagtatttttgtatttcttctgtaagttttcttggcttttgttctggaacagtcgggttactta

SEQ ID NO: 187750 - DNA, 481 bp, Homo sapiens
cttatctgtcttcacgtcaggccaatacttctgtccagtccccaggccatgggaccctgctgggccctgtgtatcacagtcttgttactcaagtgcagtcagcttcatcaacgtgcagcttcatctgaaagcttgtcagaaatacaaaagctcagcccttctgaatcaccatctgtattttaatggtgattgtatgcacatgagtgtttgaaaagcacagtgtcaaagagtccactccggctttcttctcatctctctcatcacaaccctctccaagggacaggctgataagaattttggttgcttctagaccaagtttcacataaccaagtccctggaattctctgccctaaagctcacagtccacccccatttaaggcatagaatgatctttcactgatgcattcccattgtgcacctggaactcaaatacatttgtgatcaagggataggcatgacgacgtggggagaagttgtttgg

SEQ ID NO: 187751 - DNA, 510 bp, Homo sapiens
ggggcaggacttgggagcctggctgtcatcggctcacatccacctctgccagcttgtgtggggtagggcctccttggagggaggccaccaggcacaggcctcgagtcaccagccagccctaggatatgaggagtcctgggctcagtcagagggcggtgccccaggtacccctgagagaggaacaaaggccccttcatggcaggagccagagagccagatcctgtgaggacaaggggcctctgtgaggagccagggtgggggatgcagccgggcctctccacgaataaccacacgtgtgcacacaggcacactcgccaacccaaacagcacatagggagccccactcgacattagacacacacgcacacagttggagccacaggtacgtacacacactgctgtgatgacacaggggcacacgtacacacacacacacacacacagaaacacacatgcactcaccggctctcacatctcaacagatacccgggcccacacagaccacacccg

SEQ ID NO: 187752 - DNA, 204 bp, Homo sapiens
aacgctgaggcagaagatttaaggccagctgacgtgtgttccagtagggtcaaacacactcctgtgagaaaccctgccggtccagaacatccatctagaggaaagctcatggctagggaagctctggatgggcagggtttctcacaggagtgttttgaaccatggaacaactgagctggccttaaatcttctgcctcagccttt

SEQ ID NO: 187753 - DNA, 202 bp, Homo sapiens
agaaaaagacagctttcacggcagagataagataattgagctgtctggcatagtgactcaaagccattgaaggttctagtcaaatgattcctctggttttgactttttaaatggctctttcactgttgttgcctctggcaactaccattataattggaggaaattttgttccgctaagaggctactccatttacggactcaa

SEQ ID NO: 187754 - DNA, 800 bp, Homo sapiens
aaatgtactggcttcagacacatggaagagagtctgagaatgttttgagtaggaatgttgctggagataaattatgggctaagaaatcagctgactgagtcgaccgtatagattttcccaggtcacattacttttccatttgtattctcaatcgcttttgaacacccttcatgcaagtcagcatatcaaaagatgattttatacaaggattaccgatttcaaataaataaagaaccaaaagaaatagatttcaattgcatccagactggttggagataaaatgaggagtgctacaactcgctgggccagcacagacaggagccctgggagcgctctcctctgagatcgatgaagtgagaataggccccagtaaagcagtggagaaaactgtcttcctgagccccctctagcccaaggattccagctattctttgcactcagcccccatggggttaatgatgaattattacaaacaatgaagacatttaaggctgaagactaagccatgatttgctgttctctgcctgttcacccccaactatttctaatcccactatttcctgatgagaacacacacttaaccagatattctacttcatttttggaaaatctcttgaagttgctttggatgagctgaggaaatgacatcatcaccccttgctggctgcaggagtgactgagcccttgggtttgggtggggttgggctgctggtgaacgcagaaggtgtggcgctgccgagagaactggaccccagaaccgctctgttctccaagtcagagtgacattcactcctcaggtg

SEQ ID NO: 187755 - DNA, 287 bp, Homo sapiens
ttcctggcttctagaacaccgatttactctctcttcatgagatccactattttttaactcactaacatttgcagcaacatggatggaattggaggtcattatgttaagtgaaacaattggtttcacttgcatttttgcaagtttaccagattaaagtaggctggccttatagcagcaataccaggtactgtggaatccaagtacccaccacttaggttgacagccttgggccttctttctttgcctgtgtagtgggggcatatgcaagcacaagggcagggtggggg

SEQ ID NO: 187756 - DNA, 207 bp, Homo sapiens
tcactcaatcctgtcaacctgattcatctatgaagtacgtgggaaagacatcgtcactgccccatcgtcagtgccctgtgtcatccctttacaaagagaaagcagcagaagtgggatatttgttgagtgtttcctatgtgctacacgtcctgctaaacacatcctgctcatttcatcctcctgaggaagatacactgtcatcatttc

SEQ ID NO: 187757 - DNA, 413 bp, Homo sapiens
caaaaaacatatacacctatattgtctggagaacatgaaagatgttaagaatgtaaaaagggatgatcttctatccccttaaaaacaaaaagacaaaggatccaatggccattgttaaaccaataattagaagtaatttttttaaagccacaaggcactgcatgaatcctgatattagaaattctttccactgagtatctatagaaggaagatcaagtatctgtttcctcttctcccttccaactctgtcaccttttggcccctttccttttctacctctctctcttcctgtttccttctatctcccattccaatcccaactctttgcactaaccaatttcctttttacctctcattttactgcaactgcttaaagctgccaaaaagtttatattcacggaaagaaatacaag

SEQ ID NO: 187758 - DNA, 637 bp, Homo sapiens
tccagctgtgagctgctgtcttcagcaacacttcctagaagttaagtagaggaaggaaaaggaggtagtctttgcctcagtaccacaccaattaggggttttgaaagaagcttgggctggggatgaggctgttgctattgattaaggtagggttctgatatcatctccttcagacactggctatatttcctccattcgccttgacaactaacagcaatgatggtggattaatcaacagtgtcctctaagcagtgctcccacagcacacataaatatgaagtctacataagtctttcaggatgcagaagagtcacaaggaatgaactggatatctgttgtgagaaggagaatgttacctgtgtcttgcagaagccaaactcttaccaagcagaaaaaccagaatccctcagatggaatttcattattggatcacattttaaagtcctaaaataccatttatgggtaataaatgtgaattcaatgctatattttgaactgaatgctcttttgaattaaaacacaaggtaggctctaaacaacaggcacagcaaaggactcttggatggtgacatggataaatgcatgaaaagacatgttttcctatcaaggagtttctattattaaatttgacctatct

SEQ ID NO: 187759 - DNA, 506 bp, Homo sapiens
atgcttaaacttatccatcctctgttccaaatagaaatcagttcacttggggagggctaccaagctgtgtattttcatggcctccctctacctcttggttgaatgtgcctcactgctctgaagctgtggggagtgagagtggcctgctcctttgtagtaaaacctctgcttacaagtagggcacagggtgggaaaggtaacttcttgccttgcctctcctggtggagaaactgttccttacaagtaagctggagtgagggcaattgggacacaggattttccagctgccacacctgaagaccttatgtcctggaatgaggagttggtgtaggaaggaaaccccagacttctcagctgtttctgcgtggacagagcttctgtcctacaaaactggggatgacaagaaatgctggcacccaatcttggggtaatgcagtatctctggagtaggacctgggtagagaggaaacctctggcttcttggctatatccatatagagtggagc

SEQ ID NO: 187760 - DNA, 574 bp, Homo sapiens
atagaattagttccatattggtggaacacatagcagaggtttgagaagggagaatttagtcaactgagaagttctcatgaaaggagcaagttgaagatcacagagacaccttgaaacaaaaagccaggaataacttccaacccaagaggagaacagagaggcctcaaaaccaaagctaggataagaaacttgtagcccaagagttatcttccagacaaagaagcctgagattccaacgcagcttcagagagtactcactcaaaatgttactgaaactgaaggctttttaatgacttagccatgcatgcaaaaggcattccctaaggtggcacagaagacggagcccccatatccaaagatagccaaggagaaagaaagacccctgttgccagagccagtgggcaaaggcaacagaaaaggagacaagggtcctaatgggatgagatcctttcggatttaggcttttatacaaactcctgagaactggcaggttgacagccataaatggggtaccaacatttctactcattggattacaagttctcaggcatccaaaatgatgaacaaaatgaca

SEQ ID NO: 187761 - DNA, 352 bp, Homo sapiens
agtaagcatataacagaagtaagtaaatatttttctcagtgttgtactcattcaaccaggagagcttgaattattattattgtgaaaataatccataaacactttatgtcatttattttaataaatcattaaaatttaaaattacctgtttttttaattataaaattcatcaaacaaaaaactataaagcataatacaataaatattttactcattacttaattttagcaaatctgacaatgttgacagataggcttcaaattttaaaacaaaaatttacaaatgcattggaagcccttgtgtatcccaatctgattccatcacaatctatctccatacctgcattgctccc

SEQ ID NO: 187762 - DNA, 598 bp, Homo sapiens
ttcactccctactccacttcccatagtctatgaactaaaagggaacaaaatattcttatcatttattattaaaaagataaaatattttagcatataaaaccaaatttatcttatgctactaaaacagaaaataaatgcttaacgagttttacttgaattacattaaatcacaaagtaacatctcaatacacacacacataatattcaggaaaaaaatttaaaaaacaacaaaacaataaaaaataatacaaataaaaatcaatataatagctatttacacagcatttgtattgtattaggtattataagtaagctagagatgatttaacgtatacaagaggatgggtgggtgcagtggcttatgcctgtaatcccaacactttgagaggtcaaggtgggaggatcgcttgagcccaggagtttaagaccagcctgggcgacacaatgaaactctatctctacaaaaaagttcaaaagttagctgggcatggtggtgcgtgcctgtggtcccagctaacttgggaggctgaagtggggggatcgattgagcccaggaggtcgaggctgcagtaagccatgattgtaccagcgcactcaa

SEQ ID NO: 187763 - DNA, 307 bp, Homo sapiens
tatttacaagctgatcctaaaattcatttggaaatgcaacatacacagaatagctaaaacaatcttgaaaaagaacgaagttggagaactcacattttccaatttgaaagcttactacaaagctacagtaatcaagacaatgtggtattggcataaggagaaaaaatgtatatcaaaggaatagaactcagagtccagaatcagagcctcaaatttatggtcaggtgattttcagtaaagatgccaagacaatcgggcaaagaatagtcttttcaataaactgtgttgggacaactggacagctgcc

SEQ ID NO: 187764 - DNA, 716 bp, Homo sapiens
acatgtattaagtgataaagtcctttaaaatcctaccaccagagagtaccactgttggatgtttggttatgttgtcctaatatctcattattatttgaagtacttaaaacattaattatgaaatacttagttcattcaaagaatatatgtatgcatctgtaagttatgaagcctagcaaccaggaacccattattcagcttaaggtacagaacatcaccagtgctgttgaccacagttctatgcctgcaacctctccccagtctgagctaacaaatattctgattttcaaaaattactgtcttttttaatgttttaattatgtgtatgtaccctcaaaaagttgttgcctttttgtgttttaacattataaaaatagtttaatactctatattctttgtaacttgcttttttcctgtttaacagcatgctactaagatttgtctgtgttgatgcaatagctctagttcattcattttcattgctacatagtatttcagtgtatgaatatactatgagttatctgttctcttgttagtggtatttgcacgagttccaattttacaacagtatcctagatgaaaaatataaatgcaatttatggtaccattgtgatgtttcattaatcctttaatgttcattaacataaatggcaccacttaaatcaaactaaaatgtcaggagagagctaagaataattttgctggatcaatgactt

SEQ ID NO: 187765 - DNA, 469 bp, Homo sapiens
actctagaggatacaccgacgcgagggattcactggcatgttcacagctgcttccggaggataacactggggctattgctaatgtgagaatttgcagactgtttaccagacattagaaaagtgaaacaggtgtatattttacttgcttatagcagtgaaaccaacttttgcttatagatttgtcattatttttgtccatggcatcataacatcatcctctgaaattcagaattatagagagagagttttcctccttctctgtcccagactctatacttaaatcatctttactacctgagacttacaaatgacattctggacttaagtgatgttgctttaacttagacatatgcccaggagtgctgtttatccttccatgatggtgggagtagaatagatgatagtagacagttaatctacatttatatttagctgttaagtctttggcagaaagtggggaagacatgac

SEQ ID NO: 187766 - DNA, 446 bp, Homo sapiens
tgattcactaaatctgcaattctgcatttctaacaagcttcctgggaacaccagtgctgccggtctttgtgctacactttgaggagtagggaactgaagggcccctgcttgcctccctggcctcatttcttgacacttccccaactctgttccagccatgcctcagttattccagctcccaaagtgcatcctgcttttgctcactgcaaagcctttggacaggctggcctccctccccagagcactctcaccctggcctggctgctcctacaggattggagatggcactttgcttagaagccttccctgattctctaagccctggaaacaaagagcatgtttgtggcctgggtgagaatgatctttatgctcagtgataaggggtgagagagctggcctataaggtgcagggcagcagccagaggtttcgttctacagcaggttct

SEQ ID NO: 187767 - DNA, 377 bp, Homo sapiens
gaggggctggggagggagcgtaggaactgagctgggccagggcagtgacagacttgggcctgcgcagctggtgggggaagctggtaggggtccggagccctggcgaggacacctgtggatcatgtgccctgacctcttgaccccacggtcctgagcccgtaggtgggatcaacaaaccaccggatgtgtatgtcaacaaccgcgtcagtacgtcagtaccagtgttgatcaacacctcgtgtgcctgggtcgctgcctacttcctgcttttgggagagtgggatgggccaagtgggtgtctagggagggactggatggcccccacccacatctcccaccgacccccccggctcagtgtccctgcctggagggaggcc

SEQ ID NO: 187768 - DNA, 687 bp, Homo sapiens
gatcataggaaggtaagactaaaatttttaaactagacttcttaaaatatcattcagtgcagtgatgacctctcatcatacaaatagatgagcaacttggctcaaaggaactatgttgtactttaatccattttcatcagacgaaataaatgtactctacctaatatgcatccatgtcagaaatatcacagcaagaatcagaaaatccattctgggctgggcgcagtggctcacgcctgtaatcccagcattttgggaggccgagatgggtggatcacttgaggccaggagtttgaaaccagcctgacaaacatggcaaaaccctgtctctactaaaaatacaaaaaattagccaggcatggtggcgtctgcctgtagtcctagctactcgagaggctgaggcataagaatcgcttgaacccgagaggcagaggttgcagtgagccaagatcatgccactacactccagcctgggcaacagggctacactcttgtctcaaaaaaaagaaaagaaaagaaaatccattctgcagcttgctaaggtgcccacataccctgaaaacgagtatcttgccaggtatggtggctcacacctgtaatcccagcactttgggagaccaaggtggctggatcacttgaggccaggagttcaagaccagcctagccaacatggtgaaactccatctc

SEQ ID NO: 187769 - DNA, 510 bp, Homo sapiens
ataaaaccagatttaatactacttcactgaaatcacacaactacttgatttaatctagtcttttcccaccatttccttttgagctctcaagcatatctgcctgtagcaagttctcatctgcacacgtcctagaaaagccaaaagcaaattctctactctgaaaaactgaggccaagaaggccacatcctgtgataaagccaaggacgcataatttcaagtccaaggatctctagaagaattcgtgtagctgcacatccattatagctcaatataacacaatgcagagtgaatataaatctaagactgacacacacacacctcccccaaaccaagattattgtcaaaagtatcggaggccaggtgcgatggctcacgcctgtaatcccagcactttgggaagccggggagggcagatcacttgaggtcaggagctcgagagcagcctggccaaccatggcgaaacctcatctctattaaaaacacaaaaattagtggggcatggtggcacg

SEQ ID NO: 187770 - DNA, 651 bp, Homo sapiens
ctaactgaccttcatataaacataatcatagagttgtatctccttcatgtctgaattatttcactcaatataactcgctactactttttaaatataggcattcttcggagttgcttcctaaggcctttcctcactctaacaatttcattcaatccaaaggcctcaaaactactatctgtctagcattttcattcaatccaaaggcttcaaaagtactacctcaatagagatgatcctggagctcttcagacatacttgagtattcttcaggaacctcaaacttaacacatccaaattctaactcatcatctctccccttaccctaaaaccaattcctgctcgcatattctgcctgttggttaatgggattatggtcacccctaaactagaaacctccaagtcatccagacatataaaatgttgttggtctagttcacaccatatccctagttaccaacatgcaggacatacagtagtctgcacttatctgcaattttactttccacagtttcagttacccacagccaaccacagtccaaaaatagatgagtacaatacagtaagattgacagaccatattcacataacttttattacagtattgttattaactgttccattgtattaggcgtcagtatagagttaatctct

SEQ ID NO: 187771 - DNA, 119 bp, Homo sapiens
agtgtttgatgggactcttctgattacctttctctccatagtcaactttggatagggtgctcaggacgttactttttagtttaataaacctttaggtttagttaaccatcttcattttt

SEQ ID NO: 187772 - DNA, 686 bp, Homo sapiens
tggctcagctatgcacaatatgttctttgttacactaaggtaagcactgaataggcacagaatcccatactgagccccattctaggtggagaatgagaagaggggaagtatgttgtatgtctgtactgcaagggtgctggccttggtatcttccacagtggaaagtaaatagatggtgcttaaaatggaaagaaaatttaaatagcagtatacacatcacttagcatatggagagaaacatcagaagaaacagctaactgttgaaagtggttgcctctcaagaatgtgacttgggggaaaagacagggggctgctgtctttcttaagagccttgggagcacatttgacattttaagccatagtatgtatatgtattcctttgataaaaattaaaactaaattaaaaggagggaataaatgtgcaatgctctagccatactttctaatcattaagctgtctcaaaaggcatgcacaacatgcctgactctttggagaggacacaaccttcactcctttctccttctcttccccattaacctgtattttttttctcttcatagtctttaagatcacctcatttattaatttgctggtgtgtgtgcttaatctgcctcctccagcaggaggagaacagggactgtcttgtttcttctgcatcccttgtgcttagtccccagcacacatt

SEQ ID NO: 187773 - DNA, 342 bp, Homo sapiens
tgccagtcaatgatggagaagatactttaaaaaaaaagtaataagcaatagcacaaagaaatagaaagttgagaggaaaattcgatctactttacttttcttgtagtctatcaagagaagtcaatcaaaatatttttcaacctgtacacaagacagaaatatttgctttgacttcttaaactgatttgacagaattttaagctttatattctatataatcacaggaaaattctatagaatcataataacccatttaattaggcaccttttcttgtagtatctatgccaaatatacatgaagatttaattcatttgaaagatacaggccgggcgcggtggctc

SEQ ID NO: 187774 - DNA, 1111 bp, Homo sapiens
taaacaatctggtacatgcaggcaatggaatattatttaactctaaaaagaaatgatctatccagccatgaaaagaaatagaggaaatttaaatgcatattgctaagtgaaagaagccaatctgaaaaggctacctacagtatgatatcatctatatgaacaggcaaaattatggggacagtaaaaagatgaattgttgccaagggttagatgggaaggagaggtgaataggcagagcacagaagatttttagggcagtgaaaatactctgtatgatactacaataatggataaatgccattatacatttatcaaaacccatagaatgtataacactaatagtgaacattagtgtatcaactatggactttggatgataaagatgtgtaactgttttatgataatgtgttgattgtaacagatgtatcactctggtgaggaaggctgtgcatgtgtgggggaagaaggtatatgggaattctctgtactcctgctcaatttagctgtgaatccaaaactactctaaactctattttaaaaatagaaaaaaggcacagattaccaatataaaaccccagaaaaagcctgggattttttaaaaccccaaaccttcatattctaagaatgtaatatgaagaactttctgtcagcaaatcagaaaatcctcatgaaatggaatttctaggaaaatacaatttaccagctcaagagtaaatagaaggctgggcatggtggctcgtgcctgtaatcctagttctttgggaggccagggtggatggatcatttaagtccaggagttcaagaccagcctggccaacatgtaaaaccccgtctctactaaaaatacaaataattagctgagcgtggtggcgtgcacctgtaatcccagctactcaggaggctgaggtgggggaatcacctgagccagggaggtcaaggctgcaatgagctgagatgctgccactgcactccagcctggacaaccggagtgagaccctgtaacaacaacaaacccaaaagaataaatagaaaatttgaattgtttatatctgtttaagaagttgaatctgggctgggcacagtggcccacgcctgtatcccagcactttgg

SEQ ID NO: 187775 - DNA, 850 bp, Homo sapiens
ctaaaccttatgaagacagtgctgaggcactttccttttctgatttcatctttttgggaatctgttttattgaaggtagttagtagttgagagtgcatttgctacaagcatatacttgtatcttcctagcttcatgaggaacagaaagaggtggatatggctcagggtgtggcagggacaattgaggacaaagtcaattcaaatttgtgggtcagaaagaatttttgtggacgtagtgtttttggagaaactctggatggttatatgtgcatgccttttcttcaaaaggaaatacgcaaggttgtagcatctaaaaataaacataagagtcagacaccaaataaatcaagttttacataacagttgtatgcccagtttgtttaggtgagatttcacattacagaaagtatttgaggagcatgaaaatgggttatcttctgtattttccagtttggcaaaagttcagaatttcatcacattgctttgccctaattttgcccagaattttatcttagcctctctctgacagtgatgaatcatgctcaaaagccattctaattggacctttttaagacagggaaagggatcagtaggcggattggaagaaatttcaagtcattgaaatattccattgagatttcctaaagggacaaaattgggcaaacataagaaactacgacttagatttggctacgtagtagaaagtatctcccctacatacatacaggcaattgtatgtatgaatcatagggtatatgtgtgtgtatactacacacacattcttttaaagagaattcatggaaaaaaaagcagttggagtgatcagatgtattgcaaaaacatacagaga

SEQ ID NO: 187776 - DNA, 389 bp, Homo sapiens
ccaaaagcctgacatctgatatgcagtgaaagatgacatctttctccatcccattccccaccgtgcaaaggaaagaggagcaccagcaggggccaacagctgacattaatttgccttctcttcttccttccctcctcttgcaattccgggagtatttaacccttcttcaaggtctcaagaatagtgaaccctaacagactcagccattaaaaatgctcagcaagtagcacattccaagtaagtttagagacagaccagaacaggaactgatgtaaacactattctctagagtcacagagatctttcagaaactactttgtgaatctgcaaagcttgggttagaatgaggtttaccagatgagttgactgggtgcctggagaatgaagtg

SEQ ID NO: 187777 - DNA, 436 bp, Homo sapiens
gaggctgaggcaggagaatcacttgaacccgggaggcggaggttgcagtgagccaagatcgcaccactgcactccagcttgggcaacagagcgagactgtgtctcaaaaaataaattaaaaaaatattttaagcactcatcttgttgattaggttgtttagattttgacatatatgcttaatttttgtccatttgacctgtctcctactgagaatggtgcgtttaattctccctataggtatttttctctatttttcgttgctttccctctagcatctgctttatataagtgtaatgtgtactatctccaccgaaggacaaccactatcttgacttctcatcttgcacattaatgatttgcatgttttgtctttaaataaatggaatcacatagcatgtatgctttttggttctgacttattttattcagcgtaat

SEQ ID NO: 187778 - DNA, 283 bp, Homo sapiens
ttcacctaatcattctatggtacatttggtaagtttttaatgccttgagaaataatttttaaaataggatgcttccctccttatttattagattatttctgtaagttagattcccaaagtgggattactgggtcaaatgttataaacatttttaaggcttttgagccattttggggttgaggaaaaacccttcttgttagagctctacagaagccaagtaatgatgctaaatttcctaatttgccgtatgtcactgtttgctctctgaacttaagtgaacttt

SEQ ID NO: 187779 - DNA, 292 bp, Homo sapiens
ttagacacctggagggcaatgatctggaggacactaactggaagaaagcataggcatccttaattgttgagaggacagaactggtacctgtgggtagctactatgtgaatggagatgtcagcttggtatgagaatttcataatggtagaacaaggtatcttgagtgacactacattacctactactagaggtgtttggtcggtgacagaatatctattggtcaaactcctgcctttggtcagagtttggactagttgatttttagatcccttgaagcattaaaatcttatga

SEQ ID NO: 187780 - DNA, 354 bp, Homo sapiens
ttgttatacaaggtggtgagtgtaatgatggtgttatgcagtgagaacatccagcctggtgctttttaggaagtgaagccagagctgtgtcttaaggcaggcagagtgtctgtatgtgaggtggaggtgagggagaggtgaaaggggagaacagttgggaagaaacagaagaaactgaagaaattacgaaaagtgacgatatgaagaaaggctaggaaggaataaaaagcagggtgtgaagtgagagccatttgatactgcttaggcaataaatggaaggtggaacatcagagatcaggcagattattgtcttctgtaccaaataactaagctctatactgaaaaccaacaatt

SEQ ID NO: 187781 - DNA, 682 bp, Homo sapiens
caggcgcccaccaccacgcccggctaattttttgtatttttagtagagacagggtttcatggtgttagccaggatggtttcgatctcctgacctcgtgatccgcccatctcggcctcccaaagtgctgggatgacaggcgtgacccactgcacccggcttgagcagggtgttctagggaccctggtgggctgtgtctcgggctgttgaacagtgactttgctgggcagcagatggttcctgggttgggacagtgacggtcatccttgcagtttgggcatcaggcggacgcacagtgcagactcagtctgaaaatagtcttaggagacttcagtgctgttttgtaaaaccaactgacataaagctgccgggatcctatttcaaataaatagtgttttagagagcttattacaacactcagcgtcccgacccctctggagaaacctgtggctcagcatggaagcatatggccagtgcatcacctggccgaggccattcccctgagttctgtggcgagagctgtcaactgacggttccagagtggaagcgtttctgccgggaaggcccaggccgagggcgatggtttctgccgggacggcccaggccgagggcgatggtttctggtgggaaggcccaggccgagggcgatggtttctgccgggacggccgaggccgagggcggtg

SEQ ID NO: 187782 - DNA, 178 bp, Homo sapiens
aaggtctttatgaatttctcagaaagccactaaacgagatgtgccttgaaaacgaaagagtaaactaagcaagaggaagatctggggtctagggaataagaggtccagacccaaagagaggccaaagatattccttgagtgaaggcaaaggggagcactagaatgtcagctgtgcaga

SEQ ID NO: 187783 - DNA, 203 bp, Homo sapiens
agtaggtaccctttctcagccatgtttacagccctgtctccatctctgtcaatcctaggttcttagcacagtatctggcacataacaggtactcgacaaactaaatctcctcgtctgttattttcctcctgttatttttttttttaaatctctatcacactctatcctcaggcaaccgcctcacaacctaactcctagcccta

SEQ ID NO: 187784 - DNA, 306 bp, Homo sapiens
taatatttccccccaatgccttctccaagccttggctccatccactaacttggtttccataggaatagacagagctatcaagtggcacggagtcaaacagcacaaatgagagaaggagaaaatgttactgtcaaaaaaaggcttttctctatgagaggaaattatggaaaggtattcttgactctgaggcttccttatccaatgccagatttttcaggtgctcttcctgactaatatagcctattttatttagattattatgaaaattaatgccttcattggagagccttttatatataggaaact

SEQ ID NO: 187785 - DNA, 601 bp, Homo sapiens
tgaacatgaaggcagagatcgggaaggcgccgaggaataacaaagatttccagcaaagccaccagaagctgggagaggaggcatggaatagtctgtccttcaagcccgcagaaagaaccagccctgccaactctttgatctcagacttctggcctccagaactgtgagacaagctacttctgtttaagccacacagtttgtgatgatttgttgtggtagctctagcaatctaatacaggtcttaactcacctgtttccagattgcattgcaaagcagaacccacttctgctctgccttgtattcagaggcaggccaaacacaaagtgattcaggaaggtcagaatgaaacattaagtaaagggatgctgaacttgacttgtgctaactcacaagagtagattgatacattatcaggaattttatgaggtgagtgttagacacagccattgaaaaaactataatcctgggtaaaaactcgtaattaaattaaaatacccagtacttgctaattattcaactacattttatccttcttcccatggaataattatgtagaatggtgtgctgtttcatgtctccctctccccccgccaacctcca

SEQ ID NO: 187786 - DNA, 402 bp, Homo sapiens
ctggtggggtcccggtattgtgtccgaggttagggatacaaaaaattggggggaccctgacctggtggctgctctcttcctcccatctctgcattccaaacgcacagcccagccttctgcattgaaaggaatgagaaacaaaacacactaaacagcacaaagaatgagaatgaccccttaagcacactctggggaccctcatttccaaagggtggggtgaggcttttccacaacggttgggaattatttaatggagttctcgccatccttttatcaaattgttgctcagattgggctgcaattttcttcaaagggaagaagaaattgctcgtagatggccttgataatagaaacacaaatttgtaaaataaattatttctgcggtaaaagcaatctcgggtg

SEQ ID NO: 187787 - DNA, 524 bp, Homo sapiens
gagtaactcattttctgttagtcggtagaatgcactttgatattaggaaaaaattgtttttactttaatgtgttccacattggagacccttattaaggctggtatgccttatttcccagttgtactaattaaaagcactaattatttccatgcttgtatgttggaaccatcttttgatgcatgaaagtttcgagagaattaaaaaaaaaaacactgactttgggaatcatgtgagagaattaatattctttagttccaattaaaaaaagttttatgtcagttcattagactttagcccctacttctttgatttcaagtctgtcctgaatttctgccatgtggagagcagttgccagaatcccctttctttatacagcagttactgtaattaatgctgaaaagggacttacctcattcctgatgctaataggcctcttaaaagcactttttatatctaatccttgtcatttatgagggagttgaactagatttccaagatccttcctacatctaaagtcattgat

SEQ ID NO: 187788 - DNA, 472 bp, Homo sapiens
gagtaactcattttctgttagtcggtagaatgcactttgatattaggaaaaaattgtttttactttaatgtgttccacattggagacccttattaaggctggtatgccttatttcccagttgtactaattaaaagcactaattatttccatgcttgtatgttggaaccatcttttgatgcatgaaagtttcgagagaattaaaaaaaaaaacactgactttgggaatcatgtgagagaattaatattctttagttccaattaaaaaaagttttatgtcagttcattagactttagcccctacttctttgatttcaagtctgtcctgaatttctgccatgtggagagcagttgccagaatcccctttctttatacagcagttactgtaattaatgctgaaaagggacttacctcattccctgactaaatacacctggattatttctcaagagagcaagaaatgggttgattta

SEQ ID NO: 187789 - DNA, 235 bp, Homo sapiens
atttggccaccacgcctggccgaatccctggttttaagcaaaattttaatatggagtttatggttgttggtataatgaaatgcggcaccatagcagttgatttttgtctttcagaaccacactggctttttgtattatttcaaatttgatagatgcccaatgtatgtaacaaaaattttccctcacgtgtatttctttctttatttatttgtatgttttgagatggggtctgact

SEQ ID NO: 187790 - DNA, 200 bp, Homo sapiens
taatgtatatagtatagaggctagagactccttttctttgttacattgtgaactttatccccaaatggcaggcgtgcactggggctatgaagaaaccaagacttttcttgatatcctccgtgagactcggttttatgaagcgcttcaagcctgtcatcggaagagcaaattgtatggggctgtagctgaacagcttcgag

SEQ ID NO: 187791 - DNA, 1086 bp, Homo sapiens
  misc_feature (62)..(62): n is a, c, g, or t
  misc_feature (162)..(162): n is a, c, g, or t
  misc_feature (191)..(191): n is a, c, g, or t
  misc_feature (336)..(336): n is a, c, g, or t
  misc_feature (344)..(344): n is a, c, g, or t
  misc_feature (627)..(627): n is a, c, g, or t
  misc_feature (919)..(919): n is a, c, g, or t
  misc_feature (964)..(964): n is a, c, g, or t
  misc_feature (995)..(995): n is a, c, g, or t
atgaatgaatccaggtggactgaatggaggatcctgaacatgagcagtggcattgtgaatgngtccgagcgtcactcctgcccacttggatttggccactacagtgtggtggatgtctgcatcttcgagacagtggttattgtgttgctgacatttctgatnattgctgggaatctaacagttatctttgnctttcattgtgctccactgttacatcattatactaccagctatttcattcagacgatggcatatgctgatcttttcgttggagttagctgcttggttcctactctgtcacttctccactactccacaggtgtccacgagtcattnacttgccnggtttttggatatatcatctcagttctaaaaagtgtttctatggcatgtcttgcttgcatcagtgtggatcgttatcttgcaataaccaagcctctttcctacaatcaactggtcaccccttgtcgcttgagaatttgcattattttgatctggatctactcctgcctaattttcttgccttccttttttggctgggggaaacctggttaccatggtgacatttttgaatggtgtgccacgtcttggctcaccagtgcctattttactggctttattgtttgnttactttatgctcctgctgcctttgttgtctgcttcacttacttccacattttcaaaatttgccgtcagcacaccaaagagataaatgaccgaagagcccgattccctagtcatgaggtagattcttccagagagactggacacagccctgaccgtcgctacgccatggttttgtttaggataaccagtgtattttatatgctgtggctcccctatataatttactttcttctagaaagctcccgggtcttggacaatccaactctgtccttcttaacaacctggcttgcantaagtaatagtttttgtaactgtgtaatatacagcctctccaacngcgttttccggctaggcctccgaagactgtntgagacaatgtgcacatcctgtatgtgtgtgaaggatcaggaagcacaagaacccaaacctaggaaacgggctaattcttgctccatttga

SEQ ID NO: 187792 - DNA, 377 bp, Homo sapiens
caagggagtcccaaaacagcaaccagcagatttctcagcagaatccctgcaagccataaaagggtgggataatataatcaaagtgtagaagaaaaacaaaactggcaaccaagaatacttaactcagcaaagctattcctcagaaataagggataaataaaaactttcccaaacaaacaaaaactaagtaagtttatcaccactaggcctgcctaacaggaaatgctaaagggagctaagctgaaataaaaggctcctaattgatacataaaacttataaaagcaaaaagcactaaatggtgtaagtaagacatagtcatattcagaataatactgtaaggatgatgtgtaaaggaattttctctgtattatgagag

SEQ ID NO: 187793 - DNA, 341 bp, Homo sapiens
taccagatagagtagatccttgctcttaagttccatttttcacacagttttagggaacagacacaagtccatcaagttctttgcaactgtgtagcaaggatggcctttactgcagtttccaataccttgtttttcatttgtgtctgaggcctcatcagaattgcctttaccttccacatttctaccaacattctgattatgaccacttaagtaattgctaggaatttccacactttccctacatttcttcccttcttctgagcccgcatcagaattgcccttattgctctgttcatggcaatatggacttttttctagcctgttcctccaaactcttccag

SEQ ID NO: 187794 - DNA, 254 bp, Homo sapiens
  misc_feature (77)..(77): n is a, c, g, or t
  misc_feature (109)..(109): n is a, c, g, or t
  misc_feature (114)..(114): n is a, c, g, or t
ggggcgtctagaggtcccactgatgctcacgctccagccagtgagacacttttttaacagaaatgccaagaattatngctagacaggtagatactattttttagacaantattngctttataaagatattttccttataaatacatttagaatcataaattaagtgatgtagtttaatccaaaaaacttgtcctgtttcagaatgttatggaatgatttcatattttcttgaaaatatggccgggcgcggtggc

SEQ ID NO: 187795 - DNA, 619 bp, Homo sapiens
atgaggatccggactggcgattttgtattttaagtagagatgaggttctgccatataggccaggctgtctcgaactaccgaccccaggcgatcctcccgcctcagcctcccgagtagctgagactacatgctcgcaccaccacacctggcagtagttctaattttaattttttgaggaactgttttctatcgtgatcgcatcattttacagtcccttcaacagtgcacaagattgcccatttctccacatactcaccaacagttgtcatcttctgttttttgatagtagccatcctagtggatgtgaggtgatatctcattgtggctttgattttatttctctgatgattagtggatgttgagcatcttttcatgtgcttgttagctatttttatatcattggagaagtatctattcaaattctttgcccattttttaaatcagttgtttaggttttttttccagagacagggtctccctctgtcacccagggtggagtgcagtggtacaatcatagctcactgcagcctcaagctccatgactcaggtgatcctcccacctcagcctcccaagtagctaggaccacaggtgcacaccaccacatccagctagattttt

SEQ ID NO: 187796 - DNA, 386 bp, Homo sapiens
catttttgagcccctgcatttgagtatggaagataaccaatatggaaacattcatcaagcaataaatattcatgaggaaccgacaatatataatgtgctaccttaggcactgaaaggaagtcctaacagtggatatgtggctgaaattaaattttctgataaaattaaaaaaaaaaaaagaaaaaaaattagctgggagtgcaggagtggtggcatgtgcctgtagttccagctactctagaggctgaggtgggaggattatttgagcctgggaggtcgaggctgcagtgagctgtgattgtgttactgcatttcagcctggataacagagtgagaactgatctcaaaatataaaaattaaaaaaatgaaaataaagggccactga

SEQ ID NO: 187797 - DNA, 586 bp, Homo sapiens
attgctttacctatgaaataaattcccagaacttagaatagttaacagcaatctgtttcctagaactagctgccaggactacacctggacatctgttatttacagcctcattattgacattttgtcaatagttctgacctatgccatgtaatctgttatagtcatagcatgccttcctggaaattttcatttgcctctattcctattgtattatttgggttctttccatatttgtttgttcaagattctctcatcattaaaaacaaataaacaaaaacctctacttaaccctcctcatcccattactgctctacttctcttccttcataaccaagtattatctacatgcattgtcttcacatcctgttattaattccccaatgcattaaattctggctcatcgtcctactacttctcgctgccattgaagctcctctttccagagtcactggttacttcctatttgtgaaatcagtaggaagcttttcagtcccagtcctactggacctctcagcagctctggccaatgctgaccactcccccaatccagaaaccactcttggcttctgtaacagtccctggctcc

SEQ ID NO: 187798 - DNA, 478 bp, Homo sapiens
taattgcaggcatcataatcagtcatattgtatttagtataagttttggtattactgtcttgagtatacataataccataataccagccccttctttcatgttttattaaattctttccatatttgtttgttcaagattctctcatcattaaaaacaaataaacaaaaacctctacttaaccctcctcatcccattactgctctacttctcttccttcataaccaagtattatctacatgcattgtcttcacatcctgttattaattccccaatgcattaaattctggctcatcgtcctactacttctcgctgccattgaagctcctctttccagagtcactggttacttcctatttgtgaaatcagtaggaagcttttcagtcccagtcctactggacctctcagcagctctggccaatgctgaccactcccccaatccagaaaccactcttggcttctgtaacagtccctggctcc

SEQ ID NO: 187799 - DNA, 699 bp, Homo sapiens
ttgagaaaatggtgatatgtctggagatccgtctgtatgataaatatccttctaaaatattcgctggctaactagaccatggcatcccatgctataatgaatccaggtgattcctcagctgggtgtccgctccccacattcccaccataacccagaaccataaggacttaaggcacaagagaaaagtcctcaaatgacatttatctgaaacttaaagcacatggcccccaaaagtaacccatttcctctgaaatgggaaggttctgaataaatgtaaagaaacatcaccatcagctggtgcaactggtccacatggcatttttccaaatagaatcaaaccagacatagacccttcttccacaacacccatctaaccaatgaagcagatgtgtacaaatgttagtgaatgggcaggtttgttaagtaaattttaaaaaaataactgtaaaagaaatatggtttatgaagtgtggctagagtaaatctaagtgatgtttatcattctcatagttttatagagtttttggtaacagctcattaataattggggaaagagaactactggagtgctaataactcattattcaaattgaattattaacatgacaatcttacagcaaatgataatcccattttctctgaaaaatatatttgtagagaatgaacattagtctccattataattcatatatacacaca

SEQ ID NO: 187800 - DNA, 167 bp, Homo sapiens
tataggcatttattgctataaacttccctcttagcactgcttttgctatatcccacaggttttggtatgttgtgtttccattttttgtttcaaaaatttcttttttaatttccttcttaattttttcattcacccaatggttgctgagagcatattaattttcatat

SEQ ID NO: 187801 - DNA, 384 bp, Homo sapiens
atggttctggaggctgggaagtccaagatcaaggggctgctctggcaagggccttcttgctgcatcatcccatggtggagagtggaatggcaagacagatcaagaggggacctaactggccttttataaggaacccagttccacagtaatggcattaacccatccatgagagcagagccccatgatctaaacaccttttattaggccctgcttatactgttgcactggggatcaagttgcagcacttggacttcgggcaacacattcaaaccatagcaggcaccttaataaaggtggaaaagggatgtggcagctacagtgggagggaaaaggtggctcccttagtgtgcttgggaggagggtaagagatgcgtttgcagttct

SEQ ID NO: 187802 - DNA, 890 bp, Homo sapiens
acgtttgtcaagtgtgtattcacacatttacttaaatcaagggactcaatgcttgcttttattttaaccatcttttactatttttagaaggaaactagctttagtagtgggttgccctgtatgttttctctttttgctcttaatatgccattgggtttttgtgtgtatgtgattttcaaaattcatgacttgaagtgcaaggacagatctagatgttgtttaccaagctatgtgacttctcccaaaggatctgtactttctttccttacaacagcttgaaaatcattattttaaaatccttaaatcactgtgtctagatcattttttacattgtgtgccatagacttacccatgggacaacagagctccttcattttggacaactactgtaatcatttttttttaggaaaaatggaaggtgccgggggtaatcatggccagtcaataattatataaaggagttcaaatactatagctgtcagttgatgaatttgttatgtagtaaaatgtatgactttgtatgggtttcttcagccctttttctgccactagcaaccagaatagcactttaccttttggttggctagataagtggctgactacctgtttttctcactgtggtgtgattggctaaacaatctcgcattaaaaattcaaatgtaaattgaattcacatgaaaaatcatgtttggttgtaaacctccaatgttttgattctctaatcatgttttcgtcacatgctgagtaaaagtgccttacaatgtaaaaattgtacagtactttatgttcccaagtagcatcatcatcttctgagtagtaattacattgtggtattaatatttagaaaaatggacctcagcagtgtatttactgtacatctcttaagtcct

SEQ ID NO: 187803 - DNA, 988 bp, Homo sapiens
ataatagtttcagcttcatagggtggttgggagagttattaggtaaatatatggaatactcttaaaataatgcttggcacttaataagtactatgtaagtattgttactgttgtctggctcatatttatttttctgatcttagcttagagtttatatcttccttctgggaagtcctttctgcccaaagctgagttacatattcctctttgtgttgccacagattcctgtgcctcccttgccatgttgtattgtcatagcctaattgtttcattgccacaagttctttttctgcttccatcacatcatcacatccttcttgattggcaaatagtaactactcaataaatatttgttgtctagcacatacatacagttcaaacagaaaactaaaatagactaaagtatgaggaaatcttggtattggaacttaactattgaggtttatttcaaagaattttattttgcagcttcttttgtatagctttgaaactctaaaatatttcctttttttttttttagttgccatttcctttgagtcagcaggcctttcatctggaccttgacccaagaagttatgatttttctcactgtttcactctatctcccagtctgaaatagagcattgcactttttagtgtctgagagatatcatgcctttgcagttaaattctcttctgtggctttggctggaatgtgagtaaatttccagagaggatacataattcccaggctgaactctaaccttgtgaactattttaatgtgtggcctcataaatgtaaattttttaaattttagaccaaggaggtgcttgttgttctgccttaattgcaacttctatttagaaagaaaggatctcttggctttaagatagaatcaagaggtgatagtagtgagactcaagtcctgaagataaaaacagaaagggccaaaagctcacctcttggttaatcaggcaggtgtggaggttatggaaatcctcaaagata

SEQ ID NO: 187804 - DNA, 555 bp, Homo sapiens
ctgaataactgggattacaggtgtgtgctaccatgcccggctaatttttaattttattttttagtagaggtggggtttcatcctgttggccaggctggtcctgaactccggcctcaggtgattcatctgccttagcctcccaaagtgctgggattataggcaccagccaccatgccctgtatagcccataatacaatattatgagctaatactgtgtatgtacttacatgtatgtgaaatagtataatgttgattaaaggttacttctgataatttatgcatactattataattggaagactatccagaaaaaaaaaacactaaaaaacaagagtaattactaaatagtgagtagaagagataaaaaggaaaacttggctaatcatagtgcggtggtgtttacacctgattgcaactagttacagatttgtttcttctccactcccactgcttcacttgactagccttaaaaaaaaaaaaaaaaactataaattaacatttaatcaggaataagtcaggaaaggaggaataaagaaagaaagataaaatagggca

SEQ ID NO: 187805 - DNA, 211 bp, Homo sapiens
aagggaaaaactgagatctataaaggaagggtaatgaaatgtctagcagatatttcaatggcaaaaattcataatgcttaaaaaagaatcttcaccctatagtagtatactgagctaaactatcatacaagaaagaaaagtaaatttattttaagaaagtgggccgggcgtggtggctcacacctgtaatcccagcactttgggaggccaa

SEQ ID NO: 187806 - DNA, 349 bp, Homo sapiens
tgggttgaccagtgggtgtagggttgactggctgtgaggtagaccgtggcttcagaggctagatcataaagggcacagtggcttctaccttgcactcctggatccctacctgtggggacatcccactgccatgcatatcatgagaacactcgagcagccctctggagaggcccatatagacaagaaccaaggcctcttgccaacagccagcccagggcaaatcacgtgagtgaggcaccttggaagagatcccacagctcttcagtattcacgtgacctcagccttggctgataaatcttaattgtaacctcataagacacctgaggcagaacggcccaggaagccact

SEQ ID NO: 187807 - DNA, 500 bp, Homo sapiens
tgggttgaccagtgggtgtagggttgactggctgtgaggtagaccgtggcttcagaggctagatcataaagggcacagtggcttctaccttgcactcctggatccctaccttgtgtaataaaaattttggggatgaagagataacatactaggttaagtgacagagccagaatttgaacccagttctgtgtgactcagaagtctgtgctcttaaccacactgcagtctcttgagaaagaggcttgtggttaccatgaatacctgacctggtcggtgtatgagtgagactggcagaaaaacagtaatgcatccaggccccactgaaggcatctgtgaatgatgtaaggcttgcctcttacagctggctcctagatcccgggcctcaccaccacttgtgctccaccacacctggctgggaaggggaagggtccattcacacagagacatgtgcacacacacggggacccgtagactttccttaccaccacaccttaacatgg

SEQ ID NO: 187808 - DNA, 684 bp, Homo sapiens
accaatttggtcatcagaacatggattggtgagcatggaaacagaacaaattacctgcattggtttgggggatggtttactcaggccatagtaagtctaggaagttcttcctgctctatttctgctgtttggatattcatccatcagttccatcagtactattttttagtatctttacgatatctttagtcttttggaaagtaatagacaaattctttccttctcattttttcccccaatataatgtgtacagactacttctgttagaaactcattaagacatatattattgtcattattttgattgataattatctgctgttgctgacagtttactcttgatgaaatttgaaaacaattcaagtctttgtaaaactgtgatacagattctcttccttttttgatgttaacatcttgaagaaatctgcaaggtctctaatggatagattcagccctttggtgttgtggctttagattcagattctggttctgccaccaagtagctgagtaagttgcacatgccacttgatctctttaagcttgtattttcttattggtgtaccttctcttgtacggatgatgaggcaattatgaattaatgtgtttaaaatatctgagcagtgcaaaagaaatgtatttgtataaagtcgatccattcatccttttaacaagtattaattgaac

SEQ ID NO: 187809 - DNA, 425 bp, Homo sapiens
gaacctattgagtctgatgcaaagcaaagctggatggtatgacatgagctttcgttgactctgccactgccccacaacctagatgtagttttccctaaaaggctgcattgataatttcatctttagacactggaactttcagaaggcttccaaatgttagttaaaaagtaaatgtgagtaggctgtgacccaaatgcacattaacgatttttaatatacattttgttttgttttgtcaacatgacctttaattaccttccagtggtaattttccttttcatggtactgtgtttatgttgaacaaaagcctcagaagagatttcttctacataaaagaatgaggcagttttgatttggggattaaaaaccagacttatttgttcttagatccatgtctcttaaaaaggttgactcaggtttctgtg

SEQ ID NO: 187810 - DNA, 219 bp, Homo sapiens
agaggactggaagtgataaatatgcgggtgactataattgcttgtattcttcaaaaaatcaaataataagacctcaggcacacccaaatctatggacattctatacctttttcttcaaaaatgtcaatgtcaaagacaaagaatgtttaaagatctgtcataaattacaggaaactaaatagacatgccaactaaatacaatgagtgatcctgggctgg

SEQ ID NO: 187811 - DNA, 664 bp, Homo sapiens
gaaggcattattttcttctttagtgcaaaggactgattactcataacttgcaagaggcagtcaggctgatggggactgttatcttatatatatatattgctaattagaaaatctttgagactaaaagttttgagccaagttcaataggcataaatgtaaagccccgtgtctagactttgtaggcgaactccagaagtccaggaaaggagagatgttgtttaacagcaattcatttgacacagaaatgagagtttgagctgttttaggaccttaatgagtctagaatgttaatactgtctccctgcagttatagaagctattcccaccatgatggacaccagttagacaactgctaaaatatccttatttcagaaggtggtcagatggtgaaaaccatatcatatgatcattagttagtagcgatgtaaatattttcagatggttgaaggactgaaccataaaattaggatagttattttgtgtgatggtaatgtgttgatgaattaggacctgggtaaaagttactgggaagcaaaccagttttggcacaataaaagtcaagaacttttaaagaatcggagttttttcagaattggaatagatggttctgtgagttagtatcttgtcactgaaattactcaagaattgcagggtgattccatga

SEQ ID NO: 187812 - DNA, 171 bp, Homo sapiens
gtgctgagatattctcagaggctgttatgcttattatgaggaatcaggaatgcattgtagctgtcacattgggttctgatgaccccatctgggggccgaatccctattgtaactgtcacatttgctttaagaacacgctacttgtgcatcccctgatttcccaggaacagg

SEQ ID NO: 187813 - DNA, 399 bp, Homo sapiens
tgtgacattctccaaagaccacaatagctctctagcatagattctaaccaaaataaaaactttgaaatgacagatagagaattcaagatgtgtgttataaggaagctcaatgagaacacagagaaagttggaaatcgacacacacacacacacacacacacacagaaaaacaattcaagagatgacagatgagatagatgtatttttaaaaaactaaccagaaaacctggaaattttcaaattaacccacttagacaaaaaaagaatttaaaatactgaacaaattgtttgagatatatggattatgtgaagcaagggagaagaaaaagtaagaagtttgaaaaacatatttgagggaataattgaggaaattttctccaatcttgctacagatgtata

SEQ ID NO: 187814 - DNA, 578 bp, Homo sapiens
agctcagaagtaaggagtggtctctaatacaactgtctcataaaagcaatgagaaggtatataaaatattttagaatcatccttggcataaaaaggatttccaatgagcacattttataaggctgaatttatttctaacaaaaccatgtgtacaaagcattgtcatgatagtttaatgagagatggcttaagggaaaaagtgtaaaatcgtaaaatgagattgagttttacccttccagggagtcaaatgaactactttaggagtataagttaaacaccctggggggcttttgtattttcagacaactatggagaaagtgaaaatgcttatgaattaatactgaggttctttgacagtggtttgtcttgggaaccaagtgtttggcaagttagcaagtgtggaggctgggggccaatgacccggcttggggacaagggcccagaaacaacccctttctttaggatgccggtgtgtcatgttttgtagtttctcctacaaatctgtgagttgtgtaacatatggaacattcactgcaaacagtgctttggtgatggctggatgagagagactcaaggtt

SEQ ID NO: 187815 - DNA, 510 bp, Homo sapiens
tcctgacctcaggtgatccacccacctcggcctcccaaagtgctgggattacaggtgtgagccaccgctcctggccttataaatttggcttttacacacacccatacgtacacacatacacacatacacagattggcttaattttttttttacttctacttttgtacagttcctacaatctacaagcactgtggctattggcagctgtcactgataccaaatagaattatctttagctcccaccctcaccctcacactcaaaactgcacacatgcaggacagaagcctgggcttgttcctttttctctcgctgtctcagctcccaaggctgagattactctgcttcatctggatcgcccatctctggggtctcatggctgagtttcagttccccaatcctacctgctcctcagggggccagcactggggctgcaggtaatattttgggttggcaggcagggatgcctgtgggacagcaaggtcacccctacatgggtcccagggtgggag

SEQ ID NO: 187816 - DNA, 514 bp, Homo sapiens
accaattactcaccctccttttagtagcagccattaatattctccattaatggtctctttccaaaacctagtccctcagaaatttccttcaccaagactctcctttgaaaatatctactcccaaaggtctacactcatctctttgagcagcatctttcctaaatatgtgtaataataaatttagccctggctaagaaacttgaagaagtgatcaaggatcattttaaagaaaaatgataaacaatgaacaaaaggcaacctgagtctgaagagtttaataaagggctcaggccgggttcagtggctcatgcccataatcccagcactttgggaggccgaggcgggtggatcacctgagatcaggagtttgagaccagcctggccagcatggtgaaacctcgtctctactaaaagtacaaaaattagcagggcgtggtggtgcatgcctgtaatcccagctactcaggaggctgaggcaggagaatcacttgaacctgggaggcggaggttgcag

SEQ ID NO: 187817 - DNA, 979 bp, Homo sapiens
aaacccatctctactaaaaatacaaaaattagccgagtgtggtggtgcgtgcctgtaatcccacctactcgggaggctaagacaagagaatcgcttgaacccaggaggcagaggttgcaatgagcccagattgtgccactgtgctccagcctaggtgacgagcaagaccttttctcaatggaaaaaaaaaaaaggcaaactgaataaatcataagcaatgagatatttacactttagcttttaatatatgaactgttgaaaattgaggcctgtcatgcattgtaaaataatgagcaaaaaaagtttaggctccagaattctgatactgtgcctggatttgaattccagtcctagcacttaccatctttgtggcattgggcaagtttcctaaaatctctaggagtttctttaatcataaaattggaaaaatggttataatctcaggttgtcatgaaaactaaacccaggatggcttatgttcttcacttgtcatttagtagatccccaataattattagttatctttccttctttatatattaactttttattctttcattcagggactttttttccttttaaatatatgcaatagttaaacaagtccctatggccctcatgagactgtatttacccattatgtttctctattggatcttttctatgttgttgtttatcccatcctattaaaaaacatgttatgtattccatcttaaaaacgcttttgacctttacatctctctgtagctactgcctctttcttttcccagactattgtctaaattcaattttaacctcagttcctatcctcttataacaagatcctcagtgacttccacattactaaatccagtgattagttctcaggcctcattttactttatttttcaggagcatttattgattctgccctcttttcttgaagctttttctttatttggcttctgggacacttcgttgacctttacctcctacttct

SEQ ID NO: 187818 - DNA, 917 bp, Homo sapiens
tctactaattactggctttgtgtcttccagcaaatgatttaatctccagtctcagtttcctcaactataaaatggagattatactacctattgtttatacgaagcttgcacatagtggataatcagcaaatattaaaaatcctctgctctctctcattctacaattccttgagaagttgaagcacagtgggagaagaaataagctcccacccaagcttttgctcatctgtgaggagtcggtctgtggtatcgtcagaggagtgtgaaaggaggaattttcttgagacattctccatgtagtctccatctttcagactacgatcatgtaaaggaagccaagggttttcacatacaccatcaccactccacacatcacctaccgttcttgtcttgaaaggttgatgtgtgttgcccagtggatgttgagccaatcagagatagaaggagaaaccttaggcaaccacctcttttttccctcactacttatatgggatgagatctgcgagcatcccagaacaaacctcgaagtgtaaacagtattttgtacatccagagagaagggtttcaagatagctgactagcgacacctggcacttctgcacaaagaaggaccaaaactgaacaatcacataacaagtggagcttctaagagaacaatggaattcatcagagaagtgacagggaacatctgaggcttggaaggagagggaagcaaagcagctggtccagctgcaatcagctcggagccaggagaaacccccagtgcagagagaaggtaagcaagagatcttcagcagtctacattgccacactgactcttacagtcctagccacaggagagcccctcagcccttgtgggccctgagactagtctaaggagcatcctcaagtcctccaatgccattagtccagagaag

SEQ ID NO: 187819 - DNA, 913 bp, Homo sapiens
tttggtggtgatgctaggaaagcaatttttctcaaaggcttggatgtggacactagtctggtatctaataattgctgcccactttttcctgacttcttgggagaggcattcatgagtccaaagctgaggtcaaaatcacttctgtcttatctgacattatctctcaaagcaaatctggattctagcctccagaatgcccatttcttgggccagtttttcactggtaaatctgcaagggtacaggttccatttaaaccatgctggttgggtatccttttgacttggcataaaatacttctccttcattatgattcacttgggtgaaagccaacagaaagtctggaaagatccactgtgaaaagatttcatctggactccacagacaccgctggccagctctcacttgcacaggatttccgcacaccgagccagccccagcccttgcttcaatattttcccactccagctcattaaacattttagttttttgttatatatttaagacactgaagaaagcataggaaaccagcaaaaattgaattttgctggaatttaagtttgagagcagcccgcaagaggaacacattgggtgggtagacatgttgtgctttttaatttttttcctgtaagatagtcaacaataattaatttgaacaagaaaaaaatggttgtcatacatatataaaagtaaagtctagaaaaataaaaagtttttgttttgacctaattcagattatataaaaatagaaatcacagtatttgtttttacatattttgaaaattaaataaccttgaaatgataaagtgcagaaaataatgtgaataataatgttgagttttctagtccctcttctgatccttcatcctggtagcttatatcctgttttgctgcataataaataattttattctc

SEQ ID NO: 187820 - DNA, 472 bp, Homo sapiens
cccttagttggctgaggaaaagatctcgcaagtattttttcctctgtggagtaaggaaatttcttcctggtttgggggaaagtcattttaaaaaaagacacttggtggccccaaagctagaagttatttctctcttaatgaactcactttctatgaattaagtcaagagcttattctccttagcgctcaaaagaaggcattgatctccctattttgtaactgctcagaaggaaatctgtgttcctacaagatcctgattttttaaatgggtctggatgtaaaaatgtttggcaatggaatcttgtttttgcccaccagggtcagtcttcaactcatcatgatgggaagacatttccttttcacagtcggctaccagccttcttctaattagccaaatagggcaaactcttctatctcacccataattttaagcacaaggtgatgataagatatatttactgtttttaaaaat

SEQ ID NO: 187821 - DNA, 326 bp, Homo sapiens
ggctagaccagtcgctcatttatcacttcaagagatacttattgtgtgcctactctgtgccagacactggattagacagtggagaacaagacacataagacagctacaaaacccctgttctagtggaggaaggcagacagtaaagaagcagaacaatagagaatgtaagagccaagtcacaatgaatgctattattattaagtaaaatcaagataagggggaggaaggacaaatctcctctacagaagaatgccaaataatttatggagatacgcgaagacgtttcagaacctaatgtcccattctctaagtgtggcctgtgttta

SEQ ID NO: 187822 - DNA, 608 bp, Homo sapiens
aggcagagtgtagtgaatagggaaaccccaaagtgagagtgcctgatgtgtttgaagaactcgaggtgtggccagtgtagctttagaaaagtaattgatgggaaatagagagaatggagggtacagatattttgatcataataaggtgtttgatttttacctataagtgagatgggaagctattggaagtctttgagcagagtagtgaaaaagtatgacttatgtttagcaaggtcactctggttgctgtgttaatcatagactgaaaaaggggacaagggcagaaacagaccaattggtagaccattagtacagattaagacgtgactgaaatggacagagtggtcacagtgagggtggtgagaagtggttgaattcttgatatatgttgaaatagagtccataggatttggtagtagaccagatgaaagtgggaaataaagggaggagtaaaacatgatgccaaagttttttgaccagagcagctgagagaatggagttggataattcttataaattattgcattaaatctgtgcatcatatcacatgcccacttaactacaggtaattttaccatataagcttgtggggggaaaagaggaaaaac

SEQ ID NO: 187823 - DNA, 110 bp, Homo sapiens
gaaacccagtaaatgtttgttgattgaaagatattaatactcttgcttggatgagagtgaggaaaaaggtattagtattggcttttcacaacgccttgtacggtttcttg

SEQ ID NO: 187824 - DNA, 568 bp, Homo sapiens
atatttgatgtgccaattatgcacttcattttgaggaattactactatttatagacccactttttaaaaaattatcaatgattatttttgaattgtattcagacttttttcctgttctagtctgaaatattacttctctaatattttggttaatatgaataatagtggcaaaatggcattttagaattattaatatttctaatattttaacacaagtttcaggaaacttggttttgattgttcacatttctattctaaaatctcaggttatctcctgaacacttttgggcagatgaagttttataccaaaaaatagttcttagagtgaattttaatttacatagaactcaatcgaaatgaagatttaataaccagatttctttctccaaaacatacacaatttgttattttagtaaataccttttttttttttttttttttttgtggtggagtcttgctgtctccccggctggagcgcagtggcacgatcgcggctcactgcagcctccatcctctgggttcaagcaattctcctgcctcaggctcctgagtagctgggattacaggc

SEQ ID NO: 187825 - DNA, 347 bp, Homo sapiens
catatttttgctatcaggctaacataaagtgctgctactgactgagccagcctaatggaatggcatcactgtttctgttggcatagttaagcagggggttaaaaattcaagtttttgggaaggagtttttttttttggagggatttcttttgcaatacgcaaccttcagacattccagaaagtaactgtggatgcattttagggtatagccagtgtcctttgcatctttcagtctgataggcaaaatcatattttagattactattaaaacagcatgctgatttattcatcttgtccttccttttaagaaatatatttcagaaatgctagtaacatcttgctcagca

SEQ ID NO: 187826 - DNA, 342 bp, Homo sapiens
cagcagcatgtgggtcacagtggggcaggttttccctcagaagctgaagtcctttcagccgtccatgtcaaaggaacagaaaaccaaacaggtgcataacccattttctgaccctaccagttagaaggtcaggcaaattaacaggttgaatgtgagaaccacttaaatcttgattctttgcttagaataccttctaatgatacaacgctatgggtcctcagtcaaatacaatctttaacgctcatgcaggaaatgcacttagagatagattcgcagaagcaacttcagcaggcagcatcccaagatggccccaagccacccccaccccgtacatgcctaaca

SEQ ID NO: 187827 - DNA, 377 bp, Homo sapiens
aaggaaagaactcccaaataaaaggaaggcaaagacccttcagtaatcatctggatttcctagtcagatgtctttccccactctgcaagcgagtctcacctctgtaaatatcctttaagacagtatgaactggatataaaatactatttctactctggaactgggactcaatttaaaaagtaaactccattagagctaaagattatcccaacatctacaacatttaatcctgtttgcccactaattcaaaataaacggctaaagatgtatttttatttatttatttttgagatggagtctcactctgtcccctaagctgaagtgcagtggcacaatcttggctcactgcagcctccgcctcctgggtttaagcaatt

SEQ ID NO: 187828 - DNA, 172 bp, Homo sapiens
atgacaccacccaaaatctcactcctgtcttaggatcaggctctggctgcccccaggcactgcctgttggtatctggaatagcacaagggctggccgctctgggattttcctctttaggggtggggacagtagggcaatgagtgaaacgagtagtcagtgatcatggaaagt

SEQ ID NO: 187829 - DNA, 294 bp, Homo sapiens
ggtgtctttccaagagcaaaagttattaattaatttagattaagtccattttaaaaatatttttcttctatggtttggtatgctaagaaatctgcccttccccaaggttgcaaagattttctcttttgttttcttctgtaagttttagtttttgtgtgagccattctgagttcatttttttgttgttgttttatatgaagtcaggttaaagttatttttctcatggtaaaagttctttttctccagttgtagcaccatttgttgagctgactcttatatttctccattgaattg

SEQ ID NO: 187830 - DNA, 537 bp, Homo sapiens
gtaaaatactgacatttggatgttacactaataagaagccctttcgtgcagatgaaaggacatgttatgcacagacaccctctgagaggttctcaagtaagagacaggtaacaaccacagatatgtgaggaaaacctccaaaatgaaagcaagagcttataaaatcaaacagaaataaaaaagaacctggaagaaacaaagcaatgcacagagaaggccaaagttataatttatatccttagaaggcaaaacaaagttataatttatatccttacagcaaaaagagaaaatatagcagccatatagaaagcaaaatagaatgctataactcatcaacaacagagaacacaaagtcgctctttgaattaaaaaagtagaatagcagaaataaaaaaattcagtaggaaggttggaagataaagcccaggatatctgctataaaaacaaataaacagatgaaaatattttttaaaaccgaaatataagaatgattagaattagattaggatctgtcaggggagaaggggtaccgagctc

SEQ ID NO: 187831 - DNA, 988 bp, Homo sapiens
aaaagccaaagaagtaagtaccaagttcacgtacaacaataaaaagctcaggaaccccccaactatctcactgacaaaccttcaggaagccctcctgagttaatacctaaaataacaccaagaaaaagctgggactcttccctggcggatcttttgaagtgagaaaaatcttttgtaaccacttttactgaagatgtgtaatgtggtttagaatgactgctgatactaaggtttaagaattatcttactttcccttatttatccataatacatattattttctctagaaatcctaaggaattttttagtactaatgtaataaaaggatttggccaaaccatgaaatacatgagaaatagttttcctaactatagaaaaccatatgctatcatagttatgaaggaagattatggatttcatggtatagacaacttaaacagatgtttatcaacacttcctgcagtcctaaagaaaaaaaacataaaaaaaagtcagatgatctcaggcttcttaaattacatgatgaaagactgccataatcagaaataaagtttaacatcaacatccttcagcctaaaacttaccactttttgtccaccaccaccttcctctttcacagcatgggctagtccactgcagaaatgtgttttactattttgtggagtgccagaccaagcagttatacagagacacaagaaaagcatgctcataccgtttatataatggtacccaccatgcaggaagagaattcttatcactagccctatctttgaaaccatgtgaaagacaatttaatagaaagaggcctaaaatatatctgcatagagtaattcagaagggaatgtgcccacaaccaaggcttgcctatctcagattcaacatggccagcagtttattttaatccgtctccccatcaccatctttaaattaagacacttcctgtttttaacccagtctcattgcttgcacacactgtgccaaatcttaa

SEQ ID NO: 187832 - DNA, 195 bp, Homo sapiens
cactcgtcccctttcaagacctgggcagaagcaggaagcagataagattggggtgcagacaataggaatgtgagagggcattgtggccacagaagggcagacgccataagagaatgggcaacggagccatgagcataatgcttttcagtacgataatagctcctgtgccaaagaccctgggcagtgtcaggatag

SEQ ID NO: 187833 - DNA, 355 bp, Homo sapiens
aaactaaactgaaagttctggcaaagtagaaagccatccacaacatttctggtgtacaaattaaaaagacttacatcctgagccataccactcattttatgaaggtatctctattccttggagattaaatcaagaaagtaattaacaggaatcaacagaacaacagtaaagtcacctggcacccagaagggcacattgtttgcttgctaaaggagccctccaaactctacagctgagaaagcatacaggggccctagagtcagcattcattccaaaaacacaggaatgatggttgctatttctgcttaatagatcaggacctcataaatgggtgtcatcttcactggacgaatca

SEQ ID NO: 187834 - DNA, 319 bp, Homo sapiens
gggggggggacaaaaagcacctaccgatctgttttccataaagtatgttttctcatgatttatgctaagccggagatgccattattttctttaacaagtgttacatgataccaattggttatatgataccgataaccagtttaagttagagtccattcaaaaccaccaggcatttaaatagaccttactttgaacttctaagtgcaggatctaaaaccactagtgaaatttctggagtcaattagcaaatcccttcatagaaatttctatcactgggtcttcgtgagcacaccttgcatctcctgaaatcccaattgcc

SEQ ID NO: 187835 - DNA, 322 bp, Homo sapiens
agattgtgaaaaaaacaaaacaaaacaaaacaaaacaaaacaaaacaaaacaaaacacaaaaactactgtgatgattagaagcactctgagattcttgggccaaaaagcactcgaaaagccccagctgctggggttcccccttggtgggaggtgcagggcacagtgtgattgggagtaggccaggaagctgctgatgccactatgcatgtgctcagaggggctgtctagtcccaggccaccttctaagagtcactctaatgagaccgattctccaataggctacactggacacacagaacacagcagaggaaaaacacacac

SEQ ID NO: 187836 - DNA, 641 bp, Homo sapiens
ataaagcaatactgctccaaaatataccgtgaacattagtaaaacttaaggaatactcccagtatattgttcgaatgtccacagtcgacatgctgtataaaaactaagtcattcacgtcatggtgcggtggctcacacctgtaatcccagcactttgggaggccaaggtgggtggatcgcgaggtcaggaattcgagaccagcctggccaacaaggcgaaaccctgtctctagtgcaaatacaaaaattaagctgggcacagtagcccaaccctgtaatcccagtactttgggaggttgaggtgggcagatcacttgaggccaggctagtcttggaatcctgacctcaggtgatccacccgcctcggcctcccaaagtgctggggattacaggtgtgagccactgcgcccagtcttttttttaacatattctggcccttgactaacagaagtttgttcaatatcctcatctataagatgggaatgctaatagtacctatcttatagaattgttttaaggagtcattggattagtatgtaaatttacacacttagaatgatacctggtacataattaagaactcagtatagggttgtgctgctgctgcagtccagcttcactgtctattctgatcttcaaac

SEQ ID NO: 187837 - DNA, 348 bp, Homo sapiens
acatccttacttcatgaagagaggctttgtgaaagattttaacagaaacagcaaaacccacacatccagaggagcattagcctcttcaaagacaacacacttcttattataaaaatgcccaccaatgctctaaacattttaggaacaactcttttaggactgccttcatgcatataacattcctttgaaattttcaactgtggcaaatttggttatttgaaagtggaatttggtatctgtaagctggaaagtacatttagaaaatgaagagaatcatcaaactgatttttttttttttttttttgggaaaaaggtttcatttttgcccccaagctgggggggcggggg

SEQ ID NO: 187838 - DNA, 263 bp, Homo sapiens
caagtaaaaatttccaatgcaacatacaggatatactagtatattaatctaatgaggaatgacttttataataagtaagctgaatcctgaatgactgaaagtttgcttaatgaagagatgtacagaagatgggacaggcattggagtaaaatgaaattcactatagtgggatagagtggttgttggtgaataattgagtagctaaggacagcactgttgctatacagtacactatattactgtcatccatcagctacctcagc

SEQ ID NO: 187839 - DNA, 285 bp, Homo sapiens
ctttaaagttttaatcatactatacatatatatatggttttgattcctgctttttcacacttaacacatcattagccttttcacatttctttaaatatttgttgaaggcagtttttaatggctgtgattattctaatataaatcattctgtgatttagcaactccctttttactatgcatcaatgtgtttataatttatcactattataaataacattgtgaagaatatcattttatgtaaatctctgggtacactgaatgttttctaggcataaattcataaaa

SEQ ID NO: 187840 - DNA, 340 bp, Homo sapiens
agctcaaatttgggagcttatgagcagatggaaatatcaaacttgagagtacattgggtttaaccacatttattacttctctgttgtataacacattacccagaatttagtggcttacaacctcaaccacaggttctgctgatcagaaatgtaggcacagtttggctcagtggatctaacttatggtcttttacaagattgcagtcatggcagatttttcagccccagtcaagtattcagatgacaatacttgactggggctgaaacatctgcctccatcatgtctcagtcatgtgactggctaattggtacttcccttcctctcatgtgggcttctcta

SEQ ID NO: 187841 - DNA, 431 bp, Homo sapiens
actcctttgactgacagaacagactctcagcaattaagacaccaactccaacctgactggtctaacatcacatgggagataacaagccctaaggaaatcaaagtatcttacccccaagtatatttttgacatagtttggaatggccctgcaaagccatctcttgttgggaaaatctatgtcctgcagagattcccttccctttctaggccttttcctgatttagaggagatttaactaagagtctgacaccttagagacatttaccatctattctcttgaaggcttcatctacgtaacatgaaccttggctttcacaacccaccttatcttaaacccaagctttccttctgctgacttttaactctttaggcaaagtttaactttttcagccaattgccaataaagctttttaatcaccccagttaccctg

SEQ ID NO: 187842 - DNA, 420 bp, Homo sapiens
tttttatgtctgtatttaagaaataagtagggttccctttttgcaaatgaatttccaagtttctctgtgctttctcctacttttcatgtacatctatctctgatcctacctttgatcagataggaaacctacatttgttcctcaagagttaaaaaatacaggtggtttttttcttagccttctgcagtgaatggttagttttttgaccacctagtctctctctgacttccaatctttgtttgcagtttgtcaattagtgctttgaattacgtgatttagcttagtaggcagcttccctaagcctggaaaaagccgttgaaatttgtagtcagttgtgtaacttgtcaaagttagtgaggaagaaaacgaaaagtattaactaaagagaatacttcagttgtggtactaaagtattcttga

SEQ ID NO: 187843 - DNA, 896 bp, Homo sapiens
gggtctctgatgcctttgccagataaaccccaggctcatggctggcgcctgttttctcattcttacctcattaagagtagtaatgaaaaacatgctcagtgctgaccgtgtgcctgggggtgttgtaggcactccacttactttaattcatttaattttcacaataaccttgtttttacttctagttgttatatgaaaaaactgaggcaaagagcaatacagagagttgcaaaaattcataccgctggtccaggtttgaaccaaacagtctgcacctggagtccttgtttgtaaccatggcaccctgtcttcacacatatctcatcgtggagttccatcttgtgttaggcatggcactgagcagcttcttttaagaacataatttgtagccaggcgcagtggcttatgcctgtaatcccagcactttgggaggccgaggcgggcagatcacgaggtcaggagatccagaccatcctggctaacttggtgaaaccccgtctctaataaaaacacaaaaaattagctgggcatgatggttggcgcctatagtcccagctacttgggaggctgaggcaggagactggcatgaacccgggaggtggaacttgcagtgagccgagatggcgcgactgcactccagcctgggcgagagagcaagactccatctaaaaaaaaagaaaaaaacatgatttgtaattatgtaaattactaattctacttcaaagtgccacacagccttcatgtgataaaatgaagcaattggtaagtctaagcattgagaaaaaacattatttttcccagctccattgcaacagttgggacagtgttttctctgtgcctatagaaacctcagctagtgtgccgaggagtctggtccctttggggaatgtggcagt

SEQ ID NO: 187844 - DNA, 797 bp, Homo sapiens
gagagcaagactccatctcggctcactgcaagttccacttactttaattcatttaattttcacaataaccttgtttttacttctagttgttatatgaaaaaactgaggcaaagagcaatacagagagttgcaaaaattcataccgctggtccaggtttgaaccaaacagtctgcacctggagtccttgtttgtaaccatggcaccctgtcttcacacatatctcatcgtggagttccatcttgtgttaggcatggcactgagcagcttcttttaagaacataatttgtagccaggcgcagtggcttatgcctgtaatcccagcactttgggaggccgaggcgggcagatcacgaggtcaggagatccagaccatcctggctaacttggtgaaaccccgtctctaataaaaacacaaaaaattagctgggcatgatggttggcgcctatagtcccagctacttgggaggctgaggcaggagactggcatgaacccgggaggtggaacttgcagtgagccgagatggcgcgactgcactccagcctgggcgagagagcaagactccatctaaaaaaaaagaaaaaaacatgatttgtaattatgtaaattactaattctacttcaaagtgccacacagccttcatgtgataaaatgaagcaattggtaagtctaagcattgagaaaaaacattatttttcccagctccattgcaacagttgggacagtgttttctctgtgcctatagaaacctcagctagtgtgccgaggagtctggtccctttggggaatgtggcagt

SEQ ID NO: 187845 - DNA, 817 bp, Homo sapiens
tttgaaacgcttagaaattgtgccctgagagataagccctcttttaatttgaaattgctgatgtcgatgttaacagaagttcatcatcatcactgcgggggtgaaatcgctgacatttggcgaaatccgcctgctttgcagaatgcgcgtttccttccacacatgccaggaatttctagcgtagctgggcctgtctcagcctgggcaggaacagagtgagggtcggtcctcctatgcttcccgttctgccgtgtgatgcagaggcttgtgtttgtgtgggtgtgtgcagtctcctcctcacccctccacaccctggttattgactgaccagaaatggcctgcagttcttttgggagatttcatccacaccataccttttgtttctgagtccatggtgaagaatacccatggaaaattgtgcagttagtgattctgtgatttttgttaacaattccaagtccaaaagaatgcagcttgcactaaaacgtaacagtccatgagcctatcgtgccctcttgtgttttctacatcctgtgagctaagagctgtatttacatgaacattatatgaagatgtcctacttcagttccatacgtagtttgagtggaacatggccacctccatctgttcacgtacatccatggctgcttccacccacaatgcaggggtaggtttggatggttgaaacaagaccttgcagcctgcaaaaccttaaatacttactatttcattaagaaagacctcatatcagggtactgctggccttgtaaaatgagtttgaaagtgtttgcatttcttcagctttctggcagagttt

SEQ ID NO: 187846 - DNA, 464 bp, Homo sapiens
tttgaaacgcttagaaattgtgccctgagagataagccctcttttaatttgaaattgctgatgtcgatgttaacagaagttcatcatcatcactgcgggggtgaaatcgctgacatttggcgaaatccgcctgctttgcagaatgcgcgtttccttccacacatgccaggaatttctagcgtagctgggcctgtctcagcctgggcaggaacagagtgagggtcggtcctcctatgcttcccgttctgccgtgtgatgcagaggcttgtgtttgtgtgggtgtgtgcagtctcctcctcacccctccacaccctggttattgactgaccagaaatggcctgcatgagagtgaaagcagccctggatgtaggtaaacagatgggagtggccatgttctagtcaaactttgtgtttggacactgaaatctgaacttcaacacattttcacatggcatggaatctta

SEQ ID NO: 187847 - DNA, 342 bp, Homo sapiens
gtccatgaaactgtggcaggttagttagcttgagagtagggtaaaacctcagacttcacaggtgctgttgctgttgtttaaagaaggggtctcactttgttgcccaggctagtctcaaatttcctgggctcaaatgatcctttcgcctctgcctcccaaagtgctagaattacaggcgtaagcagcagtgctcgctcagccttcatagttcttgaaaaaagtaatttgcctaaggtctgacagctagtaggtagcatatccaagattcaaacccaagctgtctgactcagaaacctttttaaactctctgctataccacagtggttctcaaagtgttgttcc

SEQ ID NO: 187848 - DNA, 482 bp, Homo sapiens
agagcattagtatatactgatgtggacatgagtgagtgagtgacagaattctctctaacttctgtcttcattggacttgtacatttttataataatatctgggtgggatcctgtgaatcagcggagaacaaatgaacaaaacaaatggatgaattaggaattgttagtggaagcagaacgccattgtcttcatatgaaggaacatatgccgacaatttagatttgtaggcgtgcactttctgtaatttgtttagtagcatctgtggatactccttacaatcgattccatttattgagtctgtgccaggcactgtgtggcattcgttttgtgcattacctcatttacttctctttgacaacagtatccgatcagtattaccagtatatatcagagctggttcccatctgcctcgaatgggattatttcttgttaatcaaatcatggcccaagggctgcgcagcagtgtttcatgctatttcac

SEQ ID NO: 187849 - DNA, 197 bp, Homo sapiens
ctcaggcaacaaattgtaatgatttattattagatttttttaagttttgaaagccattactgtccatattctctttgtgttttatttattggctcatgtgtttgtctgaacaacgcaaggccagagaacacatctgatttgtcattttatccccagcatcaagcacacttgaattattatcataataccaccaatgt

SEQ ID NO: 187850 - DNA, 223 bp, Homo sapiens
gaatagaaacagaacaaaaaaaacaatgaggaggatggtccattttctttctgcactagtgggaccagttgataagtgagcttgtccagaggacttgactaagatgcttaggaaattagaaaccatgatttgaggtgcagttgaaggtatggagagaggaaaacctagagccctcattgctgttgaaagactatcatgtggaaaaggaatttgacttaatatt

SEQ ID NO: 187851 - DNA, 305 bp, Homo sapiens
catatgtgagatctcccctacagcaatgctcagctcccgaaggagggcaatgaggacacagccaggacccttactgattccactcctagagagcaccaggcccatttaaccccaaaccaagtctaacttaccaacgcttgaccactcctatccaggaacatgttctttactcacttctcgcctagtgacttcaattcacaagcaagaagtcctttttacctgaaagccaaacaattcctccctgcttactcattctcccaagaaactaactagaagagaaagcatcagtgtctaaaatgctgatc

SEQ ID NO: 187852 - DNA, 316 bp, Homo sapiens
gaaactagctgttaaaggcttatcttaaataattggattgcattagagactgagtcttataagcaatgttttagggggagcttttgtttctagtttactttattggtaccaaagggttaaactaacaggtgctgtattaaaataaagtcatgtttgatactctgcatttcctacagcgttggtttcaggttgattttctctttccctatagaattggagctatttccccccacctcccactttttattatcaaacaatttcaagcatacagaaaatttggtaatagtaaaccacttgtatcttgaccctctagatt

SEQ ID NO: 187853 - DNA, 271 bp, Homo sapiens
tgggccacattttccccctcatcttaacccccagatgtgccaaactcaggcagccctggcctagagcacccctggtagagtcaagcctctggcctcaggacggtgatcccggggatcccacccctttgaccgcctcccccatcctgcatgaacctgggcactcccagagccaggccctgatggctcatccctcgccctgaggcattgggcctcaagggcagctggagctatgaccgtgttgggagctttcgtgagctgtcaggggcatgtt

SEQ ID NO: 187854 - DNA, 597 bp, Homo sapiens
ttaactatagtcaccctactgtgctgttgaacaatataaattattccttctttcgagctgtaactttgtacccatcaaccaacctctcttcgtgacaccgtgtcgccccaacccctgcaacttcccagcctctggtaattatcaatcttccttctactcgcatgagatcaccttttttagctcccatatattgctgacaacatgtgatatttgttttcctggcttatttcacttaacataatgacctcgagttccaatccatgttgctgcaaatgatggaatttcattttttaatgttgctgcaaatgacggaatttcatttttttaatagcgaaacagtattccattgtgtaagtatgtctcattttctttcttcattcattcattgatagacacttagatgattccgtatgttggctattgtgaatagtgcttcagtaaacatggaggtcaagtgtccctgtgatacaccgatttcctgtcttttgggtaaatacccagtagtggggatttagtagtctgatttagtggtcagtttttttgagaaacctctatactgttttccataatgactgtagtgatttatatatccaccaa

SEQ ID NO: 187855 - DNA, 205 bp, Homo sapiens
aacttacgataggccctaagatcacactgtgtgggcttgaaaatcacacagcagcatgtttacaatatacagacccctggtaaatatcaggcagctagctcacaaacagtaaatcagcatgatcccagttaaaaaatctatatgactagagacactaaaaatgttcatatttatcgtatgcgtgatctgctctgcattcttttct

SEQ ID NO: 187856 - DNA, 324 bp, Homo sapiens
aaattagaacatctatctagataataatcatatattttaaataagacataattacctttttatagtcttgtaatcatttagttcattataacctaaaaaacctcagaaacctaatttctcctttgccattgcatttatccatcgttttatacgttctgataaatctgatgtgtggatgtgccattctttgtttttatgctcattggattcagtggaatgtaagtattgggaaaatgcagggttggaactcagacctatttccagaactcttccagcatgctcccatatttatttgcatgttgttttgttctgattttggaagca

SEQ ID NO: 187857 - DNA, 304 bp, Homo sapiens
gaatgtattcagttgcacaccaaggtggggagtggagattggaagtagctgcctttgtggcaagaatttttatcaataatattgtccagaattgctgatgtatggtgacaataaaaatcagattttggtcagttttattattcttttctttacaaacagtgggcctttttattacctgcattaggggtgggccatacccaccatcttcatacaccactgaatatatttgtaattttaaaactttgcataaatggtatgctgcatgcattctttaataatttgggtttttttcattcaatactgt

SEQ ID NO: 187858 - DNA, 534 bp, Homo sapiens
tgccccgggacacagtacctcacccatcccccgactgcctggcaagggccagcaacacaacgtttacgctctctcactctcctggccttggccagttcaaagcctttggtgccatcacagagttccgaggaacagtccaatccccaaggcaggaagacccaggaacggccatgacaacgaattaacaacatgggaaagccaggggcaggagggtgaaccgaccatgtcacccaaggccacgctgggcacgtctgggatgccctgtaactacttactgactgacacacaccaccgcctttctgcaagatccgacctcgccacacctgacaaaactcccaggacacctgacattggctcagtcgtgctggcgcaggtgtaggcaccaaatgtcttgttttgtagctagggccacaaatctctgtctataaacatgcctcgtctctccacctggaccgccagggcatccagtaacaggataatgtcaaaacctcctggcattctggcaccttctgtcacctacctccacggcctaat

SEQ ID NO: 187859 - DNA, 295 bp, Homo sapiens
gaagtcaacctaaaaagtcaaaagcaattttctagcttgtttccaagtaatacttgtatttccaactgaccccaatggtcagaggagccgagacagaatggcggggaaatggcatttctcacacccagtgggcatggcttgagggttgctaacattttttggtctagattaccaagatggctaaatgtctaaatgttcatttctcaaaaggggtttttcttcatccacctttgccaccagctacctctgtgatactgaacaagtcacttcacctccctgggcctcagtttcctca

SEQ ID NO: 187860 - DNA, 476 bp, Homo sapiens
tacatatacatgcagacaaaaagtaaagatttgaaggctaaaaagctaaatgttgatggggatatttgtgagagttaagagttaagttatttttagtttttgctttgtgcctttttatttgcgttttctagctttcctacaaacaacaagcattgggttgcttatcagtgtaaaggtaatgtgtttctttttcacggcacaggacactggtttactctctgaagggacacagcctatattcccaagggctgatggactagaggtatccttaagactcacaaaccagaattccagttctcatgttatctagaagtactgcttccttttcattttggagagcagagaaggaagagacgatgggctgagtgaagaccgaccatctctgatcttaaagttccatttcggggaccccttgtagaggcccctttaaaacattaccccagcagttttaagcacaagtgcatggtagagtcccc

SEQ ID NO: 187861 - DNA, 329 bp, Homo sapiens
cagggtagaactgccaaaagacaaagaagtccttccatacatgaaacgagggtcagcctccttcatgagagatgcggctgacagcatgactctcagatgaagaagtaagcctgctgagggactctggtgatacttcacaatattacataggccctgcccttccaccccacagccccacttctcaggactcatggcaaagatacatggcaaaattatgaaacaatgcagcactgtgtctcataacatttgcctggaaacatggtgaacatccctcagtaggggacattttaaaaaatgatgttccatgtacataaaagaaaacccaagag

SEQ ID NO: 187862 - DNA, 153 bp, Homo sapiens
aggattctgtgtcaaaactattaatatttgagaaatacaatacttatcagagcctttgtatgtaaatgtctcatatacccctctaagaaggggagcgaatagtattttccaaacttacgtcaccacttaccatccacctgcatactttacacg

SEQ ID NO: 187863 - DNA, 244 bp, Homo sapiens
tccatcagaggaacataatgtctgttagtagcaattggtggtcattgcttagatccattaagggttgaaagatgttgatatccttttttaaaaatataatttcttctttaattgctaaaatattttgaaataaagaacttttcctctgctcactttttgttacactgaggtatactttaaatagtaaaggaaggataaatgcttcattctttccctttctcaattttcttcttctttttttttt

SEQ ID NO: 187864 - DNA, 259 bp, Homo sapiens
actcatgggtggctcttggggtggctcatagtgtggcacatggagtggcacgttgtcgtggctcattgggggctcgttggggtggcacctcggggatgggcacagatggggctgcctgccctcctcctggaaggagggagaacccagtctggcctggagtggtcaagagctaactctagactcagcaagacctacttctctctcctgcccctacttccttgctgctgacctgggcaagtcgctgaagcctctccgtgcc

SEQ ID NO: 187865 - DNA, 375 bp, Homo sapiens
ctttcccaaaacggagtcattttcttgactatcttcctatgtccattacctaatagaggttgtaggacatagttcctgtatattttagttatgatttgagatgatcctcttcttgttcacatagcgaaaggaagaatgtaatgtgagtttttgaaattaaatgattcaaaatttctatttagttgttttttgtttttttttcttttctttgttttttgtttgtttggtttgttttgttttggtggagtctcactctgttgcccaggctggagtgcagtggtgcaatgtcagctcactgcaacctccgcctcccaggttaaagcaattctcttgcctcagcctcctgagtaactgggattacaggtgtgcaccacc

SEQ ID NO: 187866 - DNA, 384 bp, Homo sapiens
atacctgtgtggcttcaccattgtgaaggaagaatgaagacctaagctgagccgggttgtcggcttcaacccaacattattgtcgttgttgttgtttcctcttccttaatagttttaaatgttaattgcactatgttaaaattctgttgtctgggttaaggttggggaatttgttgctgtgttttataaatttttgttaagttcataattggtgaagaaatactgcgatgcaggtttaacctgttatttcaatacagaaggcaccagaatatttttcaagccatacattgaggcttctgccccatgactcagctgaagcagctctgattgaggtcatcagtgccttcattaccagtcctgttgcttgttttagacctaatttta

SEQ ID NO: 187867 - DNA, 1400 bp, Homo sapiens
caaacctcatatttacaagttgctaactggaattgcatgattagattgagtaatcacacgtgtcggtaaaaagctgtaattacctaagaaaagcatagcatttttgtctgtgcagggctcacctatttcgtatgtctttaaaactttgaccaattataaatcttttagcaaggtagagagtaaaatcctatattttctgtggatgttgacacatgtaagttcctgatcattatttattaaacaattagctttaacatgtaagatggaatgggaaaaacatttaaacctaatgtgaattgcctaggtatgagaagccttagaactttgttagaaatttctgttttccatttctcaaatactgtgaccataactcatagtttatttataaatagaaagtgacacttcataatacctggcagctttcaaaactagattatatctgtctttgcctgaagggctccagtaacactattgtacaatattttcttctgaccatctggcagttcttaggaaccaacctctgtcaacattttatagctactgcactggttacagctaatcctttcaatgaatgagctggaaaaaatgtagatacatcaatatcgttttcctttagagcccatttaatacatgccctgttattattttgtttgatagggccattatcttctgtgagaatgaaaagtaatttgtcagaagcatttttttaaatttaaagatcaatctatgtaaatttttcttaaataaaagaaaccacagctttttaaaaaaagaacctcaaacataatcattaagagtctcagaaatgggaacttagggcttagattccacaaacatttttagctattattttctaatctgggttctaacatgtttagtctaataaccaagcctggattgggctatttctgagaggattttatgttaacagtggagttgacaccttggcaaggtttaaaaaaaaaaaaaaagtgtatgtttctcttgttgtttgctttaagaaactaggaagcaattcattccaatgtgggaatttttatgaatttttcttcaaaacgatttggtactctatggactttgaataactaatgattttaaagtactttattttgcagtttatgaataaaagttgtggaaactttccaatgttctcattctaacctatctttacttcataaaaacccatgttggttgaataattttcttagaaaggctgttagttatttctgtattctgaaatttacatttatcattgaattgaaatgggaaaagatattgatctttttttcagattcagagtttaaaactctgctcataataacagatgataaaagagattctcctcagcttcaccattccattacataccaccactatcatgagaccaagatttttttttt

SEQ ID NO: 187868 - DNA, 565 bp, Homo sapiens
cttatccaagggcccgcagaagagggaaatttcactcattttctgccaaaatgtccacatttgcagcatgagaagcccacagcagaaactgatggatgatttgacaaagtagagcctgcggcctctaaagggagacgcagcattccaccctgggcttgttatgtttgttctcaggctgacaatgactgcataatgcctaaggataattattctaattatagttacagcatatcatttcttcatggagatatgaacaaccaatcttctctaaattagcaattaaagactgcttattatcctgaaaaaccttattaatgtattcacaatctgacaatggacatttcaaaacatagacgatgtctaaaattcttggcatgctatcacaggatggcaattagatgctgatgaacaagcattctttctaatgaatgtcaaacttacatgactaatgaaggattctttgggggaaagaacaggagatatggagttgaaactgtctccagtcatgtcaccctaatgatctgactcatttgatgggtcactaaatgagaaaatgatactcatg

SEQ ID NO: 187869 - DNA, 612 bp, Homo sapiens
tgccacctgatatgtgtattcaacactgtgccccagccctttcctgctgagctaaacatcagctcttaactttgaacatgccctagactcacacagacagaccctcagaggtcttctctgtgctcccagagtgctttgttcagagtctggtttagtggcatggtaattaagagtgtgcacattgggagctaactgtttgactttaagtctacctgctgtgtgactttggacaagttacataacctctctgggcctcatttttcctcaaagccaccaaaaaagtcactgaagggcattgggggcatctggttcccaatgtaaggatgaaataagataattcagataattaacctggcccagaagctggaactttttggcccccaggaaacacgagtgttaatattcacattacctttcccaactatctccccttccaaactgtgaacttccccaggacaagggcactattccttaggtgcctgggacataataatcacacagctaatgtttgtgggaaaaaaaaacacatgcaatgactcaattctacttttaaaactggcttttcctccttattttaaaatgtaacttgctcaccttagggccttaaaaaaa

SEQ ID NO: 187870 - DNA, 277 bp, Homo sapiens
acggaactcaaatcatggccaactgattagaaaaggtcagcataattaggctaattatgggctcagagggaaaccatggactttcctcattgatttatgaccgtttgggaaaaatcctcaactgggatttttagtgtgataacgggacagaaaaatcaggatacatgatatatatatagggaaaagctaaaaccccggccttggtggatttcctatccctacccgcttccctggcccgccctctcccaacacacattcagccggttactgaggacag

SEQ ID NO: 187871 - DNA, 546 bp, Homo sapiens
aggtaggctgcctcaaactcaccatctcaatacaacagaaataaaactagaacatttcctctgtccttgacaaaccctttctacatttccaactatgctctaaaaaacaaatattaacattaagcatctgaagataagtcaaaataatatttctttattccatcaatctatacctaaagaatgactaggtccatgacatcaatgcctcaaaactaatcataacctcagcaggaactgctgctagggcatctcaactttttgcttgtcttccctgtctctcctcaccattgttatgcttaattttatttaaaaggctccaaccatcccaaatcctactcaagactaatgtcttaataaataaagcctaatctcatgaataaatatcaaccagtcctcaatatcataatatagtacacttacaattatatgtaacatctatttctggcctaaatggaatagcttgctaaagaccaacacttctacagtgaacaagtaaagtaggctgataaaaagaaaatgggggaaaaaaattgaaagcatcaaaga

SEQ ID NO: 187872 - DNA, 644 bp, Homo sapiens
ccttaggtgaacgacaccatccgtgaatacacagccacaaactgtactgtgaaggcaggctagggttatggggtacgtgcaggggacctgctgagattgagaggtctgttctccagctcaagagcctctgggatttaggtagctgtcaccatgtggcaggttctggcggggcgtcccaaatgggcctagaaccttcagggactgagcacacccagccctagccctctgttaactaggtcagcaaagggcctccagttccaccatcaggaacccattctcggcatcccatccaattacttaggaataaatcaaacctctgtggtgaagcagtcctttcactgctgggatgaatctgtaggtgtttactgactccagggaggagtctctgacacgcctcaggctacaaggcccctgaggtttttgaattttgcagagattgtgacacctgggagagagccaggacccaacctatttgcctgaaggtctgagtgagctgtgagcagtacagaggtgaccccagtgtggtggggactctgtccagccaggctggcagggagcagctgcagagagagtcccaccagcctgggctctgccagatgcctgccaaggctggtgcccacagctggcctccaggaggttgtgtg

SEQ ID NO: 187873 - DNA, 374 bp, Homo sapiens
agtgaccctaaggtgacggtggtttggacaaggatctctttgactgtctccttccatgaccaaacgctcctgtttagttctgataattgctggctgattgttcataatttgcaacagtgccctggggtataaatggcttcctagactgatccaattagaattcgatcagagctcattgaagggatagttccaaaggtcagtattgaagattggttctgactacaggagggctcttcccagctatctttccttatttttctctggcataatttatagttaatacaaaccatggtatataattgctggcagattatagtttcacctatatttccagtaagtttaccaatcttcttaatattgcccatcataacctc

SEQ ID NO: 187874 - DNA, 427 bp, Homo sapiens
gcttgataaatggctgtgtgtgtctccttcatgtcttccttaccctcaggagacaacattttgaggtccccctggctaacaaagtgccctttatgagaaaaatgaacaatcctgcagtcctcttctgctgttatttgttgtttctagtgatggtaataggctgacctacctcaaaccctgcctgatctcttcatgaataacatgttttcaaggctgttaaccaaaggcagagtgattagttctctctttgcagcgctgtttggtttcagtaacactagtttgttcagccgagcaataatctgaaagtatccttgagaacagtgtttggaaaaaggatcaggattgggttctgaaccaatttgaagaaaaatcaacacagatggaaacagcttacaaagtacagccatttaggtaacagccatttagg

SEQ ID NO: 187875 - DNA, 416 bp, Homo sapiens
ttgcccgaaactttgtagaattggtatttattgatttgtaccagctaagagttggctatttagtctctgacgtgctctttatggctgaagaaaaacaggtaactccttcacagaggagagattaattccctagaaaggaagacaaaagttttcatggacaactttggaaaggtgtgaagcattaaatatctatgacagcaagacacgggaatacacaagcctgtgttaaggcctgatcccttctgggccaggcacataagctgaaaatggtacctgagcaatttctgagtatgtcacgaaaaggcactgaaatacagaagtttctctatggaaaagagtgtcccggcttggaaactgtgtctgaagcaaaaaatttcctcaaaattgttcttcagaaagggagttgccgtctagta

SEQ ID NO: 187876 - DNA, 663 bp, Homo sapiens
ggattacaggcacatgccaccacacttggtagtcaactatttaaaaaacatctattatttaacattcagggtagaggttccaagtatagaactttagatccttactgcctgcttggttccctggattttttctcctagttttatttggggtacttactttgttatttcattttggttatgccataaataacacccaattttagcattcctgggatgatttaggcaagcttcagaaaagagtccagaagaaaatggaattggaagcataaagccactaaaattttttcattgttctctgatcattttttagctttggattttttgatcatttaacgtatcaatgagtagaaaggatttttcttgactaccacatagcttataaagtgaccgagtattctttccttagagattctacagtgtttaacatccactggtactcagtatgtttatgaatgaatatgtattaatggtagggcttttatagggtcttattttactgaaaattgaagataatcattcacatttggattacaagtgtttgtgttatgttataaacatttaatgccgtagcccaaatattaacaagcatggtcatattttggtattgccacggtaggtattctgggaagtgtgagtagttgttttttcctaccctctgtgctg

SEQ ID NO: 187877 - DNA, 207 bp, Homo sapiens
tcctcagaccacatgtacttctcaccaactggctgcaaatttggaggtcccaccatgccctcaagttcgataactcactaaaacaattcacagaatgcagaaaagcatgatactttctttctcttttttttttttttttttttttggaaagggattttggcccggtcaaaaaaaaaaacccagggggggccccggtccccctggttg

SEQ ID NO: 187878 - DNA, 321 bp, Homo sapiens
ggaagcaagtctgagcctgtgcccaggggatgcccaagtaaggggagggaggaccacagggcaatgcctgattgtggttcacttttaggttatgactttttaacaattgctttcgacttccagatcttctagaagttggcaggggtcttatctctttgcgtttgaggagtatgcagggaactaagcccaggactcgcagggttccctagctgtgtagcctcagacgggctactctgagccttaatttcttcaaccacaaaaagctgagccattggtcagatggcttctaacatcctttacctctcccttgttcttctcctg

SEQ ID NO: 187879 - DNA, 253 bp, Homo sapiens
atggagatgataataattgtcacccaccttacagggctgtttggaagactaaatgagttattagatgttaacagtgccttgcccatggtagatgttatgagaatgttagctgctattcttactgctgaattaagtccctagagcttctattctactgtcatattggtctttctcatctgaaactcctccttggtattatagggccacccactgctgatgtaaatcaacctatttctcactcagtggcctttgt

SEQ ID NO: 187880 - DNA, 371 bp, Homo sapiens
agggaaagaaacacccgggagaggaagttaaggacaattaagactttggcagccttcacgatggagaacctgtataccctcttacctctagattctgaaagcaaattaaggggcgttgaatggactggttttcaagcgcagaatgtagcagttcccgattcccttttccttagttcattgattctcaaaccttataatacatacaaatcactgaggagcccgttaaagggcatattctgggtctccctgtacttctctccacctcccaattcagattccccagatgtctgccatagggcctttcaagctggaattcagctgctgcgctgtgcttcctggcattttggagacacacattttgggaacacccc

SEQ ID NO: 187881 - DNA, 861 bp, Homo sapiens
cctggaaaacctaaaagccagcataggaaggaagtggaaaatgaaatgctgattgaaaataaatctggaagtccgggcgcggtggcttatgcctgtaatcccagcactttgggagaccaaggtgggtggatcacctgaggtcaggagttcgagaaattctgtctgtaccaaaaatacaaaattagccaggtgtggcggcacatgcttgtaatcccagctactcggaggctatggcagaagaatcgcgtgaacctgagaggcagaggttgtggtgagccgagatcaccccattgcactccagcctaggcaataagagcaaaactccatcccccacccccccaaaaaaagaaaagaaaagaaatctgaagaaaggaaaagagaattgaggataaagctttgggatacaaaatccaaaatcaaatgctagaaataagttcaaatatatcactttttcctaccaaacatagaaggattaacctcatatattaaaatacaaaatatcagtaacaaagcagcacttgcaaattaaagaaagaaaaacaatgggaataaaaattttaagtaaatattcacagaaagcaagctgctaccacaaaattaattttagttcaaataaaatttaaggaagaaataatgaacaacaggatagacactgcacatggagggaccatagaaccgagtaggtgaagcaacgtcaagtccaacgctggcctcgcctccaggacatacaaagaaactaacaggaagagcaggtctagagagggacgctggaactcatacttctgaatttaaatgggaaatagacaaaaatgttacgtgtttataaaagattttaaaatcacaacaaatgctgaatataca

SEQ ID NO: 187882 - DNA, 171 bp, Homo sapiens
tggaatctaccttctgttcttacacataatgtgatactgctcattaggtattgtgcagtcagtatttttaaatgcccactattttcaaaattatctaccagatattttgggagattaggaagattcatgagacatcttgtctggcttttaaaaaaataacatgttgattag

SEQ ID NO: 187883 - DNA, 391 bp, Homo sapiens
catctggacatctgacacgaggtctccgggtaattagtgggaaatgttgcaacatatccagggatatttaataaatatttcttgaatgaattaaggaggctcagcaactccacatttgctcacaccagaaaagtataacagagaagcttcttgtacttctctgggcccctcctaagtacctttaaagggccccattcctctgaccacactataagagttatatatagtaaccctagtgtcctgtcctcaggggactaatctcagtctccccactcttcttcagcaacctcatcccttatctctgctcaaagcaccacttgtattctaataattgccaatatttatttctagctcacagcacttcccccagcgccatcgaaaatcaaacttt

SEQ ID NO: 187884 - DNA, 854 bp, Homo sapiens
ggaaaagtcagcccctcctgcacgagtgggagctgcaaccttttagaattgataatcacaaacccctcagacccaaagtggaataaagaaaaatatgtaacattaggcattgatggaaaaggactagatcctagtgtaagcatcctaataaaaggagaggttcaaaaacgttctccagaaccagtatttcagactttctatgatgaactaaatgtgccagtacctgagattccaggaaaaactaaaaatttgtttttgcaattagccaaacatgtagcccagtctctacaagtcgcctatgtcatgtttgtggaggaaccgtaacaggagatcaatggccatgggaagcccgagaattggttcctatagacccggttcctgatgaattcttagccccaaagaaccaccctgacaatttttgggttctaaaagtctcaattattggacagtattgcatagctagagaaggaaaaggattcactcatcctgtagggcggcttagttgtcttgggcaaaagctgtaaaatggtaccacaaaaacagttacatggtggagttccaattacacagaaagaaatccattcagtaaatttccaaagttgcagactgtttgggcccacccagaattccactgggactggacggcccccgccaggttatactggatatgtggacacagagcttatgctaagctgcctgatcagtggacaggtagctgtgtaattggcaccattaagtcatctttcttcttactgcccataaaaacaggtaaacttctgggcttcccagtctatgcttcccgcgaaaaacgaagcatagccataggtgattggaaagatgataaatggccccct

SEQ ID NO: 187885 - DNA, 578 bp, Homo sapiens
ctgagactacaggtgtgtgccactgtgcccagcaagattttaaaaaatacgtatgcccggacaccactctaaaccaactaaatgagaatcagatatcgtgaagtcactaatcattttgctcctgggtctttatgacagttttgctcctgggaaactcctgggaatgtggtagagagagagaaagagatgggaaaataagattttaagaagtgttgctatgcattttgaaaataatttttatttggtgtttgtcttgagggaaggcggtaaacatttcaattgcctttaagtgtgcttggatgctggaacgatggttctttgaatgcagcgtcaaactggcattgggtcacatggcagccagcattaatctttatgccacatttataaaacatgaatgtcatgagcccactctcagagaccttataatttggagggttaggtcagatccacaaatctcttctatctcatggtaaaggaaacctggcgtgtagcaggagatggtgtgataacaataacatatcgcatgatcagtatttgtattcttcttagcaatattaaactttttgacctcctccatt

SEQ ID NO: 187886 - DNA, 261 bp, Homo sapiens
cagcatgctgagtagctaggactacaggggcacgccaccatgcctggttaacttttgcatttttagtagagacgaggtgtcacctatgttggccaggctggtctcgaactcctgacctcaagtgatcctcccacttcagcctcccaaagtgctgggattacaggcctgagctcctgggcttggcccaagttactatcctttcatttcaacctgcagaattccctttattttatcttacaggtcaggtctagtagtaatttc

SEQ ID NO: 187887 - DNA, 781 bp, Homo sapiens
gattagttaactgcggcctgatggcctagggtagctggtttcgaactcctggcctcaagcgatccacctgccttggcctcccaaagtattgggattacagacatgagccaccacacccggccacacatgtttttataaccatataattgggatgtgtgtggtgatttacacctgtaatcccagcactttgggaagccaaagcaggaggatcgcttgagcctaggagttcaaggctgcagtgaattatgattatgtcactgtgctccagcctaggcagcagggcaagaccctgtctctacaaaaaattgtttaaaaattagctgggtatggtagtgcacgcctgtagtcccagctactggggaggctgaagtgggagaattactggagcccaggagttcaaggctgcagtgagctgtcctgtgccacttgtatggcagcctgggcaacaaggcaagaccctgtctccaaacaaacaagcatataattgggccaagaaaatgttacatttccctgaatattgtaaggagactaactggagaacagtcccattctaaactgaccttttatttttcccttcttcagtcttccaaccttgaagtagtcctatctgttgcctcagatactgaacactgcaggctacaattatacaatgagcagattgattaaactgcaaatttaaatatcttaggattgtcagtgccatttggcaatgttgtatatcactggtcagctgtctcctgtttcctacaacagatatttagcgtattttttctttcaacaa

SEQ ID NO: 187888 - DNA, 537 bp, Homo sapiens
cttttttgagatggagtctcactctgttgcccaggctggagtgcaatggtgcgatctcagctcactgcaacctccacctcccgggttcaagggagtctcctgtctcaccctcccaagtagctgaagtgggagaattactggagcccaggagttcaaggctgcagtgagctgtcctgtgccacttgtatggcagcctgggcaacaaggcaagaccctgtctccaaacaaacaagcatataattgggccaagaaaatgttacatttccctgaatattgtaaggagactaactggagaacagtcccattctaaactgaccttttatttttcccttcttcagtcttccaaccttgaagtagtcctatctgttgcctcagatactgaacactgcaggctacaattatacaatgagcagattgattaaactgcaaatttaaatatcttaggattgtcagtgccatttggcaatgttgtatatcactggtcagctgtctcctgtttcctacaacagatatttagcgtattttttctttcaacaa

SEQ ID NO: 187889 - DNA, 312 bp, Homo sapiens
atgtatattcctcaatctccaagtattttgaaatttttctatcattttgctattaatttttagttaaagtcctcatgtttgagaacttattttgtatgattactgttattttaatttcacacatgtatgtccaatggccaagaatgttctctatcttgcagagcattccctgtgaggttgagaagatgtatattttgctattggaacgataattctataaatgtcagttggatcaagttactgaaataggggctgaaatctctatctataataataaatgtgtatgtttctccttgcggttatcagtttttg

SEQ ID NO: 187890 - DNA, 375 bp, Homo sapiens
ctagaggaatcccggcaggaggttcgtctcccgagagcctcacagcctcgtgggctgagaataggtgaagtcagggcacctctgtgcagagggaaggcggggtgtggggcccgtcccacgcctgggcgacccccatgcagcgaacctcgaggccgtcactctaaagctcagtctcactcagggtgccagaggtgcgcgccccaccctcagttcctagcctgggcctaggactggctgaccccgtgtgtggggccagggctcccgaacacgggtccaccggctgcacgagagtttccggggggccctacccttccgattcggcaggtttaggccagagcccatgaacccagtctgtatttttaaacacctgaagca

SEQ ID NO: 187891 - DNA, 241 bp, Homo sapiens
acatatacacctgagtggaatagaactaggagtccagaaataaacccatatgtctatgatctattgatttttgacaaacctgcctaaacaattcaatggatgagagatagtcttttcaataaatggtgccgggaaaactagttaatcacactcaaaagaactcctagctcacaccatacacaaaaattaattcaaagtgaataaaagacctaaatataagagttaaaactataaaacttta

SEQ ID NO: 187892 - DNA, 620 bp, Homo sapiens
acctcattcagccaagtatttgttctctacctcattcagtataaggcagcctttaatttgcttagaaggcaacattagaaggttagagttcagcaggaacatagaattttaaaatgtgacttcaactgaataaatttgaatttctgtagggagtaaagaatcaaaacacctatttaaagactgcaaaatatgataattatttttaaagtaattgattaaacctggtaggttttcccaaaatgaaaaacaatcagttctaaaaccaaagctgatttttagaaaatgtgaaaatgtaaatcaaccctatccataatagattctctaaaactttatcttacagtcactttcaaataactattcaaaaatgtaactgctatattaacgtcttaaaataatttaaaacattttaaaatatgaatactgtagtttaaaacaaagaatctaggggaaggaaaagtagacaaagaaatgccaattccagtccaaagctgtatttgccaagttttcttagaatgacttttaccgatttatgaattcttatacacagaatgcataatggaaatactgatttttgtctaaagtggcattattgactgctgctgtgatgctactataatgta

SEQ ID NO: 187893 - DNA, 171 bp, Homo sapiens
ttaatatggtattttcattctagaagagaaacagctaataattgagaaaaataatgcagtttcatacagtgataagtcctctgaagaatgttaacaattaggaaataggtaaggggagatagtcctgagctcaggaaagatgtcagggcttggagaaataaatttgggatt

SEQ ID NO: 187894 - DNA, 390 bp, Homo sapiens
agatttcagattatgctctgccttttatattcacaaaacaccagaggaggaagatgcaggcatcaatagatttagttgataaaaccccactgtgcccttgagtaccctctgaagcccaggaaccagcacattctactccagctctagacagcgctatctaacccagacataaaacctatcttcctaggctgccatggccacagaattgcttctcaactaaatttcactggaacaagaaaggacaggttggaaaacaacaggagcccaggtgataagggtcaacagaaatgacgatcatggctagattcctggggagagccatctgcaacaacatgtcatttaaacatgctggccagacccagaggcagatttcacagagcagaagtcttc

SEQ ID NO: 187895 - DNA, 234 bp, Homo sapiens
ggtgcgtttgaaatctgtcatgagtttaaaataacttgtgtcatcatcgatgtgtttattttcaactatattcaactgcttgggtgtaggcatcaggtaggtaaaaaaagtgggttttattatgagtagaggttttgccacgtaattaccatggagggagggaagagcaaaggagttgagagtatagatacaaaggaatgattactgtaatgtgggtaagagaggaatggaagg

SEQ ID NO: 187896 - DNA, 689 bp, Homo sapiens
atcgaaaaaggggtctggcacagagatagatgaatgaacactaacctcctccctcagtaccttgaacaagtgatgagttctctccgctttgtgcctttacacatgtggtcctcagggaggtaagctgcctttctactcccttctgcattccctacctccccctgcctaggacacttttaactcaattattcaagatgcagttccaacaccgaccttccctgagaaaccatccccaacaccccctggctctggcccgcagaagcccacacttcatatcctcccagagctctctattctagatgctgatgtgccctctgcggtcctcagtctgtccagtggactgtgtcctagtgggaggaactacatgtctgatctgtaaatcaccaactctaagcagggggctctaaatgaatgaaagggtaaatatatgaatgaatttggcaggtcatcttatatggttcctaatccttaatttgatacttttgtgctctccctgactttaactccagcccaccccaaattcaaccattctatttcagaaatatcatgcagattgacagcatgataaaatattacctgtataatttgataaggagcccctttttattttctctcccccaattccttgccatgtggctcaaaattaactgataagaatcactgataaataatcacaaaaaataccaggt

SEQ ID NO: 187897 - DNA, 208 bp, Homo sapiens
cagcgtagggtatgacacttttttgaaatacaaggtattaaatgccaatgatttataaatgtgtatcatatgccagaatattattatgtatcattaccctctagaagaggtatagtaaaactgttaatgtttccttaaggacctttttatttttctgatgataaatattggagttcacttaatagcttgtcctaataaggtagagata

SEQ ID NO: 187898 - DNA, 337 bp, Homo sapiens
tccttgttttctgtcccttagagcaaatggcagagaacagctctgattacagctttgacctaatttgtgttgctgttcaagcccttctaagacagactgcagggctttgggagacaaatcatgtgacctggatgccagttttactgtaggtttggaggtaaccatgaagagagatcagttgtaacaacttctagagcacctgggagcatgagtttggtcactggttcccatccagtgttccatatttccaagcacttattgggaagctggcccctgcttcttgtcaaggagtctgtgttcagaatttaataggcaggtgtccttgtctggaggacct

SEQ ID NO: 187899 - DNA, 256 bp, Homo sapiens
aaatgcacactttaaatagtcttccctgcaaaagaacacttctgggagccttgttttaaatctcattctctttttctctcaaaaaaaaaaaatgactgtttaacagaagagggaaaaaagcctccttgacacaaagcttttgttatccagttgatcagcaacgtgctttagatacttgtaagagggggaaaaaagccccacaacagacattgattttagaaaatcaataaccaacatttaataaaaggaacagagg

SEQ ID NO: 187900 - DNA, 390 bp, Homo sapiens
ttcatgcaattcttgtgcctcagcctcctaaatagctaggactacaggtgcctgccaccatgccgagctaatttttgtatttggtagacagagggtttcaccatgttggccaggctggtcttgaactcctggcctcaagtgatctgccggcctcagcttcctaaagtgctgggattacagtcgagccaccatacccagccagaatcttttgaggagtgttactgtagtggagaggagaaagatggggtggtagccggagggagaaatggggtcattttaaaattgagatgttcatatactatagaattcatctttttaaagtgcagagttcaatggtttttagtatattcagaaagttgtgcagtcctcaccactatctaattagaacat

SEQ ID NO: 187901 - DNA, 340 bp, Homo sapiens
ctttattcagttgtgctacttctcaaccttctcctaagctacactatgcaactgtataccccttttatatcactattactcagacagctcctacgttcctaactcccccaccaaccatctggagattaatcttgatcatgagataatttaccatagccactcctcagacctctacactaagaacaaaagataacagctttcaacttattatgctgtcactacttgatgttaattgggacttcattgaagatttgacattataatttttttcacaattaaattagtccaacagcaactatgttgctatagaaacagatccatattttcacagcaatccttg

SEQ ID NO: 187902 - DNA, 1223 bp, Homo sapiens
atggaggaaagggcccataaatgcacaagtgcctggtcccagcaaagccacacagtggcccttgtcttgctgatctggagcccctctgtgaaaaggggacagctgcggcctggtgaggcctgtccctcagggctctgtcagctctagatatccatgggggccctgagtgggcacctccaagagggctgttcatgaatacatggcagatccctcctccaagactccccaaaataacagagggagacaattgggggtgctgtggtctcctactgtggactgatcctaatgaaacctccttatttgcacatacaggcccataaggccagggaaattcagcttacattgtctgtgtgactttgggcaaatacttaacccctctgcacctccattgtaaaatggatataacatcatctagctcaagaagctttcaagaagattaaattagaaggcatgtgtcaggtgtccacccagtgtctgggtccagagttgtgcgcctctcctcaagcacctcccacctgctctgcaggcacacttcctggctggagatgggcacaatgctggtgagtgcctggtggtttagctgcctctcattatgtactgcagtcttgaaacatttttctttaactatttcgtatttcaaagagtgccttttaccattattccaaaaggttaaactttgctgctctttgtttcttgttttttcttttgccaaataataatattttaaaaagaaaaaagcctctataatctattattgcctgccactacaatttcataaagatgggatcataccaccaaaaagggagtaataatatcagaatacaggatagtccaagaaatcagagtaagcaacctacactggcacacacacacacatagagggagagagagagagagagagtacatttccattattctgttgtttcccggtttttcattctgttgttttccctttactgggagcagaccaaaccatacacactgatatgcaatgaaaacaaggtatgtcatagcctcgaggggaccctgaaaaaaccaggccctcaaacatcatcaatgattccctcccatcactaatttaattccttctggaagcatccactctatgccaaggcactgcattgggccctgcaggggatgcagaaacaagtaatccatggtccctaccctcagagagcagagggggaagcagtcaggagacaacagcaggtagcagaaggtaa

SEQ ID NO: 187903 - DNA, 506 bp, Homo sapiens
cattggtgaaggatctgcccccccaacacagctccacctcctactgttccagacagaaggctgctgcaaaagtctctgaaatgccttcaagggcctttttaatattgtattggctattagcactgaactcctttttatgcacatttctgaagactttttgaactttcccactgataatcagcttttctttttggccacttggccaggcttcaaattttccaaacttttaagctctccttctcatttaaatacaagtttcaccttgaggtcatttcttttgtcacatataggaccacaggctgttcgacacagacaggacacctcttaagctttgctgcctaaaatttcattccaccaaatacactctaaattatcaccctgatgttcaaaatgtcacaggtctccaggttaggggcatcgtgcagcaacattctttgctaaggaaaaaacaaaagtgaccttgactcctgttcccagcaagctcctcattttcatgtgagaccttc

SEQ ID NO: 187904 - DNA, 255 bp, Homo sapiens
cggcacgaggcaaagtgatggccctggtgggggggatgaggaacagggaaatgccgctgtgaggtgttaaggcacttctgcttaaactccatgtgtgaggagtgtgcctccctgtgcccttttagctttgaggctggccgtcttttggggtgttctcctcttcccacaaccttccctatctgagtaaattacaactccattcttccagatcaaaggcccaaaacctcctttcctcacacctcacattcagttaca

SEQ ID NO: 187905 - DNA, 233 bp, Homo sapiens
ctgacatagaacaaacctaaatcactcgtgataagtatacaagtaatgcttatacaaatgggcagatctggatttttagtaatctcaaacttagcatgtcaaaactgagctccttaccacccctgcctaaacctcctcttcccacaaccttccctatctgagtaaattacaactccattcttccagatcaaaggcccaaaacctcctttcctcacacctcacattcagttaca

SEQ ID NO: 187906 - DNA, 376 bp, Homo sapiens
accattaacatgtcttatttaggtgtgtcaagagctattttagaaggtgctggacaagctgtggaaagtgaatgtgctgtactagctgcacagcctcacagagattttataattacaccaggtggatgcttaaagtgcaaaataataattcatgttcctgggggaaaagatgtcaggaaaacggtcaccagtgttctagaagagtgtgaacagaggaagtacacatcggtttcccttccagccattggaacaggtaatcttcctgaacactggactgacatgaatcatcagctgttttgcatggtccagctagagccaggacaatcagaatataataccataaaggacaagttcacccgaacttgttcttcctacg

SEQ ID NO: 187907 - DNA, 552 bp, Homo sapiens
cctaaaaatatttctgaacacagagaaaagaacacagggctagacatactagagtagaattcaagcactgaataggccaaactggaccatttcaaatcagtaagagacaaaactcataataaagacaaaacatcttctaatcacagaaagtaaaactgttagtaacaagtggagaattttttttttttttgtatttttggtagtgatagggtttcatcatgttggccaggttggtctccaactcctggcctcaagtgatccacccacctcagcctcccaaagtgctgggattacaggcgtgagccaccatgcccggctaacacatggaaaaactgacaaagcataacttcattgaaaatccatatttaattaaagtctttatgagatcaaatgaaataaatatgccacataaaatgtaacaatattacagtataataaagtctattattatttgagcacctactacttatcgagcaatgcaccatatagtctctcattaaatcctcaaaagacccacttggcaaacaaaaaaaactgagacttcatgaggtt

SEQ ID NO: 187908 - DNA, 573 bp, Homo sapiens
cagcggaacaagcaattctcgtgcctcagcctcccaagtagctgggatcacaggcatgtgccaccacgcgcagctaattttgtatttttagtagaggcgggagatttgcttgaatctgggaggcggaggttacagtgagcgaagatctgcctactgcactccagcctgggcgacaatgagtccctgtctcaaaacgaaacaaaacaaaaatttatctgacattagaccctttggcatgaaataatttatggataccttctctgtagtaaattggcttgttatagattgtgtattccagagttttgtttgttccaatatataaattatacttgtcggactaccaaaattttttgctaagtagcatcaaatatatatcacattaactctgttttttttttcataaacaggttagaacttctttaactactcaagttaaaagggaataggttattttccaaagtgatgtcataaaaagttgaaataattacttaatttttggccacttttctgatagtttattgttttgtatacatagctagcagttttaagtcttaagtaaactggatttaccaa

SEQ ID NO: 187909 - DNA, 224 bp, Homo sapiens
tatcagctctactctaattaggtctaatgtccataaagtatgcacactcagaattatttcctaaagctggaaaatctttacaagttttcgttccttaattcttcgttcatctttttaaatattttctcacctcacggactcaattttttctttttcttttttttttttttttttgagacagggtctctgtcacccaggttggggtgcagtggcatgatcttggc

SEQ ID NO: 187910 - DNA, 354 bp, Homo sapiens
cccttagttcctctggattggtagaatggaacaatggaataataacacaattggctaagtccccggattggtagaatggaccaatggaataataaaaacacaactggctaaatttatggaggcttttcacctctgctaggctgaaggcactccccttggtattgctcaacctttgatccatccctttatcagctctcttctcatgaaattgtaactggaagacccaggcacatgggaatcaagatgactgatacaaatttactgaatggggacatcttgcactgttgtaagggacttgttcaccagctcatgaaaagccagaccttagtgcaagacacgtcccacagtgcgctc

SEQ ID NO: 187911 - DNA, 605 bp, Homo sapiens
  misc_feature (120)..(120): n is a, c, g, or t
  misc_feature (298)..(298): n is a, c, g, or t
  misc_feature (300)..(300): n is a, c, g, or t
caggtataccagaatatgtaggagcccaaacaactcaaagcaaaaacaaaaataaataatctgatttacaatgggcaaaagatctgaatggatatacttaaaagaaaacatacaaatgancaacaagtatatgaaaaaatgtcaacatcacaaatcaccagagaaatgcaaatcaaaatcacaatgcagtatcatcgcactccagttaaaatagtttgtatcagaatggcacacaataacaaatgcaagcaaagatgtggacaaaggggaactctcacacactgttgctggaaatgtnantaattatagccactatggagaacagtatggaggttcttcaaaaaactaaaaatagaactaccagagaacagtatggaggttcttcggaagtatgtagtcagctaattaactgtaattctttttaaaatttgagtggcagctttagggtttatggactactgcagttcatcttcaggcaggtgatatgagaccacttcaaacaaagtccaagaatcttacaatagtatttcttcattccctctcctccccatcttttggttactgttagcatgcatttggctcttacaaatgttatacattctgtg

SEQ ID NO: 187912 - DNA, 301 bp, Homo sapiens
tctctgtacaaaacaggaaggaaatgagatgaaatgaactgcattataagctaccagagggtgcctaatggcatcttcaccacatagaagtcccaggaagaaagactgatgattttgcatgggagagaagcccagacaagcaccagggaaggaacctaagcccaggaaggaaggaaagaaggaaggcaggacggtagaaggaaggaaggaaccaaagccaaggaaggacggacggacagaccagtcagcaccggaaggaaggaaggcaggaacctaagtcccgtaaggcaggttgctaggg

SEQ ID NO: 187913 - DNA, 634 bp, Homo sapiens
aaataaaaacatgaaatgtgattttgaaatatttaagatgattgttagagaaacattgttacatttcatattattcagtaatcctgtatgataaagtagctgttttttcataaataattatgttcagtttcctgtttgataacgcaaaatgtttcactgttttaatttcatatattctttcatatttcacaatatgcttcttgtgtgtagcagaaaccagattcaatagctacatatctagttgacttcatatgcatttacttcaatggacttcaacttatttggccctaaaatagcttttcattgtttttcccttggtataaaacaccttattcctctgtattcctctgtttctactggcattgttactaaataaaaggagaaattatctacaggcacataattcctaagatcccacctcttctacaactcctatctctgttacttcaatttcaaaagccacaaaatgacattattttttcagtcgtacttgtaaaaattatgtacaaatcttcaaaataaatttcagttaaaaaaagtatgtacacaaaatcttctacccaatgaataagatatttggaattggttaaaattattagttatagactaagcaaatatattatattttaacctg

SEQ ID NO: 187914 - DNA, 236 bp, Homo sapiens
agagaacaatggggaagaacagagaggtctgaaggaatgtgggggtgtttggttctgtgggatgacatgagcctctcctctgtcgtcccagaaaaacctccctactcgttatgtgacttcgaggctgtcaggacctgctttatgtttgggaattgaatgacatttttttttttttttttcctgagacggaatcttgctctgtcaccccaggctggagtgcagtggcacgatctcag

SEQ ID NO: 187915 - DNA, 708 bp, Homo sapiens
gaagagaaatccacattcctagagggtttgcattggcaccacagggctacagttggaaagggacaaagaacgtgttcctgcagtaaagacctaacaggtgtcagagctggctgccacgtcctcctgcagtttgccggaggaggtaagggcatcctgcatactttatgtgaggcaaatacttgctcaaggtcacaggtctgagtaattggtagagctgggatttgaacccagatctgtgtgttttctttccctttcccaggctgcttcccagaccactgggcagccagagggcctgggttttggaggcccccactccctaccccatgcagactgggtgtggcactgaatccgcctctagggtttctgggtttccatttcctcatctgtaaggtggtgggtctgaacctgtcattccatgtcacacgagttttgtgaggatccaatcagaggtcagatgtgaagagagttttgagtgtgtaaagtaaatacaggctctagcaaacaatgtcctggctgcaggcggcatttagggacaccaatgtattttgcagtccccacattagaagttcagttcaagttcagtttgaattagaagttcaagttgttatattctgtgcaaaggtgaagaatatgcatgggagatacaggggacaccgctcctgttgtcttagggacatttgtgggaacaatatactggtacgaagagga

SEQ ID NO: 187916 - DNA, 478 bp, Homo sapiens
gggtatacagttctactgtaaaagtagcctcttttgggattcaagaggccaggtagttttgaaggagaagggattaaagcttaaaaggtttgcgttctaaacctggcccttatcactttactacttgtgggacttgaatcaagtcattttacctcttgtaagcctcagtttcttcaactctaaaatatgggatctcagctttcctatttacttcaaaagctagtgtgagaatcaattaacatgatctgtaaaaaaaaattaacatgatctgttaaaaaaattttttaattgacaaataataattgtacatattcgttgggtatatagtgatgttttggtacatataatagtgacaagatcagggtaataagttctttatacatattgggtgactgatcgtttaattcataggatactttgactaagagaatatctcctgatccctccaattaactgcatacttaacaagtactaacag

SEQ ID NO: 187917 - DNA, 632 bp, Homo sapiens
tgacaggacaaaataattacaagaatcaaacagccagggggctacgcaaagactgggaaaagttaaaatacagaaacgcatccctgggagatagacagttgttcaagagttactttggttaaacaaaaggtcacacgtgtgtttatttattggtcaaattagaaaaatctttcaatatctcctctctcaaattctcgaatttcaagttttccttaatgttatagctcctattagttccttggtggtgttctcaccctaaaatttctttttaaaaaaaatttgtattttttttacttttattttaggtccagggatacatatgcaggtttgttacataggtaaacttgtgtcatgggagtttgttgtacagactattttgtcacgcaagtactaagcctagtacccaatagttattttttctgctcctctctctcctcccaccctcaactccctaaaatttctttaattttgaaaatgtacttgtttctttctttgcccccaaagaaaatatgatttttaaaactggaaagtgtcatttagctcaatcctttcattttacaaatgagaagaggggacctcataggcttcatagatgtgtagcaagtctacacatagcctagtctaaaagctag

SEQ ID NO: 187918 - DNA, 706 bp, Homo sapiens
gtaagggtcacgtttccggtctggtcattctgagctctgagcgtctgctgtgtgccccagactaggctgtgtcctagcaagagacaaaagatgaaagaggcacaggcgtgacagtgagtttgagttcaaaacagcatgcatactctgccaggctttgtgtacctgcagtgccctgccttccatcagtgttaattgtcacctgtgtgccaggtattgttctaggcactggggatgtgctggcgaatgtagcacatgggaaccctagccctggtagagcttttgttccagcatggagggaggggaatcaggactttaaaagcaggtggtgataggtgctctgaagaacaatgaggcaggggaggaaaatagagggagtcggtggtggggaggtacgacaattcataaacggtcaggtcagggaaactctggctgcatgaggatgagggggtgagtgaatcacgtggctgtccaggacgagaaccttccaggcagaggtggcaaagtctctggtaggtgccaaggatagaataaccctggaaggaaaaacccaaagccaccagcagtggttcccctttggaaggaatggcaacagggaggcgtcaaggagactgtttttcaatgcacgccttttattcggcttctgtatatttctaattacttcttcaaaatagcatttcaaagtgaagaaatggaacggtgaggtgga

SEQ ID NO: 187919 - DNA, 390 bp, Homo sapiens
ggatctgggggtgccagagagtggggacaaggggtgtaacagggaagaggggatttaatagggggagcagagggggagcaaagatgagggaagaaagaggcagaaatatgtggagattgggattgggacaatgaaaagtttgggcagaaaggaataagaggtggaagaagttgtaggaatggagcagaacagggggaagagaaggaatggagggaagaaggggagaaagagcaggagaggagaggggctcaaaatgaggagcagaaacctggggggaaacatcggaaaaaaagagccagggagggaaggtgaggatgagatatgtacagaatgagagagggaaacacacaggaaggaagaaggaggggaccttggttcaggtgagtggtg

SEQ ID NO: 187920 - DNA, 438 bp, Homo sapiens
cacagcccacttcatttgttcttctctaatccagacccaacctctgttatttggtgttgatttctttcacaaaaaggataaaagaaggttcatattcacatatatgctccagtttcttctatatgcatgtgcaccacattatggaaacagctaaaagcccctctttccttgcctgtaatatgggaataatcatacctactctgtggggttggtgtgagtagtaaatgtgacaaaagactgggcacggtggctcatgcctgtaatcccagcactttgggcggccaaggtgggaggatcacttgaggccaggagtttgagagcagcctggccaacatggtaaaaccccgtatctactaaaaatacaagaacaacaaaaaattagctaggtacagtggctcatgcctgtaatcccagccacttgagagactcaggtgggaa

SEQ ID NO: 187921 - DNA, 395 bp, Homo sapiens
ctccctttgctgtggtcttcagtgtaagacaggggtccccaacctctgggccacagaccagtcagcagcaacattaaattctcataggagcacaaaccctattgtgaacttcacatatgagagatctaggttgtgtgctccttatgagaatctaatgcctgatgatctgaggtggaacagttttatcctgaaaccgtcttcccctcccccactggtccataaaaaaaaaccagtcctgggtgccgaaaaggttggggactgctgctgtaagacctgtggcagtggccagagaggtggtgattaagttgtgtgttgcaggcgtgagccaccgtgcctggccttatttatcaacatttatggtgagaattggtcattcaagtggaactgatccttca

SEQ ID NO: 187922 - DNA, 160 bp, Homo sapiens
aacttgagaggccgggagagggtggagtgtatacggcatgtattagtatttactgtgttcatccctctgaacagttagttcagagattagagaagatgataaatcagcagatactggtgtggtcaggaaaagcttcacaaaagaggcgggctttgcaggg

SEQ ID NO: 187923 - DNA, 401 bp, Homo sapiens
gctaggttataaagaaacttagccggggcttccccaggaagaggtggaaagagcgaggcccagagagactcggtggcggtccaaagtcacagcgattcggctgctggcgaggacagggcctggcctttgagtctgcgggcgccctgcctgcatcgcttggcattcatgccaccccaagggcaaggaacccaggtagcagggcacccagcttccacacgagaaggcagcttacagagaaataggactttctcctgaagagggcacttcccgaggcgggggtgcaggccccggcaaagcccaggtgatggattcactgatctggctgctcccataccactgtgtgacttaggacagtcacttgacctcctgagcctcagcttcctcgtctctaaaacatgata

SEQ ID NO: 187924 - DNA, 923 bp, Homo sapiens
ttggggattggggatttttcctattttaacacaatcgtcactttaatccttcaaggtaggtattatttgctccatataaagatgaagaaaataaggactaggaaagttaataacttgccaagaatcacacaaggaatgtgtagtatttaaacccattcaatatatggcattcaaaccttcaaattctgggtacttctgtatctctctctaggttaaaatgaagctaggacatctcataaagccaaactattgtttagatttgacagaaggaccaacatcatataaagcaatgaatgtactgattcctccctgcagaaggcatcgtcatgatgtttaccttgcagagtgtcattcctggagctgaaatgctctgtacatgagaaaagtcaaggatctctgacattaagagctgcctaggccgggcatggtagctcacacctgtaatcccagcactttgggaggctgaggcaggtggattaccggagcccaggagttcaagaccagcctggccaacatggtgaaaccctgtctctactaaaaatatgaaaaattaaccaggcatagtggtggtgcgtgcttgtgttcccagctcctcgggaggtagaggcgtgagacttgtttgaacttgcttgaaaatgtggaggttgcagtgagccaagatcccaccactgcactccagcctcggtgacagagtgaggctatgtcacttacacacacacacccccgagcttccttatagctgtgtagtggtagggctcaactctggaatcatatgtcaggagagtaatgtggaataatagtagcctgaaatgtgatcccttgacggatctttaagcaataggcctttcctactttttcttacccttatggttttggatttaacctcattctcccttcttggtgtttgttcttgacctcagctt

SEQ ID NO: 187925 - DNA, 616 bp, Homo sapiens
tcttaaagctgtgtctttacatgtttgatttgccagctttgaaaatgcaagattcagcccggtgcagtggctcatgcctgtaatcctagcacttttggaggctgaggcaggaggattgcttgagtccaggcattcaagaccagcctggacaatacaacaagacctgtctctcaaaaaagaaaatgcaagatttcacatagaaatttagatttctgtcttgtaaaatgaaaacatctgactgcatggggcctgaattcccacaggagctgagtgaatggggcttaggcactctggtttgccctgtgccctctcctgcctctacccaagttgattgattaattgccatttatcgccattctgaaactattctgatccttacacttggcctacctcacacatacttgcaaggttgcttgctggtccttaaaacacccaagtttgggactctgcaagcttcattgtttagaattgtccatttcagactgagccaccacgcccagctctggttcgattttttcatttctgaccctcaggttgtcccagattcaaccatggtagccctatcagactgactcctgaaactctttgatactcccccatccgtttttgaccttca

SEQ ID NO: 187926 - DNA, 831 bp, Homo sapiens
ctgcggttcttaagagtctatttaactattcacttccagagaaatatatgacattaatttaaaaaatttcaatttcttaacatatatatgtattaaacatggttagaaaagaagaattcccaagatatacaagcatataaaacgagagtctctctttctatgtcccttatacccagtttcccctgccaaaagtaatcactgttccagtgtcctggtatccttccagagaatctaggcatatattgtcttcaaaattaaaacacacacatgtgcccggtgcagtggctcatgcctgtaatcctagcacttttggaggctgaggcaggaggattgcttgagtccaggcattcaagaccagcctggacaatacaacaagacctgtctctcaaaaaagaaaatgcaagatttcacatagaaatttagatttctgtcttgtaaaatgaaaacatctgactgcatggggcctgaattcccacaggagctgagtgaatggggcttaggcactctggtttgccctgtgccctctcctgcctctacccaagttgattgattaattgccatttatcgccattctgaaactattctgatccttacacttggcctacctcacacatacttgcaaggttgcttgctggtccttaaaacacccaagtttgggactctgcaagcttcattgtttagaattgtccatttcagactgagccaccacgcccagctctggttcgattttttcatttctgaccctcaggttgtcccagattcaaccatggtagccctatcagactgactcctgaaactctttgatactcccccatccgtttttgaccttca

SEQ ID NO: 187927 - DNA, 579 bp, Homo sapiens
ataaaaccaccagatcatctgggattcaagaagtgtagatatttgaatacaaacatggggttagagtcaggggaccttattaacagtcatgaagctatcctggtttagaacagaggttcaggtcaggcacttaaacccctaaattgggaagccactagcattgcttttgtaaaggctagaactctgctttgaattatgtgtctttctgccacgttgctccatcaattatcttttctcccctgtgtcttcagcatttccctcctcactgccctaccccgaacatgtaaacatgctcaggcacacccatgtgttacctgggggaaggtttcttcccttcatccttagttccccttcacttactatcctatcttcttcctttgatggctgttatttattttgttgttgttaatttttgtggatacctagtaggtgtatatatttatgggctacatgagatgttttgatagaggcatgcaaggtgtaataatcacattatggagaatgagatatccatccccttaagcatttatcctttaagttacaaacaatccaattacacttttattttattttttattt

SEQ ID NO: 187928 - DNA, 322 bp, Homo sapiens
attggctcatggttcttcaggctgtgcaggagacatggcaccagagatctgctcagcttgtgatcatgcctcaggaagcttacaatcactgcggaagcaaagagggagctggtgcatcacatgacaaaagccaggagctaaagagagtggggtgcggagaggtaccacacacttttaagcagccagatcttgtgaaaactatctcaaggacagcaccaaggggatggtgttaagctattcatgagaactcctccatccccatcatccagtcacctcccatcaggccccacctccgatactggggattacagttcaccatgag

SEQ ID NO: 187929 - DNA, 418 bp, Homo sapiens
tctaaatttgatttatctcaataaagcttttttttcatgctacttagcatgaaaacaaagaacaatttaatttccttatgggaagaaggactcacagaaaggtaccaagaagtgatatcatttgtgctaagtatatgttttactattctctaagtctttaaaaatttgaaaatacacacatagcaataactaaccagaatagtacaaatttgagcatgctggttttgaattacatattgctgtactaatgatgttcataaatgaattgtcaagacaattttcaatacaatggcagccaaataaataaatacacaaaacaccaagaacagggatttatattatacaagcaagtacatgaaatggaaaactaccatgagagccaacatacactggatttaggattaaggagtgtaaatat

SEQ ID NO: 187930 - DNA, 440 bp, Homo sapiens
tcttctcctagaaatctgcatgattcattctttcatgtctcctagtcttgcataaaatgtcactttctcggggaagacttccatggatactctgtcaaaatttcaatacccccacacttcttatcattgctccagttctttttttcttatttactgtcctctgtagcactagtcccatctactgcagcatttcgttttacgtttctccagtttgaatgtgagctccctagaggaagaagatttgactgttcacttagggcattgaatgtctggtacatgctagatgctcatgaaatatttgttgaatgtaagaaaagaagaaaggaaggaaaataaaagaaaattaacagaataataattccccatttgtaaatacattttaattttgtagagtgcttttatgttcatagtcacatttaatcttcacaggtgttctgtaa

SEQ ID NO: 187931 - DNA, 320 bp, Homo sapiens
gatcgcgccactgcactccagcgtgggcgacagaatgtggtgctgtgtaaaaaaaaccccaaaaaagaaaaacaagtttcaatataccaatgttttccaagagtttaaagaactctttttgtcatattgcctaggtgtttttcctctctattgaagttaaaccaagaaaaaatagactttgtgacgttggatacagttttcttgagtttgatattaagcactggatagttttatggaaccatagtttatacgtgttcctccgctctcccccgctcccctcccctccctcccctcctcaagtctgcccttctctctccact

SEQ ID NO: 187932 - DNA, 442 bp, Homo sapiens
agacctgttctagtcacactctcctatgagtctgccgtataggaagggcgttatccaccttccactgtactttggcctctctgggatagaattctataagcaggcacacaacagaggcagttccagatttcaactgctcatcagatggcgggaagatgaagacagatggtgcagccacagttcgtttgatctccaccctggtccctccgccgaaagtgagcggagtccagttgctacgctgctgacagtaataaactgcaaaatcttcaggctctaggctgctgatggtgagagtgaagtctgtcccaggcccactgccactgaacctggctgggatgccagtggccctgttggatgcatcatagatgaggagcctgggagcctggccaggtttctgctggtaccaggctaagtagctgctaacaccctgactggccctgca

SEQ ID NO: 187933 - DNA, 98 bp, Homo sapiens
tcaggctgatgtccaaactcctctcaactcatgctcaatgtatttgcattcccagtctctttttaccagaaaagaccctagaaaaatctattgaagac

SEQ ID NO: 187934 - DNA, 192 bp, Homo sapiens
gccacaccactagtttgaattttagtcacaaagggtgcagacttactaagaattcacagtggagacatatttctgttttactcttctaccaagaaccaaagccaataaagacccttattctcattatcgccctctgcagaatgagcttttacctatttcacttactaaggatgcagacttttgggaggcttc

SEQ ID NO: 187935 - DNA, 384 bp, Homo sapiens
ctgaaaacaacctgcgagtatcgtttccatggagagagatggaattttctgcctttctcacagctccctgaccagtgcgaggacagtgtgagcccacaacttggggcttcctttgaagccacctttatctgttgaccttggtggtctggaatggggtaggcaccaggactcccaggacagcctccaagactgtgattaggagaggaagctcagaggtccatcagtggtcatgtgaagagaatgaagaggtgagggggaagaagtccctagggaagaggcagggaggaagtactgggtggtggtgtccacaggggtggcagggacccactcggggggtcctgctctcctgcattgggcatgtgcctttccagttgactgcttctg

SEQ ID NO: 187936 - DNA, 361 bp, Homo sapiens
tcaatacaaacacgcagagttgttgtggggatgtcctgccctacacaatgcttagtgcatactgggtattccataaaacattacatcactctccgatttgaagatgctacttttcactgtggcattattcacaacagcaaagacttggaatacttagactacatcttctcttattggtcctcagatagagaaccttgccagttcctatccaacggtttaatctgtgctttccaaatacattaggcattctgattttggcacctttaaaaaattccctccacatccattgctctatatctgcttttattcttcatcgctatgaaaagttaaaaaaaaacagatgcaaacagagtttggaaat

SEQ ID NO: 187937 - DNA, 482 bp, Homo sapiens
cactagaatttaaaattgaccattgaatctgttttcaaaagatttgctctactgtccttaatttgaaaacagagcacttcagacatagtttaaatatattctaaatttagatactctgaaaatataattaggcaaactgtgaaaccttgctgaacctcaattgcctcatctataaaatgatgattatttaattttcctgtgatacttattttatcttttgtagtctctgtaagcaaaaggtttattatcactgtcctcagggtataggtagcacatggtcatttattccagcttctttacttactagctttgtgacttgtgtgagttacttagcctctgtgccttcgttttctgtctgtaaaatgggaataataacaatacctgcatcttagtatttttgtaagaattaaatgagttaatttatgcaaagctgtgcctgacacataataaatgctgaatgagtgttagctattaaaaaaaaa

SEQ ID NO: 187938 - DNA, 455 bp, Homo sapiens
gctccttctctaaactgtaactgaagaacaagtaagcacaggaaagctttccttaaaatgatcatctaaatggttttccacagtgggtttcctccccatgaggaatcgggctgagacctctaggctttccctactaaggtttgaataaagcccagaggcactagaaaagaggttttcaccaaattcaaaaatgttttggggacaataagtcaccaaaatatgatcttagacaagaagcccaatcacaatttttttttctggctctgacaggaataaagtggctttaaagggaaaacaaagtgcaaagttccttatacatcacggctgaatctttccctatggttatggcaaatacaaagccatctcatctattacagggcaataccctccaaatgaagatgagtacaaatcttacaccaagagggttcatgaccactctactgccacttataaat

SEQ ID NO: 187939 - DNA, 538 bp, Homo sapiens
atgaagtgatttggggatgttactagttttctgtgctgctgcagcaaattactacgaacttagaggtttaaaaaaatggaagcagccgggcatggtggctcacgcctgtaatcccagcactttcagaggccaaggtggatggatcacctgaggtcaggagttcaagaccagcctggccagcatggtgaaacctcatctctactaaaaatataaaagttagctgggcgtgttggcaggcacctgtaatcccagctactggggaggctgaggcaggagaatcacttgaaccagggaggcagaggttgcagcgagccgagattgtgccattgcactccagcctgggcaacagagtgaggctctgtctcaaaaaaacaaacaaaacaaaacaaaacaatggaagtttattctctcccagttctagagaccagaagtctgaaattggtatcagtgggcttgatccaggggtgggtatcagggatcaaggtgtcaccggggccacactctttccagaggctccaggggtgaatctgttccttcc

SEQ ID NO: 187940 - DNA, 146 bp, Homo sapiens
ttttcactcattccctagcctttcagcttctccgccatgttgtcaggcagcacatggcccccaccaagagctgagcagatgctgatgccacattcttatactctcaagccaccacagtcgtgagccaaataagcttcttttcttta

SEQ ID NO: 187941 - DNA, 393 bp, Homo sapiens
aagcgatcctcctgccttggcctcccaaagtgctgggatgaaaggtgtgagccatcacccccaatgtcatggggtctcttgcttgctagtccctacccagccaatttggcatccatattacctgcctggccctttgcaaacatttgagttgatgaccctattctaggaatttataaatttggagtctggaaccagacggcttaggctcaaatcctgccacttacttgctgtgggaccttgggcaggagtcttaacatctctgatcatcagtttcctcatctgtaaatcggccagagtagcagtacccactttgtaggctaacagatgatgtatataaagctactgagggcagtgcctggtgcttagtgacagctggatacaatttgtataatg

SEQ ID NO: 187942 - DNA, 456 bp, Homo sapiens
tgaccgctgctccgtcagatatcactgggtgttttttattctgtttcaccattccatagacccagatcccaacaaccattgctcttcagtaccccttccttcttaaccaatgggaggagaattcagctatttatactctgttaaactactgggtagattcagacaatagtttacacattctgtgattgttattattctttaaatcctcctttgttataagtatcaatttatactatttccttgttagggtttttaataaaaatatctgcattaaggtgttcattaagcaggtatgctgacaccttcatattctaagccaccatcttttcttacttgaatcttggaaaacctcctaactggtttctctttgtccagctgtttcattctccacagtatagctggggtaatctctacaacatgaacttgatcctggctagtcttctgcttgtggttctt

SEQ ID NO: 187943 - DNA, 660 bp, Homo sapiens
aggctgacactgaggaagacatttcctggatttttttcctgtgcccatggtgaggtccaaagtgacccaaataccacctaaatccctggatgctaaactccttgagggcagagacagagttatgaacctctgggtctccccataggtccaacccagcactaggtcttcagtggcgtctctaagaatgtcagttggtcaatttgttattcaatgggcacatgacaagttgcaggagtgcacaggtgctttcagggtatcatcatctcaaacagaaacagcattgtttcaaagagcctgtaggagtccagaagaaatacaggactttcttcttccttttgcaaaagctggcagtttaaagccacagggcattagatcaagaatgccatgaggctgaccagtgaggggcttgactttgagggctctgggctggttgggctggccatgcttacacttggaaagcagtaggacccattccctggttttgagcattcaaagtagccttggcttactctctgctctgagttctcacttcagtcttcctattctgaggttcaaagaactgcaaatagtcctcagacaaagcctgtggggtgtctccccagattccaggaactctccaaatcagatagaccaggattatgaaactcagcctcttctatg

SEQ ID NO: 187944 - DNA, 1070 bp, Homo sapiens
tgtgcagcctgggtgtgtgcatcattaaagctccagggagttccgtgcagctgagttttcgaacctctgccccagagccagcctgtctggctccaccacttcctagtgtgtgaccttgggcaaccagtaactcgctgtacctgagtttccttagctgtgaaatgaggaccatgtaattaccttcctatagagctggtatgagggtcaagtgggttcatatatgtaaaatacatgtctgcacacgaatctatcaccattttctgagcctggagtttagatttcctccctaaccggcttagttgttctctttgcacctggcaggtgtcagctcacatgccgcccaggtggagagaccacacttctgctagcctgggacagtcccagcaatgctgatgtcactgcattctttcccattaggcttactttagatcacttgaaaaatagttctattttggataataaattatgtggccaccctcttaaccctcttctatagcatgctacatataggtagtgatgaatggtaagtcccttagaagattagagagggcaacattataaacagtgcatcagagaattagtctgctcccccagaagagaggctcttgaaccacacagctacttttcctgcttcttaaaaaataaatcctacttttcttgaaaagaagttttgccaaggaagaaatctgatcagcttttttcctccactcatgactcagttacctggagttacagggaagccttcctgatttggtacacgttttagaaacaatcatatttattgcacaggaattgttcccttttttgttttgtttctgtgtcctgtagtggtgccctttcagtcggcacccagacctgccccatgcacatctacagccgagtttctcattcctttcctgatctagtccatggtattattaaaatgctcattaacagaatgcccacttaacacgaaatacttggtttcgtttggagaaatccatttatctggaggagggctacacataaagtatcactcttgatgaagtatagaaaactgaacttataagtcagttattcaaaatgtgtca

SEQ ID NO: 187945 - DNA, 390 bp, Homo sapiens
tgatcactctccctctccactccagctattaagtcttctcattttcactaatcagcaacagtaatgctccctatttactcctccagtacgggtctcaaattcatataactccaagccaggcaagtaccatcaattaagcacagcaaataaggggggactataaactccacctaggagcttacacaccgagtttcaaccccaaagctgctactacagtccatctctccatcctgttgttgctctgagaaatgcagcactggcgctacaagatattccaatttttcctaacagaagccacaaatccaaaacacacagaattttccattttttaaacagtgcaggccaaattaaaagtacctgcaaactgaatctgcttgtctatatacaata

SEQ ID NO: 187946 - DNA, 422 bp, Homo sapiens
cagctacttgggaggctaaggcaggagaatcacttgaacctgggaggtgtaggctacagtgaactgagatcacaccactgccctccagcctgggtgacagagtaagactctgcatcaaaaaaaaaaaaaaaataataataataataataaccaaatagaatatctagaaatgaaaaggtaatttacattgagaacttgctgtaagagttaaataggggttagacatagctgaagaaagaattgacaaactgaaagagctgaggaaattacccagaacgtaccacaaagaacaaagcagatgaaaaatataaaagatatttagagatacagaggacagagtccttggtttctcctgaaatgtatctaggattgaaatttctgggtagaaaattaaaattgtagtgaatgcagatgttcagctt

SEQ ID NO: 187947 - DNA, 398 bp, Homo sapiens
ctcccactctctgggttgtctgtttactctgctgattgttccttttgccttgcaaaagctctttaaagtcccagttatttatctttgtttttattgtatttggatttgggttcttggtcatgaaatccttgcctaagcaagtgtctagaaaggtttttctagtatttcttctagaatttttgtagtttcaggtcctagatttgtccttaatccatcttgagttgatttttgtgtgagatatgaggatccagttttcctcccctaaatgtggctagccaattatcccagcaccatttgttgtaaagagtgtcctttccccactttatgtttttgtttgctttgttgaagatcagttggctctaagtatttgggtttatttctgggttctctattctgtt

SEQ ID NO: 187948 - DNA, 392 bp, Homo sapiens
taggctctagggcagtaagggcaaccagtgccaagtttcattttaacactgacaggttggtcatggtgacccagagcacacttggagaattcttaggctacgtctgcagggttgccagtggctgggaaaagggaaagggtgaccacataggagccacaggtgtactgtctgtgaacttcaaaggctaccgtctgagtctaaactctgcaaggagtaaagcaaatgcattgagtaaactgagtgatggaaaagaggttgaaaataaagtgtttgataatacaagatgataatatcaacctcatcacaggggggccaaccagcatgtaaagatgtttcactgtcaacaatgtctcacattaagctttcaggttccattaaaaaattaatatgct

SEQ ID NO: 187949 - DNA, 606 bp, Homo sapiens
aagatactaagaagagagtgtttcatttaaccccttccatcactacccctatgagacatgattgcctttacttgacaggaaaatgaggttcagggaggttaaatgtatgtagaagattttagcaagaatattctgacttgaaatctatgttcttaatgatttaggataccagctcacaactcaaagcatgaagcatgtggcaatactataggaggtaagagatctcatgacaggaaactcgggttattcattcattcatccatctagtcattcatccatgcatatatccatctctccactcagtcactgtgtcaacagatatttaccatgtaactatctctgtacttggtactggggcagaggtgagcaaaacagataaagcccctggcctcacagtgttcacagtctaatgaaagcacaaacatcaatcagtgacattactgtgcaatcacaaattgagataatacttgaaaggaaagtaatgggagcctatgacaaagatctggatttggggtagggtcagatttaagaaaatgagacctgagagctgaactgataggcaagttgacattaattaggtggaaggcaggtgaaagaatggggcta

SEQ ID NO: 187950 - DNA, 346 bp, Homo sapiens
cgctcccctgtaccacctatcacagtggtcacaagacaaatttgaacttcgcgcctgtgaacttggcgcctagctgtaacgcttccgggatcaggtctgtcgctttccactcccacggatgttgcttatttgtcccaaaaccgccatttcaatactagagcgtgggcacccgaggccaattctgcgattaaaagtccctaacaactttctgataaagagaaaccatgtgaaatcgttcataacaaacttttatcctgcgagaacttggataagcgagccttgttccttacttgaattgtccagacctctaagtccgttattgcaaccactgggaaagggcgcgggg

SEQ ID NO: 187951 - DNA, 534 bp, Homo sapiens
atgtaggcttgtaagcaagggaaggagtttgggttctgttcggtctgcaatgagaagtttttgcaaggtttaaacatggaaatgctacacatcttaattcaccccctgttcctcaatgtatttactcatcatttagctttaattccttttacttcacttaagctttaactccagcctcttttctttggttatctttgtatttcttgacattaagtcctgctgcttttcttttaccctaaattctgtcagtcctctgacctttcttatctacctgccaatgatacggtctagcctctttggatgacatccatgatttattttttctttccagagattctcttttatagacaaatcactcagcccagtgtcctgccagtgatgaaaattggcagatgatagggtgtgatggaaattagaaagcaatgctgattttgtccttcttcaatttacactgtatgacagctattttgacttttcttgctgttcaccaatgcttttattcttatgtgttgtctggactttcttaagcaatag

SEQ ID NO: 187952 - DNA, 130 bp, Homo sapiens
ggaaagaagtcagacaagcaggccacatgctgtatgagtccacttacacgaagtgtccagaatacatacatccagagacagaaaggggattagccggccgggcgcagcgctcacacctgtaatcccagca

SEQ ID NO: 187953 - DNA, 221 bp, Homo sapiens
gacccttgggcagaccggggctaggggtggctctaccacttaccctcatgtgaccctggaggccacagaagtgcaccaggctccgagaggtggttccaatggttgcctctagcaaacttactgtgtgctgaatgcttcctgggcacccaggccctgtggcaccggctttgggagtattgtctcacttgagccacttgatggcccagcaaagtcactgccat

SEQ ID NO: 187954 - DNA, 422 bp, Homo sapiens
aagactgcagagaagaggaataaatagctaagcagttaaacattcattcacctttgaattgatgaagatggctggtctctgagtcaaagtaagcagactcttgcttaagagaaagaactgaggaagagcagggactatcggtagacttaattatgccttcaattgttcctatacactagtgcctagcatggcacctgatacacagctgtcactttatgaaaatttgttccccttcccctttattgttctgtttgaggactactcttagactttgcacttgacttaggtaagaactggtcttcatctctgaatattcaaggttataaagatacagataacttgaattcccttgtacgatgtgtgctgaacatgtctgctctgcctggtgcctggaatattttctttgtgtgggaagcttctaa

SEQ ID NO: 187955 - DNA, 353 bp, Homo sapiens
cgatgtaacatgttcatagttaggaagacccaatgtcataaaactgtgaaatcactcaaagactcaagtcaagaaaagccaagagttttgaagaagagccttccctaacagatatttccctaacagatatggaggttagcttttccctaacagatatcaagaaaattggaggtattttccttttctgttcctatgaaggaacatggctttaggagttaacactcttggctctctccatcctctcactctctcagaggaggaggcactttcctgattggtgaatctagagggcaaaatagcaactgggtattcttggctcagccctatctgggctcctgaagaaaagtcacctg

SEQ ID NO: 187956 - DNA, 135 bp, Homo sapiens
agaacacaggcaaggatctgcggagggaggacagacctgcagccatagacactgggggaaacacaacaaaatcaactgagtatgaagagggagagtgttttaaatcagagcaatgaaagaaagtgaaggagaaag

SEQ ID NO: 187957 - DNA, 474 bp, Homo sapiens
atcatacttggaaaaccagaaacataagagcaaactaattccaaacctagcaaaagaaaagaactaaaatcagagcagaactgaacaaaattaagaccccaaaatccagggaaataatcaacttaaccagaagttggttttttgaaagcataaacaagattgataaaccactgtctacattaacaaagaaaaaacgacagaagatccaaataagtacagtcagagatgacaaaggtgacattacaactgatctcacagaagtagaatgattctgagagacccttatgaacacctccatacacataaactagaaaatctaaaggaaatgggtaaataccatcaaggccctgccacatgggaggtcccttctgagcagttaccaacccatttttaagccccctttaaatttcaacaccaatgccagtaacatatcttttttgtctacaacttccaaagacacttatcatcactacc

SEQ ID NO: 187958 - DNA, 449 bp, Homo sapiens
cactattcatctgtgctcctatctaaaaccaactccttaacttctgcactggacctcaactcctcttgattattcagctgtcactatagcaataagccctctctctcacaaaacatgaattttctcctgtctcagcctcctgagcatattactaccgcatatgttcaaatagttgcagaaaatgtaatataaaatctcccaacttaaaaaattccttcctttaccccacgtctctctcatctaccccttttctctgatcttctcagcaaaactcctttaaaaagttgtctaagtgtgttgtctccatttcctctcctcctattctaaagaacctgctccaaaagtggagaattcattattgttccccactactccacaaaacttgttaaatgtaatattgaattagccttcatcattctgtttgacttagtgtagtagcatctgacaca

SEQ ID NO: 187959 - DNA, 388 bp, Homo sapiens
aaagaaaaagcaatcaatcagcctttaaggctgttgttgtgtaataaaaaccttgcttgacagttgaagtacaccttaactttttcatttaaaatttattactctttgaaaaaggagaacttgttgagcagcatattttcttttttcacagatgtctgattagcctgcaatattttggttctatttaatatacttttaactattttttaatgaatatgaatgtaaaaataatgttgagttagaatagaaatatctaactgtatgattaaagttgaatcacttataaatttgaaaaagcttcttgtcttctattgttaatgctcctagaatctcatgtttgagaacgaatgttcagtgtagccaaaacctaaatctgggactatatgtt

SEQ ID NO: 187960 - DNA, 367 bp, Homo sapiens
ctgtctaaaacttaatcttttccttttggaccatttgagattggacagcggagagaaacttggcttctctccctcttgcctattaacccatattaatctaaacaggacccccatgtctcattttactaatatgagcgatttcatttccttttagaatttccttgaccattgtttacagttgtatttctacagaaaaattcatttcaatttctaaaccaatgaaagagaacttttggagcacaatccaattttagtaattgcctatactttaaactcaaaaagtttgttgaaattaagtaaactctaaattccaagcttcaggcaccagtctacctaatttgtatttctcaatgtagcctccgccatt

SEQ ID NO: 187961 - DNA, 453 bp, Homo sapiens
accctcctttcttcatattctcctcaaaaaggttccaggaatctaccttttcatataccttgcccctagttttaggatccactaaaccattctgatcttcttttggtggcttagaattagtccatgtgtgatccagatcagaactgggatttccaggtgcaaagatgtgatccctggagtcattgtttttcttgccccagatttctggagctgcttcattgtttatctcactgggtgaattgtccagtagttctgaagaagaaaaggcaaacccactttttgccatggcccactcattcgggtccctaacagaaggtgtcttgctgcttgttgggtgcaaatcccaggtattttttaaagcttcatcatgatcttctttaccaaatgcactccaggctgggaatggcgccacagctgctggttcaccatcatctgtaggatttccccagggct

SEQ ID NO: 187962 - DNA, 795 bp, Homo sapiens
atttgagtattagctcttttctcacagtacatgtgatataattcctaaccccttaaatactttataaatgaagagcttccactaatgaaacctccccaaattacagttcagttttagggagacaaaggaaatgaacttcgggtataaaaaaccaaaatgaaactgggtatggtggcagacacctgtaatcccagctacttgggagcctggggcaggagaatcacttgaacctgggaggtggaagttgcagtgagctgagatagcgccattgcattccagcttgggcaaaaagagtgaaactccgtctcaaataagtaaataaataaataaaatgtgttcattgtagaacatttagaaaatatattaaaacagagagagaatgggaatgaacacccacaataccacaactagaacagcccatccctttctaggatttgctaacatcaagtggtaggttcaagaatgtcaagttatacctataaaataagtgaagataggtcaagagagggtgaaaacgtttccaggttccatcttactctgactccaatatgcacaactccaattttactgcattgcttccccttttagatgatggatttctagatttctagagctcaggatatggctgtgttacatttgtttggaatggtgcacatatattatgaaatgatgcgtatatatgggtaccagtttatgtatctctcttgatggagataaaatccctttctttgtgctaaagggccaaggtgtatgaccaacatcacttggtctccaaggcagtaatatatatagaaa

SEQ ID NO: 187963 - DNA, 532 bp, Homo sapiens
actacacccctgccatgggatccttgtttattgaagccctgtgtttttctctctctaactcaggcctagagcaataaatagtatatgaatgtctaaaaaggctagtaagcttggaaaagattatgtagatgtttaatgtatttcacacagctactgtgtgaaactggcgtttatttgttgtcttaaaagaactgcttgcattctagatttttctttctgctagaacatattgccaatcccatttgattgaagagggaaatcactaaaaacagggaatcacacaaactcagaatacactatattaagctaactacgcattgtatttagtttcacagatacttgtaactaaaaaggattccttgttagaaagttacatgtagaaaaaaattgtttcagtattgagaagttttttagtccctatttatttttgcttttattagtttaaaacagtttatgttctgttatggacctgattttgtgtttttttctaataaactttgtatcacagcttatcaggagtaaattaaactgt

SEQ ID NO: 187964 - DNA, 435 bp, Homo sapiens
ttatggcagttgtatcatgattccacattcacacaacattctttggtgaatacgaagaatgttgactaaaacctaatcccctcccatgttccaaataggtcatctcttatacttcctattgtcgacacgtgaataagaatatgatttgtatggaaagccacctttgctataaaattattttatcccgcttactattcctttttatatcatacctaatcattcccagtttgatatattgcttcttaattttaattttttttctttatttttaggttttacagtttgttgatgtacagttattcattatagtctctaatcattctttgcatttctgttgtctaatttgttatgtcccctttttcatttccgattttatttatttgggtcttctctctttttttcttagtccaggtgaaggtttgtcaaatagtttaa

SEQ ID NO: 187965 - DNA, 102 bp, Homo sapiens
tgtggtttatgtaatttatggaatgattggtataataggaggtacccaggcattactggaagcagaacctcgaggattgagaaatagtcattggattcagca

SEQ ID NO: 187966 - DNA, 348 bp, Homo sapiens
ctgttaagccaacagggactcagagaaagcaagggtcagggtgaccagaaatagagaaaaaaaagcctcacagaggaagaggacctggacctgagccacagaggatgggtagaacttagaaggagggaatgagcccagtctgaatgatatgtctacaaagtatacaatatgcaatgatgattaactgaaaaattgggctggccatttgtgagatccatgaataaaagtagatcagaaagtcagtgtgagttttaaatatatatattttattataaaacgttaatcacataatatgtgaaatcactattgataaccttttctattggtcctagtgttttgctatttaag

SEQ ID NO: 187967 - DNA, 376 bp, Homo sapiens
gcccagtttgtgatactttgcaatggcagcctgagcaaatatacaaactgtttctgcatggcactaatttatgtttagagctttgggaaacagggaactacagactgaatgcattcggatcttttggaatacaagctcaatttttattaggggccacacgtggtggctcatgcctgtaatgccagtactttgggagcctgaggcaggagtaccacttgaggccaggatttcaggaccagcctgggcatcacagggagacgtcatctctccaaaaatttaaaaaaatggccaggcgtagtggctcatgcctgtaatcccagcactttgggatgccgaggcgggtggatcacctgaggtcaggagttctagaccagtc

SEQ ID NO: 187968 - DNA, 239 bp, Homo sapiens
tccatttgcctccctggtcttgcctcctggaggcctgtagataggagacacccttcctggaaagacaacagcttggggacattacagataaggctgggcgggtgtgcctagctagcccagaataaaaggatcaccgagagaagttaggaatcgaccttccttctttctctttcttcgaggaggtggtgggatcttggaacaaggaaggtgtggttttttttctttatttttttttagga

SEQ ID NO: 187969 - DNA, 286 bp, Homo sapiens
catattgggggagtttgggggtttgtgcagggtgcatcaaaaagcactcgcatggaataaacatatcttgcacaggaacatatgacaggtaattgaatagtttgatttgaattatgtaaagacatgatcctgatggtagaaggatggtacagagtagacaaatgaggctaaaagatgaaggtgaatgaactcagcatagctagagagacagctgaggaggagttaagagattggagtctaatcaggataataacacttgtaagaaatcaggtaatccctggtccta

SEQ ID NO: 187970 - DNA, 521 bp, Homo sapiens
tgctggcttcataaaatgagtttggaagtagtccctcttattcaatttttaagaagagtttgaaaaagattgctatttgttccttaaatatttggtagaattcaacagtgaaaccatctggtcctgaacttttgtttggtgggtggtattttattatggattaaatcttactcattattggtctgttcagattttcctgtttctttgttattcagtcttggtaggctgtgtgtgtttaggaatttatccatttcttctaggttatccaatttgttggcattaaattgtttatagcagtgtcttatgattctttgtatatatgtggtatgagaaaggtagtgtctcctctttcatttctgattttattcatttgagtgttttctcttttttcttagtctagctaaagctttctcaattttgtttattttttcaaaaagccagtgctttgttttgttgatctcatttttttctagttttgaactcatttatttctgatctgatatttattgtttccttctttc

SEQ ID NO: 187971 - DNA, 515 bp, Homo sapiens
ggacaaagatgatctgatgtatcatttggcttaccaacattcctgtccctgttacattcctgtggtttcatggtggttgaaggtgaacctgacagtgctgttttacagagaagattgaagggaaggtgttttaagtcaatagagttaaagctctttatgttttggaaaaaatttgggggttattttaaaaactactcagaggtgatagagtattgtaattatcatatggaaaataatccaagaaatatagtatataaaattcacatttcattaacctggaaaattgactgattgtttgatgtatctaagtgttggacttagaagtggacagtattatattctcgacaaagagattatatttagatttctcagagaagtgtgtaatgattaaactcaatgttggaaccatttggttaatttaattataatttaaaataaaaccccttttgagaaaattcctgcataagacttaagtgttatttttgactagttcagactgtggcttaatatacaat

SEQ ID NO: 187972 - DNA, 700 bp, Homo sapiens
ctgatgatgtaaaaggaaatacagagaaaagcaagcatccttctcccactcctgagcctgtaatcatagggcctagggcttctctgcagacagaacccagccaagacttttcgtaaatgccatgtgcacttcagggcttggtttgttctattatatttagggatgcggtgctgagatgcttgcctgcagaacagcaaaaacctctgacttcattattgttattcagagtaaccagggtcattgctctctggcttgccttaaagccagcaaaggcaattgcccatccctgggcttttggtctggaagagaccgttggcatcattattcagccccctcacttttcaggtaaggagctaatgaagacaacattcccagtgacacacggcaagttactgtggtgttggggtttcagtgtcaggagtctcctctcttcctctggcatttctgctactatgccaggctggctcctttcagtagacataacatcattgaaaaataccacaagtgcccctgtggagagcagagcagatagccattaaaattacaaaagcttatgctttttggcccaacatttccacttcaaggcattcaattcttcctatagatacactcatgtgagggtaaaatgatctctgtataaccttattctttgcaacactgattgtaataaggaaatattggaagcaacccagatgcctat

SEQ ID NO: 187973 - DNA, 612 bp, Homo sapiens
cttacttcactcatccattgctaacgaagggagtaaggagggataagaggcaaattaaagtccagtactccggtagacaggagttggggtgtgtgtgtgtgtgtgtgtgtgtatgtgtgtgataacctaattgacaaagcaatcatgatgttttccatgagcctgatgttatcccatcattcggagacccattttgtttaatttgttttttcatatagtttctggtgggaaaaatgcattgctttagtaccgaaattaacttgattgaaatgtcttagactttatcattttccagtggctcaaagggttatttcccaagtgtttaattttttaagtacagtgtatattaatttcactgctactttctgacattcatcattccatgagaaattatcacagatgaatacatcagacttttatttacactccaattcctactcaatgtaaagttatttaactttgacgatagcatgcaaatttgataaagatgaggtttttaaaaacctgaaccatttattgatttgctaagtataattttcacatttttcttatagtattctataatacatctttcagaaggaaaacacttgaaaactagtataatcttcagga

SEQ ID NO: 187974 - DNA, 524 bp, Homo sapiens
cctgtccccaagcaaacatgcatacacacacacacacacacccgctaaaatcaatttctcacaactgagttatcaacatctttacgagagccaagggatatttcttcctagaatcagatctcgcagccacccaagatatttttacatggttcaggatggtagtggaaagtaaatctaattgtccatttcttggcaatgccttgtaggacatgatcagttatttaaacttcctgtgactaaattccccctatttctgtgacagattaatgccatttgccagcatataatgttagccaagttctggtaacacacagagggaaagcttcacgtaaaccttaagcaaagttattactctctggaatccagtatgtaattggcactccttaagaattacaattattatttttatattccttttagagtgtcttaggaacttacaggtcttcagagaaaaagctgtgggattttggatgagagtcacaaaatcatttgctctctagtccaagtgaaatcttttgttagaa

SEQ ID NO: 187975 - DNA, 351 bp, Homo sapiens
attctagtcactttcctcaatatttgtctccattccaaacctagtctgtgccctatatttaagtattgttattaatttgagtgaatcctaccagacatatacaaatatatgtatctatttaaatcaatatgccataagtggcaaaaaaataaagattagcaatgtccatctcctgcagatattaattccataccttgtacttggtaaaacatttgcttgcacaaatgaaaatattcaattatgctagagtaaatttacattatatagggatatctttcaaaaaagtttctctcctgttttgaatttcagctgtcttgaattgtcacttgcaaaatacttagggaagtttct

SEQ ID NO: 187976 - DNA, 499 bp, Homo sapiens
atttctggggtgggggctgccaaacacagtcatgggcctgtgatacagttggaaccaatcagagtcctttccaggaattcgtatcatcccagtgggagaggaagtcttctctttcctctggagccactctctggggtggtggaataacataagcctagagctgtttgcagacatctctgccgcatgaatcttgtcctcacttggatggaaggagccatattcacagaaaaagagaagcaagacagatagacatagtcttacacacacacacacacacacacacacacacacacagagacaccatatttgaaataaactaaggtgaagagagagtagagacaataccataagagaatcacactctgtagtgtactacttcaagataataattgtgagtgagaggtaatgattgaataattaaaatatttatgttccttggaatcttaatatgagagaagggtaccataaaagtaggtgactcttggaaagtgaaagaaaa

SEQ ID NO: 187977 - DNA, 281 bp, Homo sapiens
ctttgtcccatttgtcttcatccatctctccattcagctgcctggaatgcagatgtgatggtcaggaatccagcaggcatctctgacaataaagataggggctataccccaggagtggtgagcataaagcaggaagtttctaatgacttcaggggctagcataccagctctggactgcctcactctaggacatttttttgtttgtttgtttgtttgtttgttttttggagacggagtctcactcagtcgcccaggctggagtgcagtggccgcgatctcgg

SEQ ID NO: 187978 - DNA, 456 bp, Homo sapiens
tactgaaagccctttctttctgtttttgaaaaacaataaacagcagaagaaaaattactgcgcctcctttcccctcaaaaagggaggcctcgtctgttttcctcgctgtaacaattttcatgatgtcatgacgtgtcctgggctttaagcccctctcccttaaccagctaatcctgaagagaggctcacacttggtgagtgtggggtggcgctgggcatcccacggcaaccaagggacagccccgttagagttaatcactccggcttcacagatggaggaactgagtcttggaaaggggagactggagggggccacccagcaggtgagtgttggatggagctcaaacccaggcagcaagtcaccagaggcagctggagccactcactggcctacagtgcggggacacaccgtggtacccaaggatgtgtcaaaggcaggagtaagacaagcaggtt

SEQ ID NO: 187979 - DNA, 416 bp, Homo sapiens
gaaattgatcatacctacagtaacccctcactcagataaatatttcccccaagacagccaacagagacccttagagacactaacttaatgctaaccgagcaataaatgcagcgtacccatacccaagcatacagacccacccacccagtcccaaggctctgtcccctgccctaaggtgtctctctgcagcgtaccccctccccaatacccactgagggtccgtcagccaaagaggtgagtgtcttaacacagagaagcagaatctatccgactccttcaggaaggggacctggcaggaaggagccccgtccctggcgcttgttctgggagttccgtccaccccctcccctacctgccaagagctgcatccaggcgcagatcttgtagaccgtagccgtgttgcagaagaagaaaag

SEQ ID NO: 187980 - DNA, 238 bp, Homo sapiens
aaactttggagccagactgctttggttcaaatcctggctctacttttctgtcatctaaggcaagtcacttatcctttgtgtgccccagttctcttaaccataaaatgaggataatattaaaacttgcaaggactaaataaattagcgtatgcaaagcatgtagaaaatgttttccatgtaataaacactaattattactgtgataaccgaagggttccaaaatcaactcaatttttgg

SEQ ID NO: 187981 - DNA, 668 bp, Homo sapiens
gctaaacggaagaaaagttacctggcagcataagatagctatgaagaatctttcccccaccagaaagaagtttagcaaactattttactgaataaatctaagacttcctccttcccagtagttgcccacaattttcctccaatatgagattatgtctctattttgtaattctgctcagaaaacctgtcttaaaatctacacatattaaactataatatgtcataaattttaagaatgttatttaacagaggtaaatttatcatgaataccatatatttaaggtagcaaaacataaagagagtaataacctcttttgatactcaacagcagaccaggtaaagtccaaacagttctgtctcatcaaaataatgaaggttgcttgtctttgacctcttttcctgttacctctttaagagataacacacatatacatacgcttttgtagatgagaccattctaaaatttataaattgtgttgtatatctttgtctgcctgattaaaatggcttgtcttaaggtaacactgaactgcttagtctttcaataggaatttatttagcaactactttgtggtattgttttgatatactctatttttgtgtttcggctttttcttatttattttaattaaatcaatatcatccctcgtatacactattcttctgtgc

SEQ ID NO: 187982 - DNA, 614 bp, Homo sapiens
gctaaacggaagaaaagttacctggcagcataagatagctatgaagaatctttcccccaccagaaagaagtttagcaaactattttactgaataaatctaagacttcctccttcccagtagttgcccacaattttcctccaatatgagattatgtctctattttgtaattctgctcagaaaacctgtcttaaaatctacacatattaaactataatatgtcataaattttaagaatgttatttaacagaggtaaatttatcatgaataccatatatttaaggtagcaaaacataaagagagtaataacctcttttgatactcaacagcagaccaggtaaagtccaaacagttctgtctcatcaaaataatgaaggttgcttgtctttgacctcttttcctgttacctctttaagagataacacacatatacatacgcttttgtagatgagaccattctaaaatttataaattgtgttgtatatctttgtctgcctgattatttagcaactactttgtggtattgttttgatatactctatttttgtgtttcggctttttcttatttattttaattaaatcaatatcatccctcgtatacactattcttctgtgc

SEQ ID NO: 187983 - DNA, 1135 bp, Homo sapiens
cagcctctctgagtctgtcctctcatctgtctgtttaattaaatgaggtgtcatatatcaaatacttgattattgtaggcacttgagatgcaatgtttgcagctgggcgtggttgctcacgcctgtagtcccagcactttgggaggccgaggcaggtggatcacttgagctcaggagttcgagaccagcctgaccaacacggtgaaaccccatctctaaaaaaatagcaaaattagccgggtgtggtggtgtgtgcctgtagtcccagctactcaggaggctgaggcaggagaattgcttgaacccgggaggtggagattacagtgagccatgatgccatgatggcgccactgcactccaacatgggtgacagagtgagacttcatctcaaaaaaaaaaaaaaaaaaaaaaaaaagaaaagaaaagaaccaatgcttgttttgtggtgtgatttgatggctatcttattggctatctggacttcataatcccattttctcatcctcattgaaatacaaaataaataaataaataaaagcaaagcaactaccttaaaaccccaaattctggcatttgtttatatagtgatccttctgtatccatggggaattggttgcaggccccccagattttggatgctcgagtcctctatataaaatggtgcagtatttgcatatgacctacacatatcttcccatatactttgagtcatctctagatgacttagaatacctaatccaatggaaatgctagtaagtagttgttatgctgtattgtttagggaataatgacaagaaaaagaagtctatgtgtttagtacagacacagccgtccttttcacatttttacatttttaattttttgtgggcacatagtagtatatatatttatggggtacatgagatttttgaatattcttgatctgtggttggttgacttcagggatgcggaacccacagacactgagggctgactgtacgtagaatatatgcctttgaaacactgttttggattcagattttgtgtcttcaaacttttttttatcaaaatttaagtatatttctgaacagtaaggcattggactccatgccagggggtgcagaggtgagtgttctggtgatctagaaaggagttg

SEQ ID NO: 187984 - DNA, 951 bp, Homo sapiens
ctgaggatcagcgtccttcctgcctacctgtcctatgattccccgtggcctgtcaggaagatcccgctgtgctgcacggtccactgtgtggcttaccatgtggagtccaagatgtacgctgtggccaccagcaccaacacactgtgcacctgcatcccacatgactggcgaggagaaggcatttgagaccattgagagagatgagcagtgcatccacccccaggaggcggccttatccatccagttcatctccctagtctgctgggaggctattcccaatgccaggattgagctgcagaagtgggagcttgtgaccagcacgaagacagtgtcgctgcagcaaggagaccaggtcaggcttcaaaggctacgcgtggccgccgggacctgcctcatgcaggaggaggaggaggtcatgtcctgagggcggatcttgatcatggatgtgactgaggtggtgcccgagcccagccagcccttgaccaagaacaagttcagagtcctttacgagaaggagcagaaggggcccgtgactgccctgtgcactgcaaggccacctggtgtcggccatcagccagaagattttcctgtgaagcctgcaggccagcgagctgacgggcatggccttcatggtcgacaggcagctctacatccaccagatgatcagcgtcaggaacttcatcctggcagccgacctcatgaagagcatctggctgctgttaccaggaggagagcaagacgctgagcctcgtcatgggatgccaagaccctggaggtgtacagcgtggacttcatggtagacaacacccagctgggttttctggtgtctgaccacgactgcagcctcatggtgtacatgtacctgcctgaagccaaggagagttttgggggcatgtgcctgctgcgctgggcagacttccatgtgggtgcccacatgaacgcattctatag

SEQ ID NO: 187985 - DNA, 1114 bp, Homo sapiens
gtttgctctctttgtgtgctgatgtctgtttttgagtgtgcctggtctctcctctttcttgctctgtttcctcgcgtgttgggctgtggccgagtgtctctggccctctggctttactttcctctcttttggtgcctccgtcttgtggtgtcccccttccgtgtaccgatactggtgcccggggctccttcgatccttatctctcgtcctctgtgcttccggcctcttgtgctcttctgccgatcctttgtatgactccggttgtcataggttacaggtgacagggttgtcaggctctccagtgctggtgtgttctctagtgtcccgattctcagggacatgcccggcagccatggcataagctaccacctgccagtctgaagctctcgagatgagctcatcgtttgtcccggccgtaagacgatcttctgtgtcgtttgcaaagcatccgactaccgacatggccgcttaccaacaagaagagcagatgcagcttccccgagctgatgccattcgttcacgtctcatcgatactttctctctcattgagcatttgcaaggcttgagccaagctgtgccgcggcacactatcagggagttacttgatccttcccgccagaagaaacttgtattgggagatcaacaccagctagtgcgtttctctataaagcctcagcgtatagaacagatttcacatgcccagaggctgttgagcaggcttcatgtgcgctgcagtcagaggccacctctttctttgtgggccggatgggtccttgagtgtcctctcttcaaaaacttcatcatcttcctggtctttttgaatacgatcatattgatggttgaaataggtgagaactgaccttgtatgaaagaggaagtgaggccgggcacgccggctcacacgtgtaatcctagcactttgggaggccggggcgtgtggattgccggagctcaggagttggagaccagcctgggcaacatggtgaaaccctgtctctactaaaaaatacaaaaaattagccgggcttggtagcacgcgcttgtagtcccagctacttgggaggctgaggcaggagaatcgcttaaacccaggaggcgtaggtttcagtgagcc

SEQ ID NO: 187986 - DNA, 715 bp, Homo sapiens
catgtttcttgacaaagtttatttgaatatcatttgaagaatttaaagataccctgccttaaaaattagggtcatttatttttacctgggtgtcaactgcctttttatattaaatctgtgtctttcttttgaatgtaatctacatctctgtgtgaaagtctctctgtaacagaaaattcagatatttaggttgacgtctcattcatatgacaaccttacttttgtgcacaggccattgggtggggcttaggaccctaaactcattaaagggccaggtagagtgtgtggccctcttggactgtgatacctggccaaatttcccagtgatatatcattctcggaattaggtggaaaaggaactaatccattgattattttactagagtgtttgtggtactcttggatcttggtttttattatcctgtatcctttataaagcatgcttaatggatgtgcctcaagggaaagagaaaacaatcttaactgattatgttatgcatagctctccctgatgccacatgctgtaggccgagtagccagagtgtggatagacatgtattactaccgcatttacagcggactctgcttagggcagaaaaaaggttgttctatgacatcccaaagctattaaaggtttttttatttcacttttgttcccttaagtaaaagcttctgtccataaccacgctaaaataaagcaaaacccatttaaaga

SEQ ID NO: 187987 - DNA, 364 bp, Homo sapiens
acatttattaattcagtactttactgaatactgtgctgggcattgttctgggccatgaataagacagacctggcctggtgcagtcgccattgtatccagcccagttatgtagttatgtgccatttctaaactactttagaacccatctctttggtgtttgtttgtttgagacagagtctcactctgtcacctcagctggagtgcagtggtgtgatctcagctcactgcagcctcggcccccaaggttcaagcgaccctcccacctcagcctcccaagtagctgggaccacaggtgctctttttgttaagagtggaaaagccaaggtccatgtactttttttgagaaagacagcctgttggcttt

SEQ ID NO: 187988 - DNA, 310 bp, Homo sapiens
atatattttattataatttcaaaactccttttcaccatttttaaatgtattaagtagattcactctggcattacatacattcacattgttggtaactattaccaccatccatctctggaacattttcattttcccaaacagaaacctcatccccattaaactctaactctccatcccctctgccctctagccactacccttctacttttgtctctatgaatttgacggctctcagtatctcataagtttttcgttactggcttattttcacttagcatgttttcaaggttcattaatgttgtaccatgtg

SEQ ID NO: 187989 - DNA, 792 bp, Homo sapiens
ggactatttctaaatacagaaaaagctttaagcacaaatatatcatctctcagtcacaaatacactgaaaaatcacgcaccacatttaagtagactatgatctatccacaggccagaatattaagcaaacattagctacaaaaactccaaactaacacagaaagcattatgactgggcagtgtgacagagccaaagagaaatttatgtactatttgatttgtgttatgttttacaacaaaaactcgtagaacaaggatggaaaagagacactaacacctgctccactgggggccatttatgttgggttggatatattcaaaggggaggttttccttctttcatctctgtaaagtttcagcaatatgcatgtactctcatgatgaaactttaaaaattaacactttagaaaacaggaagtgaaggaggcccgctgagaagtgcattcacctgcaggtttactcagagcagcgccatctgtgcaaaggtcccgctgcccagggggaccctgatgtggacgtgaacccagcgcccatgcccgcttcttctttcccacacttccgcatgctcaaccattaagtaccaagaggttcgcccaggagctgggaggttaatatcggaaaatgtcaatactggaacagtggcgcaaagccgaaggttggcccaggaaaccgtctgaatatcacaagcctggtcatgtagggcctggaaaggaagagcacaacgtgtacccggcagagctgtgagtgccacactggggacccaggtggagcgccggcctcctcttcccggcc

SEQ ID NO: 187990 - DNA, 198 bp, Homo sapiens
agccagccgcggcttaggcggggcggaacggtccactgcttcgcggcgaggggaggagtcgggaagagccgggcgaggcggagggatccctctggaatgtttccgtcgggtccacccgaagcggaagacgcggattggctgcgagcaccgagaggcagccgctgattggccggccgcgggcgtcggccccgcccccca

SEQ ID NO: 187991 - DNA, 323 bp, Homo sapiens
  misc_feature (26)..(26): n is a, c, g, or t
  misc_feature (64)..(64): n is a, c, g, or t
  misc_feature (93)..(93): n is a, c, g, or t
tagacaggctgatgctcctttctcancattcgaaggtctttctgcatctaacaatctcctgccnagtttctgtttctcccgttctgccccggntaatttaaactccggatgttccagacctctcatctctccctgtgcacacaaggccttttcacatctgtgggtcttagtacacccactgttgctgtcaagaatgtcctcctcctcctttttttttttttttttgagatggagtctcactttgttgcccaggctggagtacagtagcgcgatctcagctcactgcaacctctaccctgcatcagcctccctagtagctggga

SEQ ID NO: 187992 - DNA, 317 bp, Homo sapiens
ttttagatattgcaggtgttctttgtaagactttcattaaggtctttttctgtttctgtttctcttctaagattgccggtctgttcactcattatgactattaagtctttgaacttttttttttttttgagatagtctcacgctgttacccaggccggagtgcaatggcatgatctcagctcactgcaacctccacctcctgggttcaagtgattctcctgccttagcctctgaagtagctgggattacaggcacatgccaccacacctggctactttttgtgttattagtagagacggggtttcaccatgttggcc

SEQ ID NO: 187993 - DNA, 279 bp, Homo sapiens
tgggcctctgtttcctcccctgacaaatagggataataatgttactgctctattatccacaattatggttataagaaaatatatattttttttcaaataaaatactctaccaaagcctgaggtcaatcatgattctttgagccattcattttccaaagagaactttattgagcacataccatgtgctggaactcaaggtagttgttggcaccatagccataaagcaaggaaacacagaatggttgccctcatggggatcagagcctggcagggaaaaca

SEQ ID NO: 187994 - DNA, 229 bp, Homo sapiens
atgggtgtttgccaagaggggcccataccaggtgaatgcaagtgattggcccaaactcctcgtgttccagttgggaaaagtagcaagcttacaatgtggatccctcaaagtgttcacagtacatggaattctccctctctgagatgtcaagtttcctaactctggctgcatattaatgtaacctgggaagcttttaaaattttcgatgcctgggtccttattgacaaca

SEQ ID NO: 187995 - DNA, 561 bp, Homo sapiens
gttacataaccttaacctgctcggatgaatgttataaaagttattgggtaccagacattttggaaaacagctaaagaataaagtaacaccattaaagttcaaagtcttatttcatccatgttcctaacaagggatatgaactcatcattttttatggctgcatagtattccatggtgtatatgtgccacattttcttaatccagtctatcattggttggacatttgggttggttccaaagtctatgctattgtgaatagtgccgcaataaacatacgtggtgcatgtgtctttatagcagcatgatttatactcatttgggtatatacccagtaatgggatggctgggtcaaatggtaatttctagttctagatccctgaggaatcgccacactgacttccacaaatggttgaactagtttacagtcccaccaacagtgtaaaagtgttcctatttctccacatcctctccagcaactgttgtttcctgactttttaatgattgccattctaactggtgtgagatgatatctcaaagggggtttggattgctttctctgat

SEQ ID NO: 187996 - DNA, 380 bp, Homo sapiens
ccagttaataagtgtcagggctaaggtatgaacccacagggtccaactctaggacctgtactcttcggcaccatcctttcagtgaattaccagtagctgctatggactgaatgtttgtgtccaccccccaaccccaaattcatatgtttaaaccctaatccccagtgtgatgtgatttggagatgggactttggggaggtaattaggttatgagggtgaagccttcacaatgggattagtgcccttatgagaagagataacaagagagcttgcttcctttctctctgctctacaaatgtgaggacatggcaaggaaaccaggaagagggccattgacagaactgaaccagggtggctcgcacctctagcactttgggagg

SEQ ID NO: 187997 - DNA, 607 bp, Homo sapiens
tcaggaatgctattgatgctattgtattaaataactgtcatgccaaaggcacataatactataaagtttatttgcaatgttgagcagaaacatctatttcttttttatatcaaagcttattagaatgctctatcatctatggagtgtacagaatcatttccagatactcttgaaccaaaaaagaatctgagcctctcctaacaagtagttacaacaatgtagaaagattacatgggaatgttaaattggtaacacattttacctcaactctgtttccaaatatattttcagtaagttcaatgggcaggctaaaaggtaaaatctgtccctagaaggtatattatttttacaacaggatgagataatttaaaatgtattataataaatccaactcatgcattttaagcatctactcaattttcagtaatatgctagaaattttcagtaatatgctggaaactgctatgcagtttaaggataaatgttttactttattaattagctataggaaataatatacttacgcagtttttgtattttttaaaaatagtctaattccattttgttcaataagcattgatttactgtccaggtgctagtataggtt

SEQ ID NO: 187998 - DNA, 305 bp, Homo sapiens
acgttgacacttcaggttcctttattgtggaatttctttcttggcctatctctgtcgtttgtgacttgacatttttgaaccatacagatcagtgtttatttgaggcttccttatgattgaattaacatttgcattttgggcagggatacaacagaagtgatgtgtcccttatatcccaagattgccttatatagaagtcacatgatatcttcatgtgggttggttctggtattggaatataatgaaccagaatgctatgaacattcttatacaagtatttttatcaatatttttatatattttgg

SEQ ID NO: 187999 - DNA, 441 bp, Homo sapiens
agtctatgtttaattttgtacacagaagaaaatgtataaatagtgcatatggtttgtaaagtggagtaggggagattagggactctagcttgcacctcttgccctgttacacaaggactcatccttggttcccatgtcctcctcaatgccacctcctgggaggattaggtccaggtttcccaaggaaacgaccatccatggagagtgggtcaccagacatgcagacaacagatgcagaggccgaaggggtcctgatctgagaggtgagaacttgccccaaacaaggcttcaatgggttctgagaaccggcctgaggggaaggcagggagcggcggttctcagagggttctgcccaaaggctggtcccatccctacaaggaaacttacagcagggccacctgctgggccagagggctccctgggcgaggggcagtggtacag

SEQ ID NO: 188000 - DNA, 567 bp, Homo sapiens
aggagctgagaggccaaagaaagaggctgacaaatccagtcttgcagaaagaaatttcacagggacataaaaacaggagccatatctcaggtagccacaagaccgtggattcccatacctgacctccagaaagtattcttaatatatcaagcttttagcataaaacatgtgcagctgatcatgtcttcagactttcttgccaagacttgtgaccactggagaggctggataagcatctttatgaagggttatctatgctacaggcatttttaaagaacttactgtagaacaacttggtatgtggggcccaaatatccatcatcatggtggtttcacttcaagatggcctcactctggccatgcaacagggtgttttcctacagttgtgaggattacatgaaatgatgcgtttaaagtttctcacactatgcctggcacatagggatcagtcatgaaatggcagttactcttctaataatttgcctgagattatacagtcggtgtgttaacaatacctggagctgtgttgtgactttagatgaggcatgaactctccagtttggcaat

SEQ ID NO: 188001 - DNA, 221 bp, Homo sapiens
tggcaaaaaaaaaattcatgcaaataacaagagcaataatatccatccaacggcaagcctacaggaaagtaagcattcttctacactattggcaggaatataaattgaagcaacctttttgggagagcaattgcctggaatctatgttaatgtaaattgtacatacccacaatcacacccttagtaatacagtgttcagaaatactagcacttaagaaaat

SEQ ID NO: 188002 - DNA, 425 bp, Homo sapiens
tcaaagcaacatttctcagcagtgtggaatacttctaaagttgcattattgttgaatacatagagaacctatcttcagtaggcaaggctattccttcatacagaaaaaatatataaagaccatctgacacactgttgatggacacttttaagtgtaagaaattaattaagataatatttggctgtaatactttgcatttgaaattttgtagacaattcattttcaagaggatgtgatatttttgggagattacctatactgaacaatagtggatgttagaattattttgcaaatttaactttataatatcatattctataaaagttctgcatattaattataggaattggtttttctaatttgatcatttaagcgtagaaagatttgtttggaaattgtgaaatgtctttatactatattttgtg

SEQ ID NO: 188003 - DNA, 831 bp, Homo sapiens
ggagtaatgaaatctgacttacagtttagagtatcacgctggctagtgggatggaaatagtctgtcgggagacaagggaggaagcaggaaggtgagttcacaggccagtggtagctcagaccagggtgaaagtggtggagatggtcagagtcaggttcgggacatatttaaggcaaaaccaacaggatttattgattaaatggatgtgaagtgtgagagaaagggagaagtcagggacgacgagaattttaggggccttggcaagcggaaggatgaaatcatcatgaactgggatgggaaagactttgggaggtacagggatgggatgggggttcattctgttttggacacgttaaactaggaagccttttagacagcaggtgtggtgagcaggcagcagaatatccaaggctgaagttgcagagaatgggctgaaattataaatgtgggaggagtcaccagcatatataatactacataattctatgtatgatcatgtgtaatttgcatgactatgtgtttactgtctgccccctacaagactgtaagctccatgtggccaaggaccacgtctgttcacagccagcagggtgcttggcactcagtacatacttactgagcaaatggagaagttgcccaattactccctcaagaatagccacacagcccacacaagaagcagactctcttgcaaccacagtgccaagcccaaccagccccaaacagggccctgggtctgtccaccccgagcttgagattccagaacgtaagtggatatgcctggcacatcacagagtcagatatttgggtttcagccctgccacattctca

SEQ ID NO: 188004 - DNA, 278 bp, Homo sapiens
tacctgccttctacccacaaggtgctccctaagcagcactagaggcctcaattttcctgaccagctcaaagataaacggacagaataactcccactgctcaagcatgggctgcacacactattgtagagaaaccggataagtagttgaggccaacttcagcagccataaagcacacagacagcaggtatccttgatatgaggacaacaacattttaccttggggatatcgctccaaaaacccatttgccagtcataataagaaaaaacagcaaattcc

SEQ ID NO: 188005 - DNA, 509 bp, Homo sapiens
cggcatcttcctcatccccatgtccccagcccatccggtatggtgcctggcacggcagccaccatcagtagccataatagctactggttagcacacactcgctgctgagctataagcagaattatagctctttaatcctcaaaatatccctcaaaataggagggaagtagatgtatcagctccacttgtttactgagtgaataaactaatggaagagaatggcctttcggacatttgagttctctaacactgctgggaaagttttaataaaccagggcttgccactcatggtagaggagcatatcgaggtgtggagcatgagctggggtctgcctaagtgggttcgaatcctggctctgccatcttttagctgtgtgactctgggtgggtttactgacattctctgagcctcagtttccttgtctcacaagaccttggtgaaaattaaacaaattcatgtgcaaaagtctcaaacacacagctgccatctgggggatgggacgggatct

SEQ ID NO: 188006 - DNA, 523 bp, Homo sapiens
tactaaatggctgtacctagatgtatgttacctaaatggctgtacctaaatggctgttacctaaatggctgttacctaaatggctgttacctaaatggctgttacctaaatggctgttacctaaatggctgtttattatataatcagtgctactataatactctttgaaaaagcaaatttgtccaatgcaactgatgtattgggaacaatttatagtaacacaaattttgcatttgttaatgtgcaattttgttcacaagaaacactagataaacacaggaaactatacctcactgaacagggctgggtaggaatacataaaacacatacatgcacacatcttaaacatctaccagccacctagatcaccacatgttatggaccacattcatctggttacaattttccatctgatttcagatgatcttcttccactacttcataactcacaagctgcaacccttctcatgcccatttctataagcaaacttcggggttttacagagtaaagtaccatatttat

SEQ ID NO: 188007 - DNA, 401 bp, Homo sapiens
aggaaacatattgctctcagtctctactgcaactttattctgtttacaaaattacctgtgaccaacaaatgggaaaagccatggtctttaaaagaaaaaatatgcaattccatttccactatttattcttgttagttcactgactgaaactgaaatgtggtttattacaatggatgaaaatttggaaagaaacaattaatttgcataatcaagcaatctgcattatattgcataaaagacaataacaaagtgaattatgtacaaggctagacttcatgctttgacaaacaaaatgtagcagaatagtttctttaagtggaacttctggacaaaatttccatatgagatataggtagcatggatgaaatagagatgttaagacattttagtttttttgtttt

SEQ ID NO: 188008 - DNA, 532 bp, Homo sapiens
taagcactgaacaaatcctccttaatatcgtccacttatttctatacctcttagtcgtacagcatttccctgtttagttgtattagtttatacatccttggtattactgttattgataaatcttaacattgaagagctctctttcttagactattatcacttaaaatttgagcacatttagctttcacgacctctaatattggtatgaaataaacctagcatttaagctaaagacacagtggaatgtctaaaagatgctgtcagttacttattttcttgtttcataaacattggatatccctcaatttatattccaagatagccctcaaatatgatttaatacactttttgttgagtgttctgttaaattttcacctcttgtggcatttattatttatccttttattatagttatcctgaacattgtcttcgctcccctatttcactagaagcttttcatggtatttattatgtcctattcagtaaatattttcctcaaaaatttctataaaaattattttaaaataaatta

SEQ ID NO: 188009 - DNA, 757 bp, Homo sapiens
cctgccaatttttgttgttgttgttttttgtagagacaggatttcacatgttgctcacgctggtctcaaactcaagcggtttgcctgcctctgccgcccaaagtgctgagattataggcgtgaaccgccgcccccagcctcaggctttttttaaaaatacaaatggttgcatagtgtactggattttttagtccttattttacaacccataggagtactcatagagctgcctcattcttttgaagcagaaataaatatccttatacatatttatttatgcatatatgtaagtatatcaatgagataaatttctcgaagaattactaagtcaaaaggaaggtgtatttaaaactgatagatactgtatatcaccattagaaataaggaaaactcacaccatttatcttatttttctctcaccttctatatccaatccatttgcaaatcctgttgactctaactccaaaataaattcaggacttgaccacttctactctgattcaacccaccttctcttatcaggattatatttcagtagccttttaacggtctccttgcatcagctattgccccttcattattaggagccagagtaatattttcaaagcatatatcagcccttggctccagatcctttcagagcaaaagccgaagtctttgtggtgtcttaaaaagcctgatcagcacctctccttttccccaaaccatctctctgcccccctttgtgatcacatttgctactgttgactcctctgga

SEQ ID NO: 188010 - DNA, 505 bp, Homo sapiens
cccacccccaagaggaagtagaaagcatgaaccttgataaatatagccttgagaatgatttattaggaatgaaaactttctttaaataagtaagtaaataaggttacagttatctaaatatcataggtctaacagagtgtaagctcttcgaagggaactacttttatttgtatgtgcatagcgtgaaagtgtggaataaatcaatgaatgcatcactaataatacaggattttagctagcgtttttcctttttcctttaatttatgtttagggaaaaaaaaacctacaccttcaaactaaataggtatgattttacctttagagtgatagcagctgagatgtttttgtcctaataagcaccatccacataaaaagtgaatggcaaatttcagccctactcagaatatttcagcagaacattaggacaaatggattttcttagatccacgtatggaagctctcagattatgaattatttggaacatcagaaacttggcaacagttt

SEQ ID NO: 188011 - DNA, 398 bp, Homo sapiens
atggcgttcccctgtgtgcatgtgggtattccttcttttaagacaccagtcatattgggtcaggatacatcctaatgaccttattttaacttggttatttctgttaaaaaccctatctccagctggatacagtggcctacacctataatcccagcactttggaaggccaaggcaggcagatcctttgaaccaaggagtaggagaccagcctgggcaacatagtgagaccctcctctccataaaaaatttttcaaaattaaaaaaaaagaaggcctgaagctgacatagctgagaaagtttgttttaactcactaccattgaataaaaacttaatagttttatcaagatataatttacatactatgaaattcacctattttgtgtacaatttaatgatt

SEQ ID NO: 188012 - DNA, 367 bp, Homo sapiens
agtacgagactggatgttcatgtcttaagccttccagtggagcttctgatgtaaatttctcttaaaccactgttttcagtccgtgaagaaaatgtgtatgtatgtggagtcatcaatttttttcaggaatttaaattcctgaattttaattttaaaaggatttacactgttttctgaccactgtttgcttgtcctactgaagaacagaagcaaacatccagtcccttattccatagataatagttccatagtagcctctgtattgttaaagagctgcataggtaattctagaattattctagttgatctaatatgaaaggagaattggtatagatttgtccttaaattaactgtgtctgcttctaga

SEQ ID NO: 188013 - DNA, 358 bp, Homo sapiens
ctgtgtctttgagggtgtttctggaagagattgacatttgaatcagtaaactgagtgaagcagattgccctcccgagtgtgggtgggcctcatccaacccatggacggcttgaataagatgatgggttaagaaaggtttctgctccactgtctttgagctgggacatcagtcttctgccttaagccttggacttggtcttgaactatattcgactctcctaggtatagagcttactcagagtagaacttgggcttctctgcgtgcgtgcatgcgtgtgtgtgtgtgtgtgtgtgtgtgggtgtgtgtatgtatcctcacgccacagtcttatagacatgtaacagaaacaacagccag

SEQ ID NO: 188014 - DNA, 621 bp, Homo sapiens
ggctctggctagagggagtggcagtgggtggatatggtgagcggcacttccagatccccgaccgaccctcaggcctaccttggccctcgcagaccagacagcccgtgggggctgctggcgtttgcagcgagggagagactggccactgacgcttcccgtttttggtgggtttccacctccctgagatgctccaaccatgtctttctggttctctttccagaggcactgggaaagggacagcaaagcagagtgggcagctgagaccctcacatcctcattaggaggagggagaccacagctcgatgaggcagcagagggatgaagggggaacccagccagtgacaggtctggttgggatgcccaactccacctcctgcccccacagatagaccactactgtgtccactgccccggcctagtccaagccactaccgttctgtcctgggatttctgggactgccctcatctgtgatgggggtctctgtgtccagctctgccgctctcctgctccctccctctagtctccctccagaactccctccagtcagttctccatgttttagctggagctgcctttataacatgcgaatcggttacctctctgtacttaaaacccttcca

SEQ ID NO: 188015 - DNA, 184 bp, Homo sapiens
tagggtaagtatatgtctggcttccaaagcagttctttaacaacaaggaatgaacattatttatattcccacagttcctaacaaatgtctttcatatagcaaagagctaaatgaacacttgttgatgaattaatatagataaaagaaaaagaatggagttctaattataattattggtttggga

SEQ ID NO: 188016 - DNA, 470 bp, Homo sapiens
gtacaaaagcacgtgtgtgaggggagcactataggaaaaactatggaaggctataaggtgatttgtgatcaatggttgtatcagagaagtggtggcaaagatgaggagactgttatttggatacttctttattgtctggattttcacaataagcatgtataacttttgaaattcaaatgagtgaaaccaaaataaaaatctaccagctaaatttgttaacaaagaatgggtattgcttttaaaacacaaaaaatcaaattatgtacttttttaaaatgtaagataaaacaccctaggattatgctacagtttgtgactactggatcctgaaaatggaacagttaatgatcaaatatacttgacagagatcttggtggagaaagaaatttggattccattaatacatactgagcaccaccatcaggtattagacactgtattaagcagctatgcagtaacttaggacttag

SEQ ID NO: 188017 - DNA, 343 bp, Homo sapiens
gaacatttttaggctgcacacagaactcaggcagatgagcaatttgtttctgacacttaaattacctgaataggtagggaagaagtggtactgacagtagtttcaggaccaaagaatgtatttccctttctattaagaagttcaggcaaactataagcagagagatgatagcacccaactactctggagctctacctggcaagtctttgggataaatcaaatccattcttttttttttttctttgagacggagtcttgctctgtcacccaggctggagtgcagcggcgtgatctcattgcaacctccacctcctgggttcacgcgattctcctgcctcagcct

SEQ ID NO: 188018 - DNA, 320 bp, Homo sapiens
gacggatacacgtgggtacacatgtgtaattactgtcacagagtgacatgtacattcatgaacagaatgtgttaggcagaaatgtttcactagcatcctgaagaaacaaaggaaaatcactaaatgcaagaaaataattgctttatcaatttttgatcagcagtctcaacttccaaaaaagcatgaactatattatattcccactattatacattgtatcttaagaacagctccaaatcaaattaagcatcccctgaattgagatagaaagacagcagttacaatcaatggtgatgagtatggaaaaagggttttgtttt

SEQ ID NO: 188019 - DNA, 375 bp, Homo sapiens
agaatagtggaagagtgaatgtgtgcctatggttaattttgagggtttgttttgaaatcttgttccttaatgtatcttatttttgtttacctgccaatggatagaaaatgcttgtgaccacgtgaattttcacccacttgaatagattactttataatttcatctattaccctgaagacagaattcaatgtcattcttacctttatattgtcttctcactcaggttcctcccattaaacagttctagattttaagcataatgctctatatgtttttacagtgtgttaattattactcaggtgtcagtatagcaaatgggcttttgatcatcattgtatgcatgatgattctgtacggtggtatctattatttctt

SEQ ID NO: 188020 - DNA, 410 bp, Homo sapiens
tctctgcagatttattctcatggggtgcattttagaaagagagagagcatgagagagagagaaataatgtttcagaacaaggaacttttcacttttgagataaaccacagcatagttcactctccagtgtaactgagtctatgacactgtttgacctgctatttgcatatgtctgaagagtaaaaccaggttccttctagtatcccttctgaatgatttaggaattgacagactacaatattctgtaaagtaggtatttatttcatcaacctgctttaattgtaccatagcagcccaagaattacaggtgatagttattaaataattaaaaaataaatttatggagtatctgcgatatacaggtcactgttttggagactgtaggacaagaaatgtgacatgttcttccc

SEQ ID NO: 188021 - DNA, 430 bp, Homo sapiens
gaatgtgcagctagccccgcttaattgatctaagcagccagggtcggcaggggagctttcacgtacacagcctctattcctggcttgcaggactgtttacctaaggggcaaagaagtccacctgcgaaagacaccatgttgctactacagccttagcaacagcagtagcccggttttcattgttgttgtttacagtcatgagagccatactcctttaagaaaacaccaaactcctttccctcattcctggccccaatcagtaatcaccaagactgtcagctgcctgcagttatcgggaagagcagcctggggaaagttataggagcacagatggacagttgctttctgcatgcaagtggccagctaggatccggggggcatcaagccatgatttttatttctgtgctggatgcattagcagctgttgtaa

SEQ ID NO: 188022 - DNA, 264 bp, Homo sapiens
atgaaggcctttccacattcattacaagcaaagggtttttctccagcatgaattctcaggtgccgtcgaaggcttgaattagttccaaatgtctttccacattctttacattcaaagggtttttctccactatgaactctcatatgctggatgagatgtgagttctgattaaaggctttcccacattctttacatgtatgaggcttttctcccacagaacttctctgtgttttgttagattctaaaatctctaggaagttttgg

SEQ ID NO: 188023 - DNA, 284 bp, Homo sapiens
acaggagcactgtgtgtgtgtgtgtgtgtgtgtgtgtgtgtgtgtgtgtaattacacaagtaatgcatgaatagattgtcattctgaaaataccagtggtacatgagtagagtgaaaaatgaaagttttccttcactactctgatccctttccattcctctgcctagaggaaccttgtgaacagttaattatgcaaatgtatttgtttctacttaaatcatactgtgcatattctgcaccttgattttttgggtcatctaacagatctgtccaggtggtacatg

SEQ ID NO: 188024 - DNA, 383 bp, Homo sapiens
ctagttcttgaaggtgatgtgattatttgagtcatcttttattgttactatcaggaactacaataggattttggagaaattatggagagaaatttggccccaagaaaacatgggtttgtattagtttcctatggatgccgtaacaaattatcacaaacctagcggcttaaaacagtacctagttgttatctcacaggaagattttcttttttttttttttttttgttatactttaagttttagggtacatgtgcacaatgtgcaggttagttacatatgtatacatgtgccatgctggtgtgctgcacccattaacttttcatttagccttaggtatatctcctaatgctatccctccctcctccccgcaccccacaacagtc

SEQ ID NO: 188025 - DNA, 572 bp, Homo sapiens
acctcctaccccacggattctctggatttgttctgtaaatatttatataaaaatatattctagggcagagttgaatcaccctgagtaaagagtgctgtgggcaaggcatgacctgaactagcgtcacctaatactctcagcttctagacgggaaagtagtccacacctcaggaccaagtgtaactccatttctctcggcctctcagattagtgcttcctaaccagcagccacacttaagctcagctctgggatggacatctccagcactcaaactctctctgcacagacctgcccacaaaaatgcctacacccaagttccaccctgcccccgcttcggtttccatgaccccttactaggagtcacaaacttaccaaggctagcccccaggagtgttttgctgggccaataagctatttttaaatgactgattttttggccgggtgcggaggctcacgcctgtaatcccagcactttgggaggccaaggtgggcagatcacctgaggtcaggtgatccgcctgcctcggcctctaaaagtgctgcatacaggcataagccactgtgcctgccc

SEQ ID NO: 188026 - DNA, 440 bp, Homo sapiens
tgggttcaaacgactcacttgccttagcctcctaaagttctgggattacaggcgtgagccagcatgcttggccaaaatttaccatcttaaccatttttaagtgtatagtttagtatgttaagtatattaatactattgtgcaaacaatctccagagcttttcatactgcaaaactgaaactatacctgttttacaattccctatcactccctcctttatccccaggcaactacgatcctattttctcttttatgagttgaactattctagatacctcaaataagtggttgtccttttgtgactgtcttgtttcacttagcataatgtcttcaaggttcatccatgtcgtagcatgtcagaagttatttcattttaaaggctgaataatattacactgtatatgtgccacattgtgtttatccattcatctattgatggac

SEQ ID NO: 188027 - DNA, 501 bp, Homo sapiens
ttactgagcaggttgccacaaaaggtaactggggctcaatctcactgggcccttcagttattccagctgaggggtggtgaagctgtggtatttatccaccaactccctttcttcatggctgttttaaaatgcactcaagattttcattagatatggcaagccggcctatgtcattcttattctttaaaaatatattcatttgggttctgcttgaaggagagcctgagtcaaggatttgggtgcatgcatttttttagaagatgattccaggaagcaaggtaagagggtgagaagtgagatagggaagggaagaaagtcaatagatggtacattaatgagcaggttgccacaaaaggtaactggggctcaatctcactgggcccttcagttattccagctgaggggtggtgaagctgtggtatttatccaccaactccctttcttcatggctgttttaaaatgcactcaagattttcattagatatggcaagacggccacag

SEQ ID NO: 188028 - DNA, 104 bp, Homo sapiens
ggctgacctctgaggattcacttttttaaccagaaccacaagagtttaaaatgtgctgacctcttctgtaatgagtgccagtaagtagaatgctacttaatggg

SEQ ID NO: 188029 - DNA, 194 bp, Homo sapiens
cccacccaaatgacccccaattacaaggatggagaagggacctgaatgaacccccaccttctgcctcctaagctaaagtacctatcatccaagtaggacagggtgtgcctcccccaggagaaaggatactgccgggggctgggagacccccaaccccaaacccctaagagcggggctgttgttcgagatccccc

SEQ ID NO: 188030 - DNA, 380 bp, Homo sapiens
tcccgggatcaagggatctcccacctcagcctccttagtagctgggactacagacacccaccaccgcgcctggctgatttttaaaactttgtatagatggggtctcactatgttgcccaggttggtcttgaactcttgtgctccagggatcctcctgccttggtctcccaaagtgttggaattacaggcctgagccaccacaccgaacatagcctattaatgtcagcctatttctctatttatgaattttctgaagtgttatttttatattcagatttatagaagcttttgtcttttatgaccttgacacttttaaagggtactctcagctattttgtagaatgtccctcacactggggactctgaccttatgactggac

SEQ ID NO: 188031 - DNA, 400 bp, Homo sapiens
cttgtgtcccgccgtgggatctgttcgaagggggtagtccccagcagttgtcctgacctgaatatgtttctatttcctgccttcacagaccctgaagcaggtgacaggagtccctacaacacgttctgtccttcaccggaaaggcatctgactagcatgcctactcaaaagtcctccaccttgcagaatctgcatggagtccttggctatgctagcagagtctgaaaatgatttcctatgctcgagcaggggttggcattgctaaactgctgagggacagagtgaaacactcatttcctgtgttctgttgacctgcgtccacagtgtcccctctgggtgccccccacatgttatgtcttcctctattcgcaccttctcaccgtttatcattatctagttt

SEQ ID NO: 188032 - DNA, 287 bp, Homo sapiens
gtagggctgtcggtctagcacccataaaccaaaatgaggcagggattggggcttgccctatgatgctctgatgaccaaagcagatgcgtagaggcaagcagcatggtattgggcaagaggactggactgggagtccagagatgctgcttcaccctgggcctttagacacgtctctttccctcccagagcctcagcatcccttctatcaaatgatgacattctgcctttttcccagggcggttgtggggatcgagggagacagtggctatagggatgctgtgttaact

SEQ ID NO: 188033 - DNA, 242 bp, Homo sapiens
tgtctcattggaatcatggctaggactgattttataacatgctcacgcaatctggttcataggaactcacaagctgtcccccagaaacccaatgctgatggagaaggcaggagaaccacttccattattgcaggcaggagtcataaattccagtccctgctcagtcaccaacttgctgtggaagaccttgtgaaagtcatttaattcccctagaccttaaccgttgcctctctaagatgagg

SEQ ID NO: 188034 - DNA, 275 bp, Homo sapiens
ttcacagtctaatgggaggggcagaccaggaacagctgactaccatgcatggggagagctctgataaacctgcgcactgttgcggaggcacaagtgagggtaccacatccgccttgtgttgcgggggcggttagggaaggctttgcagagtcctgagaaaatactaggcttgccagttggagaacgggaggcagggcattccaagttgaagaaacaccacatacaaaggcagagtcctgaaaacataaggtatgtccacaattagtattagtttg

SEQ ID NO: 188035 - DNA, 359 bp, Homo sapiens
tctgtttgtgaccattgttcacttttgttgagtcttaaaaagttgttttgggatctttttttaatgttaagaaatcagccctttgtgatatgtgttgcaagtatttctccccagtttgttgtactattctggttgtttctaccagatagaaatataaatacctatttgtttatccattttcttacttattttttgtagtatgatttaaagaatttttttttaatagtttctaggtttgtgttatagttaggccaaactgagattaatttaagaaaaaaagattccttcatgattttttctagtttttttaaaactggcatattttaatatttaatcttgactgtaaaatctggattttg

SEQ ID NO: 188036 - DNA, 364 bp, Homo sapiens
tgaactgcctggtcagggcaacatgcggtacaagcctaaaaggagcgcttttcagccctgaccacctgcgccctcctgagcgctggggagaacaaaacgcaatccctgcctttgaaatctgcatcctccaggagaatggcaggcagcgcagagtggagggagaaaattctgcttctgactaacatttttggtagtgatgaaatttttggaccctctgctaaggcttaatgtttttaaaagctaatcctgggaaaatagtcttgatttctaaggtagtacttaacctctttatttcccttgtgttggttcttgttttccaacttcagagaaggctttataggatcctaatagggacacagttcca

SEQ ID NO: 188037 - DNA, 550 bp, Homo sapiens
tggttggccccttgctgtcagccactcttcacacattcatctaacaaaatttactgagtgcctgcaatggaagaacacaagtgctaggttctagaaataaaattaaaaattcctttctttgacatgcaatagcagttatcatttctgagcacttctacatggagtatttcaggagggctcattgtatcctcacaataaacttatgacagaagcattattgataactccactttatagatgagaaaactgaaacacaggttaatacatggcccaagtcatataactagtaagtgactgagccaaatgtcattggttctaaatgattatgcctctgaaataattacagtgaaaagttcttaaagacattaataaaatactgaacaggaagatcttagctttgctgcagtttctaggatgaagggctacttgagctccaagaagctttccacccctaccccatgccgatgccatgccccatctggagcactcatcacatagtctcagccaagtcatttccatctcaagcattgtgcaaaagacaaacactcac

SEQ ID NO: 188038 - DNA, 280 bp, Homo sapiens
aggttgcagtgagccgagatcgtgccactgcatagcgacagagcgagactccaactcaattaaaaagaaaaaaaagaaactgcatgaaaaaaggctgagaggaagtatgctgaaggttaagagtaaacacattcactgggctagaagcttcaagaagggtgactaccacacctctagttcctaaagggcagtacacaaaatgtaactgaatttcttgatgatgtgattatgggtaatattttcttccttagacgttaccttagcatcttagatgaaaaaa

SEQ ID NO: 188039 - DNA, 709 bp, Homo sapiens
gttctagagaagttataatcatgttctctggagagagtaatatttaccacacagcagaacacttcagtcagactttgtttccctctaacattgtgtaggcaaaagactttggtacctcaactcgagctttttcccttttcatctggttgtcctagtagagtgtcaacacaggcaggaatagattaaaatgaagggacactatactgttattcaccaacacccctggaggctgtggccctgggttgagtaagacggcttggctttctcttcttaatgtttgagaaatctcctgataacttgcttagtatccaaactgactaaacccagcatactttaaagatgagagaataatgctctttttggaaaagagactgccaatttgaatgaaagtcaagggcttcagacaaactgcaatctcaaagccctctggacctctccttgcttttaatgaaagtttaaaatgatcttgtaagattctcgtaaaaactgctaaacacaaacgtacttctgaattttggtaatcaaaaatcatgagtgtataaagctgtaccttgcttggaaagataaaataacaaaaccctgtgaaaaccacattatatttgactttggctgacagtaaatcacttctaatgttcaatcttaaaactgatggggaaatctctcaaaacataaatgaataattattacaaatatgaagtgaaatctctac

SEQ ID NO: 188040 - DNA, 527 bp, Homo sapiens
tttcagtaaaatgtctctcacttttggtagtttcaatggactagaattgatttatgttgaattgtttttcttttgttattcacagaagccaaaagtaagaaaaacagttccctctataaactgagctgttatttcattcctgcaacaaatatttattgagtgttcacaatattaagccaaagcaatgtacaaggtatacatagtccctaccctctggaacttacattctagttaggagaaacaggcaataaagcacataaacaatgtataagtaaatttcagacagtggtaaatgctataaggaaactaaaatggggtaaagagttagacaatatgggattacatgaaagattgctgctttgagactaggataatcagggaattcctctctgaggaggtgacattttggctgaggtctgaatgatgggaaagagatagccatgtgaagttctggctaggtgctttcacataaatcttttcacttaatcctcacctcaccatgaactggatgatgttatctccattta

SEQ ID NO: 188041 - DNA, 237 bp, Homo sapiens
acagtctctaaaggtataagacaagggtgacacaaacactctgacatgactccaaacctagctacttggtacaggcaaaatctcttcagagagcagagctgatctgattgaaatgtatggtgtggtggcccagaggtaccctgggctccacagagcacagtttgaaagggccccggtttaggaaaccagcctaggaaaactgcaacttctggctcagaccaaagggtagaaatggag

SEQ ID NO: 188042 - DNA, 580 bp, Homo sapiens
tcctatagtcccagctactcgggaggctgaggcaggagaatcgtttgaacccgggggcagaggttgcagtgagccaagatcgcgccactgcaccccagcctggcgacagagcaagactctgtctcaaaagaaaaaaaattaagttcaacaaatgctagctgttatgagtactgttgaatgtgctacagagaaccattccattagcccagaagggcttcctcgctccacaaagtgactcaagtttctctctcccaatctctctctctctctctcaatcaaatatttgttaagcttagtctaggtagcaggagagatctggattgctaacaatatctgcctccgtggcctgtttgctttggttaaatcaaattaggcgatctgtgaggggatggtaaactgcacagatgacaggaattgtttccctgagccaggccctgtcctcagggagctcatagacaagtcgaagctttcacaggtagccactggcagaaaaagcatacgggtaagtctcgcaagaatggtattggatgagtattacagaaattcaaggaagagaatggcacacgcagtagatacttat

SEQ ID NO: 188043 - DNA, 388 bp, Homo sapiens
aatgtaggggtctgcattggttagttttctgtgtcaacttggccagcacgtagtacccagttattaaattacacacaaatctagtattgctgtgaaggtatttttgtatatgtggttaggaaattatcatcagtaatttggagctaactcatccaatcagttgaaaggccagaagggcaaaacaactttctctgaggaataataaattctacctatgggatgaaacttcagcttctgccccagaatttccagcttgccagccttccctacagatttcaaactagctaatctctacaattccataagccaattccttgaaataaacatatttatcatatctatctttctgcctagatctattctaattccaggagacccaaaatgttat

SEQ ID NO: 188044 - DNA, 463 bp, Homo sapiens
cactttggctgccgggtgaatcatgctttagagaaagataagattgatgattgaggcctggaattttctttgtggaagacaatttcttttattttcttttttttttaagagacaggacctagctctgttgcccaggctgaagtgcagtgcacaatcatggcgcagtacagcctcaacctcctggggtcaggcaatcctctcacctcagcctcctgggtagctgggactacaggtatgagctaccaccttggctaattgttctattttttgtagagatggggtcttgctctgttgcccaggctggtctcgaactcctaggttcaaggaatcctcctatctcagcctcccaaagtgctgggattacaggtgtgaactgctgagctcggcctcgactttaatagatatagggctattaggattttctatttcttcttcgcgctttgcagttggggtaccgagctcg

SEQ ID NO: 188045 - DNA, 421 bp, Homo sapiens
agcgtgtctccttagtgacaaaacttctctctcctcagaaatcatctaccactgatttaggatgagatattaaacattctcttcagtcctttcacctctaagacaaagggtctaagggatgatggtccagagcagtggtccccaacctttttgaaaccggggaccagttgcaaaagaagacaatttttccacaaatggcaggtcggggccagggagggtggtggttttgggatgaaactgttccacctcagatgacctggcatttgattctcataaggagcatgcaacctagattcctcgcatgtgcagttcacaatagggtttgtgcttccctgagaatctaatgctgtggctgatctgacagaaggtggagagctcaggcagtgatgcttgcttgcctgctgctcacctcctgctgtgc

SEQ ID NO: 188046 - DNA, 449 bp, Homo sapiens
gtgcctccatacatttttacttttagaacagtaattcataagtgacaactgatatagcttatttccccgtgttccacaatgcgaagcaaagcaacattctctattttcatataaaggaaaaatgagaaaccaaagtaaaggtggagttgaggaaacttgggaattattgggaaaaataacgaacaaaaaattagtttacatattaatcagtgtttactaacaagtttccttaaactccacgccagcatttgcctgcaggtgttaaatatttgctaaatgaagacataaaccatatacacttggtgctctgcatctgtgattcaaccaaccccagatggaaaatactttggaggagcacatacagtagctcaccctgtagtcccagctacttaggaggctgaggcgggaggttctcttgaacccaggaattcaaggctgcaatgagctat

SEQ ID NO: 188047 - DNA, 157 bp, Homo sapiens
cactttgaaatgcttttttctttctcagatttcaggatttctttcttgccttagagtgggatgttcacttaaccctttttggggtctgtttttctctctaactttgggcctttttcacatttctgtgtttcttttttctctttttgagacggagtct

SEQ ID NO: 188048 - DNA, 357 bp, Homo sapiens
tactagaggacccggtcactgcgacagtatgacgttaagtgagaactgtattaaaaatatatgtgatcaagtagggtttgtcccaagaacaaaacaatctttctgtgagtcaatgtattaaaagactaaaggaaaaaccattgcatttgaaaaaggtttaacgcctattgtaaaacttaatgcattaaaattagaaggaaatgattaacttgactgaggttacaaataggttaagtggttgagtttttagtgttttaagtcgattagtgattaattattggggagagataatcctggcacaacaaaagaagccctgggtatcaggaaacggatttcagcctcttctgggtttatata

SEQ ID NO: 188049 - DNA, 225 bp, Homo sapiens
acccgtatcatctcttgctgcctccagacccattactgaattcagattcctgtatgtcccaggaagtaaagtcaaacctatgaggagaaagcacacacacacaaatgataagatttagctaatttatactggcagaaacctccataatatgggtgacagagtgagaccatgtctcaaaaaaaaaaaaaaaaaaaaaaaagaaaaagaaaaaaagaaacctccata

SEQ ID NO: 188050 - DNA, 663 bp, Homo sapiens
ctctgttacatactactacagtattttagttttcctaataaacgattacaaggagaaataatatctaatcttctcacaagcagttaactaaacaactctacaatttgaagctaaagtaagtccgttctgtggaaatgggaacaaaataaagcttactcagatcagtcaagaaaagttatacaattcttctccgcttctgaagtaatcaactgcattactaaaagacaaactttgaaattcaaattatatagagacttaattaaggagagagaaactcaaatcatttatgatcacatgacttgtatccaaatctgcacacttcattttggacttttctgaacccactctatgaaaaatacacctgaatatacaacactagggggaatggttaaattatgttactttggaacaatggaatactatacaacacaatcttggaagatgatacagctctcaatgtagaaattgagaaaggtctattatacactgctgaagaaaaactataagactgctgtaacaggccaagtgcagtggctcacactgcactttgggaggcaaaggcaggtggatcacttgaggtcaggagttcgagaccagtctggctaacatgatgaatccccgtctctactaaaaatacaaaaactagccgggtgtggtggtgtg

SEQ ID NO: 188051 - DNA, 334 bp, Homo sapiens
cactgaggtgtaaatgggaggtgaggagaggaaggcgctaaacacagattcttcttccaagagagacaggcaggcggtgggaccaggggctgagactgcactgctcaccagcttagccaagtgggtcgccggcagcttccatcactccggtgcccctttccctgtctgtaagtggatttgatggcccctgccttctagagtagctgggaagattgcatggccacacacttggggagagcccccagcctgtgacatggcacacgtgcaggtctcacaaggtggagagggctgcaggtggaggcagggtttgtaagttgtgaaagacacaggtgtg

SEQ ID NO: 188052 - DNA, 583 bp, Homo sapiens
tatagtgatccccaactgggctaaaacaacatcgttataattctctgtcttgtgatggaattctctggccctagccttttagaaagttaggggagagctataaatatgtaggaggaagagaagatattttgaggtgtgtggtttgggtgtgtgttaaaaaggaaaactagagtactgttatgttattacccatgtggcgttttgaccacaggattattagtctgacaggttgtcttggaatcagatttggtacaagactgcatagtctatgtaactgaacctgggaacagttcagtttaggtttggtgctttaatagcattagatgagaaatgtagattactgaatacttttgggtcataatgtaaagttcagcaccagatcgttatctttccctggtaaatccacttccttgcactggattctgtctcagggcagctggcactataagctgtgcaaaccagaacctagaggtcagcctggatccttcccttgcccttcatatcacataaatcactgagctttttttacttccttatgtccaatctgacttctcttttctatcccagcttgcctgtagcctcc

SEQ ID NO: 188053 - DNA, 258 bp, Homo sapiens
gctgcttgcttccagactttgtgctgtccagtaattatgtcttccactacccatcttgtgagcagagtaaatgtcctaggtaataccactatcaggcctgtaggagatactcagtggagcctctgcccttctttttcttacttgagaacttgtaatggtgttagggaacagttgtaggggcagaaaacaactctgaaagtggtagaaggtcctgatcttggtggttactcttgcattactgtgttaggtcaagcagtg

SEQ ID NO: 188054 - DNA, 575 bp, Homo sapiens
ctgggattatggtgtgagtcattgcgcctggtctcattgtgttcttttatcgtctgtgccagcttctaagtttgcatggcattgtgttttgcttgagatgaaagataatattctatagggaaataaatctctggttatttctaggtttgaataatcataattccttattctgtagctgttcatatcttacaaggcacttttgtcttttctcttgaacctcttaactttgaggtaggtaggatagatgtgtcggaggaaatacatggtaagtttctttttattttttttgagacggagttttgcgcttgtcacccaggctggagtgcagtgatcttggctcactgcagcctccttctttttcttccgggttcaagtgattctcctccctcagcctctggagtagctgggattacaggtgccagccaccacgccctggtaatttttgtatttttagtagagacgtggtttcaccatgttggccaggctggtctggaattcctgacctcaggtgatccacccacctgggcttcctaaagtgttgggattacatgcgtgagccaccgtgcttggccagt

SEQ ID NO: 188055 - DNA, 327 bp, Homo sapiens
tggtgtgtgcctatagtcttagctactcaggagacaaatgggaggatatcttgagaccaggagttcaagactaccttgggcaagatggctggacccttgtctctaaaattattttaaaaaattagccaggcatggaatatgactgtagtcctagctaacttaagaggctgaggtggagggtctcttgagcccagaagttcaaggctgcagtgaattatggtcatgccactattctctagcctcagtgacagagtgagacccataccaaaaagcaaaagacaaaatactttatgacctagaaactgtttgttggtatatgatgtggaa

SEQ ID NO: 188056 - DNA, 514 bp, Homo sapiens
aggtctaaaaagatgatgctggaactgtaatttgaacctggaatatttatctgctttcccatctaaaaaacactttattattcttttcatgctttggcatgatgagtatgcaatgaatataaataaaaggtcctggtagagtgatatacatagtacttgaaatgctgtctagtgtgtcagcgcaattagtagtgcactcagcagcagtgagaagagatgagagtagcacatataagctctattgaaactattaaactttgcctttgcagcacacaaacagccacagataacataaaagaatgaccatggctatgttacaatcaaactttatttttagaccttgatgcaaatgccaaggaaatttccatattttgtaatccacttaactatgcaattgagtttccattaaccttcaattggaattgattaatctgcagtgtaatgacatgctaaaaggcaaacatcaagaaaataatcaaatataattttataaataccttgtgctctataaagt

SEQ ID NO: 188057 - DNA, 205 bp, Homo sapiens
agaaaccaacgctgaacttcggtcggggatgggagggctatttagagtgcaggtaaggaaaacaaacataatgtgctttacaggactaatcataattcatcattatcatgtacttatcatatatagaaaggactgccctaggcattgaagttttggcaataaccagattgcccttgtttttgaagcgcttacaatgtagtgagag

SEQ ID NO: 188058 - DNA, 348 bp, Homo sapiens
ggctactggatttagcaacaaggaggtccctaataactttgacaagagcagttttactggactggtagggggtctgcctgatttgagtggtcttaagagggaatgaaaggagacgaactgcaaatgttggtacatacaatctttgaggagctctttcataaaggggaccagaggaatggcgtggtagctacagagacaggtgggatcaaagtaaagttttgctagaagaaaaacaatagcatgtttgtaagcggatccactaaaggggaaatcatagggatgcagaagagagaagggaggtgactttgagtaagtaaaggaggatgggtacaatgtacacggttaggg

SEQ ID NO: 188059 - DNA, 258 bp, Homo sapiens
aaagtcaaggtaggaggttgaggagaggaatgaatatgaggaagacataaagggaaatggacaagagagctgcctgaggatatggggagggctgagccacgctgagggcctatttggtggcacactagtgtaatagtgtcaaaagcacaatgtgtctataatggagctggcagggctttaggttaccacaagaaaagtgcagtcttgctctgcatggttagagtcctcaaggaaagaggatttcctttctgtaccaca

SEQ ID NO: 188060 - DNA, 408 bp, Homo sapiens
ttattcctctttcctcaacagcatgacacatagagacatggattgcacacccacactggctgataatacctgtgtctatgccttgagatttcaccagctggaagacaaacttggtcaggaatacagtaaggatgtgctgacctgctggttttctctctcctttgagaccaggaggtacttactgatatgtattactgaccctcaaagacactgtgtcagaggaaagccgaggaggatcatatgacattcagtatttccccacagaaagtttccagtggtgtcagtatcacctttcctactcacactctgtgacagacaagtcataaataaaataataaattttatgaacatttaatggattaactcaaacctgagcttcagcagttgccataaagcttcttctctctc

SEQ ID NO: 188061 - DNA, 185 bp, Homo sapiens
tattgcctttgtgatttggtgattggaaatgcctgcattgtcgaatttaagcaacaggtttatttctataatagcctattcttacatgctgaaatgagagagaaggtgctatttgcaagcacatcacgttgagtagtcatttgatgtggacattttattaccaaaaataaaaagccaagttgtat

SEQ ID NO: 188062 - DNA, 629 bp, Homo sapiens
ggttgttataaggagaaaattcagtggccaggacaaccttcggccaactctaaagccctatatgaaacaccagttatttcaccaagtcacctgatgtaacatgaattcagtcttctctatgctttttgtgtatgagcaactgtaaaaagaaatttctggggtgtgtttgtgtgtgtgtgtgtgtgtgtgtgtgtgtgttaaataagagtgcctggtttttcataactaagactaagaaaatgaaaagtatatacagttgtccttcagtatctgagggagattggttcaggattccctcaggtagcaaaatctatggaagctgaagttcccagctattccaagactctctgggacagagctctcagaaggtggagtagactgccatctttgctgtatagtagccttagccattgttgccttcaggctttagagagtcaaggttgaccagggactggagtgaactgccagcaaagcactgttgcccttggaaaataggtcagactgctttgcgagtgggtcatgatccatttctccgcagagccaggtctaccaagtggagactcagcccctctgctgtgtgtcaggctgcaaatgtctgactccctggttgagtcccaagggggggacgc

SEQ ID NO: 188063 - DNA, 400 bp, Homo sapiens
tgtgtgaaatggcaaaactccattaacaatggagaagtgtttaaataaatcacggtataaagcaacagaatacaggtattttaagaaatcagaggagtatctacaatatggaaattagtccacagtatattaaggttaaaaaaaaatgcatcttgtgaaatgctacattacaaatgatcccttccccccaccacccccctgagacagagtcttgctctgtcacccaggctggagtgtggaggcacgatcttggctcactgcaacctctgcttcccgggctcaagtgattctcctgcctcagcctcttcagtagctaggactacagccatgcgccaccatgcctggctaacttttgtacttctagtagagacgaggtttcacatgttggccaggctggtct

SEQ ID NO: 188064 - DNA, 574 bp, Homo sapiens
tttcttttattctgagagctgtattctgtggatagggattttgtattttagtgctaacaatgtttttcagtacctaacaccatgagtattcaaaggtctgatgttatctttaatgtatgtaatgaacatacaatggtatatcttatgaatattacattcattttctattcctacaacgttttcagaggaaatatttttaccctgacctggattctatcgctatcctaataactgtggttcagaaaattgtctcacaggcagacagtttcctaatcacgttttactcaattattttatttctcaatatgataggctgtgaagtagtccactggaaaaggcatcatgctgagagtaagaaaagcttatttgttcactgctctatctccagcacctagaacaatgcctgacccagaacaggtgcatagtatttgctgagtgaattctaatcctacttctgggtaaaattaagtaaattaattagttcttgagggactctgtctagatgacccctaaacttccatggtaaggttttgtggtttttatcttggcttttctaaatgctctaaaaatagta

SEQ ID NO: 188065 - DNA, 404 bp, Homo sapiens
ggctggaattacagatgtgagccactgtgcccagcctgtcttctaaaaatttaacgccactttgaattaattaaaagcagaatgtagttagtgaaattatgttcatcacttaagaaccaaagaagaagaaaatttattttttgagcttgttcttgcactaggagagcttgtctgaacttcataattaaagacctttacccttcagttccttcatagagttcgagttttattttccaactgcaggaactattatgtaaaacctagttcgtatcggttggcctcattcttttttgtttcctgctgtgaagtctttgagctctatttctgccatttttgtttctgactatggcttgttaggggaagagttaaattatttagtcatacttccttatgccactgaaata

SEQ ID NO: 188066 - DNA, 402 bp, Homo sapiens
aaaggcaactgtaatattttctttccaacatttcctagatgaaaaaaacaacatactataaagggcttccagtgtttgtttacctaaatgttatggtggaagaattgtttgcagtcatttctttatgtagcttattatgaaagtaaaaagcaggaagttaagagaaatgattagaaatgattacttcaagtgataatgtattcagtattcatacttttgcagaatgctttaaattattgcactacatcactttttaatgtagagatcattgtgcatttacatggtttaaagatattaatttcacattttcccaattaaatacaaatacagtacctcactttattattagtcccgtgaggatgtagagaccatatcttgtttattattgtttctccaacacaa

SEQ ID NO: 188067 - DNA, 357 bp, Homo sapiens
agtaattggaaatacatggaaacatggttatagtaaagatgtttgtgggccaggtgtagtggtccatgcctgtaatccaagagctttgggagactagggtgggtgggtcgcatgagcccagttggagactagcctgggcaagatgacaaaccctgtctgtacacaaaataccaaaaaaattagccagacaaggtggcctgcaactatagtcccagctactcgaggggctgaggctggaggatcagttgagcccggaggatcaaggctgaagtgagctgtgcttgcaccactgtgctccagcctggagaacagaacaagagtctgtctcagataaatgaatgaatggataaatgatac

SEQ ID NO: 188068 - DNA, 260 bp, Homo sapiens
aaaaattagctagtcatggtgacacacacatgtagtcccagctacttgggaggttaaggtgggaggatcacttcagcctggaaggtcaaggctgcagtgagctgtgatcacaccattgtactccagcctggttgacagagcaagaccccatcacacacacgcgcacacacacacacacacacacacagaaaagctgagccagattcggttggacacagttacaaatcccccttgaaacaccccacccctcattcttgagc

SEQ ID NO: 188069 - DNA, 449 bp, Homo sapiens
gacatgaatttgaaatgcttgttaagttttctgggtgtagatgacaggtaggggctagatctacgggatgtggagttcgaggctgggctggaaggggcacggagagggtgcagcacactgactggactcagccaaggacacagccaaaggagacagacctggggaaggggccagggggccactaatggctgaggaacctttaaaggccgctgaaaagcagcagccaaagagggagaaaggaaaactaggagcgtgcagtcagacagccaagaggaagggtgtgtggggcagcggtgtcgaaagatacagggtgcccaaccgagatcaagaccgaaaggcactgctgggtttggctccctggaactcaccaggcaccttgattagagtgggacatcgcagggaaccagagtggagggagcccagaagtttggtgctgaaggggtaaacgg

SEQ ID NO: 188070 - DNA, 422 bp, Homo sapiens
gcattgatggggttcagatcccaagttcatcctgatactgaggggcaaaaccagtggactttgatttgcatttctctaaagatctgtggaggtcaatagggagaccgctcatgatgttgaatcctggcaagcaaacggagagaatctgacatgtgtcccagtcgtgattaacctgtgaactgtaactcggggaaacccagtagctgatggggttgcgtccttctttgggactcccgcagatgcctgaggcggcagtgctgctgaagtcctgccaggctccagctcctggtgaggtcagggattccgcatgcagcgtcacagctgccaacctctccaaagcagtaaaggccttcggacagtgcacagaaagtgctcccatccacaatgcttccttgcctggatggatggatggatggatggat

SEQ ID NO: 188071 - DNA, 503 bp, Homo sapiens
acgcacgtgataaagttttcttgaggtacgtagaacaacttccctattgtgaaggcctcatggatcacctattaagacaaaaggaacaaacaccgttacctcacatacatttatgattctgtcctatctcaattgtgtgtattttctattgcgattgccatttggtaaaatctctgctttctaaaattgaaaatgaaaggggaaaatacagctgggtttttctaacatttccccttccttctgacatacaattttcaaactcaagaaatagagattttggttaggcgcagtggctcaggcctgtaatcccagcactttgggacgctaaggcaggtggattacttgagttcaggggctctagaccatcctgggcaacatggtgaatccctgtctctacaaaaaaatacaaaaattaaccaggtgtggtggtgtacacctgtggtcccagctatcctggaggctgaaatggaaagatggctggagcccaggaggttgaggctgca

SEQ ID NO: 188072 - DNA, 1449 bp, Homo sapiens
attatagagaatgtttcctggcaattaagcagaaattatggatactatagagcaacctggaatatttaaggagaaaaaaggttcctaaatgacatgcagactgactaattgcaagtcaataacgagcttgtctacctgggatcaaagacttgataggtgtaaagaaaagctgtcctggcaatgctgtcagggagtgatggtgggtgctggttctccttcctgcagtctttttgaaggttgccttttaaatgtggaaaaataagaggaattgagccaagagttggggcatctggttgggtttgtgggtgacctagggcaagtcactgtcctgggcttcatttctctctccaagaagactggctggactggctgctctgaaccttcttctagcatgaaggaaccacatactgggggccaaagaagctgcccatcaaactggtgctagagagagagatgaggccaggagtgggctcgtggctcccttcactcactaggacccagcttctactggcataacagggtctcctattgggcaaatcacttcccccatcctgcttagagctgctgtgaccactgtaaccctaagtaggacttggtggaacgtagacatttgaaaagctcttgtatacgctagagattttcaaatgtatgcataatagttgcaaatttgttaaaaacaaaaacatttacaagttataaaagtaacatgtcatagatgtaacatagttgtaacataaagaagtgttagactctccctacccctttcctgtcccactgctgacagtttcgggaacacccctttcactcttctctgcttgtacaaacacatatatacatccttttcccttctaaccataatgggattttgctttatactttattttgcaacctgcttgttttcctttagaatatatcatatggtgggcatggtggcatgtaattccagcactttgggaggccaaggcaggaggattgcctgaggccagtcctggcaacatagcaagaccctgtttttacaaataatttaaaaattaatggtgcttggtgcctggcacctgtaatgccagcactttgggaggtcaaggtgggaggatcgcttgagcccaggagtttgtgaccagcctggtcaacataaggagacctcatctcaataaaaaagaaaaaagaaaaaaaaatatagctctctctccatgtcagtacatataaggtgtcatttctgttaatggctacttaaccttccatggtaagaagtactatcagggattcaactggtcctgtttgattgaagagtcagcctatttctgatgttttgctatcacagagtattttagcaagtatatatatgatgtaggtaaagaggcagataaacacatgcacactgagtaagagagagagagagagactgagattgctgcattctgtgagttttatttctgcgggtttagttta

SEQ ID NO: 188073 - DNA, 654 bp, Homo sapiens
agaagcacttttcagacctcaaaaggtgcttcctgagttctataattctgggacaggacagaaaagcccgtactggctctggccatgcacactggttcctcatggaggagcatgtctgtgacacactctgggtcttatcctccttcagaacctcagtgtcctataagtttgctcatccatgggctcatttcacttccactgagcctcaaccttgagtgtccagtgaacacaaggacatttagacaaggccggagctattttgttccaagatacacaaatcgatgatgaaacaggatttcattgacttggggttggtggaaggacatgagtttacactgtaggaagccagtttttgttatctgtttccctataaggaagcccaacttcaaagccttgagatctgacctgatgagaccagttataagaaaaagaaaggggtgtgtttccctttcccttcctaaggagtgggtagaagtctcatccctctgggttgttggaggttagagaatgtccagatgtctttggaaagtcagtcttgtctttccatttctccagtcgcctgatttattttctaaattggcatttcagcacaaatccaatatctgacagtttagactgtatgctttaaagttcagagaatcttctgtaatcaat

SEQ ID NO: 188074 - DNA, 322 bp, Homo sapiens
ctgagtcacgggcgcgcatgctcaactttggccagataaactttctaaattaactgagacctgtctcaaatttttggggttcacattttggtaaccacgaagggattctgaacgtggatgcccctgacctttgacaaatttcctatcagtgcttgttaacagcatgagctaactttatggctcaaaccaataggaccatttgctgaggtctgagagcacccccttcagagaatccctgatctcccaaaatttgctagggatctaaagtttattttgctgtacaactcccttttttttggagttttacttgcttccaacacaa

SEQ ID NO: 188075 - DNA, 522 bp, Homo sapiens
cagctcctagagtatccccgttgtcttcaagactaattagaacatgaagaattttgaggcccaagccaaatagaacattttgtttttagaacatgaggtatagaatgccacgtattagtgtggtagttttcctttgtgatttatgatacacgtaatgttctttcaattaaaaagtgcagttcatcatattaagtcattatcctacctacagcgtattggacaaatttcatatatacttttcaattagtaagaaaagcaagtattgcagcagtcacctatctgatacaggtccttacagttgaatcagctctgcccatctgtaaattatgtttgaggcttgaacttttccctgtacttccagttccattattacctacgtatagcacatatggtctgcagcagtcttctgagccattgaaaaattgaggatttgtttttaaatgaactatcaaagaatccttcctggaaggattgtgtatttgagttgctgtagctgtattttgtttgattttgttttcctta

SEQ ID NO: 188076 - DNA, 313 bp, Homo sapiens
aaactgcccaaggtcagacaaggtaccactgaaaagaaggaacaatcatcgaggctaatataggattgggaatcgtttgtgttctcagcagccagagtggaaaaccacataatttagagtagacttctgagaacagttttacttatgtaatagggtgaaattaattttcctgctctgctaacctgaaagcatcaaactatttcgaagaaacttaactgcatttcagaataaaacttgagtatttataagaatacaaaaatatccagcatacaaaaatgtaaaatttataatggcttggatctgaccaaatatt

SEQ ID NO: 188077 - DNA, 799 bp, Homo sapiens
aaaaaaaagagagaagaaagacaaatgaaaagtaagaaaaattagcagatcaggccacaaagtgcaacatctgactaacgcaactctggaagacagaaaacagagaccaggccataagaaccacgccaaggtgcgtgttcatgaaatctgagaagaagaagaaaaagacaactctacaaggtgttagaacaaaggacaaaaatgcagaacacccttgacggatgctagaaaacggggagccaaatctttcccattctgcaggaagtgttttccaacctgggatttgaggacagaataaagaagatcttgtcggatcgcagatatggtcaccatctatcaggaagcaatcggagaacatccccgcagcaaatgagaggttaaccaggaagaacaaagccatggcgtacacgagtcaggagatccaaagctggagagagatgggaggaagcccccgagatgatgaggaatgggagacccagctgggcagaataggggggccaagaagggctgtcaccaagaaagatgaaaccctacctcactgatggccttccatattttaagagatctatgttgctggaggagagtttaggcatacattaagtagtgtacaaagaatactaatatttacaaagtcatagctatggaaacactgtatatttgaaaattgattgagccaaaaagagaagtatgactatgcttttaaaaatgtatttatttgttattttctaagagacagactctcgctctgtcacccaggctggagtacaggggtgtggtcatagctcactgcatccttgac

SEQ ID NO: 188078 - DNA, 464 bp, Homo sapiens
tctgaagtttctcgtcctccatcaccctggcgtgtcttcaggaagagtcctcttaggtcagtttagccagaattccccttacccctcatgtttcttcctggtaattttctatccactgatccccaccctgctccttggctataaatctcctcttgcccatgctgtattcggagttgagcccaagctctctccccaactgcaagaccccattgcagtagtccctatacccatcatgatggccctgaataaaatctgtcttactatgctttaacaagtatcactgaatttttttcttctttaacagggctgattcaaactagctacctattttctaattgggaggttaaagaaaatttggtggtattaatgaattgttgtcagttttgttgtctgtgataatagaatgctgtttatcctttttgacatcctgatctgttagactaagggtttattaacctcagcac

SEQ ID NO: 188079 - DNA, 168 bp, Homo sapiens
caccgggtcccaggacttcagagacactaaaaatttctaaaaacctgcatctgttcccttgaaggtttgaaaaacagtaagattccattcggggacattttctcagtatcaatgacttctatcctcttagtttctgtttctctcaaaaaaaaaaaaaaaaaaaaaaaa

SEQ ID NO: 188080 - DNA, 703 bp, Homo sapiens
aatttggaagagtttaaaaacatatatttttttcattaattgggtattgttacatttctcctgtattttttcttatattttcttgtgtaactttagtgacaaattactgtagaggcatctgaatttaggactcttggaagggaaggggatggaggtaggagggatggtgccagtgaatgatgtctgtctgagagagatttatgtttatgaaaaaggaagtgagtggattcctaagattgtggttttaaggcctgaatattgctttaagagtgtttagaattgttggggccaggatgaaggttgagaactacaggtttgagatcttaagaaaagccaggaccagaaagatctgttctagttatttccagctacgggatgcagctgaatgtcatttgaaaacatttttctcgttttttagcatctttgactgaaggcgaaatcttcatgccttggagggaaattcctagtgccacagcataaaaggaccagcagcagcaagtgtgatataattactgatgcctttaaaagatatgcgagccctttgggtatatacccagtaatgggatggctgggtcaaatagtatttctagttctagatcactgaggaatcgccacactgacttccacaatggttgaactagtttacggtcccaccaacagtgtaaaagtgttcctatttctccacatcctctccataaagaca

SEQ ID NO: 188081 - DNA, 1416 bp, Homo sapiens
atggagacccaggcatggctgaggagcctctgtccatcagtccattgctttctctgtcccttttttcccttctggactctggaagacaagagagtcaaatccctcaggggcagggaactaaaggacagagaacgctgtggtgccctcaccctctagagcgacactatccaatgtggtagccactagctgcatgtggctattttaattttagttattttaaattaaataaacccagtttctcagcggtgctaaccacatttcaaatgctcaattgccttacagtctagtggctccccctattgggtggcacagatgtaaaatattttcatcatctcggaaggttgagttggaccacactgctcccaaatatcccctcctgcgcatcttaattacccataataagagatgatgggattttaaatgtaaacaattggcagttttggagacacaattggggcagtgatggcagccatgaccagacattttccagtgttttttttttttctaagacggaatctcactctgtcacccaggcttgagtacagtggcacagtctcggctcactgcaacctctgccaactgggtttaagtgattcttctgcctcagcctcctgagtagctgggactacaggcgcctgccaccacacttggctaattttttgtatttttagtagagatggtgttttaccatgttggccaggctggtctcaaactcctgacctcatgatctgcccaccttaacctcccaaagtgctgggattacaggtgtgagccaccgcacgcagccattttccagtgtttttaaatgtaaacccaatagtggacctcaggccctttcctctggcctccctctgcctcctcctgatggttcctgctggtctctccctggctgggaccctgggaggaggatccaggtcggactttctgcaagagatgcccgacctcttctgggctagttaggcaagggcagccctccttagccagactcagctgcccacagcctggctttgatgagccccatgtcccaagcctgggtcattatgacctctagctgttcatggatggagatgctgctctcagagaatttcctttccaccagcttctagagctggcaaggactgaccctagtgtcctgaccctagccctctggcccctgcagagaagggttctgggaggactaggggaaccaggggggatctgcttagttttcttgaacagtctcaggtgtggactccacatatctcatgtcctagccctctcccctggggcaggctgcaccattggcatgtagtaaagggcagggctgacaactctgttcaaatggtagtggctttctggagtcctgcgtgttcaacagtcatgacggcgctctctgcagccgccagaatgctctctgtgccggggggatcctctaca

SEQ ID NO: 188082 - DNA, 397 bp, Homo sapiens
gcttctagagctggcaaggactgaccctagtgtcctgaccctagccctctggcccctgcagagaagggttctgggaggactaggggaaccaggggggatctgcttagttttcttgaacagtctcaggtgtggactccacatatctcatgtcctagccctctcccctggggcaggctgcaccattggcatgtagtaaagggcagggctgacaactctgttcaaatggtagtggctttctggagtcctgtgttgagaaggattctgaggttgcatccaattttagcaggaaagagtgctgtgatcgttagctgcatcagacatgggcatggatgtaggctgtgccaacacgcatgcttcttcccagacactccttggaatcaagagaatcaatgaacca

SEQ ID NO: 188083 - DNA, 437 bp, Homo sapiens
gctttcaagtaaaagacagaattttgaaaaatgtgaggctgccacatgaacatgctgatttccactcagcttctgcagatgaaatagatgatgacagcaaatgtgattttttttggtattgtggaatgagaagtgtccacaactggaagacgagcacaactcagagacccagcattttccaaatgaccaacacacagtgctgcccaagcacagtgggtagcgagtccctcacagggccagaggagccggcctgcaggaccaccactgcctggcacgcttgggcggcgtcgcagaaggacacccacgctgccctcaaggttacaaacactcctccctttcccaatcgcctacctaggtgattccacatgttcttcctaaacaacgtaacatcgatagactgcagaggcagatgtgagagtgcagccatcttctattaa

SEQ ID NO: 188084 - DNA, 312 bp, Homo sapiens
tgaggctgaatgttggtttaccatcttacattttctacgtccattaaatcagccttctgggaatccacagtcctggcaattctgaactgccccaggaggagggaagccatctctctagggtgagataggtgagccatcaggtctggtggtgggagtccacagtcctggcacttctgaactgccccagtaggagcgagcccatctctccagggtgagatatgtgagccgtcaggtctggttgtgggagtccacagtcctgacacttctgaactgccccagtaggaggaaagccatctctccaaggtgagattt

SEQ ID NO: 188085 - DNA, 264 bp, Homo sapiens
ctccagatatgatatctgaactgaccgaataatcgcagaatgaaatgttccataaaggtgcgtgccttttgcttcctcctgtcctattcacactaattgggtgccatagttaattcccggtagtaacatacctggggctttataaattattatataaccacacggctgctcacagagtgagactgtctcaaaaagaaaaaaagactgtctagaaaaaggtaatctctagaatctgaagagggttaacaaaatgaggattaaggc

SEQ ID NO: 188086 - DNA, 481 bp, Homo sapiens
agatcacaccactgtactccagcctgggcaacagagtgagactgtctcaaaaagaaaaaaagactgtctagaaaaaggtaatctctagaatctgaagagggttaacaaaatgaggattaaggcaaaatacagttagtaataagataacaaggaatctgatcatggaaaaggggtccttgtaacttactgaggctgaatgttggtttaccatcttacattttctacgtccattaaatcagccttctgggaatccacagtcctggcaattctgaactgccccaggaggagggaagccatctctctagggtgagataggtgagccatcaggtctggtggtgggagtccacagtcctggcacttctgaactgccccagtaggagcgagcccatctctccagggtgagatatgtgagccgtcaggtctggttgtgggagtccacagtcctgacacttctgaactgccccagtaggaggaaagccat

SEQ ID NO: 188087 - DNA, 269 bp, Homo sapiens
ttctgggattacaggagtgagccactgtggcctgccattcccgtgagttttcacaaatgtatgtagtatgtcattgccaccacgatgaaggtcaagagcattccaacaccccataaaattgcctcaggcttctttgtagttaatccctcaccgtcaacttccagaatgtcatagagagaaaaaccacacaatatattgccttttgagtctggtgttcttcactcagcccagtggattctgagacttctgtctgttgtgtggatctgtga

SEQ ID NO: 188088 - DNA, 257 bp, Homo sapiens
tccttttaatttctaggataccatgggtccttttttctctttctatgcctcaagattgttcaagattcttcactttcctcctgcttttgacctacctcttggatattgtttctttgagattctgtcttgatcactttctcttcttgctcaatgagctctatctgggaaattgtcaacactctcaaggctttagtaaatatcatgttctctcaatgacttccaaatttctgtatgtagtgtggttctgccttcattga

SEQ ID NO: 188089 - DNA, 392 bp, Homo sapiens
tcctcttactctacctgccccctaaagatggtgttcctcagtctgacaaccttagttctcaaagctctctcttttactaacctgattttaaacacttcttaagtcactaaatataatcaaatcattctaacccacacctctcaactgaactccagatctattacccaaaagcttactggatatctggatgtctagtgattattatggtacttctgtgcacaatatctggcacaaagtaggacttaataaatatttgttgataaatatcccataggcacttcaaattcaatcgattcaaaactaaactaataacttgccctctcatgaatctgttgttttggtttgtcctactaccacccattcagtcttatggctcagtcagaaagttcatg

SEQ ID NO: 188090 - DNA, 515 bp, Homo sapiens
catctgtacatacaaatatgaaatcacagatcaaactgtagtctcctcctggaaaccactgccttcattgcagctaggtcccagtgatcacagctacgcttctcaggcaggaggaaaaagaggcctggtagcagaatacttgtttttaatgggaaggacagagaaaccacataaggtgttcagaaagtccaaatgaattagaacactggttcttcacttggtcttcaaactgttaatatttatcacctgaccacttctgtaactcccacatctgtgccaagcacaatccttattcattaagttatacaactggagacaggtcttggctcaaatgtccacccctcagagagtcctcattcactgcagagatgaggtggcttgttcaggaatctacttagagggtttatttttatttgagacagggtcttgctctgttgcccaggctgtatgtagtccaatagcacaatcaggtctcactgcagcctccaataaactcctgggctcaagtgatcctc

SEQ ID NO: 188091 - DNA, 253 bp, Homo sapiens
gataatacttagacacaggttagagggggaaccatgctgaaaataccatggcaactagagattcattcagtattttgtttatggattcagacatggatagtttaaactacacgaaaacaaaaatgattaccacaaaaaccagccaagtgatcacttctagggtagtgggagttgtgatcagggaacagcatgtaggtttccagctgcaaaccacacaatgcagctgcaaacacacaatgctgctgcaaacaca

SEQ ID NO: 188092 - DNA, 693 bp, Homo sapiens
atttgggaggctgaggcgaacggatcacctgaggtcagctgttcgagaccagcctggccaacatggtgaaaccccgtgtctaataaaaaacagaaaaattagctgggtgtggaggcgggtgcctgtaatcccaactactcgggaggctgaggcagaagaattgcttgaacccaggaggcggaggttgcagtgagccgagatggcgccattgcactccagtctgggcaacaagagggaaactctatctcaaaaaaacaaaaacaaaaacaaaaactgactgtagtgacggttgtacaactctgaatatatacaaaatcacttaactgtacatgtgaaatgggtgaattgcacagtatgtcaactacatttcaataaagttcttcccaagaaaatagggaactcggccgggcagagtggctcacagctgtaatcccagcactttgggaggccgaggtgggaggctgaggggggcagataacaaggtcaggagatctagactatcctagctaacacggtgaaaccctgtctctactaaaaatacaaaagcattaactgggcgttgtggcagaggcctgttgccccagctactctggaggctgaggcaggagaatggcgtgaacccaggaggcggcgcttgcagtgagccgagatcacgccactgcactccagcctgggcgacagagcgagactctg

SEQ ID NO: 188093 - DNA, 496 bp, Homo sapiens
ctgcaggtcttgaggcagatcctggaactgtcagtcaccaccaacacccctgtcccccaaatgcagctacacaccattttcacagaactgcacgtccaggtgtgcaacaaggccccggcccagcatcagtacagcagccagaatctgatggagatggtgcactgcttcgtagcccttgctcgctcctaccccaaggagctgatgaagttcttcttcagccagatggagacaaacaaggaggccgtccgcgtggggactctgaatctgattagggctatagtgagcgcagatgagcccaggatgagtatcagggccatctacctggctatccgggtagtcaagaacaccatctctgatacccggtccaaggtgaggatggctattctccacatcattgggcagttggctctctgtggctaccaggagagaatcaaaggctggggcctgaagtacctgtctgtgcagctgaccttatccacctacaaactggtgagtg

SEQ ID NO: 188094 - DNA, 440 bp, Homo sapiens
tcctgagagaaaattcaagactattttgcataaaatacatttatcacaaccaggcagaccaaaaatgacctttttgggtgggataaaggggatattttgcagacccaaagaaaataaattcttgagattttttcccagaaatccatgggaggaaggctgaagtatccttattcttatcagaaaacatatttgaattttattaccaatatctttaaccccattttgtagatgggaaatctttgaggctcaaagagcaaagaaggctaacatttgttgagcacttaataaatgaaactgtcaatattagtaattattatcgccatcatcattatctttatttaacctatagcacagccctgtgaggtgttatcactgccatttacagatatgtaaagcaagattcaggcagttcagataactagctaggattacacattgag

SEQ ID NO: 188095 - DNA, 320 bp, Homo sapiens
gaatgcacagtgcatgagtggcctgagggaggccccgattctgttgcctgcagctgcaatatcccttattcaaggctccaatctctcagcttacacagcaagctactgcacaaatatcactttccgtgttagcagagacatggaagaattggaaagcaacagctcacaactttggggctaccaaacgaaccaccacagtaggtgaattagaaaaaagtcttcttacatcttttttttttttttttttttttgggtttgtggacctttttcaacccccctcctggaaaaaccggtgtgggggtctcccgccccaaattcgg

SEQ ID NO: 188096 - DNA, 580 bp, Homo sapiens
acagagacagaagcaaggacaaagacagagacagaagcaaggacaaagacagagacagactgaatggggtggcccttgctctcctctatcttggaagacacacctcaggtcccaagagaccaccaggagccaagtatgccaagagtctgcctgcagcattggcaggaaggacgccagaggacaggggtcgcagagcatgagctttgggaggtgacggcatgatgaggcaacaaggagcctcctctggctgtggggctgcccagcctggcctgcctctgaaggccatgcccagcttgcccctacctccccatctcaccccttttagttttcagtttaggtctgcagaccgggttcaggccccagcatgccacctcttgtgccatcgctctccctgtggcctaagtccccagctctggaagtggatgatggtgagtacctcacctaccagggctgcattcacatgtcaggggtgggacataggcaaggctcctcccgcctatggacccccaatcttagctcttcccaacaccccaagaaacagtctgagcaaatcagctcttctcctccctcctccctttca

SEQ ID NO: 188097 - DNA, 397 bp, Homo sapiens
ctctgctctccatagcccaaatgacacttttgctggtgtagagtaactaagcttcactttctgttcccctaataagagactatgttagagaccaccagatccctccttgccacactgcagacccatatccctggaagcagctcagagttagaccgtctttggagcagccctacagtcttttcatcacttggaataggagaaagactgagaatctatagcaagtctatcaccttgaataaatgtattacaaaataggaataaactacacacacataatgcaggatttacacaacacctaacaggtacttttatgaattttggacagatgctgcctgagcaatgattcccaaacctattctggtgagctttaaaaaatatagatcctggctgggcgcag

SEQ ID NO: 188098 - DNA, 326 bp, Homo sapiens
gcctaaagctacaagatgtcaagttcatttggttaaggcaaggtcagtgctatggcttatcaaagtggcacaggttaactatgtcaaatgattagtgtggatcaccccagcacaagcctattttaattacaaactaggtaatgttgagagcagggtttgatgaaaggaggaggaaatataatcaaaatttgcaggcatgatgaaaccatgtttgccacactagccatgttacccaaagaatcaaggaacaactgacctgtaagaatgttttgaagttttaattgccacagagaagacaaatgtcacagtaagcataggccaactaa

SEQ ID NO: 188099 - DNA, 331 bp, Homo sapiens
taggccttacataccaaccctttctgtgaacgacttgctctttccattacatatcctgcaattttccacttcgacatctggaattttgtgcctcctcggtcacaaatttcacttacatgttttatgtcaaaatcagtcaccattcaagatatcttggtcacaatttatctccctccaatttatttcctagtctctcctgaaagaagttaactcctacagtaaaggccactggtgaaacaagtccctggaatcagatgaacatgggtttgaatccttcctttaaaatttctcgtgatatgaggctgggcaaaactctatctaaatcaaatgt

SEQ ID NO: 188100 - DNA, 382 bp, Homo sapiens
gaggagttctcatttgggagaaaggctcaccagtgaggcaggaagtgacctttggaaacatgcgagaaccaacgtgcatgggtcctcaccaacttactctcagcagcgaggcctgccaacaagaaggcataggctcaccagctgcacacggctaatgctcacccaagaacaacactgatataagacccagagactggaaatctgccactccacactccttccctcagagaaggtaagaaatgagaattttataccctctccagctctgaacatgcctcctagccatgcctcttcttcacaactgtgagatcaccgcaaacataattcagcacacagagcctgaatccttatttccagataacatgagcagaaacatgcagct

SEQ ID NO: 188101 - DNA, 304 bp, Homo sapiens
aaaattggaaaagggaatggagggttggagtgccaagtatgtgtgaggaagagtaagagagaaggacccaggccgggcatggtagctcacgcctgtaatcccagcactttggggggccaaggagggtggatcacctgaagtcaggatttcaagaccagcctggccaacatggcaaaatcccatctctactaaaaatacaaaaattagctgggcatggtggtgggcgcctgtagtcccagctacttgggaggctgaggcaggagaatgacttgaacccgggagacggaggttgcagtgagctgag

SEQ ID NO: 188102 - DNA, 512 bp, Homo sapiens
gagcagctactctaactgcatattcacaggccagtacccagaatccctctcttctcctctataatacaggaagaggacaataatatttgcaagttgtgccaagttaaatcaaaggacatcatcaacctgacaaactcctctataaacttccctggatccttcaaaaaccagccatatttctccttgaagaaagccaatttggacaaaggaaatggcacatatactctgattgttcccctatctctgccagctaactccagcaatggacacagattcaatttgaggggctgatagagagctccactcctggtggttctggttgggcttacttccttgggcagtggggatacaggctggagctagctaaataaaagggagggttttctgatgacattggggtgaaatcccacactggagaactggcaggacccctcgcagaactgggggactgagaagaccctggagagggcatgggccctccagggggtgccgccaggaagggagcatcgagg

SEQ ID NO: 188103 - DNA, 393 bp, Homo sapiens
ccaaaactatgtccactcaccaggaggaggagtgccctcccttcttttgcccctcttcactaggctattacatcctccccgagcccccatcacttccccactcaaaacattccagcaatctgcctggctgctttaagcactccagatcctgctgaggagcgcgattcaaacttcacacagttcagacagcacagaaaaccggtaaccgatcagaagctaaaaataatcagatagagtgtaaccagcactccctctttcctttccacagcagcaaccacaggatcctactagcacagatgcccggctggtctttcaaacagaatcctcaacgcccccctccaccaccaccaccacaagcctccaggggtcccagctacctgcattcctccgagg

SEQ ID NO: 188104 - DNA, 677 bp, Homo sapiens
atctccatcagtgacatttattttctgccccttaatgtttataaatggtaatatgttctttgtgctctgaattttttggtatgtataatgacattagtcttgcaacacaggtatttttctacttctcagtatattctatttgtttatatgatctcttattaattaggtacagctaagaaaagtgagcctataacaaacattactaagctgtgttttgttgtggttgagaaagaaatgagatgaataaaagggagaatatgaattgaagataagaaaaatatgaatatgcctgcatttaaaagccaggtggcctcacgttagtacaggcctggaagaaacaactggaatctacacatttcctttcacagatgaggagactgaggcttggaggggcttgtctattttctcagagagggcatatctggacccagaaccaacagaccagtgtcatttcatgtttctgaccctcagctcctggaccagaaggcagctacttttttaacagaagatttttttagtcctggctttgccactctgttttgcatttaaaatctaagttcatctcctaatttctcctcttttcacccctacaggacacctataagatctccaggactcggtcagcatttttcttttacattttcccccttgtattttcctgcttaaccacctgagga

SEQ ID NO: 188105 - DNA, 294 bp, Homo sapiens
gtacacatgagtgacagcctctatctagtgcctgagtatatgaacctttaatccatcaaggaacttctaacaccatcagaatatacacacccacgtgcatacaccttcctgcagccaccaggtttgaaaccagcagaatatatttttctaatctcacccagattttatggctataatgtggctactgacaagattctaaaattagcttttatttaaataaaccatgtaatttttttttagttttttttttttttttttttagtttttaaaactctctgccacggcaatctactg

SEQ ID NO: 188106 - DNA, 501 bp, Homo sapiens
taattccaacgagtttttaaaaaatgtttaaacactatggtgtatcaaaaagaaaaggaaaattgcaatagaaattactttgaaaataaataaagacactgcaaatgaaaaggtttgaaataaggtcaagtacacagaagaaaactcataaattacttatattatttttaaaaaaagaagaaacatgaagaaattaattaagttttcagcaaaagaaattagagtctgggcgtggtggctcacacctgtaatcccagaactttgggaggccaaggcgggcggatcacaaggtcaggagatcaagaccatcctagctaaaacagtgaaaccccatctctactaaaaatacaaaaaattagccaggcatggtggtgtgcgcctgtagtcccggctactcgggaggctgaggcaggggaattgcttgaacctgagaggcagaggttgcagtgagccaagatcgcaccactgcactccagcctggtgataaagtaagactgtctc

SEQ ID NO: 188107 - DNA, 435 bp, Homo sapiens
tttgaaaagatctacctgtttcttaggaaactgaatatacatataccctgtaaccaagctattacatttttaggtatttgcccaagagaaataaaaaaaatagtccacaaaaagacttgtacaaaaatgtctgtagaagctctatttataatagccctgaactgaaaacaatccaggtgtacatcggtaggaaaaactgtggcaaatttataaagtagtacaaactaatgttagataaaatagcatgaataaatcttgaaaatgctattttggtgaaagaagtataacacaaaagagacatactttatgattccaatttatgaagttagatccttgtaaaacaggcagaactaatctatgatcttgtattagtcagggttttccagagggacagaactaatagggggtgtgtgtgtgtgtgtgtgtgtgtgtgtg

SEQ ID NO: 188108 - DNA, 124 bp, Homo sapiens
gcccgtcctcaccctggggtctttttgcagtctcctagccccttctacatgctcctgtgatggcacttcttctctgtgtgctagttatttacctacctgtttgttgatgccagattgacctcct

SEQ ID NO: 188109 - DNA, 435 bp, Homo sapiens
aaagggattgcagaggacttgacagagtgtcccacttggaggttaggcgggcaggagacacagtttccagaattgcttcataatatcttcctgatcttcatggtcctgttgggcagaatgatgttcagtcttttcttcctgaatgccttgttctgagggtatgagggctttgaatgtagatgggacagtctcaccctcctacgggaggaaaagggctcttcccttatcacacagtatttatcaacttgattaaaagctatgatagcagtgcctgaagatgggacttgtttctgacttaatttaccctcctctctcccagttccactctttacctcagtatagaggactctgagatagccctgttttgagctgatctttttcttggaattcattttcaggttcctggaagatattttcacaaagaatcccccctga

SEQ ID NO: 188110 - DNA, 589 bp, Homo sapiens
tgctctttagccataaattattcttggatccaaacttaaattcatactttatttctaagttattgggtgactgtagcttttatcagacttttcctttgagcactcactgttaagtcccaaagctcccgtgtagtttctgtcattattcccttacaaagttatatctttacatgtgtgctctacagtttcatttgttcccctgcttttctccctgtacaacacatgtatacaggcataccttggagatgttccaggtttggttccagatcatgacaataaagcaagtcacacacattttttggtttttcagtgtatataagccaacaattttctgaaccttcagtgagtcgtaatcttttttttttctttttttttttggggacagagtctcgcactgttgcccaggctggagtgcagtggggcgatctcggctcactgcaagctccacctcccaggttcttgccattctcctgcctcagccatctctactaaaaatacaaaaattagccgggcatggtgttgatttccgggctccagcctcaggagagttatgggatcgacttcgcctgaccggttcccgacccttcac

SEQ ID NO: 188111 - DNA, 561 bp, Homo sapiens
gttttattccccagtgcaggatacagtccaggatccttcatgcatttgtagtaaataaaatacagttcatcttttttttttaacttttttttttttttaggtttgggggtacatgtgaaggtttgttacataggtaaacaacatgtcatgggggtttgttgcacatattatttcatcacccaggtattaagcccaatagccaatagttatcttttctgctcctctccctcctcccaccctcctgcgtcaggtagaccccagtgtctcttgtttccttctttgtgttcatgagttcttatcatttagctcccacttacaagtgagaacatgcggtatttggttttttgttcctgtattactgtgctaaggataatagcctccggctccatccatgttcctgcaaaagacatgatcttactcttttttatggctgcacaatattttatcgtgtatttgtaccctattttctttatccagtctgtcactgatgggcatttaggctgattccacgtctttgctattgtgaatagtgctgcagtgaacatttgtgtgcatgtgtct

SEQ ID NO: 188112 - DNA, 269 bp, Homo sapiens
tataaccaagttctgttctgttaaaaaaatcagcagccaaggcttccatgttactttcttcttgtacatcaacacaggccctttttgcagggaattctggtcttaaatatgctctccctccagttttttccatgtctttgaggaactccagtgcagcagaagcattcatgacttttgcagacgttacatctctcttgtacaaactggagctcaacgtgacttgccatgagaccaagtttgccaagcattgggtgaagtgcaggaaacaa

SEQ ID NO: 188113 - DNA, 678 bp, Homo sapiens
aacctcccataccattgatgctgtctagacccataccaccactttcctcccttgctcactccagtctagccaccataccctcctttgttgttcctctatcatgcatgacaaacttctgtctatgagtctttgcatttgtttttccttccttctgaaatgttcttaccccagattgttccaggtttgtttttttcttgacaggatcttgctctgtcacccaagctggagtacagtggtgtgatcacagctcactgcaacctcaaactcctgggctcaagtgatcctcccatctcagcctcccaaccagctgggattagaggtatgcaccacgcctggctaatttttttatatttttagtagagaagagacaaggtcatgctatgttgcccaggctggtctggaactcctggcctcaatgtgatcctctagcttccgcctcccaaaatgtttggatttcaggtgtaagccccatgtcaagcacacagtttctttacctctctcaggtgagctcaagtagattttttcagaaagacctctctttactatcagatataaaacggtgactcatcccatttccacaccctagcattccccatttcttccctgctttattttctctaaagcacttatcactttccaacgtacttcttgatgtatttattgagttgtttattgcct

SEQ ID NO: 188114 - DNA, 363 bp, Homo sapiens
taatggttctcaatgatcatgacagatgtggcaaaaagaatgagtagaatggatataaggaacaaagaagctccatttaccctgtaaaaggatgggtccctgggggctgaggttgtaattcttgtgtgggcaggattcttaatacaccaaagtaaagtaatttttaatgtctctatgaaaaaaaaagggaaggaaacatatgcatcttcacatagactgtgagccaaactgttatagtttcccaggaggcagggagcactgtcacatagcataggagaaaggcattgaaaacttcaataattccatttcttcagaaagacagcttaatttcccacatgagccattcctgaggtctttcttcca

SEQ ID NO: 188115 - DNA, 660 bp, Homo sapiens
ggggtttcgccatgttggtcaggctggtctcaaactcctgacctcaagtgatccgcccacctctgcctcccaaagtgctgggattacaggtgtgagccactgcacctggtctatttatttactttttgagacagagtctcattctgttgcccaggctggagtgcagtggcacaatctcggctcactgcaacctccgcctcccaggttcaagcagttctcctgcctcagcctcccgagtagctgagattacaggcatgcaccaccacacccagctaattgttgtatatgtagtagagacagggtttcaccatgttggccaggctgctctcgaactcctgacctcaagtggtccgcccacctcagcctcccaaagtgctgaaattatgggtgtgagccaccatggctggccaatactgtcaatttatataagtgacttgagcattcacagattttggtatttgcggggccctggacccagtcccccaaggatagtgaggcatggccgtaatcttttacctagtgtcctggttagcattttcaacttttaccttagtagttattgaaataaacagtatttcttcaaaattatgagagaattaatagcttaatagtagaataaattgtacttcatgacacatttcaatttgagaagtgttcaag

SEQ ID NO: 188116 - DNA, 529 bp, Homo sapiens
catagctgtgtatacagagatacttaatgcatgtgtagtagacatgtatcttatatgcatatctgaatgctttctgtggatgtaataatacttttgtatctaagcatcatatggttatttctcactacatacatagaatcacagagtttgaagagaacttaagtcatctagactatactctttttgttgttttttttctgtttttctggggagactgagtctgcactccagcctgggcaagagagcgagactccctcgaaaaaaaaaaaaaaacttgcttacttgtgtgacatattcaatctgtcacctcaggggagaacaaaactgtgttcaagttggcagatagagtggctgcattcaaagccagactagtattatgggggccacaagtgaacattgggattttttgacatgtttcaaacattagcagagattttaaaagagactgagccaggaccttttttctcccagctggcacatgatcacctatctcagccttcaaagagtttgagtattattttccagccac

SEQ ID NO: 188117 - DNA, 490 bp, Homo sapiens
agtagggcacaatcagcagatacttactgaatttttctataaaaggacaaccgaagtagttcccatttccatggggaatcatggagtggttctgccacattgctgagtggtcagcaataggccaagctccacactgcaatgctgtacattcattattgatgtgtgatgggctcatgagaatttattatataattctttcaattttgagtatatttgaaatcttccatgaaaaaatattaaagaaaacctaacttttggtgactgggattccccaaagagatccccatatggataactgcttcaagtttttattatcatcagacaactggagagggtaaaattatagttaagtgctgaagtcataaattcaacatggatcacttaagtctatgtatcagttcccatatactaacttcatcagacaactggagaggttaagattatagttaagtgcttaagtcataaattcaacatggatcacttaagtcta

SEQ ID NO: 188118 - DNA, 675 bp, Homo sapiens
ctacctcctaccagtgttgacagttttgcaaacaggagcctgctacaagtcattaccaagtagaaatggacctctcgcagtcatcgtgtgccctgggtggaagaaggcccaatttatttttgaattattgggagaatatagcatgtcctccaggcctcttcatcctgtgctattaacaattgggctccataaagaggaagccaaaaatacaaagcttccaaggggctgtgatgtgattgttacgaccccatacagcctgctgaggcttctcgcctgtcagagcctgctgttcctcaggctctgccacctgatcctggatgaggtagaggtgctattcttggaagccaatgaacagatgtttgctatattagataactttaaaaaaaatattgaagttgaagaaagggaatctgcaccacatcagattgttgcagttggagttcattggaacaaacatatagaacatctcatcaaagagttcatgaatgatccctacattgtgatcacagccatggaagaggctgctctctatggcaatgtccaacaggtagtacatctttgcctagaatgtgaaaaaacttcttctttactccaagctcttgattttattccaagtcaggcacaaaagaccttgatcttcacctgctctgtagctgaaacagaaatagtgtgtaa

SEQ ID NO: 188119 - DNA, 312 bp, Homo sapiens
ctctctctctgtgtaaaaggctcctcaaacacacactaagctactcattccagaatcatcacaatcttttcaatcaaaaagtgaacagctttgacattttaaaataagagactgttgctttcagaatttgattagactattctaatagcaggctagagtcattaaaattggcttttagagagacacttcacgtgcttagtaattggcacatcggagtgatgacagcctccaaatcaggcttccgagtaagtcagtctttatctagttgtctttaaaactggataaaggcatgtctacacaaaagccacctac

SEQ ID NO: 188120 - DNA, 462 bp, Homo sapiens
aatgactttccatccaattagaagcaattctatgttacatccttagctgtatcaccctttatcatctggcccttgttctctgtgtgacttcctttcttctttctcctccccatcacccactgtgctctggccacaacatcagctcttgggtcactgaaacacacaaagctccttcctcccttagaggctttgtgattcagctccttttgctgtttgcaaggccggctgcttcctgcaattcacatctcaacttagacgccacttcttctgaaaaatcttccccaactacccactgaaaagttgccgctcattcactgtccattatgtttaactctctcatggcacccatcactgagcaatgcttttcttgtgtccttgttgattttttctctcttccctttctaaggtctaagctccacaagagtagggatcttctccgtcgtggtcgccactgtgatttca

SEQ ID NO: 188121 - DNA, 379 bp, Homo sapiens
ctctttgctgagagctgttctgtcgctcaaaaaaattctcctcccatcttcacccttcaattgtcagcatttcctcattcttcttggatgcaggacaagagcttgagaactgccgaatgcagatacaagctataacacaggtgggctgagtgggcagggtgcctccagtgtcatgcccttgcgggtggtagggggcactgccggccatagatgtccccggctggcaaagtggctaagaaaaatcctgagtcaatatggtgaaggaatctacaacctggaattctggtttttttttttgagacagggtctctctctgttgcacaggttggagtgcagtagtgcaatcatggctcactgcagcctcaacctcctgggctca

SEQ ID NO: 188122 - DNA, 656 bp, Homo sapiens
ctaagatcaataccatctttctggtgaactttgtctccaagcactgcaaagcactgcatctaattcaaagattctatgtctttggtgaagaaggccagcattgttgacctaagtctgtagtatctgagttaggaacaagacctagtttcctcacgcctggatgtgaggtttatctttacatgagagcaagggacgtttatgtaatcctcattagtgcggatggctgttctgactccaacagccagtgcatcattgcaagaacagttgctttaatctctaaagaaaacaccaaataaaatgcatttttttaaatcaaggaaataaggttccgtcaatgcatattgtccaagtgacaaaggatttcagacagctacgtaattagcctctaatagcaatatacatgagaatgcaatttacttttcatcattcttgttcgggtcatgaattgaaatcacagtaggagcacaaggctgtcagggataaagcaaaggaagaaaacaggacttggctgctgggaatattcacacccagccaagaaaacatgccaaatgaggcttaaaatgaacttttcctgtgtgcatttcacaagttcagaccaagaggaaaaacaattcttcccctcccctacccccactttaatactttaaccattgggt

SEQ ID NO: 188123 - DNA, 663 bp, Homo sapiens
cgagctcttacccgtcctacatagcgttacttagaggagacagacaaactttggaagccatgtattgactattaaggaacttgtctttctcttagagatggtaccaattactggtagtgatatagggaggataagacctgtctctaggattgctgtgattattgtctacgtagaatggccttcacttcagaatcagttgtgaatgaaaagtacatttgtgtgctagaaataggaaaaaaccttgtcttttatagaaaacttttaaaatgcagttatgttatcaggtagattcaaacgtataatatacaagaaaataaaacaaatgaataagtgttgtttgccagagaagaagcagttctgatcaataatatgtagagtaatttgtaagagtttgaaggcttgcgaagcgcttttaagcttgagagtaatgtcaactcatttttaaatctaatcgcattttattttcttgattgtaggtatcaagagcactcctcgcattgaaaagggctggttactggatgttcttatgagtaggagaatctagaagtgtcagcatgggtgtttaacctatttgggcagtgtttttccttttccttgttctgactaaagcatttatctctgaggtggggaaatggcattttctgttgaacacaggtggccttt

SEQ ID NO: 188124 - DNA, 289 bp, Homo sapiens
aattgattatatcaaaggaaaaacaaacagtaagattttaaaacttaaagctttcaatagtatattttctgaattttcaagcgactaaattcatcccatttgacttggtggatactaggtgtctcatgaagacttttatcttaattccactctagctcatagatagactgctttcttctgtcaactttttccaggtgttgagcccaaaggatcagaaaaaagtggattaacatacttccctgtaccttttgcaaattacatgcaaagctcatattcaaatgattgttgg

SEQ ID NO: 188125 - DNA, 470 bp, Homo sapiens
atgcaactattgttactatacctgagtgtttgtgcttgcaaaaatgtgtatattattaatattattattgcctattttgtagtattaatataaggtggcctatcacgtgttctgccatgtttttatgtttcccaaataaatcccccttaaaaatgtaaataaatgtctttaaaatattttttaattattttgttccccagaattatatttttgagattttgatcttttaggattatgattttagggattttagactttagggattttgatgtttcagagtttcagcattcaggatttggtcttttaggattgtgtgtctcaggattatggcccgcacccctaacaaagaggggaaacctgagatgtttttccttgggactgataagagataagccttgattgatattgaacatatgtagggattgaatggtgcttttcattaaatcgctgccatttttcagtgggaaagt

SEQ ID NO: 188126 - DNA, 676 bp, Homo sapiens
tacttggaatagtgcttggacctatggtagtttcccagtaaaaatttgttgaataagtgaatgaactaatgaatgaatgaatgaatatactacttatggatcccagattaagaattctttcctattcagttatgtcctccttttaaaagaattttgatggtgtcagagggaggggctgtttcaaactcatctttttggtttgaatgcaataatgtctgtagcacatagtagatagtaaatattaatttcattccttttcactcagaaagaagtcaaaaacttagtagaaggtagtttttatgatgacagatctcttgagactcttctaagtaatgttttcacacataaggcatagacgtgaaaaatgataaatggatgtttttgcaatattggtatttagggcactttatacctggataaaatagtcatatttgttaaataaatttttttttctccttcctgtaacaaaggatacttcattaataatataggggatgttagtgggaaaataggtatgtaagttttatattttagatactttttcagaagctcatttcctgtattggagataaatctgaagattttattaggggtctttcctagcatacactgcagctatatttatcccactttgcttaatgatttttcttcctctaacaaagttatatatactctt

SEQ ID NO: 188127 - DNA, 766 bp, Homo sapiens
tgaaagagtgagacacatgaaaagagaattccagtcagagtaacagtatgtatgtaaaggcccaggggtatcaagacgtcgagcatgtttaaataaaacagtgaccactgcagtcaagcaatctgggcacaagagtaccagtttaagaggagactacagatgtaggtagggctgctgatcacagggcctttggaaggagtttggacataaatatatatacacatatgtatttatttaaagtcactgttggctaacacctgtttttttctggcttaataaatgtgttcctggcttatctgaagagaatgggcatgaaacttgtccagggcaatagtacataacatccaaagtaatcactagcagcaaggtcacaataatatgacctaggaaggtcagaatctgtcccagtgggacactacccatagggaagacaactttcacaccactcaggtggctttttcctccatctgtaattgcttctctcccacctacagtggaaactcacctcagttatcactaacaagccctatctttcccaatcagagaataattaggctgattaacaactgcttcctgtatcttaatttcctataagtgaaaatgagtgtgacctaacaaagtcagactctgcttacgcctgggtgtcttggctaaaatacaagtaaacacttctcaaagtgtaatcactttcccctgtcctctaaacatgtaagcttcattttgccaaagataactcaatgtatcacatttatagacaaaggaagta

SEQ ID NO: 188128 - DNA, 456 bp, Homo sapiens
aagcttgattgcctgccacaggtttggtctcactgaagtctctaagaactcagcactgaacacaaataattttcaggtaacatagagtgttgttcttggtgactaaaattgccatcctcccttttttctcctctctgtaagatacaattgagagagccctgaaatagaagccagaaaactgaagctctatacttctgtccaacatcctctgcatcattcattccttgtagattcagtgtcctcatctttaatctgaggttctgagaatgtatgcataaaagaagtgggaatgcttcatgaattgtataatactacttatatgtagtgtgatattattatttgtagaggcagaagacaccaaaaataaatgtcaacagagtatagaccactagccaactcagaaaaccctgactttgtctctaagaaagcctttctatatcttgggcaatcaagctt

SEQ ID NO: 188129 - DNA, 356 bp, Homo sapiens
ctgtaagggaacaaaagggatggggaaatatcaactctgactcaagccatgcagagccagaaataggcaaaagaagagagggtgcacactgccgtgtacctgtgtcctcttcctgggggctggtcactccccactgtacccactcttctagaaagaagtcaagggcagtaatgagaaatgacagcaggaggagaaagtgccaaagtccaatgaacaacaggtggtaatactgtcagttcaaatcaccatcccggaagctgagtggcgatggagctgaacctagatcagtactcaaactctattaaacctacagcactaattgctcggtgaagcccatgtgttccttctcacccact

SEQ ID NO: 188130 - DNA, 526 bp, Homo sapiens
gggtggggatcaaggatgatgagaaatttaatattggcatatagatgtgaagatacttaagtgcctcagcaataaaatcatttctgtagcttgccttgaatgactggactcctacagttcaacagatactcagtaaatatagcacaattactccaaaagtcatctatttcaacacaggattgaactacctctctaagcaacttggattgactcctatttggctattacagaagactttctaagagaaatgggatacttccccacccatcacaaaaaaagaattgtaactgcagggtaaatgattatgtaatggtttaaaataggaaatatttttaaagtttctaaggattgctttttaaatttggttaaatgtcttaaatgggaaatcgagtaaatatataaagagacaccataaagacattatctcaaattaacgctatgatatggtatgagagtgagtaaatgcatttgactattgttggactgctgtgcttttgattttaatttcccaggtacttatatttgc

SEQ ID NO: 188131 - DNA, 186 bp, Homo sapiens
cctggtggggatcgcccttccccagcaacacgagagactcagggaacactcgctcagcaacgccgtttgccaaaggctgcaaaagcgacgtcagcgaggctggcagagctgcggaaagagagagctggggccgggtggggtcagtccactttgctggctctgccggaggacaggagcctgccattg

SEQ ID NO: 188132 - DNA, 785 bp, Homo sapiens
tcttccactaatcaagcctactgcatggtatgactccacatttgcagacgtgatcagagtgttcctcatgccccctcctctgcctgtttcctctgtctatgatggaacagccttacttctcccttcatgtgcccaactctcttaccctcctaacctcaggctacctgtttttttggcatacagtggcatccctggcacctagcacctctggtacagctcaggtgctccataaatatttgatgacagagtaaatggactgtgttgtattattgtccaccctggtggttctccacactgactaaacatcagaaacagagatctccaggtcctactcccctgcctttggcatttgagtttgtaggaacaggcctatacattcctactgtaaaattccgccacaggtcatgctcatgtgagaaacacaagtctctcctccgtgagttccttgaggaggcagactatggtttctgccatttcattcccattctgattctggcagaaattagatatacaagaaatatttgtgaataagagaatttaactctagagaaaagtaataaataataaatgagaggaaaatgccctttcttctgtttgcagatctaaaaccttggacctttaaagactaattcacattacccataccagtttgttacataagtgaattgtagtgccaacaccgattgttaattcgagtctggtctatcatgggggcaaccgcttatgccgattacaatcggaaattggtcttagctcccaaggtttaagggtttaatggacaccct

SEQ ID NO: 188133 - DNA, 783 bp, Homo sapiens
caaagtgggaggcatcatactacctcacttcaaaatataatacaaagctagtgtcatcaaagcagcatggtattggtctaaaaatagacactggccaggcacagtggctcacacctgtaatcccagtgctctgagagactgtggcaggcggattgcttgaggctaggagttcgagtccagcctgggcaacacgatgagaccccatcattacaaaaggttaaaaaaaaaattagctgggcatggtggcacatgcctatagtcctagctacttgagacacgaggatcacttaagcccaggagttagaggctgcagtgagctgtgatggcaccactgcactcctgcctgggtggacagagcaagaccctgtccatagaaacaaaaacaaaaatgaaatacacatagaccaataaaagagaatagataatctacaaataaatccatatatttatagccaactgatttttgacaaaggcactaaaaacataccttagggtaaggacagaatcttcaataaatggtattagaaaaagtgaattccaaaatgagtaagaatgaagttagatgtttgtttctcatactatacaaaaataaactcaaaatagattaaagacttaaacatgagttccacaattataaaacaacttgaagaaacacaggagaaatgctttaggacactggcctaaactagccatattttatggctaagacttcaaaatcacaagcaacaaaagcaaaaatacacacatgagactacattaaactaaaaactaaaaagcttctgt

SEQ ID NO: 188134 - DNA, 146 bp, Homo sapiens
atgccaaatgatgaaaagaaatgtgatctaaaatcagaggagcaactcatacacccaggaatcaatgtcaaagaaggtagtaaatgctactgcatgtttttcatgcaagacatcagaaggatttataccattatactgcaagtatt

SEQ ID NO: 188135 - DNA, 473 bp, Homo sapiens
gtgaaatcttgcctttaataaggccatactaagttttctacaaatacctgttgaatggcagtctcctacatttctatgtgctaaagtagaactaccattacctttagttagaaggaaataagcatttggaattctctaggacattaggaaatacgattaaattaggaggtatcagaacagattcaataattcaaattttaagaaatctacttgaaagcccaatatatcactttgtcatttatcacttctcaaagagcctttcaatagcattagttaagtgttacatggaaaaataagttttttttttgtggcaatacatttgaaaaatgctgttacttaaagttaaggaggtttctttatttctggactttaatatgcactgttaatctttgggtagcagcagcagatgcaatatttctcaaatttagttgggcatgatcctatttatccataagcatcttgaggtaggaagc

SEQ ID NO: 188136 - DNA, 331 bp, Homo sapiens
aaggactaccatcccctgtaacttgcaagtgttttgtcacggcagtgaccagttccattccttagggaatgcggttattatattttatacattgggttgccagcagtggagaatttcagaggcttcaacttggtcctgctataataatgtcccttactctacagttcacgaagaatgtgaaagtcctgccagctgccatacgtatccagttcaattacacgttcaggaagaggtagtaactacaaactgattagatccaccttgggatggacatgagacaaaactctaggtagcatctgaccttcaaaacctccccctgcaggctggatgt

SEQ ID NO: 188137 - DNA, 499 bp, Homo sapiens
ggtgatttataaatgtttgttatattacttgtaacttgaccattgtcttcctggctcatagggtgtgcggaggaattaaaacatagaggctgtcagaaacctcctttcctcaacataaagtcattgcaaggttattgagacaccccaacaaatagaggggcttctcaaggctaagttcacatccttctgttcatgaacgtctcagtgaaaagtaattttctttgttacttcctgtgcaatttatttttagtgctttgttcagagaagatgaagtgtctcaagtcacttcagtattccagcaaaattaatggattttaaattgtactttatgttttttgtattcatagatatatttttattcttttgaaacctgtacaatcttgcatctcttgcagttattaatggaaattccatctctcctaatgtttattcatcatgttccctcaatccaaagttcctcttcagttatggattaactcctcatacagaaatattttta

SEQ ID NO: 188138 - DNA, 544 bp, Homo sapiens
acacggacttgtgtcctgcacttctcctatttatgggggtttagtattgattgatagcggtgtggtcgggtgtgttattattctgaagtttgggggaggttatatgggtttaatagtttttttaatcaagtctcactctgtcacccaggttggggtgcggtggtgaaatctcggctcactgcaaccttcacctcccagattcaagtggatcctttcacctcaggttcccaacgtgctgagattacaggtgtgagccacttggtctgacctcttttattttacatgatagtcaatcctaatgggtgcgaagtcgtatctcattgtggttttcatttggatttccctaattagtggtgtttcatatcttttcatgtgcttattggccatttgtatgtcttccttggagaaatgtcttttcaagtcttctgcccaatttttaattggcttgtttgttttgtgttgttgagttttaggaggtctttatgtgtttagatattaatccatcaacagatataagatttgctgtattttctcccattttatg

SEQ ID NO: 188139 - DNA, 455 bp, Homo sapiens
tatttgttaagctattcagatgaactctgatctcaagaaatgatccaggatgaaacaatatttcagaaaggaatgagcttagaatcagagaaaatggaggcttcagatatagatttttaagatcagttgatctctgaattgaataattttaaaaagagaagcatcttgggtatataaaaaatgggttgacaactcaaaatacttcagcaatcaataggaaaagattatttagcaatgaagtgaaggctgtcaggtgactgccacctctgtccttccagctctcaagattacatgcacagtttcaacaagtgactgaaccctccgatcctcactgcaggggctgctgggtgcctctcaggcatccattcacctccatccattgtggcatccagcctctaagacagtgcccaacaactcctgccatctggcactcatccctggcctttcgtcccccg

SEQ ID NO: 188140 - DNA, 606 bp, Homo sapiens
agacttttcaccaattgatgccactatcaatacaatagaagaggattaaaaaccacagtaaagcctttctaattttagtttctctgtgacgtgattgagatttttaagatatttatccttcttaaggatgcatatgtgaagatttaggagcatataataagctaagcagttgttaattcctaggtgacctcaaacataggctttatattattccaggtgcttcatgtaccaccattatttttcttctgtaattataccttcctctttggatagccactctgttcccctgctttatttttagatctctgtggatgccatataagttgctttccgtcattggtttcaagatcagcattaattataggatccattgccttggcaatgacagtgtcaagacaaaaaggtaattgtggttttcgcagtgaggtgatagtcaaaccgtgaatcaggagaacttttgaaagtcttagtcttagaacttttgaaggtcttagtacagtattctcttttagcaccaaatctggagcaactctactctttgcttggagatattgctattttccttgatttgtacttttgtttctttctttcttttttttttttttt

SEQ ID NO: 188141 - DNA, 218 bp, Homo sapiens
tgaagttttttgcacctaccaccagtggggaaagtggcagctcacagcaagtctttggggtcctagttgttcccttctcctccctcccctgccgtggccaccatgtgcctgtgtagcaggaagctgtgggatctgcagactcagctctatcaggcttcccagaattgaggggcatggggtgttctaggggacatttcctggtcacatggcctagcaga

SEQ ID NO: 188142 - DNA, 271 bp, Homo sapiens
ctgccatcaccaaagtgaattttccactctcctttcatactttaagcattgcacactccagagttattgcacctggctggccacgctctagctggtaggaaggctgaggaatgccagtatctggcccatgtggccctgcctcttgccaagacccgtatggtgaagcgttcctcaaatgtaagaaatgggttcagctggaaagcaaacacatgttcactgcaaacttccagtctactgggaagtatttgccaaagatggaaaccttccttag

SEQ ID NO: 188143 - DNA, 125 bp, Homo sapiens
ctaccctaccttcactagacagagcagggcgagagttccatggtccccaataggtagggactaggcctcaaggcagcatgaagtagttacagaaaaagaacattggtccctctgcctcccataaa

SEQ ID NO: 188144 - DNA, 288 bp, Homo sapiens
ctcatagcactgaaaacatacacagtgcttaggtgtaaatatttgtaaagttaaagtggattccagccacactagaatccaagttgaattcaaatttactcctatgctgggggctgtggctcatgattgtaatcccagcatttcgggaggtccaggcaggaggattacttgagatcaggagatagaaaccagtctgggcaacataacgagacccatctctacacacacacacacacataaaattagccacgtgcgttagcgtgcacctataatcctagctactcagga

SEQ ID NO: 188145 - DNA, 370 bp, Homo sapiens
cagaatcaaatatcagtttctttactgattggctatttcttccctgcttgaatgcagttaagctcttttggcccctaagatgcacaatttcattttccaatccatttaataatgattgtattattttcagcaaagggaagaagagaactaaccttgtgctatcatgaacatgacagacactgtgaagatagattctcttaaatccgagggaaccagcttcatttaacagatgaagacattgaggcttgggagattaagccaccttgcccaaggctaaacaattagtaaatcatggagttgggattcagactgatctttctgacccaaaacaccatgtcctttgtaccttccttaaaatgtcacattctac

SEQ ID NO: 188146 - DNA, 425 bp, Homo sapiens
taactggaactagaggcatgcaccaccacacctggcttagattttatttttaaagcaattttaggttcatagagttcgcatatcctccttctcccttatagctagtttctcttatcagtaatacttttaattagtacggtggatttattattgatgaaccagtattgatatattattattaactgaagtccatagtttacattggggtttcatttttgtgttgtacaggtctatgggttttgacaaatgtatagtgtcatgtgtccatgattaccatattgtacaaaatagtttcactatcctaaaaatcccctttgcctattcattccttatcccatccctcgacccctggtaacaccactgatctccactgtctctctagttttaccttttctagaatgtcatgtagttggaatcatacaata

SEQ ID NO: 188147 - DNA, 452 bp, Homo sapiens
aagggctgagggagagtacccaaggaaggacaaacttggaaggggatcccctcccaatgactggagtttggacttcagtggagaaggtttagctcagcccaccagatagcagagaagtttgctagtttgcaggtgctgagcaagccagaagcaactctccagagtgcaggtggggtgtacattcaagccacagctggtgtcatgacatgcagaaggagagagagaatccagtagaaaccttctgtgctgcaagtgaggcacacacgtgggccttcagagggaattggggccagggtgagcagatggccttcaaagctctggtttccatgttgagagggcctcgggagagttatccccaggccaggctaaggcttcaggtcaccaaggacccacaccttctgggagtgtggctagacaggtcttcagtggatgacctctctgcctccccaaca

SEQ ID NO: 188148 - DNA, 306 bp, Homo sapiens
ttggatcaccaaaaaacagcgcatgcttttgagttgttttattctaagaaaatactctactttcatttagctgcttttgtaaaacttcattagagataaagaacacaggctctgtaatgaaaagacccaaattcaggtcctgtttcactactttttaaaaagctatattgcacagaaatcattatggagtgtagtgggtagacaaaaacagattagcagatagataaacatataaaactgcattttgtatttatcttacccaaacttgttttctgtagtactccccatgttggtatataggcaact

SEQ ID NO: 188149 - DNA, 406 bp, Homo sapiens
cttaaaacaacatacatttgttctcttagagttctggaggtcagaactccaaaaccaatttcactgggctgaaaccagtgagtcagcagggctgcttctgctccggaggctctcaggaagaatccgtttccttgccttttccagcatctagagctgtattcactggctcatggccacttcctccatattcaaagccagtggcatagcatcctctctctatgactctgtttccctctgcttctatcacatgaccttcctctcttttatctgtaatctccttcttatgaggacacttgtgattgcatttacagcccacccagctaattaagcataatatccccatcacaagatccttaaattagtcatatctgcaaagtattacatgcataaggtaacattcacaggt

SEQ ID NO: 188150 - DNA, 227 bp, Homo sapiens
atatattcttccatcacctcaaaacaatatcaactcattcacaaactcatttgatggtgaaatattttcacatcagtgaattactcgatgtctatgccctatacagttacagagaactggccctccttaaaatgttccaaatcttgagaaaattcttctctctcccttcccacaaatctcattaaataaaatagcgatattttcaggttgccagcacacatatctct

SEQ ID NO: 188151 - DNA, 480 bp, Homo sapiens
ctattcagctatcttggaacaataaaaacacaaaggtttacttttgagcactcattttaatcttgttttcactatgggaggaaagggtctaggagcaaatgtaaactccaagttttgctaataattgataaggccgtaagttctgtttacaagggccaaccaagagggccacagtgtccctgaaaaaatggaaacattccaaagctggtttcctgagagattcatcttaaagtacataggactggctacttctcaagatagagcattcagacttttctgttgaccgaattgttgtttaactaggaccaattaattttgcagttttactcgtgccagcttttactttgcttgccaataactaattgcattgttttcttatttttgtttttaacaccaacagtcagttttttgtatttaaaaaagccactttgggatactgaagttttaagccaagactatttagttgattggctcggtaag

SEQ ID NO: 188152 - DNA, 407 bp, Homo sapiens
gggcgacctcttaaccacctcctgccgtgagcctcattccttccctccctttgtaactgggttcccgctatttgtcacgtcctcctgtaaccgcacatactggcgaaagcactgcccgggttatcagggtgccccagattgcagactgagatgctggcctgagattgtaatccaaccttgcattgtaaaacgggcagagaccagagccctgctttgagatcattcggtggagacttcctttgaggaagaaaatgtgtgtgtgtgtgtgtatgtgtgtgtgtgtacatgactgcacatgtcgcactggagccctcagcacctgctgcaaagacacctgatgagcgcccaggctccacggactcctcgcgactgataggcacgttcaagaccaggctgacccaacaggc

SEQ ID NO: 188153 - DNA, 467 bp, Homo sapiens
agggcctctttttagaacattccattttcccattagcgcaagcctctgaggcacctttgtgctactctctttagaaaagagaatattacaaaaacacgttctaattattgttggcctttcattactttagagcttctgcacagcctagaaatgaacatccttgcctcagaattttgtccttattttttttttcttttgggagatgtgtcatccctacagggctatttatgaagcccaagctggcagaatttgtctaatgtgcgtaatgtagaagaggccaacaccataatgaaaggagcacctctgagctcatttgcattcccccagctggttgggaaacaaaagcccactccgtgctacacttcatggttcacttattgtggttcatttcctccaaatcgagtggtaggttaaaaagaaaagaaagtcaagtcttttctgcagtgtcctctgcccggcattcacag

SEQ ID NO: 188154 - DNA, 370 bp, Homo sapiens
tccagaggattccgcgtaatccgtaccacatacaaaagatgaaatatctctatagggagtagctggacacaaagcaattgattagtgagcttttcactttaaccttcactaaaatcaaaaacctcacaaaaaaacatcccagagctgcctctcaatcctgccaattctctccaggtttgaggtacaaaggtatgtggaacaggactttctgaacagacgggagttaggtagcgtggcgcatgctaggaaaacaatacgtacgtagtaaaggtcacatgtgccttccgataaaagatttttgttttgacaactgggtttttgaaagtggcttaagccagcctgggcaacatggcaaaaccctgtctctaca

SEQ ID NO: 188155 - DNA, 284 bp, Homo sapiens
ggattaggacagaaatcacatctaggacatctcaggccctttccacctgggacctgagacctcaaatctcttggcaggagatgagtgggtctacacagcccgattttgaggtaggtgtggctagcctcatttatgcgatgggaaaactgtggtccgggaaccaggggttttcaaattatgctttttgcccagggctggatgtaggatgtctgggggagaggcttgactgagatctgggtacactgagcctccactttaggaggtaacctagagactacacctac

SEQ ID NO: 188156 - DNA, 459 bp, Homo sapiens
cactttcccatctcccgggctttgcttctcacctgcccctcatctggagggctctcccttcccacatccttcttgcagaatccaatccagccccaaaggcccatctcagtgggttctctgccatcgaatcctccctttatcactccaaccaaaagggatttcttcctcaaaatgagatcagccctctgtggtaggcagaacaatggtctcccaaagatgaccacaccctagtcccccaaacctgtgaagatgttaccttacacagaaaaggaaacttgcaaatatgattaagttaacgatcttgagatggggagattatcctagattagccagatgggcccaatgtaaccacaagtgtcagaggcatttgaaccagagcaactccatcttgaataggggttgcataaaataaggctgagatctgctgggctgcattcccagtaagttaggcattctaag

SEQ ID NO: 188157 - DNA, 696 bp, Homo sapiens
caggcaggaatgaactgttgggggacccagcgagttcccagggcctttctgctgcttcttctacccctgtatttcaccgggctctctaaatgactcatctcaggcctttgtgtccttacctggacttctaccaatgctaatggctttccaaccacctcccctcacctgggaagatactgtcagtctgacatacattatgcatctgtctatccagaattcctcacactgctgatttctgaagagcattccaacttcagtggatctttttcatctctgcgtcttgaccatctcaacctggcccttctgacaactccagtgagaagaaggcagaaattaagaacagaatatatattttttggtctcagtcatgctcaggatggcgcaagatgagaaacagcctggaatttcccatccttgacaatctttaccatatcctgcccttcttgggcattaagatagagttaagagataggaaaaaccaagaaaagcaaaagagtcaaccaataagaagagtataaaaggacaaatatgtcaatagtttatgttatggagtttgaattctcacttctccactttccagtaatatgacattgggcaattacataaattcaattagcttcagtctcctcttccttaaaatgtggataacaaaagggttgactccatagggttgttatgactcaacacataacataa

SEQ ID NO: 188158 - DNA, 546 bp, Homo sapiens
tgagtgggtgaaaaacaagcggtcttaaaaagaaaggaggtgagcccggggagataaggtcgcattcagtgccagtgcttggtcagccatgaccctgcaccatgcgagtgacattgggactggagcaaagggacacagcagagtggcccctggtgcccaggacccggcagagctctcggactggttgcaagccagcaatagtggctatgcccgtgtgggagacgcagcttgccttagacttcagcgggaaccaccatgtccggcacagccatttccatccttcccaggggtgcttacgtgatcctggcagtctcagtcaaacttccaaactcagcagggaatgtgtgtgcttgtcctccaatctcaacaccctgggatgcagtgtcaggtgcaggtcagagacagcagtggagacccgattcccagccctgggctggggcccccacaaggcctccagcatctccccatggcccagtttcctcatctgcaggacaggctctcttgagaatttggggggatgatagacccaaaagcattctggagcca

SEQ ID NO: 188159 - DNA, 332 bp, Homo sapiens
aacaagggctggatgaatcaccagttatctcaactgaaaaaaatcagtgacataattcctattaactgagatggctcaaaattctaagctccaaaaaaatgtctgtcactctggaaggatgtgtacccttgggtcatttgtgttctgggtgtggcaggcccaaaagcatttaactgggtataaactcaattaagggagggccttcatttaacaccttacagttggaattttactgagtacaaagagttggtaccacctgctgaaatgggtggcaagtggtgtctattgagaattgtaagcaaccacaaacatcatgaattagcttgtacaac

SEQ ID NO: 188160 - DNA, 726 bp, Homo sapiens
atttccttgatgaataaccaatgcttagcatgttctgcctaaaaggaatttgttttcaaattcattttcccttaaaatcaaatactgaaccctctaattagaaataagcttttgttctctgactgtgtgttgtttcacaatgatctattcactgttttattcagaacacagacaacatatatggtgcttgcctccctcacccccacgtgcctgccttgccaggggctggaatatatggacatagtaacatgctgtcatattcttgaagaaatttccgtctataaataagccactattacttagaagaagaagaatagaagggccccaggacagagtacctagctaggtggagaaattgaagaaggcatcacagaaaaggtgtcatttgtcctgtagggtggcaatgggctctccaggaagaggaaaaagagagtactagagctaggaatgcttgatgctcatgttccaagtgttttacataaattaactcatccgatcttcatggcaaccctatgagatagtaagtattatgatcacacgcattttaaaacagggaaattttagcaaggaaaagtggactaacgtgcctgaggtcaaaggtaacaagatgtggaagaacatggcatgttacatgaagggtgagaagcccaagtggtgggaaggggagctgctgagacagggctgggccaggtcatatgtggcactgtgcaccgtgtgaacaatctg

SEQ ID NO: 188161 - DNA, 230 bp, Homo sapiens
aagctggagtccagacacacgatcatggctcactgtggcctcaaccccctgggttcaagtgattcttcgcctcagccttccgactggctgggactacaaacgtgcaccaccacattctgctaatttttttttattattatttgtagagatggagtcttgctatgttgcacaggcaggtctcaaactcctgggctcatgcgatattcctgccttgggctcccaaagtcttg

SEQ ID NO: 188162 - DNA, 481 bp, Homo sapiens
cactgacctgaaagtgtgttaaattactgagattttgtggttgttacctcaacataacctattctatcctgtctatgaaatgcagatttgtagcacaataacattttagaatcctaagcagatacatacaaaaccatccttctacttcccaagggtatacacataaccagactaacaggtggaattataaaaccatataaatatcttagaatggttgagtgggtgactaaaacaaaagaaaatggggaaaaaaggaatgagcataaaggggaaaagaaaaggaaaagacataaaaaggtttattaaacccgttgtgcaaatattagaaatttcattcactcactgactcaacaaacatctatggacctattatgtgccagaactattttgggtgtacttacagagtggtgagtcaaaaaaaggcagtgcaggctgggcacagtggctcacgcctgtaatcccagcactttgggatcacgag

SEQ ID NO: 188163 - DNA, 404 bp, Homo sapiens
gattgtccatatggaaagtccaagaaatctacaagaaaaaaatctagaactattaaattcagcaaggttgcataacataaaacatagctccatacacataaaaaaaattgtatgtctatatgtcagcagtaatagcaaatacaacacaattaaaaatacaatactatttacagtcactcaaaaaatgaaatacttagatataaatataagaaaacatgtgcaggaatatatatttaaatctatacaacactaatgaaagaaaagaaatgtaaacacatgtagagatataacatgcccctgcactggaagacacaacgaggtaagatgtcaactgtcctaaagttgctatacatgtttaactcagcccctatcagaatccttgcaggattttttttttttttttt

SEQ ID NO: 188164 - DNA, 443 bp, Homo sapiens
gcagcatggaatgaatgaatgaatgagtttatttatttatttatttaaatgaccaagtcttgctttgttgcccaggctggagtgcaatgacgcgatctcggctcactgcaagttctgcctcccaggttcaatgcgattctcctgcctcagcttccctaataactgggactacaggtggctgccagtatgccctgctaatttttgtgtttttagtagaggtggggttttgccatgttggccaggctggtctcaaactcctgacctcaagtgatcagcccgccttggcctcccaaagtgctgggattacaggggtaagccaacattcctggcccagacatggaatttaaacctaaatattttgttggtagcatccccacttttaaccatgacattgtccttgttcggttccagggtttctgtagcgtggagctgggcacatctct

SEQ ID NO: 188165 - DNA, 351 bp, Homo sapiens
gagaatgttcgaggaaggcagtggcaggcaatagccatagagagtcacagaaggttaaagaggttgtggaaacagtcatttgtttttcaagcagttccggtggggtttgagaaagcagcagcactcaactgtgagcagacaaactcactttggaaacctatgcagccacttctaagtaaactaccaagagaattattattttatttaggttcctcatttcagtgacaatcttttaatcctttgaactgtatgctgaaaaggacattatagatcctcctgaaagataatttttagtgtccacggttccctcaatatgatgatttttttccttggtccctatctttcaccatt

SEQ ID NO: 188166 - DNA, 760 bp, Homo sapiens
accacagacagcccctgtcttgtggacccatagccatggctggctgcacatctgtacgctgggctcacccacgcgattcacctattctgataacaaagagattcattttgtaaaaaatgtcacatacaaatgccattcaaagccagtaacaggtatgttgactttgtggaaattcactaagctggatattgacgtgagcactttctgcatgtatgtgacactgaagcaaaaattcacggaatgaaatgagtgagacaggaccatttggaggccaaagaatcatgacaactaaatgcagtgaggcaaagaaataggaaaagaaatagtataaggacatgaccagagcaatgaacaagctctgaaaatgagctgtgggttagagaggagtgttatattagtgttatcagtgtgtgtataatagctttttggcttgtgtcttttacttactgtttgtgcaagagaatgtccttgttcctcagaaatacacaaggaggatttagagataaggtggtgtggtcgcaggtgtgtctccaatgtattttcagatggttcagaaaacagactacatatgtagctatatagagacaaaattatctatttatgtaaaatattgacatatttgggccaggcgcggtggctcaacgcctgtaatcccagcactttgggaggccaaggcgcacagatcatctgaggtcaggagttcgagaccagcctggccaacatggtgaaatcctgtctctactaaaaaaattaaaaaatt

SEQ ID NO: 188167 - DNA, 330 bp, Homo sapiens
tatgtataatgaaatttaatatttatcatttaatagttgatttagcaagaagttggggtttataaggtatatactttaaaaaaactgacacatagttaaccccagcagctatagaaccctttaatataataagatggagtactaagaacaaaaaataatttaaatttaattattaaaataatttagttttgtttttcatttgaaaaataagctaatgtgtaaggttagaaaagaaagttggaatgcaacttagagcatgtttataatgtgcacagaaaaagcttgagaatgataattttggtttaaatgtgctggttagttgatgttatg

SEQ ID NO: 188168 - DNA, 376 bp, Homo sapiens
ctggtgactctagtatacttgaaagttgctaagtcagtggatcttaaatattctcattacaaagaaaaggtatgtgtggggatggaaatgttaattagctcgatttcatcattgcacaatggatgcacacagcgaaacactaagtgatacaccatacatgtatacaatctttaaatttgtcaagcagaccttaataaagctggaaagcagagtatgaacctcagctgcaccttttaccaggttctgggccttgaggaagttaactcctctgtgcctagtttgctcatctaggaaatggggctgataagagcacatttgtcattgtgcaggttaaacgagataatccacatttgtatctgcagagcaagcattcaac

SEQ ID NO: 188169 - DNA, 163 bp, Homo sapiens
atggtcttgatctcctgaccttgtgatccacccgcctcggcctcccaaagtgctgggattacaggcgtgagctaccgcgcccggctaaattcttatgttgaagccctaaagccccaaagtgactgtatttcaagataggtcctttaagaaggcaattaaggtt

SEQ ID NO: 188170 - DNA, 329 bp, Homo sapiens
tgctgggattacaggcatgagccaccactcctggcctacctaccctgtgtctttaccctgtgtgtatctcaaaataaccatctcgaaattatccttacgccaaagaggcagatctgtggtggcttattctagtctcctacagtcatatttggggaagcatgtcctgaaccctgtcacactctgattttatatttgttatgccagtgatgaacctttacattttaactaaattgttgttaagcagtaattttaaaagcttaaaagtctttaagaagatgagggccagcctcatcttcttggttcctgggaattcccgttggttgtgaccg

SEQ ID NO: 188171 - DNA, 509 bp, Homo sapiens
cttacagccttgtaaaaaagtcactgggggcctgcttgaggcaatctgggtcccttggtctgccctgagtgccatcaacctgggttctggtcctgactctggcactcactagaaatatggctttgagagggggcctgctagatctttctgggaccactgtagatgaaagggaccctcggccagaaaagccgcctgcagaggctctcaagatctgcacacccatgttcacagccacactattcgcaatagctaagaggtggcagcagcccaggtgccctttggtggaggaataagtgtagaaacagggtgtgggctgtctatacaatgcaacactacttagctttacaaaggaaggaattctgacacatgctacgtacagcatggaggaaccttaagggcatactgctagtgacatagtcgcaaaaggacaaatactgtatgattccacttagataggtcgctagagcagtcacattcacatagacagaaaggagaagggtggctgccag

SEQ ID NO: 188172 - DNA, 448 bp, Homo sapiens
agatcccccttcatccaatgaaaagaaacaggcctttggagctgaggtctaggaaattattggtggggggaatgcaactgaaattgctaggagttgagtcaggcagctatgagcaagttcaatggtaggtataaaccatgctttcaaacaaaaaagttgaaataagaaaacaagagcccagatgctaaggacatggggaaattaagaaaacagttgaggtagagaaagaatttaaggagggctgaatgctataatagctgccattatttgactgcttattatgcaccgtggagagttctaaatgctttagctaatttaatcttcatgagacacctaagagataaatcctgctattattattcatattttggataggagattaaggcacagagaggtcgtacaaacaagtgagtgtcaggattcaaagaaggaggttttgctccagagg

SEQ ID NO: 188173 - DNA, 335 bp, Homo sapiens
ccagcctccagccacatggaacttgcagttctagagcggaccacgctctcttgcttccaggactccgcatggcctgtccccatcccatctatcttccaggtcttacacctagattttaccttccctgggaggccttctttaattctccctcaccccagttggggtgtacgtcacactgtcttaacaaccactgagacactgtccccaccacattgggctgtgaacgctgggagggcagagactcttcctcagtcacagggagaggctcaagaagtggttaagaggccgggcgcggtggctcaagcctgtaatcctagcactttgggaggccgaga

SEQ ID NO: 188174 - DNA, 138 bp, Homo sapiens
tcaggcacaatcaagataaatgatagaaatcttagtaaagccctctggagcctgactaaaggaggcagcaaacaactttggcacaaatgtgctaaaagatggattgaggaagatgtgagctcagtcagtgttagacag

SEQ ID NO: 188175 - DNA, 236 bp, Homo sapiens
atacatttaaaaattttagaagcagctggctaacttcaacaaatactcctgttgagcttgatagtgctctgattgctacagattaatgtggggagaggtatcgtgtattttatcaacaccctttgtttaatctttctgagcctgataggcctgttctgaattaatgctgtcgttgagtgataaaaattaagatagtttaccttactgttatgtctcgtgctcttttgaaataatta

SEQ ID NO: 188176 - DNA, 233 bp, Homo sapiens
gggagctgcgggcggggaccagagtgccatgtgctgtcctgtgacatgtgtgggacccaggcctcgctccccgacccccgggatccattctctcaggagctagagcctgggtctcaccacagcaagctgaggagaagagaaagagtcagttagaccagtcagggccgcgtcctgcgcacgtcagaaaggcttttactcttggggcagcctccccgcctccccggccgccctcc

SEQ ID NO: 188177 - DNA, 372 bp, Homo sapiens
atggaagtttatatacacttaagggagctacctgttcccttctcttgaaggatattaaactgtggtatttgctagagaatttgaattagcaggtgtatgtagattctgagccttttttgtgctcagctcaaagccttgaccatgctgaatacataacaaagtactgattgataatgtttaacccctaggggcaggctttcttttcgccctgagcaaaaaagatgcaatctttgtggatgggtgtttggggaattcctgcaatataccttagatgcagagtttcgggtggagttttgtttttatgtttgtttgttttgttttgttttgactttccattttccactttaactgtgatccattccaggggatttt

SEQ ID NO: 188178 - DNA, 121 bp, Homo sapiens
ttcctcttcctatctaatccttgctttttaagtccaggtgggagaaatctggttgtcctggatgttgaagaagttcactgttgtgatggtgtgtgacttcaacctatcatcaattccatgg

SEQ ID NO: 188179 - DNA, 422 bp, Homo sapiens
tcccggattcaagcaattctcctgcctcagcctcctgagtagctgggattacaggcacccgccaccatacccagctaattttttgtatttttactagagacaaggttttgccatgttggccaggcttgtctccaactcctgacttcaagctgtctgtctcggcctcccaaagtgctgtgattataggcgtgagccaccgcgcctggccagagttttttttttaagtagactctatttttaagaccagttttagattaatggcaaatttgagcagaaagtacagagagtttctacatacctcttggccctgcacatgcacagcctccaccacagcatcgtgcactggtgtgggcattgatttttatgagagtgaaaaagaggctaagaatgcaggccgactagggaaagaagaaggaagccca

SEQ ID NO: 188180 - DNA, 241 bp, Homo sapiens
ctggcagtataggcagcagggcaggctggggcatgctgatacccgcctctgtctgggaagtcgaaggaacagaacctgttcaggctggcggctcatttggatgaacagggagtgtgtgaccttgggcgttgagtcctctccactccctgggcctcagtctccccaacatcaaagaagaaggcaaatcacctttttttttttttttgagatagggtctcgctctgtaacccaggctacaatt

SEQ ID NO: 188181 - DNA, 490 bp, Homo sapiens
  misc_feature (69)..(69): n is a, c, g, or t
ggctgactctagaggattccaactacagcagctcaggcatgaaaaataatactactcgccagctcaggntatagatgcaaaaccaaagagtctgccctctagagactattactggaaacaatgttagggcaaaaagataaatgcttcgttttttaagacatgtgttatacattagttaacctctgccaggagagttgggttttttggtattgttttctgtgccgtctgccctctagagactattactggaaaatgtttaccgaagtattttgcactggcgatcattgtgtgagcctgagagggtatctggttgtgttgtgttctcttaccacctccaaaatatttgggattacgggtgtgagccactgcacccaacaaagaaaggtgtttatttgactcaaggttttggcggctgggaagtccaagtgcatggcggcagcttctggcaagggcttttttttatacaggaagtttttagattaagcaatta

SEQ ID NO: 188182 - DNA, 406 bp, Homo sapiens
cctccatggagcctggtatcctttatacaatctttgtgctctaggatctcataagctagttgggaaacagtctgaacttaagaagaaacaaccacaacagtaaggcagttacggtgtgtacaaaaagagtaacacagcaaaggctttgcagaaaaggaactagcaaaaagaggattttatttagtcaagtatgcctgaaggtttgtgttggaaaatactaagtaagaggcaaaatattgggccaattggtctttattctatagtatgctggtccctccagatgctacatgaaaaaacaaggtgtagcaaaataactctgggaaacaatgcattctatcctttgatcctttaggttcacaatgtacattagcttactgaaggatcctagaagcctttcagtcaacag

SEQ ID NO: 188183 - DNA, 449 bp, Homo sapiens
agatttcaacatgagacttggtagggccaaagaaaccaaatccaaaccaaagcagatggagatgactatgtcagagacacctcaatctttgaaggaggatatgtgcttctttgcatgtgtccatgaggtttgtgatgggtgggactgaggagatagtaacttgaactgaaaaactaccagaactttatttttttcctcctgcaaattgacttcattttttccctaattctccatcacatagctggcagaaggtcaccaactcacacctctcaagttttcaactttttcactcaaaaaccaggtcagactgactaactcctaattctaaatttttcagaagaattaatttgacaggcttattttgtttcagatgtcccttttaaattcaattacccgtgtctgagaggagcccaaatctgagagcagagaaggaggtgacaggtacttca

SEQ ID NO: 188184 - DNA, 463 bp, Homo sapiens
aatgaataaagtttgaatctgtaggacttgttcatgcagtgttggcaggggtgagggatgaggtgcagagcccatgggtgaggaagaaaggaagaaaggctgccagatgttgcattcgctaagtaggaaatacagaaaaggcatcaggtttggagagtgtagcagatgcttttgggtcacatgtgccctctgaggtgaggataaattaattgccttttgtatcctccatcacagtggtccccaacctttttggcaccagggacccattttgtggaagaaagtttttctgggggctgatggggggaatggtttcaggatgaaactgctccacctcagatcatcaggtattagttagattctcataaggagcatgcaaactagatctctcgcatttgcagttcacaatagcatttgtgcccctatgagaatctaatgccacagctgatctgacaggaggcggagc

SEQ ID NO: 188185 - DNA, 254 bp, Homo sapiens
ggcttcccagactccagtggcttcagactctcggccagcccaggctctacacagatgacgccttccgtggtagggcttggaccatagctgagcgctcggctgagcactttattttacttgatgctcgtaaccgctaccctctgagataggttttattggcccggttttaggcacctggggttgcaaaaggcccaaggtcacaaatgaataagaggcaagatgaagtgcaaataaatgattccaagacccttgtt

SEQ ID NO: 188186 - DNA, 657 bp, Homo sapiens
agggtaaaagggagggagggggatgggcaactggatggaagaatggatgctcagcttacagactatctggaggatggatggatggatggatggatggatggacaaaccgatgggagaacaggtagatggacagaagaacagatagatattcaaatgcacgaaccatatgagcaacagtgatatttggtaaagtacacaaaagaccaagacaggtgctacttctagagaagtagacagaaggatcaagagtgtgagttctggaggcatgtaggctcctgctcaaatcatggatctctgcttactagctagagaagtctctttacctgagctgcagcttcctcactggtaaagtggccataatagtagctactgcatagggttgttgagaaaattaaatgtacatgcaaagcccagagcttattaagtattcaaaaaatggaagccattattatcttttaaattgcaagtgctcaatatttgttggatgggtgaatggatgagtggatggatggatggatggatggatggatggatggatggatggatatacagacagatgaggcacctgtgatattgcattctacatcatttaagtctctctgagcttcacacaggttttctgatcaacaaaatgagaatcttaaggacaataatact

SEQ ID NO: 188187 - DNA, 344 bp, Homo sapiens
tagatatatatagtattatgatgacactaggtggaaataaaaaaaagttttctatttttgaagaagcactgttctttttctgtcctttctttcccctatgattcatatctctggctttacaatgctagctaaaagataaacagtatgccacttgctcaggttccttaagtgttcatctcctccaggtctgccatgcctttaaggaaatgagagagaaagaaaggaatatatcacttcccttattagatatatgacagcattaaagccagtgatgggatagagtttgaaatctcataagattatctaaaactgagcagaactcccatacagaggtactagaggtg

SEQ ID NO: 188188 - DNA, 350 bp, Homo sapiens
acactgtcttcttcccatttatgaaatctcggctctgtccgggtggtttctctggacttttgttattacagattaaaaatgaggtttagaaaggtgaaaattgatccagaaagtactgattgagaatctttgggggtatccaggattaggctggacaccaggatagtttttagttttgatttttagaattccgctaacaacaaaaatccatcatgtatacttttgtccatctgcagaaaaaggtaagacagaaaggtgcccaaagctcatgctaagccgatgggacttcttcaattgcctggatgctttcagaatcaaagtttgtatttaagaaatggtgctggtctgta

SEQ ID NO: 188189 - DNA, 168 bp, Homo sapiens
acataatatcacctttgtggggttcttgctgaaaatacagaatctaattttgaagaaatgggcttatatatccagaaggtgggttgttttgcgagacagttatccacactcttcaaaagattcaatattacaaagaatggagagaggcagcagaactgctttaggctg

SEQ ID NO: 188190 - DNA, 724 bp, Homo sapiens
agctacttgggaggctgaggcaggagaatcgcttgaaccctggaggtggaggttgcagtgagccaagatcatgccattgcattccagcctgggcaacagagtgagattcctctcaaaaaaaaaaaaaaaaaaagaaagaaagaaagaaagagaaaaaaaaagtgtactgctgaaaaactaactttaaagtttgaaatgctattattcagtaccaggtattatgttcaaaccaatgtgggggcttccgtataaggggctacacatcattgggcagatttgattagctgtgacaattgtttagagtccttaaagaaggctttaagcacagtctaggagtgtactatgtgatacggtttggatatttgtcgccacccaaatcttatgttgaattataatccccagtgctagaggtgggcctggtgggaggtgaattgatcatgggggcgatttcttatggcttaacaccacatactcttgctgttgtcattgtgataatgagttcttgtgagatctggtcatttataagtgtgtggcacctcaaccttctctctcttcctcctgctccctctttgccttccaccatgagtaaaagctccctgaggcctccccagaagcagatgctgccatgcttcctgtagtctgtggaactgtgagccaattaaacctcttttctttataaattactcaatctcaggtatttctttacagcaacacaagaatggca

SEQ ID NO: 188191 - DNA, 318 bp, Homo sapiens
agagctgggatgtattaatccaagtgatggaaatgaagatgggactgactcctatattaaacaaaatgatctctcatttaggcagccaggaaaaacaatctcctcatgaagattgattcacattttgttttgtttttagggtacctgtcaaatgaaaaatctgattcgtgtcaagatgtcccaaaaaaggccatagcaattttcaaattggccctagtgaaattgtgtccgttagggacaagtacatacgctaacattataatgagaaaacatgaaggaaacaggtgtttgtcctggaagaaatgcagttttagatag

SEQ ID NO: 188192 - DNA, 462 bp, Homo sapiens
cagttatatccaggtgattgatggtgttattgagttcaactatatctttactgattttttgcctgctgaatctgcccatttctgatagagaggtattcaagtctccagctatgatagtggattcatttctttcttttctgtctttttttttttttttttttggcctcgattatttggatgctctgttgtaaggtcaaccgggccaggttagacctataccccaggtagtaagttttttaatcccatttagaattacaagagcacaatctccacatttatctatggatcctccgtaagttaaaacccttgaggggtacagcatcactcggatccggtgcccaagggcctaagcagaaagatggctccgaatttgggcacaaacaatgtgccatgtgtcccagggccccgagttattttcccccagattactcgggggggaccctcataagtcgaccgtgcagg

SEQ ID NO: 188193 - DNA, 423 bp, Homo sapiens
gctcaagtgatcctcctgcctcagcctcccgagtagctgggagtacaggcttgtgccaccaaggccagctggataagagcttttaattgaaccaagttacaagacattaacaatagaaactgacacctaccataagggtatactagattccttgaataaacaagggaccatactacaggattaacaagagagacagtggcttctgggctggatacaggctttctggattacctgcatataatgattgggcataaggtgattaatttggcacaaatttatgtgccagtacaagagattctatgtgaaaagttatttatccatcgccacctgtgattaatcatttaattcagtgaaacaaatattatttgttatattcaaggcaatgtggtaaatgggatacaaaggttatagattggcaaaatc

SEQ ID NO: 188194 - DNA, 230 bp, Homo sapiens
gggaaggataggaggaggtatacattgatccaagggcattctcctacgtaagcacaatacagttatcacactcagaaaatttaacattaatgcagcattaccatctagtatgcagttcacattcaaatatcccagtgtcttgaaatttgctgagagtagatcttaattgtcttcacactccccatctcacactctccctctcatggtaactgtgtggtgaaggattggtt

SEQ ID NO: 188195 - DNA, 523 bp, Homo sapiens
aggaatctcaagacattggcttgtccaaagtcacatagtaggtgatagggccaatactcagatcacatctgagcttgtctcacgaggctaagttcatctaccccttctgaagacatcctgcatgcttagggactatattagactagactttgattcacaaatattagaagactggtcctgctgctggaggcctcagatgggataggattatgtagctaaaagcttctacaagggctgtggggagtggtgaaatatcaccttatctttagtatttcaacttgagaataagggcaatattgcctggcactccaataccagcacctggctctgacactttcactactatgtatgttgtgggcaagcaacctaagaatgggaagtggggaggacagaaataaaacaacgttactgggcaatagctattactccattacaaaagatgatttgggttttcaggatggtcgcttgctgaagtttaaacgaaaaaagaaaaatgaggctggactcagctcactgatgactg

SEQ ID NO: 188196 - DNA, 206 bp, Homo sapiens
accccagcaaatccccattcgggcttgatacacattcagaacatttctttcagagctctggtggggccagagtgctaccaccaatttttatgaacttaaattttcaggtcctagatctaatggtatctagcagttcctttcttagaccttcagttcttactgaaccctttaatccagggctattgtttacctttccttagatcatt

SEQ ID NO: 188197 - DNA, 302 bp, Homo sapiens
ccaaggggccatattttggagcagcctgtcctgaactccaacagcaaaggtagaacagggcagagtgatagcctggtcaggaagtgaatgaatgggactcacagccacactgattgtctctagtgacaccaagagctcaggtgaggctaaatcagccaggaacccccaggggcccaaagaggatggtcaggagtaggaggaagacatcacaagtcatagaaaagagataggagggccgttttctctgcatatgccagttataacagttgaatttgcactccccagtactcctagagactcta

SEQ ID NO: 188198 - DNA, 365 bp, Homo sapiens
aaagagatcctgcaagatcgcaaaaagttagaagtaaacagttctatgcatttcactgtgaccagcaattctgaaaaatccatctgataatttaaatttattgttggaactgactcctcctatctagctgtaattttgtaccctttaacaaatctctccccatcaccccttctccctacccttcctgacctctggtatcctctgttctagttcttacttctatgagatccagttttgggttttttttttttaaggtagttctagtgttctatagcaggggtccccaacccctgggctgcagaccagtgctggtccatggcctattaggaactgggccgcacagcaggaggtgagtagcggcgagt

SEQ ID NO: 188199 - DNA, 501 bp, Homo sapiens
tgccgattgagtatattgtcagtttcatgaaagcaaagaatgtccagttctattgtaccagtcagtctagtggcaggagacagatttgaaagatattgaatgaagggacttttcatagtgctgtgggaaactaaggaattatcaggaatgttgaaatttccacaaactagcaacataggaaagcaatagcatcaataggtctgaacaagcatgtgtagaagtggcttctaagggtgttaggagagaattaactgtgaaattgaattaggcaaactgtaaaggagaattaactgtaaaattgaattaggcaaaatttaccttatcctcacagataaaatacatcgcacattttttctttttaatgttttagttcacagacttcttgatgcaaagacacagaggaccctatttgccaaaacataaataaacacatacttgcctctctactttcagatgtatgatcattaatatctcacacaacaaactttcttcagttatctc

SEQ ID NO: 188200 - DNA, 429 bp, Homo sapiens
tagaatcgccacgacaaggagcaacaggaattatcttgttagagacaggggaggtgggtggggttagtgccccagtgccgggcattaatacagccaaggaagggtgtcacagacaggccgagtaggagggacagggagagcctggcagccttcttaccaagaggaaaagaggaaagacctgtttatctgggccttggaggcagggatggttaactgcaaagcaggaaaaggcggctcggggctggaacgttactccctctgctcatgatccagggagaagttttgggcccccttctctctgctgctgatggccgataacttgataactcggctggctggggccaagaagatcccaagacctcgatctgccaggagtggccagacacgtgaaaaagcagctccttctgcgtggcccaaacccattttgca

SEQ ID NO: 188201 - DNA, 812 bp, Homo sapiens
ggctagagtgcagtggctcgatctcggctcactgcaacctccacctcctgggttcaagtgattctcctgcctcggcttccggagtagctggaattacaggtgcgcaccaccatgcccggctaattttttttttatttatttttagtagagatggggtttcaccatgttggtcaggctggtatccaactcctgacctcaagtgatctgcccgcctcggcctcccaaagtgctgagattacaggcgtgagccaccatgcctggcctaggtgggtttttaaccatagggacagtccaataatgtctagtttgactttaagattaagccttttaacttcagtaatgaaggaaggggtgtaaaatagcattaagccggcaagttaggtcatgtaacttggctaatcacattagacttgatgtttaaagagagaaggagagtgtgtagagcaggaattatgaaatttataatcagctttagagtaggctgagatttccttggatgtcaataattatgagtaaacaagaattctgtcatcccacatgtaagtaagcagttacaagactgcttacttatctgtcttggacattgatagaaagcacatgattgggaaggggcagttccttgactgagggaaggaattgtgtctggttcacttttctatcaccaacatagtagatgctcaacaaatacttgttggatagaggtccactcttgtactcaaataaattatatttgaatattactatagttcttatgcacaaactgatgtcaataactcctgtaattgttgtgtatgtgtgtgtgtcagggggag

SEQ ID NO: 188202 - DNA, 197 bp, Homo sapiens
atccccaaatggaataccatatttaagtgtctgttcccttccacgcttcttttcattttgataaaaatacagtatttcgtttctatttgtaaatgttcagtatttattcaacaaacaggagtgttgtatttcaggcactgtgccagtgcttgagttaaaacaaagggcaggctcttaacacctgcctgaaggggctt

SEQ ID NO: 188203 - DNA, 377 bp, Homo sapiens
ctgagacagttccccagtctttctttgtagacaagaattttaaagcagctactataactatgctcaaggattaaagagtaaaatagtctcttaataaatgaataggaaatttcagcaaagaaacagaaaccataaaagaacacaaattctggaccaaaaattacaataaccaaaataagaacattcactggatacaaaataaagatgacaggaagagtcagtaaacttagaatagatactattcaatctgaacaacacagagggaaaaaataagaaaactgaagagtactgtgtattacaacatcaaaggtctaaacctacatgtaataggtataattggaattctataatcagaactaagagagaatggggcagag

SEQ ID NO: 188204 - DNA, 695 bp, Homo sapiens
cacccacaaaaactagaaaggatgaaggagggaaatttcaatcaataaaatacatggcttgaaattctgtgaatcaggagattttccagaaaatgttgtttgaagttggactagagttaatccttccagctgcttttgttacaagataagttgttgaatcatgtaatgtgacaatggctgtgcaaacagcaactaaaattttggataggatgtaaacagccaaccgcaacacggacaaactaccagcacaattgttttagtccttggaatagaccacaaagccagggacccagaactaaacccagaccattaaaacatcccaatgtattgctgggtctgtttcaaagagctggatggctttttcttttagcttagtcatggttatttacttgactgtatttatgaggtgtagaaagaaccattttgctatagcataagcactcgctcgggaattccttaaaaggaaatcaaggataataccaaacttggctgatggattttaaatggtttgttgagtctttaaagcagaagtgatgttcacataagaaacagtatcctagaagagcacagccccattggtaatataagtagccttcattttaacaggagtgagtcaatcattggtaccttaagttggtcagattttctaagtagagcgaaataatttctgcaaagcaggctggagtgtttctgaa

SEQ ID NO: 188205 - DNA, 711 bp, Homo sapiens
gcattccagagagagaaagggtgaggagaatgtgcaaagaattcagggcatgcctggagtgtctgaggaacagtaaggaggcaactgcagccagatcagagtatgtgagagaaagagcagcaggtgatggggtccatcagaagtaatggggaccaggtcatgtacacacagagctgtaggccactgtggttcccagtgagggggtcaagtggagatcagaaatctaagtcagaggagagggaagggagtctggcttgaccaactgatggaaaactggagaagaatcaggagtgtgggcaaaggcaaaagaggagaggatgaaaagctcagaatccagacctgaggaaagcagagacaagaaaatcagtggcaagcactgccctgtcagcggctcatggtgctgccatcaaagtattcatgatccactcttcttccatcattcatccaaccatccaatcatccattcatttatccacccatctctcctttcatccatcccctttccttccctccttttattctcctatccatctatccctccatcctccttagctctctccctccatgcatctctccatccatccatccatccatcatccatccatccatctattcacctatttacctaaacctccattcatctgtccctgatccttcccttcattctttcctccatcccttcctccatcccttcatccatctctttatcca

SEQ ID NO: 188206 - DNA, 414 bp, Homo sapiens
cagtcaaagggtattgactattaggacaggaaaaaatcccactaaagaatacagtaatagtggttattgggaacagccactatctctcaggctctaggagagtacccaaggagggaataactgagtagaacttccccctacccaccctccaccctactaagcctgaaagtaggcgctcattggaaataatatggctgtggtccacttaatgatccagaaatttaaggtgtcacacactgggctgctgaggaaaccatcagctgtgttttcagtaaaacttgctaggaagccattccactgacatgccagtggtactccatagaaagacacatactagggaactggccaaatttactgaagattatgtaacatggccttcttgcacaccactggtcagaaagtcactcactggcc

SEQ ID NO: 188207 - DNA, 684 bp, Homo sapiens
gtaatttgtaaaatattttacctttttttccccctgccctctccagaaatgttacagaaaaagattgagtacatttctgccatgatgcagagaaagaaactggtccattattactcattgtgtaacaccataagaaggttcaaaggagctcataccttctgtatgttgatgccaggaactgtgtataatgaactggccttctatagttaggattggtacataccgctcattcagcaaatgagtattacagtgatattcaacatgtgtccattgactacagcatcagaagcactaagtgctattaaaatgcagattctaggcctcatcctactcctgctgaatccaggtatctcaggagggaattcatgagactgcatttcaaataaataccccatgtgattcttgtgcatgctgaaggttgagaaccactgatttattaagtatcttgtgtgttcattatgctttatcccctctaatcctcttgtctaggactccttaaatttgagatttagtatttccctttaatataaacattaaaattgagattagtgtaaatttgtaaagagactatttagctaatctggaggaaaaagagtaaaaagcactgaatttagcagcaatagaccttccacttggctgctgtagtaggtaaacatttgcaaccacgtgtttggatttaacaaa

SEQ ID NO: 188208 - DNA, 460 bp, Homo sapiens
tgaatatatattccaattagtagccattacaagccggttttttggaaacagtgcgaaggcagtttctaagttgtttaccaagaattgacattaaaattattggtaaattgattgggtattgattggctatatatatttgttttacatattttatgaaaaacgaaataatggttgagacagctagtcagaaacaaaatgtctttaaacaattgcccctgtgcacagatgtggggtaagattgaagtctcatactctcatctttctgggcttgataaattgtgcagaactcaaagagcggagactgctctgagctacttttctcaccgccttgctcaggacacataaaccccttaggtgggcagatcacctaaggtcaggagtttaaaaccagactggcaaagatggtaaaaccctgtctctactaaaaataaaaaaaggccgggcacagtggctcatgcct

SEQ ID NO: 188209 - DNA, 469 bp, Homo sapiens
tggattactcaagttgctgttgcatagagaacatttatcatacttcagtcactctagcccttgccagataggactagtttccaaatccacatgtgaattttgggttggaattttgaattcatctatattttccctccaccttcaaattccatttctgatggaaatgagatgagtaaatctaacaaggctcttgtaacagacatccacatgattgttttcagaaatctagttttcgagcctctttcttccaacagtaccatcattgctcagaatgtcttgggggcctcttgaatctgtactcaggtactgaagagcatctctggtggccaatcatcttttggagcttgtatttgtctttgggtgggagaaatgattaacatgttttttagagacaagattgggaaaaaaggggtgggtaattgtcaagttgaaggatactaaaggtctctattgaggtgactataaagag

SEQ ID NO: 188210 - DNA, 306 bp, Homo sapiens
tccacttaacaaaattgtggtaaaacaggtgaagcagtaaggacgccatcttccatcctctgcatccaggccaaggaagacacactgagttaaaaaatcacgtatggctgagggcagagccatccttaaagaagctgtcctctccagagaaggtagtgagacatttctaagtggggcagcgatcagctcctcttttcaacataaaaacgtaaagaggctcctggaggagcctttctcctctttctttggtaagtgtgaaaaaatcagcagattaggtctttcccttccacaaccctttcatcctcg

SEQ ID NO: 188211 - DNA, 168 bp, Homo sapiens
ggggaggactcatccccctatgcatcatctaccccccgatagctgacacagtactgttcacaaggttacttactggttttttgtttttttttttttgagacagtttcacgctgtggcccaggctggaatgtagggatgtgatcacggctcactgcaacctccacctcc

SEQ ID NO: 188212 - DNA, 275 bp, Homo sapiens
atttctcttaaatcttgttcttcttgggccttacatatgggagccagtgttttgtttcactccaatgaaatatgccattaacacaaacttttttaaaattttaaggtccacgccgggcgcgctggctcacgcctgtaatcccagcactttgagaggccaaggtgagcagatcacaaggtcaggagttcgagaccaacctggccactatggtgaaaccctgtctctactaaaaacacaaaaactagccgggcatggtggcaggcacctgtagtccc

SEQ ID NO: 188213 - DNA, 176 bp, Homo sapiens
tttgtaaaaccaaaatttgggagagaatgcgaggagaaattaaaaagatcactgatattacctaaatgaccctattacttaaaatgaccttttgaagtaagaggaaatgaaacaagttacactgagttcctccactgatgatatggggaggatgacacctttcctgcctgccgtat

SEQ ID NO: 188214 - DNA, 319 bp, Homo sapiens
ctcaccacagacagaggctaatatccccaacatgtaaagttctctacaaatcaataataaaccaatgactttcttgctcccgcctatggactaaagaaatgcataaacaactcacagcaaaagtgatatgtgacccttttttctttgagacggagtcgtgctctgttgcccaggttggaccgagtgcagtggcgtgatctctgttcactgcaaactccacctcccagattcaagctattctcctgcctgatttaattttttgagtaaatgtttgcatgggttaaaaaattgaagccaggaaaagcaccacgtgtacttg

SEQ ID NO: 188215 - DNA, 495 bp, Homo sapiens
cccacctcagcctaccgagcagctgggactacaggcgtgcaccaccatgcctggctactttttataaaaaaattttttgtagagatggggtctcactgtgttgcccaggccgatctcgaactcctgggctcaagacatcttcctgccttggcctcccaaagtgttaggattactgctgtgagccaccacactgggcccaaataccaaattctaaatagaattggaaattgtgttattgaggatttagtgattactcttccctatgtcttgttaagtaattcttctcaagttgtttgcctttttccctctgtttctctcaccagttatacagtggggttttccagaggctctatgacgcgacagcatcatcactctggtggttaatggaatgtgtgtttgtgtatttctgagttctctagagttttgtaagttggtaggtattggtagaattggaaaatttttaacatttaaattttaaaaaattccttttttttc

SEQ ID NO: 188216 - DNA, 275 bp, Homo sapiens
tagaatttgatggcactgtaggaatcttaatccagaccagcgattttcagtccccagactaaaaccaagcccttacctgagggcagtgcgatgagaaacctaagaaaatgaagtgaatgttgtattaaatataaagctaaatttattcagttgatttctgcatcattctgttattttcttttcttgaatttttcaggtttttttttttagtgtcctccacctaccccagaaatcagtcttcctgatctcagcctcccacctcccaccattctgtc

SEQ ID NO: 188217 - DNA, 662 bp, Homo sapiens
ctgccttccagcttcaagcgattctcatgcctcagcctcctgagtagctgggactacaggctcctaccaccacagttggctattttttattgttttgtatttttagtagagatggggtttcactatgttggccaggctggtcttgaactcctgacctcaagtgatccacctgccttggcctcccaaaatgctgggattacaggcgtgagtcactgtgccaggcctttggctactttttgaagtggatattttcagtgggtgagatggtagattataaatagcttaatccagaaattaaaagtcacctaaatgttagcaacacctaatatggaatttatgaatagcccaaagcagcctttgcagccactttaagctaactttaaataaaatgatacctttatgcaacttcttcattatcaaataaaatatttatatttgggaagtaaggcatacaataaaaaataaataaatggagctttcacctttggaaaacaggcacgataatttcctgaggactcgctgaatctgaagttggattctctggagattttggacttgtcaactggctgccttcagtttctcctatgaaaatgaggacagtagtaatgcccagtgagaaaaggagggtcagaaatgaataatataatgtaataaatgtgata

SEQ ID NO: 188218 - DNA, 378 bp, Homo sapiens
tggctttcgattgttcccccttatctcactctgtctttccttgagtccatcatctggtcaacatttactgagctgaagctccctggagcttactcactgagcctagtagagtgcggtcgacattcccatggaggagataaacctgcgctagggactgtggtagctcagaggggcatgtacatcagacggaggcattctgggactgagtttggtacacctggggtctgatctccttatgcagaacatctaccctgcagtctgcatgactgtggtcaagtcacttttctaaacaaaaatctgtagcctacaggctcccagatgctagcctggagactgattcactaggttggggtcccagaacttgtatcctgctcaagt

SEQ ID NO: 188219 - DNA, 461 bp, Homo sapiens
cttaaaggctggtgacccaactcacacagaaggggatgggccatgcatccaagtgaggcatgcaccttccctcgggaagcagaaatcctaagtaggtgacaaccacttgctgagtggccggagcacaccctgatggaagtctcagggtcagattgcaccctgcctccctgcattgcatcaagcagggcagcacacctgcactccagcttctagtgtgtaccaactcagtggaaaacacgtcactgtcggttttgttccaaaaagattttgtttgccattaaaaaaaaaaagttaattaacgtagtagaaaccaaaggactgcctgggggtagggagcaagtcagccatcaccagaggtatttaaataccagctagacaatcacgtcactgtcggtttggtcccaaaaagatttggtttgccattaaaaaaaaacaaggttaatatagtcaggtctaccggg

SEQ ID NO: 188220 - DNA, 425 bp, Homo sapiens
tctttcccctgacgcctggcaaccaccatttgactttctatctcatgattttcactattctaagtacttcatgtaagtggaatcatacggtatttgtccttttgggactggcttatttcctgtaacataatagacatgtaatactttcttaaaagttatgaggtgaatatgaaaccgtatgagtaaactctgactttgttaccttaaaattcattgatggatctaatactttggatggatcttttatccatgtatgattttataacatcctgcactggttatttggaaaatattgattctttgagttatacccatcttctaaatattggtacattttattttacaatatgaaaagaattcattgatattaccactgaactcgtcagaaaagtccctaattattgagaatctgtcaggataaagga

SEQ ID NO: 188221 - DNA, 581 bp, Homo sapiens
cctaggtcagtcagctcctggaaaccccccttctgtttccttctccaccctcactcctcattcagtctctcccaggtccatgtgcaaaactgggaagaaactggaatttctgtagatgtaagggagagggtgcattggtcagagtccagctgcagagagcagaatacattctagccagtttaaaggagaaagggattaaggggtattcagtgacttaccaaattactggggaggttgtttataggaccagctagcaaaggcatactacaaaacagcgacaccaaggcagccacagaatctcccataaacatgatgctactcacaaaatttgaaagctcctgcaaaagctgcgtggtctagaaataccccatccgagccacaatcaggaaggcagtagaaatgggatacacagacaacaacatgaccaggtgatatgccatgataaggaagtccctgctatttggcagcttcagaattttgacatatctgctacaatccacacttgtaaaatagatggctgaggcctgggtactgagactatactaattctgccgtagtggtgtttgcctccagaaataaca

SEQ ID NO: 188222 - DNA, 483 bp, Homo sapiens
atgttggtctaggctggtctcaaactcctgggctcaggcgatccacctgcctcagcctcccaaaatgctgggattacaggcgtgagccaccgcgcccagcctgtttgcatcattttaagggacacgaattatgtctttctggggttaattaagaggagctgccttgtgggactataaaaacgtagacatagaagaagcttctaagcatcagtttaatctcctcattggagaagatgagaaaacatggacagaggggtgaccttggcttgccccaaatcacacagcaaaggggttgaagagctgggatcagacatgtcctgggtctctttcccttaagggtcgtgtaactcagagacctttgtgcttcaacttctaaccaaaaggtgaccgaaaacaggggtctgttgtctcatttgatttcttgttggcctctaataatttccacccgatcttaccacatttggcaatcaagcttgggtacct

SEQ ID NO: 188223 - DNA, 302 bp, Homo sapiens
tcagccttagggcttcagagtgtctgaggtgaccaggggctgaagtgaacccccagcacagcacagctgctctataaaaacgtggccagactttttttttaaagcaagtccctgtgcttgttcctcctgactaggtaagactcctcaacttgcctccagccacatcttataggtgtggtcagattggcaacaggttcgtacctcagtggtacagagctcccagagaaaggggcaggctatcatcttccctggaaaatatgaggcaattagggactggagggacccccagcataccacagcag

SEQ ID NO: 188224 - DNA, 746 bp, Homo sapiens
tagatgagtgaacctcagcgtgactataccttaggatgtatggagagatcactgcattgggaaaggcgattggaaaaggagatgggggctagaactttttaagggttttagatgctatttaataaatcatatgtagttactgacaaattatgaggaaggtggcgattttcaacttgtaatttaggatgaatattttggtagaaagtgcattagagaagatgcagtagcaccatttataggtccattgcaataacccacctgtccatttaagtatatattcattagatatctactgtgtgctaggcccaattttagactatagaggcacaggaatgagcaaaataggaaaacaaagtttcctgactcgtggggctcatgctcttgtggagaagacagagagtgaatagcataaataaatgaactatgtttattttagtgataactgataaagagaaggaataaaacagggaaagggggtatggaggtgagggagaagggttaatttctgtacattttgcaatatatattcaaggtaattaaggaaggcctcttggagaaagaacttgagggaagacctgaaggaaggaggctttaggcagggtctctaaacatctggggtaagcctgggtcaagcagaggagacagatagggccaaggctctgatgctgggtgagcctgggatgctcacaagttgactagtgagttgggcagtgtgggcagaagagggaaaaggagagaaacaaagc

SEQ ID NO: 188225 - DNA, 334 bp, Homo sapiens
tgagttctgccactcagcaattttcctaaataaccacctttgtcacattgctcctacgctaaaaacagtatatcaagttgtaacttctatgttcaatgcccaggttttcctattagaacccatctcacttatctaatctcattttcctcattcttcccaaactctggtgttcctatgtacttttcttgtcatgctgttccccttagcatgctactcttcttacaactgcctgcctacacaagtttatgtctactttggggttttttttttttttggacacagattgaagcggtggaccaaccatgtgtggggttcctctaaattcaaccgtgaa

SEQ ID NO: 188226 - DNA, 352 bp, Homo sapiens
ggagacaaatggtgtaaaggtcattattgggtcaaatgagataattgggacggtagattacacaagtcaatgtatcaaatgctaaatttaccaaaattgaaaattttgctgtgattctgtaagagaatattactattcttgtgaaatatttagcagtatagggtcataatgtatgttccacataaaagaacaaaagacaagactagtaagacatactatgatacagaaagcatgggcttggcttttcttttactgacagtgcacaagcctattttctacgggtaaagcacattttgagttgaattaataaattccgctaagaaaatgcaaacatttaaaatacaattttagt

SEQ ID NO: 188227 - DNA, 294 bp, Homo sapiens
acttctatatgtgtgtgtatacacacacagatagattgaccaatagatagatagataggtttagaaagttctaaattaccacaacccttagaatttcaggcaattttttcttccaaagacataaatattattttttcataacacctgctgacagagggatagctagctggattagagttcacttccttctattgaggtggcatttctgaggatgtgttgcatctctgtgaatgagctcctttaattctcacaacattcctaatcgcatgcctaatcatctaagccaagaaagcc

SEQ ID NO: 188228 - DNA, 316 bp, Homo sapiens
gggtcactttcccagctttttccctaatgctggacatgaggttgtttctcacatgttggtttgtaggggcaaacagagccactgtgtgtgtttcttttctggctccagtcaacttccctgtcgaagaccgattcatctcccagcccaactcttcccgtgctctgcttccgccaacctgggcatttagagggaggctccttcctgccatctctgagcatcgttcggggctagtgggcttgaaggggctgcctgtgtactggggacggggactgatgaccatggcctctgggtgtgtggccatagagtctagcctgcg

SEQ ID NO: 188229 - DNA, 682 bp, Homo sapiens
aataaagatggtaatatatatgttctctatttatctgttaatgtggtaaatatgttaccttaataggtatctttaaatttacctgtcttacattcctggattaaatcttatttggtcatatttttaactattcagctggatttatcaagattttatttggaaaatttgtacctatatttataaataaggttctgtagttttttcctgatgtcttttttcattttttggtatcagagttattctgtccccatttttcctaaatataaagcttgatgttctactctttattgattttacattctctctgagtaatatctggtcttaccacttcaattatatgtctccttataccattttatcacctaatattctgtcagaggaccctatgtaggcagctatggttgatatttcaaatgttttcagaagacacagaagaaggagaaagaagaaatatgtggataaaaccagtgttttctattcataacttatgtaacatatatagctgactatgtttatggtgtctatcataaaaatgtataaagatagtcttttgatatattaagttgtatattctgagaaagtccttttttgtgtatgtgtatatttatgtatatatgtagtctgtatatgttttcaatacccatagcccttttcccactgaactggacggaaccttattgcc

SEQ ID NO: 188230 - DNA, 272 bp, Homo sapiens
atcaggatcttacactgctcactgagctcaccatagcctaatgaaaacaaccgaaaccaaatatttcaagttcagaatatgagaacaaagaagaactagtaaaaattatgtattatgaaatgttctcttctattagaatgaaatattataaccaatggcctttccacaaagtcagtacacataagcaaaaaactttagctgctagctatagatattaaactatacaaactcagtactgtttctgtttagacaatgaattgtgcccatcctgc

SEQ ID NO: 188231 - DNA, 195 bp, Homo sapiens
tctcttacagacagatggaggactgccagacagatgtaggtgtattttggtcacctgcccttagagaggcatttatgatggatttattcgtcctttctttcaacaagtaattgaagatctactactctgtgctgtgtaccattcaaattcaaccagaaataaataaaaccctgcccttcctttcattgcctctca

SEQ ID NO: 188232 - DNA, 367 bp, Homo sapiens
tcacatttctggccactgagaccctttctctgagcttgagacttaaatatcagctgtgtccttgacatcacacctgggccccagctgggtggcccctctgtccctggctcaggttagacccctgggccactctgactcccctcccttcctccctgtggctgcttgagcaccaggttgtattggttcatgtaccttgtacgacccttgccatcagagccctggccccagccaccatcgccccgcctgggtttccttctgcactttccactttgggtatccacccatttcccccagttctttgaccagtgcagccagcagggaattttatttcacgtctaatcagacagcatctctttagtgtctttct

SEQ ID NO: 188233 - DNA, 520 bp, Homo sapiens
agtacaatgaacatttattgctttgctcttcattcccaagctgcttcaccccaatcccatatccatagtaatttttgttatattcaggccttcagctgattgggagggcattacagagggcagatcacgttaaggacggcaaactcctttactcaatcgaccaatttaagtgttaatgtcatctcaaaatgcccttgcaggaagactctgaatgttttaccaaatatctgggcatcccatggcccagtcaagttgacaaaataaaattaaccatcacagactcctttgttgatcttgctcatgtaacttcacccaaattgtttttatccctgtgttctttgacctgggattgagaataacacatccaaccccctgctttgatgttagtgtgcaagatgacatcattttagggaattcattgtatctattagtaagattgttcaatagaaaagtagtacttttttcattatcagcttacaaagatgaaaataaaaaaataaaataaattttatctcaatga

SEQ ID NO: 188234 - DNA, 281 bp, Homo sapiens
aacatggagaaaatcatgctcatagcagatactttaaaaaatacagctcaactgtgtcttctacatgggccaacatcattatcttagcagttctgagaagaggatgaatattggtccagacagcttttattattatttggtgctccctctctggtcaaaatcctacaggttgtagctaggcccaagaatcaagtttcatgcagctttgcagacaaatttgactctgacagccaatcctcaaatcctagtgcataccaagctctggctttcacggtgggctg

SEQ ID NO: 188235 - DNA, 432 bp, Homo sapiens
cattctgtgtcacagggcaaaccaccaaatgatgctggctcataggccatctactttttctgataacactaccttaactccttcgttttctaaaattcaatgaatatttattagaaatcagtaagtattcactgaaaattataaaatcacatgccatatgaaataacatatatctatgcctttaaagatggcaggtcacattggaaagcatggccatttcctcaaatactaatttttaagttatatatttttaaattttgaattgacacataataattatacatatttacagggtacacggtgagttttgatacatacatagtgatcaaatcacaataatgagattattcactacctcaaatatttaccatttgcttgtgttgggaacattcaaaatcttctctcctagctatttgaaaatccgtagtaaat

SEQ ID NO: 188236 - DNA, 111 bp, Homo sapiens
tgtccaactcatggctcttgccccaacccttactccaatgcttgggccacatttgggtctctctaaatacttatggagtatttagagagctattttgagagctacttagag

SEQ ID NO: 188237 - DNA, 2489 bp, Homo sapiens
gtgggcaggcgaggagcgggaagaccatctctgcaagtgcagcatagcctcggcctaggacagcgggagtgcgtggccaaagctgtgagcagaggcacaggtggtggcagacagtagaggcgccccatggggaacatactgacctgtcgtgtgcaccctagcgtcagcctcgagtttgaccagcagcaggggtcggtgtgtccctctgaatctgagatctatgaggcaggagctggggacaggatggcaggagcgcccatggctgctgctgtacagcctgctgaggtgactgttgaagttggtgaggacctccacatgcaccacgttcgtgaccgggagatgcctgaagctttggagtttaacctttctgccaatccagaggcaagcacaatattccagaggaactctcaaacagatgctttggagtttaacccttctgccaatccagaggcaagcacaatattccagaggaactctcaaacagatgttgtagaaataagaagaagcaactgtacaaaccatgtatctactgtgcgtttcagtcaacaatacagcttgtgttcgacaatattccttgatgacagcacagccatccagcattatcttacaatgacaataatatctgtgaccttggagatacctcatcatatcacacaaagagatgcagatagatctttgagcatacctgatgaacagttacactcatttgcagtttccaccgtgcacattatgaagaaaagaaatggaggtgggagtttaaataactattcctcctccattccatcgactcccagcaccagccaggaggaccctcagttcagtgttcctcccactgccaacacacccacccccgtttgcaagcggtccatgcgctggtccaacctgtttacatctgagaaagggagtgacccagacaaagagaggaaagccccggagaatcatgctgacaccatcgggagcggcagagccatccccattaaacagggcatgctcttaaagcgaagtgggaaatggctgaagacatggaaaaagaaatacgtcaccctgtgttccaatggcgtgctcacctattattcaagcttaggtgattatatgaagaatattcataaaaaagagattgaccttcagacatctaccatcaaagtcccaggaaagtggccatccctagccacatcggcctgcacacccatctccagctctaaaagcaatggcctatccaaggacatggacaccgggctgggtgactccatatgcttcagccccagtatctccagcaccaccagccccaagctcaacccgcccccctctcctcatgctaataaaaagaaacacctaaagaagaaaagcaccaacaactttatgattgtgtctgccactggccaaacgtggcactttgaagccacgacgtatgaggagcgggatgcctgggtccaagccatccagagccagatcctggccagcctgcagtcatgcgagagcagtaaaagcaagtcccagctgaccagccagagcaaggccatggccctgcagtcgatccaaaacatgcgtgggaacgcccactgtgtggactgtgagacccagaatcctaagtgggccagtttgaacttgggagtcctcatgtgtattgaatgctcaggtatccaccgcagtcttggcacccgcctttcccgtgtgcgatctctggagctggatgactggccagttgagctcaggaaggttatgtcatctattggcaatgacctagccaacagcatctgggaagggagcagccaggggcagacaaaaccctcagaaaagtccacgagggaagagaaggaacggtggatccgttccaaatatgaggagaagctctttctggccccactaccctgcactgagctgtccctgggccagcagctgctgcgggccaccgctgatgaggacctgcagacagccatcctgctgctggcacatggctcccgtgaggaggtgaacgagacctgtggggagggagacggctgcacggcgctccatctggcctgccgcaaggggaatgtggtcctggcgcagctcctgatctggtacggggtggacgtcatggcccgagatgcccacgggaacacagcgctgacctacgcccggcaggcctccagccaggagtgcatcaacgtgcttctgcagtacggctgccccgacgagtgcgtgtagtatctgttttatttgactgcagtctccttggtgcaaaaacaaaatgggaaaaataaggataactcagaatttcaaaaggaaatcacaaattcagctaataatagcattttcagtacttttcgtaaactaagtaaatacacaaaatgttgatttttctgaccataagacgtattttatgtccttttgccaaggtggatttgttagtctcaggccctcctggccacattgcccaagtcacacaggcttctgtattatgtatttagataaaatgtgtgaaaatatatttgaaataaagttcataa

SEQ ID NO: 188238 - DNA, 344 bp, Homo sapiens
atcaaagtagagatagtgaaatagcctaaatgcagcagtcgaataaacgagttgataaatttttatcaatgattacatctttttttcttttcttcctctatgcatatagctttggagtttaacccttctgccaatccagaggcaagcacaatattccagaggaactctcaaacagatgttgtagaaataagaagaagcaactgtacaaaccatgtaagtaaacactcaaatagttaagaaattgatagtttgacataaaaggatgtctctcttgatttctttaaattacaatgtggacctggtggtggtagcatggacctctttttgtggattttctaaatctc

SEQ ID NO: 188239 - DNA, 2420 bp, Homo sapiens
gtgggcaggcgaggagcgggaagaccatctctgcaagtgcagcatagcctcggcctaggacagcgggagtgcgtggccaaagctgtgagcagaggcacaggtggtggcagacagtagaggcgccccatggggaacatactgacctgtcgtgtgcaccctagcgtcagcctcgagtttgaccagcagcaggggtcggtgtgtccctctgaatctgagatctatgaggcaggagctggggacaggatggcaggagcgcccatggctgctgctgtacagcctgctgaggtgactgttgaagttggtgaggacctccacatgcaccacgttcgtgaccgggagatgcctgaagctttggagtttaacccttctgccaatccagaggcaagcacaatattccagaggaactctcaaacagatgttgtagaaataagaagaagcaactgtacaaaccatgtatctactgtgcgtttcagtcaacaatacagcttgtgttcgacaatattccttgatgacagcacagccatccagcattatcttacaatgacaataatatctgtgaccttggagatacctcatcatatcacacaaagagatgcagatagatctttgagcatacctgatgaacagttacactcatttgcagtttccaccgtgcacattatgaagaaaagaaatggaggtgggagtttaaataactattcctcctccattccatcgactcccagcaccagccaggaggaccctcagttcagtgttcctcccactgccaacacacccacccccgtttgcaagcggtccatgcgctggtccaacctgtttacatctgagaaagggagtgacccagacaaagagaggaaagccccggagaatcatgctgacaccatcgggagcggcagagccatccccattaaacagggcatgctcttaaagcgaagtgggaaatggctgaagacatggaaaaagaaatacgtcaccctgtgttccaatggcgtgctcacctattattcaagcttaggtgattatatgaagaatattcataaaaaagagattgaccttcagacatctaccatcaaagtcccaggaaagtggccatccctagccacatcggcctgcacacccatctccagctctaaaagcaatggcctatccaaggacatggacaccgggctgggtgactccatatgcttcagccccagtatctccagcaccaccagccccaagctcaacccgcccccctctcctcatgctaataaaaagaaacacctaaagaagaaaagcaccaacaactttatgattgtgtctgccactggccaaacgtggcactttgaagccacgacgtatgaggagcgggatgcctgggtccaagccatccagagccagatcctggccagcctgcagtcatgcgagagcagtaaaagcaagtcccagctgaccagccagagcaaggccatggccctgcagtcgatccaaaacatgcgtgggaacgcccactgtgtggactgtgagacccagaatcctaagtgggccagtttgaacttgggagtcctcatgtgtattgaatgctcaggtatccaccgcagtcttggcacccgcctttcccgtgtgcgatctctggagctggatgactggccagttgagctcaggaaggttatgtcatctattggcaatgacctagccaacagcatctgggaagggagcagccaggggcagacaaaaccctcagaaaagtccacgagggaagagaaggaacggtggatccgttccaaatatgaggagaagctctttctggccccactaccctgcactgagctgtccctgggccagcagctgctgcgggccaccgctgatgaggacctgcagacagccatcctgctgctggcacatggctcccgtgaggaggtgaacgagacctgtggggagggagacggctgcacggcgctccatctggcctgccgcaaggggaatgtggtcctggcgcagctcctgatctggtacggggtggacgtcatggcccgagatgcccacgggaacacagcgctgacctacgcccggcaggcctccagccaggagtgcatcaacgtgcttctgcagtacggctgccccgacgagtgcgtgtagtatctgttttatttgactgcagtctccttggtgcaaaaacaaaatgggaaaaataaggataactcagaatttcaaaaggaaatcacaaattcagctaataatagcattttcagtacttttcgtaaactaagtaaatacacaaaatgttgatttttctgaccataagacgtattttatgtccttttgccaaggtggatttgttagtctcaggccctcctggccacattgcccaagtcacacaggcttctgtattatgtatttagataaaatgtgtgaaaatatatttgaaataaagttcataa

SEQ ID NO: 188240 - DNA, 405 bp, Homo sapiens
taattccctccattcgtgtttcatccatttcgttttgaatgctttcccttggaggacaattccatagtctaatagatacagatacttgagagcttctttaagacattcagtctatttataaaaaaaaaaaatgctcctccagttgctgtataattgttcttccttgtattatcctaaaggaagtggtggggggcggaatgtatgcaatgggaaatcgagttcaacaacatttctctcttgggtgctacagatttcatctttcataaacttatgctttgctcacagaaaatgattaccaagggaagggaatgaattcactgcttttccagagctgaacgagttctacctataacaggtgctcacagagaataacacagtcccaagtcgaaatagtccctaaatgta

SEQ ID NO: 188241 - DNA, 297 bp, Homo sapiens
atagcgacaccgtaccacgggggagcccgagaaacaacgggaagagggcaaagtgaagcagccacaggaagaggactggacgcccccagacccgggcctcctgagctacattgacaagctgtgttcccagaaagacttcgtcaccaaggtgggctggcctggagtgctggggtctgctggattccaggggctggcactcccaggtccttggaattaagctctgttctttagctactcagcagtgtgtgtatttccatggatttgagtgtctgtgtatgtgattgtgtgtgtctgtgt

SEQ ID NO: 188242 - DNA, 434 bp, Homo sapiens
tagccgggactacaggaatgcaccaccacgcacagctacttttttattttttgtagagatgggggtcttgctgtgttgcccaggctggtctagaactcctggcctcaagcagtcatcccgctttgacctcccaaagtgctggagttacctttgctagccaccatgcttttggctggggtgttttagaagcagaaatcagcatgttactctcctgcttaagacttgcagtagctgcccatcagccttcctataaagtccaagctcctcaccatgacctgaaagggtccagtgtgaactacccacctttggaacatatctagttccttccatgctggcaagattgacttcttttccaggctcatacctaccaagcttgctcctgcctcagggtctttgtacaagttcctctgcctagaacatgctttctcaatttt

SEQ ID NO: 188243 - DNA, 502 bp, Homo sapiens
ctgccaatttgcttggtgtagcagagtctttctgtaggttttttcaaatgaaaacattgcaagaatatcaaagagagcagtgtttgcgttagtgattataaactgcagcatggtgctgacattgataactgaaagtcaactaatgagaatttgagacttctgaagtacacttagttgctagtgtctcccttttggtgtcactggaaagtttagaaagcatggttttgtttttgctcaggtttctctttctgtgatgcagagactctcagctgttcctcctctatgtctacattatgtctgaaggaaagaatataacaaaacttgaaatactgctgtttttctacaatgtttgtaaatatttatcttgctgcttttctaggttaggtctacctggccaggtagatctaacagcaaaatttgaatttgagtggagcaacagaaaacataaaacaatacaccatcctcagaaaacccttaatcacactccatttttgtgcactaa

SEQ ID NO: 188244 - DNA, 310 bp, Homo sapiens
aaaagtaccctggagttagtagactgttttgttgagagttcacttacattacttaaataatggaaatgcttttgaaggattgacaaagatgtaaagaaggcagtaaccatagtttttgtaaaatagctacatgattaagagctcaagagagaacaagaacctcatgatagcaatgtctagtagacaccagaatgaagtttagcacttggaagcttgacggggatccatggcagagtttgtgaatcactgttctactagtctactgctgagtaactttactcagtttgcctcttttctccatatgtgattt

SEQ ID NO: 188245 - DNA, 1026 bp, Homo sapiens
ccaaagatatgatgagaaaagacaggcaggctcatgtttgtgtagtctaatgggagctccttcaaggagcctggaaacacaggcctctccctccgtgcccagtgaggaagaactttacctgccaggatgtgagcgcggagggcagcacacacaactccagcaccagggtttgctcaggataactgtgccaggactgagcctgggcaaggtgccaccgaactgctcccttctctcacagagacatcctgctcctcactgccaccatctcagaacaacccccgttccacctcccaggctcctctggctggctctggccatgttcttgcaggatccacatagacacacacaggggcctggtgaggagctcagtccggcaaatgatcagcctcatgaggtcggctcagatctgatcctgggacgcccaagtgctccaaggccctggtggctccccgagcccatggcaacagcacttacctgggaactccgggccccttctctgcaagacttcagatgtgtccaccacctgtgtaagtcccctctctcaggcccctcagggctgctgcctcctcggcctcccagcctggctcaggggcaaccactcgctggcaggtaaagctgtgccctgagctctccactggcctctgatcagaccaggtggacacccctcgggcctgagccctgggccatggccaatatcatcggatctgacgagtgattctctgagaggaagatggcctgattccacccctcccagctcctctgtgctctgtccacgtaagcctagatttccttgtgtgtaacatggtccacaactaacgtcctctccatgcctgtcttgagagttgtgggctccatatgaggtgacaggaggaacaacacttcccaaacggtgagaaacagcctttgggagctgggtggggttttggcgtcaggtgagacgaggctgactcggatgcccccttccggcatccacacggaagccacctcactgagtctgactcggacacacttactgcctggtaaata

SEQ ID NO: 188246 - DNA, 404 bp, Homo sapiens
ttatgagagctgaaacaagaaagcctatgttggcctcagctgggaatgtgtgcattgggcaattcaaatttttcattgcgctatgcgtgtctgtgaatgaccatacaaatggtgatacaaatactgattttggggttataaataatttttttttttttttttgaaacagaacctcactcttgtgcccaggctggctggagtgcaggggcataatctcggctcaccgtgcagtctcagcctccgtgggttcaggctatctccgtgcctcagcctcctcagtagcggggactacaggcgcccatcaccacgccgggctaatttttccgtgcattttagaaaagagtgggtttcaccatgttaagccaggatgtgtctcgatctccgtgacctcgtgatccgccgtg

SEQ ID NO: 188247 - DNA, 196 bp, Homo sapiens
ttatagatttaacccttaggagggaatctctcctacattttagcatcggagacctagattaaaggctgaggagagaagattaaatgtggccaagagagagaagcttttctttctcattccgtctggtacagccaaaggggtaaggaagacgcgggcttctcttacgatagattgtgaggctgcagtttctatggtg

SEQ ID NO: 188248 - DNA, 494 bp, Homo sapiens
gccggtgctgacataatgacatagctgtggagcccatggaaagagagaacctgcatctgctccagaggcagcctgggaagactctcattctcctgcaaggtcgtcaagcaaaggggaagttaggagcttggtgagaggccagggggctgctatgaaaaggaataagcatttgctaagtaatcccgaagagacaagttgaaaggaacggggcttagtagcctggataacagctattaagtatacagaagggactgggctgggcaagttttgtcctgggtggtgaggacgcaggtatcatgaaacacaggacccacagagatcatggcttcagaggcaaagcactatgtggtttctaagcactctgtgtaggtttctaaagagatttggtctgtcaaactttggaatgtgtgtccaaaggaaattacaagtgaccttttcctacctccctcccccaaatcaaggatgatcagagataattcagtttagtgtgataa

SEQ ID NO: 188249 - DNA, 293 bp, Homo sapiens
caggcttgtgctcaatgtttactttctcagttgaggtcagtgttattgaactgagatagtatctaattttaactgtgcttgaaaggttatactcttcaaattatatttaaatttcttgattgttttcataagacaatgatacttaatatttaatttaattagtttatattttttgaggcagtcttactctgtcacccaggctagagtgcagtagtgtgaccttggctcattgcagcctctgcctcttgggttcaagagattctcccatcagcatagctaggattacaggtgca

SEQ ID NO: 188250 - DNA, 585 bp, Homo sapiens
actttgctttgttttcattacgcatgatttgttgccctggaaatacgagagaatctcagacagagtaagtttccttcctctgcccatctgctgggggaatctacagtgctatgaggccaaccttgaaaactttgtgtgttacagcctgaatttactttacatacagtcatttcaggggcatgtgtgatcactctgtgcttcataagattaatgagtcaggcaggatggtacttggagaattcccgtgtggtgagtgagttcacacagcagtgacttgggatccagtggactctctgtttcaaaatctctactcatagaaacaatttctttagttcatccacacctcttcttgtaacacatacaagtcctaatttcatgacagagttgaggcaccacatctctgtgccaatgtagtaactatttccctaaagtctttcaaatgaatgtatgagtgtcactttatcatgctgactaggattgtagagtatgtcaacctgattctgtaaaattggaaaattatccagcttttgaacacaggatgagtttcttaagacaatgtggaggcatgtgattagaagaattatt

SEQ ID NO: 188251 - DNA, 432 bp, Homo sapiens
  misc_feature (74)..(75): n is a, c, g, or t
acctcctaccccacgggggaatctggaaacatcaaagctggattagaacatctgccaccagctgaacaggccgnngccagactacagctggttcttgaagctgctgctgttcttctgatctccatcatccaagtgaaacagccatggagggattcttttctgaaaggagacttcactttggaaggggcaacatggcctggtgcggtggcttacacctgtaatcccagcactttgggaggccgagacaagcggatcacctgaggtcaggagttgacgaccagcctggccaacatggggaaaccccatctctactgaaaatacaaaaattagctgggcatggtggtgcatgcctgtaatcccagctactcgagaggctgaggcaggagaatcgcttgaacccaggaagcagaggttgcagtgagccaagatctt

SEQ ID NO: 188252 - DNA, 126 bp, Homo sapiens
tataaacaaacaaaaaagatctctgggaataaggctcaagtgccctgtatttcaaacaagtttcccagatgattattaggtatacttaacgcaagagcgtgaccctaaacccagtcttgaaactgt

SEQ ID NO: 188253 - DNA, 382 bp, Homo sapiens
aatttctggatttagcaaattaagtgaaatatataaattacatctgtcattaatgtagcagatcaaacttaaaaagcatacatggtagattggtgcagccattatggaaaatagtatggagggtcctaaagaaattaaaactaggattacctgtaacccaacaacctttcttctgggtgtatacacaaaggaaatgaaatcaccacctctaatagatgcattcctcatgttcactgcagcattattcattatggccaaagtatggaaacaaccttggtatccctcaactatcaaatggattaagaaactatggtgtataataaaaaatggaatattattcagccttaaaaaaaaaagaaggggatcttgtcatttgccacaa

SEQ ID NO: 188254 - DNA, 159 bp, Homo sapiens
cacttctttgtcctgcattgtaattctggggccaggactcttcatttcccccttgctggttggcttcctgctagaatttgcaataggagctgctagaaagagatggaaattcaggaggagcgaagtagagatgtcctctgcactgttaccatcacctgg

SEQ ID NO: 188255 - DNA, 686 bp, Homo sapiens
ctgaagggagaagggcatcgggtcaggttattgaagacctagatatggatttatgcattcatttatgtaacaaacatttattgagaacctagtgtacttcaggtacttctccaggcacttggaatgcagcaatgaacaaaaaagacaaataaataatcctgccttcagccacatatcctggtgaaagaagaaagacaataaacaaactaataaaataataaaatatgttaggaggtgttatgaagaaaagcaaaacaggaaatgaggaaaggaaatgctaagtgagtggtagttaggattcttagtaggaatgtcactggaggtcaagttaacttgaaatcattcaccattgatgtttacttttgattcagccagatgagactccactcaaattgcactatcattcaacatcagtttctctatctaattcacgaggactcaatctgtgtttttcaagcctggctaaatcaagataatgccaacagagtggggtagtgccttagagtacttgaaaggtattatttcacctgatccccaaacctgtgaggaaggtagactagatattgttttcatttcgacaactggtgtcactgaaccacaggggtttaagttaataactcaaacttagtaagtgctaatactctattcagtggtaggatggtagtggtgcttgaggatgtatttcg

SEQ ID NO: 188256 - DNA, 536 bp, Homo sapiens
tatgctgggggaaagcaaggctatgtttctagttcacatcttgatgatagtatactctcaagtatcactttttgaagtataaatgtgccaggtaatttatttctttagtacaagtgtaaatgaaagggaatcataggtgtaatatttcggacttgagtaagacatttggttttgtccttggtgaggcccatgtctacgaacagaaaaattcaaagcattgataacccaactttacagtttatgcaatcttatgttggagtgtagaactaaggtaatagaatagttacatattaatcccaagacaagactatatagtgtcttaaggttttcctggcattcacaaatatttattaaatgtctgctctatgtaaggtagtgtacagttgagatacataaagtataagatgcaatccttcaaagtgctaatttttaacttgaaagctctgatgccggaaacactaaataacactatttggtacaggagccatatagaacatatcaatgtacaagaactgtcactgtacatgatcaatggt

SEQ ID NO: 188257 - DNA, 621 bp, Homo sapiens
gtttttcaacttgaactatttcataaaacatgaaatgttgcacttctgacattcatccaaagtagcaagctgcaatgtgcttttaaaaaattccacagtgtgttcgttttgatggggccaaccagaaaaactagggaaagagaagttcagaaagttagggagtcataagaatgcttggaatttctaacagattttactaaacattttctgtatcatgacatgttccagaaggccataaaagttagtttatacgaatataaactactttttgccttgctgataactgcaaataaataattcagatgaccacccaccaaaacaccaagacatttgggggtttatgtgtttcctacagaatattttccttataaatttcatggtcaaggagcacaagaatgaagtagtacctcattttattccatttttaaattctgcagcacctgtttcaatatttttgtatatcccaataatatcatttacagaataagataatgactaacctccttccttgatttgactttaaaggaagggatagaaggcattcttttatttacattttagtacagcaacacactgatttctccagtcaaaattacttaatctgtcacgttgctttcatgg

SEQ ID NO: 188258 - DNA, 374 bp, Homo sapiens
aaattaaaagtaataaactaataaaataaaagtgagtaaaagaagggggagaagttccaggagggctcctccagctacagcagccaaagcatattcaatccggacaagtttatcagacgggctgaatgtagtcagcgaaaagccgtaccgcgctccgccatctttacccgaagagccaaagcacaagttcagggaggtgtccactgtctctcaaatcaaccaccagactttagaggggcacaagattgttaacgcgcaaaggtggttgaggaattggaaaggttgactggggctgcaccttggaatttattttgtcttggataatatgtaacattaacagagagcagaagctgattaaagtatcttggtgccaa

SEQ ID NO: 188259 - DNA, 350 bp, Homo sapiens
agaacgacgtgcgtaagcgccaaacggccgaaactcaagggctcctccagctacagcagccaaagcatattcaatccggacaagtttatcagacgggctgaatgtagtcagcgaaaagccgtaccgcgctccgccatctttacccgaagagccaaagcacaagttcagggaggtgtccactgtctctcaaatcaaccaccagactttagaggggcacaagattgttaacgcgcaaaggtggttgaggaattggaaaggttgactggggctgcaccttggaatttattttgtcttggataatatgtaacattaacagagagcagaagctgattaaagtatcttggtgccaa

SEQ ID NO: 188260 - DNA, 519 bp, Homo sapiens
tctaagggagcttacattccagtggggaagatgaatattaaaacaaaaccaacctcaaaacacaaaactgtttttgaaaggaagactctaatattcaattagtgcctttctctcttgagaagtagattcttgcatgaattaatttatttcttctcagttttatttgaagatgttatacttttaaagaaagatttgaaaagaaaaagttcacccattattccattggcatcattcccttaatactacagttaatctgtttttcaatgttattttgtggtttccccgcccaggagcttctttgcaactttggttttcttctacttctactcaggttcagggaggtgtccactgtctctcaaatcaaccaccagactttagaggggcacaagattgttaacgcgcaaaggtggttgaggaattggaaaggttgactggggctgcaccttggaatttattttgtcttggataatatgtaacattaacagagagcagaagctgattaaagtatcttggtgccaa

SEQ ID NO: 188261 - DNA, 115 bp, Homo sapiens
cctccttaaaaagaataaatcccctccttcctctcttctcttacaaaatctcacactcttcaagatttctatgcctcaaatcttagggaattaaagtgaagagcgggctgatctt

SEQ ID NO: 188262 - DNA, 281 bp, Homo sapiens
tcaggggacactgtttggctttcacccggtcacaggtgtactaacacacatgactaacacaggatttttgtcttatgcacacagaactgcatgggagaaacaaaaccaccagcgagcagagaggccgaggcttggctctgctgtgagagcgtcaaggtccctgcagccctgagctgctgcagaacccacaggaaccaacttccagagcttgtttctggggtcctggtgcagggaccccacccactgtgctcagatggagcttgaagctctcagacctcagg

SEQ ID NO: 188263 - DNA, 409 bp, Homo sapiens
accaaaaaaacccagcagcactgaccacattgacacccaaattccccgactcccacggcaaccccactggggctgtgatattatccttgtgttttaatttaattttttagttttgtagaggtgggggtcttgctatgttgcccaggcaggtctcgaactcctgggctcaagcgatcctccctcctaggcctcccaaagtgcggggattacaggtgtaacccactgagcctggtcttttttttttttttttttttttgagacagtcacccaggctggagtgcagtggtatgacctcagctcactgcaacctccacctcctgggttcaagcaattctgcctcagcctcccgagtagctgggattacaagtgcacgccgccatgcctggctaacttttgtatttttagtaga

SEQ ID NO: 188264 - DNA, 174 bp, Homo sapiens
agatgtatgcaattacaattattggggttccctcagcattatgtaatgactcatccttcaatcatcacatagcacgaaatttacatcagtgtagttttctgttttcagaacctagaattccacaataagatttttttctcaggtgacagtaatatccaaggtacttcaacagaa

SEQ ID NO: 188265 - DNA, 591 bp, Homo sapiens
aagaaattatcaagtttactagtttgcaaattttagaaagttattggctaacactggtcttgagttatggtctggtgaccccgctctccatgaaaataatattagcttccacttactaaggcaggccctaaaatgcaatgcatcctgaatccttcactcaatcctatgaggcagattttggcaatttccctttttattcacgaagaaatcaagctcagattagttaaaaataaatctccccccaaatcgcatcactgtgtagtggcggaggtgggatgtaagccagttctgattggtttcaaagccccattctctttcccgaaaattctctctgggtttcttctttcatgcgcagtgcatatgtcttcacttaatttgtttccttatcttaagtctgcaataattccactgacttcctcaactctcctcttctctgcctcactcatttatctctgcttgaattcaaacgctgagctctccataaagctaaggagttctaggagtagatgataatatgtctcacctttaccaacaaacttaaatttcctacattgcatttatttttctgtagcaaccaaagctcagggaaga

SEQ ID NO: 188266 - DNA, 449 bp, Homo sapiens
cactagatcaaatctctaaataggaatcatttcccatggaaacctccaggaaggtacccatatgactgagaagggcacaggaagcaaagaaatgcttttaaatgtagccatgcacaaatcatgtgtctcctatacattccgagttgaaaagtaatttccaattttaaaaaaaatacacagaggtatgaattcatacatactcacacgtatatgtacacataaacacacacatatgtatgcatacgcacatatatgagatagaaatttctcctttaagtgccactctgtaggacctaagatatttctggattttgtttgtttatttttgttttacatctgtgagttggtatcaacttacctagcaaagtaaggggagaggcacagaaaaaaggcgcctttgcactttctggaaactagccacctttgactcaccttctgcctccagctcc

SEQ ID NO: 188267 - DNA, 364 bp, Homo sapiens
caagtttcccaaagacactgcgcaggcatcacttcctctaggaaaccctccctgacgaccagtgtcaactaagcgtccgtctccagtagcacagcaccctaggcttacttcaatttcttttgtggaatcaagatccccacagatgttcaacaggactcccatcacaaccgtatctttcctaggattttagatcagtgcatttatttctttcacctgcctaaaatgtctacaaaatattcaaatgcttacatccaaatactcaaatgtctgccgggcacagtggctcatgcctgtaatcctagcactttgggaggccaaggcaggtggttcacctgaggtcaggagttcaacaccagcctgacca

SEQ ID NO: 188268 - DNA, 553 bp, Homo sapiens
caccagctaatttttgtatttttagtagagacgaggttttgccatgttggccaggctggtctcgaactcctgacttcaagtgatccacctacctcagcctcccaaagtgctgggattacaagcgtgagccaccgcacccggccaactgtactttttctatgtttagatacacaaacaccattgcattacagttgcctacagtatttagtacagtaacatgctatacaagtttgtagccttggagaaataggccgtaccatatagcctaggtctgtagtaggctacatcatctaggtttgtgtaagtacactctatgacattcacacaacaaaatcgcctaacgattctcagaacatgcccctgtcattaagcaacgcatgactgtgttgatgcgatagttggacttgatggcttccctcctgccccgatagcccatgacttggtgatttctttctcctgactagatacctccatctgcgtatcttaccagcaacttaaactttgcagctctgaaatgaaactgacctgcttctctacccagctgtgccacctg

SEQ ID NO: 188269 - DNA, 502 bp, Homo sapiens
tcagccggtccttcaaacattcatcgctggttgggagcagaataagtattatgtttcttgttttcaagctctgattgttttcactatgtcacattgtttttcacttaccttaacccattgaccccgatctggcttcacttacagtgagacatagctgcccaaacttggagtgcagcttatgaccatataccaaaataatcaatgttttcaacactttgggtctaagatacagggatactgattaacctcaccaaacagtccaactttgtcattatttaatttctccttttcctgcttagagcttcccaggtgccactgtttaagatcaactggagggagtgtgaagatggggacctgaaatatggcctgtccctcacagaccgagacctcagactctgtgatgctgtttagtgctttgtgcttggaaataggattcttaggggttatgggtttaggtggtagttgcagtgtctggctgtgtggcctttcccctcttctgcca

SEQ ID NO: 188270 - DNA, 423 bp, Homo sapiens
ggccaccagaatgctaatagttgtccaaagtcaaacagctagagagtaatggaagcaggattcccaccctttcatagtgattccagagctcataatctcactgagcttgtgctgtgtggcctcactataaattataaaaacagccaccttaattaatgatggactatgcacctgaggacaggtttcacataatagggtccatgtatttattttgattagcacttatatggaaccttatccaaacactctggagtttccttagcaggacatgtgcagagaagctaaaggaaggctgtttgcttgtcctgttattccctggaattctctgctcctcatgttgttccctagcatctaatttccttgtgactgccttcccacaatcattgaatcaacagccatatttatccctttcatttaaataac

SEQ ID NO: 188271 - DNA, 295 bp, Homo sapiens
acctgcccccgtatgtcaggcatgtatctcatcgggtagactgaggctgacacacacaacagtgtaaatgactaatgacacatggagcactccatctataactatggaagaaatgataacacagtggcttgtaccctgaacatccttttggaaagactaaacaaagagggttattttgtgacttcaccatatacatggcctgaatggatggtaagactgttgaatggaaggttgggtagattagagtgtgctaccaaaggcaaaagggctctggccaggggcccaatactactgt

SEQ ID NO: 188272 - DNA, 382 bp, Homo sapiens
aatatgaacttgtgagagaattgggtttgaggggattttggatagagcaaaagaggattgtttgtttttaattagtatagcagttgtaacctttttcctctctcagattttccccaagaacgctgtcccgtggtgctcgcaccacttttataccctgaaaaacgggacattctaatggacaggatcctgcctgattccggaggggtagctaaaaccatgatggagagctctttggctgatttcatgcaagaagtaggctatggcttttgtgcaaggttggtagtaaaatgtgttaagcttctgattattcttgtgccaaacatgatgtaattctttaaaaaaagtctctaaaattccttaaagttatcatcttttcttctca

SEQ ID NO: 188273 - DNA, 465 bp, Homo sapiens
tgccccaagctggagggagctttcactttgttaaaacattcactttcagaggtgctggagagatagatcgtcaacctcgagtacagctctgaattggtgctggggttttctctttttgttcctgtctttgaatctcaaagtaaaacttttgggagcggctgcatctcttcagcaaactgcgtaactcggtgctccggcttaggaaatgggatctttctcttcgcagagaagtcacccgataaagactttcaggaccagaggtgccttccaaaaagggcacagttgagcccagatggtttgaaattgacgctctggtctctggggggtcctccctgaaagcgtggctttcagaaaacccgcttgtattttctatacgttctccactaaggtccagagtttccctaaccctgtccttggctctacttcttaattctcccacagcctggatcccttcttctctgctgg

SEQ ID NO: 188274 - DNA, 324 bp, Homo sapiens
tgagttcttgggagatctagtcatttaaaagtgtatagcacctggccctctctcgcttgctcctgcttttcactatgtgatgtgccttctccccctttgcctgctgtcatgattgggagcttcctgaaacctccccagaagcagatgccactatacttcctgtacagcctgcagaaccataagccacttaaacctcttttcttataaattacccagtctcaagtatttctttaaaacagtgcaagagcagactaataaaatagcgttttcttggtatgtgcagtaagaatgagttgtcactaagatggggaagactgttacagg

SEQ ID NO: 188275 - DNA, 338 bp, Homo sapiens
attgttaaaagcaggaaagaaaaggaggtgagtaactgggtagtggggaaaatgtatgaccttttatgatctcaattctgagtgtccatgaactttacttttgtactcagggagcagaagaaatcagaattgaatttgtcattggagcactctgtgaaatgcaaatagaaagcaaaaaaggcaatgacagagataaaagcataacaagccacattcactgcaattaaggcagaaggtgtttgcaccactttcctggatgctgagaaaatacattgtgatgaaggaagtgcccctacccctgcactcagcctcatttgacaaagacagagaagagcacg

SEQ ID NO: 188276 - DNA, 296 bp, Homo sapiens
gtgaaactccgtctcagaaaaaataaataaaaataaaaaataagatactttgataaaatagaacaatgagaaccagaacaggctctttgaaattacaagtaagattgttcaatgttatagatacaatgtttagtgagaaacagaatgcttgttgcctggtgctgcaaagaaatagcactcaaaacataaatttaattctctcagcaaggccgtttttactttctgcagaaagggtgctcatcacagatggaacaatggcaagagcacacctgaacaaaggagggaagcaattttta

SEQ ID NO: 188277 - DNA, 336 bp, Homo sapiens
cggctgtgaaaggttgatttcttgttaagtttaagaaatttagtgtgaaaagagccagatttaattgggcatgaggagtaatagcatctccctttgatttagtatcctgtttacgaagttgatctttgagtgttttattggctcgttcaaccaaggcctgttctccagagttatagggaatgcccgttgtgtgagtaattgcccatgtctgaggaaactttttaaaagcagcactagtgtaggcggggccgttatcagtttttagtttctcagaacagcccataaccgagaaacaggaaggcacatgtcgtttaccatgagctgtactttcgcccg

SEQ ID NO: 188278 - DNA, 162 bp, Homo sapiens
tcacaccactgcactccagcctgggtgacagagcaagaccctgtttcaaaaaagaaaaggagaaaaaatgagtagtctaattaagttaatcagtactagaaaatgaagtacttttatactttcaattttgaaacagggtcttgctctgtcacccaggctgga

SEQ ID NO: 188279 - DNA, 351 bp, Homo sapiens
taattcagcactcttcaccaattattcctaatctaggcatcaaagcaggcctgactgcctgcttgaatttcagcccctagaaccctccacatcattgggactgttagcctggacaaaaccaggacttcacataatcatcgaactgggattaggccaagcatatagggaggggcaaagtgacatgtaattgagctcctgaaagatcatgcatgcatgggaaagtcttcagatgtttctagaaataggtcatctgaaatgcatgtgacttggcagtttcgttgacgtaaaagatttcttctaaaaaaaagatctctcctaattaaatttactgatgtggtgtcacagagaaga

SEQ ID NO: 188280 - DNA, 303 bp, Homo sapiens
aatatgttctctgttctcctccagatcctacattgtacttaatcatgttttgttttcaagagagcaaaaggatgccaaattccaagtgagagaacagattgttagttatcaacctaagtacagactgagccactaacccaggtgaataaagagaaaaaaccaggactctcgggaactgatctgtttgtctgctgatcttgtatgctttaaaattactcagtgcatagccagctcttaaggcaaaggacagtcaataatgaaatcttagctagctattaatactggtgtccagaaggttgtata

SEQ ID NO: 188281 - DNA, 449 bp, Homo sapiens
atcggcttcaaatcttccataatcacaatgtaagctgtgtccattaaattctctgaggaatgcaagaggatacaacctaagacaaaaaaattaattgaatcctgatatttcattagtaaacagggtaattgatggataaatgtaatggtctcggtgggtggacagtagttatataagggctgatgcagcaagatacttaattatttaaaggcgtttgaaagaaattgaaacacaagagtgggtgtattcaactaaaataaaatcagagagccctaaaataaatccattttgcgggtaaaaaaatggcattagaggagattctgggtcaatcatccagctgtgaaagttgcatcttggaagcaggatccctgtaatgcaacgatacttgtttatcagtggtggtctttcagtggaaaagattttgaagaatggacccttccttttgtgta

SEQ ID NO: 188282 - DNA, 389 bp, Homo sapiens
caatgtagcatgcacggggtgggataaatatggaggggagatgagccaggcagcactgacattttgatgtggaggctaatgataagctctcaccatgtgctaagcaacttacagacattaacccttaccaccacctcatgaaacaagcaagctggagagcatcagagtgaagaggggccaatcaccatgctctcctgacttctttcagtggcagttttggcagcctgagaatccagggagatgtgtggtggaagactgaggaggcgaggcctagggaggttagtcaggacagagctgagatgactaagtgagatacggatggaaatgaaggggggctgggaggagtggggtgctaagagatggaggttacagagagggtgaaggatgtg

SEQ ID NO: 188283 - DNA, 701 bp, Homo sapiens
ccccgcttgcgcttgttctacagtagttaaaagtataatactttaaaatgaaaaaagctcgctgggcgtggtgcacacgtctgtagaccagcatttctggaggctaagacaggcagatcgctagagcccaggagttcaagaaccatcctggctaacactgtgaaaccctgtctctagtaaaaatacaaaaaattagccgggcgtagtggtgggctcctgtagtcccagccacctggaggctgaggcaggagaatggcatgaacctgggaggcggagcttgctgtgagccgagatcgcgccactgcactccagcctgggcgacagagtgagactccgtctcaaaaaaccaaaaaaaaaacaacaaaaaaattgcttttaaaaatagtgactttatagctcttccccaagcggcctgagatgatctgtgaaaatggttcattagtcacttgacccagaaatccccacaaaatcgtgcaaatccagaggttcaggtcttcttgatcactttaagaacgctcgtgaaactgcccaggccatcaagggtatgcatacgtgagaagtcaccaagtgtctgaaagacgtccctttatagaaacagtgtatgccattccgacttggcaggggtggagctggcaggtgtacctaggccaaacagtggggctggacacagggttggtgacccgaaaagagcgctgaatttt

SEQ ID NO: 188284 - DNA, 260 bp, Homo sapiens
gcatcttgatctgattgctgggggatactcaaacctttagctcaccttgcttctcccctccacctgagctgcagcctggaaaaggaggcacccacaggtctaaacatggccctgctttttttttcctgaaaattccaataacaaaagcaacgagagcctctcactaccaggccttctctcactttgctataaaattagttcacccctctttcttagagtgttgaggtccctgccctccccacctccctccccagaaacaa

SEQ ID NO: 188285 - DNA, 304 bp, Homo sapiens
aacagaaaaaaaaagagaccctcaaataaaaactgtcatatctgaaatgaaaaacttcactagatacactcagtggcaaactggataaagcagaagaaagtgtcaataatttccaaagaaattatccagagaggaaaatcaacaaaacagaaaatagaacacaacagaaaaaataaagacaaaaactgattctttgaaaaaggtcaacgaaatttctaactcttagcaaaaatgatcaagaacaaaagagaatatacaaattaccaataagaacaatgaaagaagggatatcaaaatgatccta

SEQ ID NO: 188286 - DNA, 432 bp, Homo sapiens
aattatgatctctttaaattcaggcaataatgtggaagtcctcatgagtggcaatgtcaggtgttataatattgtggtggaagctatgaaagcattccctatgagtgaaagaattcaagaagtgagttgctgtttgctccataggcttacattaggtaattttttcaatatcctggtattaaacgaagtccatgagtttgtggtgaaagctgtgcagcagtacccagagaatgcagcattgcagatctcagcgctcagctgtttggccctcctcactgagactattttcttaaatcaagatttagaggaaaagaatgagaatcaagagaatgatgatgagggggaagaagataaattgttttggctggaagcctgttacaaagcattaacgtggcatagaaagaacaagcacgtgcaggtaggactctcata

SEQ ID NO: 188287 - DNA, 201 bp, Homo sapiens
cgcaggggtttggggggagtgttggcaataccaagaagcttttttggggcggtttgtccctaacatatagtcagaagataatgttttatttactgctttgttgaagaaacaacttggtcactagtgaagggtaacatgcagtgtgttgtaaaatgttttttgctagtttctgatccttaaattgagcagcatattatactt

SEQ ID NO: 188288 - DNA, 188 bp, Homo sapiens
cctgacatcaagtgatctgcctgcctcagcctcccaaagtgttgagattgcaggtgtgagccactgcacccggcccatattttttaatttttaaaatagctcaaaagtggattgtgtctccactttatagatggatgccagtatttatataaaatttattaccatctacttcctaaaaggataagagg

SEQ ID NO: 188289 - DNA, 272 bp, Homo sapiens
acccgagtagctgggattataggcacatgccaccaagcctggctaatttttgtatttttagtagagacagggtttcaccatgttggccaggatgttctcgatctcctgaactcgcatccacccaccttggcctcccaaagcgctaggattacaggcatgagccaccgcgcctggccgaacagtgcctatcttgatacagctggcattatgctaaatatatcagctgaatttttacttgatcctcacaataaccctgtggttgctacaatttt

SEQ ID NO: 188290 - DNA, 405 bp, Homo sapiens
aaactatgccttaaataacatgaatctgtcgttgtagaacttattcaaattgttcttgagcctgtttctcttctcagacatttcaggtgtctgtcatttaacagtaagctcaagtaggtgccctgatgaaacaactgaaaatgctggaaaaccctgcacataaatgcatttgaaatgtattttagtaaagaatacttggagccccaaaacttaagcgaaagaggaaactcgaaagtgatagagttctgaagccaactttgagggcattggccaaacattcatctttggtgtttatgattcaagggacctgcaaaatggaacacacatctcagagcctaagatggaaagtctaagaagctccctaacccaatcccatgaagcagagagttcaaagggtaacattct

SEQ ID NO: 188291 - DNA, 278 bp, Homo sapiens
ggtttggctgtttgggatggggctgagttgggagccgggattatagcgattatatgagcgggcagtgtcaagtgtggtaaatccatggctcttgaccagcatgcagcagaatcagagtatttcaaaacacggatccctagacccccaaccccagggcttctattccgcatggtctgagcaggcagccggatgctgctggcctcccaactatccttgacaaccaccgatttaaaagaatgctttagaggtgggaggcactcaaaagtcacgaggtgcaa

SEQ ID NO: 188292 - DNA, 147 bp, Homo sapiens
gctactcatggaaagggttttttaataatggaaaaaaataaactgtcttgatgctcaagttcttgagctcaaattagcaaagcaggtggacagatcatatttttttctatagcataactccaggaggattctgagctgtctttgtta

SEQ ID NO: 188293 - DNA, 225 bp, Homo sapiens
ctcacaggcacacacatgctcgctacacacacactcttcatacacacaccctcacagagacatacacactcttcacacacgcgctctcacaaacacaccctcacaggcacacacatgcacttcacacacataccctcacaggcacaccccttcatggacacacgcacgttcagaggcgcacacacacccttgacacatacacaccctttcacacacaccctcaca

SEQ ID NO: 188294 - DNA, 561 bp, Homo sapiens
ttgaaattacctagagaataagtaagctccaagaagaacatacctatggctatcctatttttgaaggcaaaaatggagctacaaaattaaacaaaggatgtatttcatgtttgaatttgtagaaaaagtcttagaaaggtataatgaaaataaataaaattactaaataaaataactatgagatcctaagaattttgccaccatctttgggaataactaatgctgataaagtacaaactaatactttggtgccaattccaactccttgcacggtacaaagggggaaaagtatcttaatgcataagaaattatgagacagcacaaataaaaaccaatcttttatgcagaaagtttcaattaaagtgaaattcatattttaaattacgaaattataaccggaaaagtttgtaatgttttcaaaatggtcttcgctaaaccacctctatctagcctggaggctagagatggaacttaactatccacttaaattatatctatgtatttgtgcaaagttaaaactttaaatctaataaattattcgaatcaattaaaacaaagtca

SEQ ID NO: 188295 - DNA, 302 bp, Homo sapiens
gtaaccttcaggacaggaaatgtctgggagcaactggagaacagaaagtttagtgttcagtgaggtcagggctgggcagccatcctcatgtatgtatcagctgaagcagtgagagtggattctccaagacacagagtgtagatataaaacagcaagcaaatagcattgcttttagaaagtagccttttaatttgattggaaggattgcctgggaaggagcacatgtgaaatgtatggagtgatagaaatgttctataatgttaaagtgtgttacgggcatatgcatatgtcaaatcgcatga

SEQ ID NO: 188296 - DNA, 255 bp, Homo sapiens
ggctccctctggctgggagtcgtcaccagctctgcactggtgtttggttgtgtgagctcctagtgttcccaaaggagtgagcactcatttggagaactgagtcctcccatgatggcactgcttaaaatccaaacccagagtcaagtccagaggtcctcgacctgtgaggcaagtatggtttttacatttttaaaagttcatacaacaaaataaaacaaaacaaacagaccaaaaaaccaaggaagaacatgttaa

SEQ ID NO: 188297 - DNA, 721 bp, Homo sapiens
gcaggctgttgccaaagttaagttcccaggactcatggctgtctctgctccttccctctcaccccacaccccacactcagccagtcccgtggctcaaccaatacagccactgctcaccgccctcaatgccagcctcaggtcacgccacactgtctttcttgtggacaccacaggaatccaccccacacacacacttactcttctctccctccaccctcaccgtcttgttgtccattctccccacatcccccagactcatgccttaaaaatgtggatcaggtcatcccccggctcataacccccacagagcttccatcacatttacgatgaaattcgccctcctcacccctgctcaccgtgggacctcactccctcctccatttcctccttagcgcttctccaatgcccagtgagtcatttccttgttagtgtcttatccctgccggcatctaagccccatgagggttctgctgctttggcgctgtgtcaccagcccccagcacagtactgaccatggaacgactccacagctctctgggctcacattggatgatgacctctttcagcttcatctctattgtctcctttaaccctcagacacccctgtgatgtggttacttttactggccccatgcacaagtgagaaactgagtctggggcgggttacccagctgtgatgaatatctggtaaatgtttacttttagcattcgcgggtctatc

SEQ ID NO: 188298 - DNA, 590 bp, Homo sapiens
aagtgcttaaggatgtgctttagctcgagatctggaactcattacttttaaaaatactgttaaggacaaaattaagtagaagaaattcattctcttttgatgatagtatatggccttttgcatgctttagaaagattatcaagcactgtttatgactttgtgatatttcacaacacattttaggatttacatagggactagtaaatagcttatatcctatcagtattaccaaaggaatcaaagtacattaatttgaagaattaagatgaaagaagaaactttctagccaactgtaatatttttccagtattttttgttacatgtcttttaagcaagtgttatttgtggacattctgcgggaaataaccctattgatttctttagttcacttgctattcaacaataaataaatgaatgagtaaataaactcaggttactgagttcaccttaattaaaaggattatgtagcacaattcccttatttattactggtgtagtctcctggcctcaaaatgagacatctgtttattaccacagcccagtaggttctgttccagtgttgctgcctagatgttcttctcagtctcttt

SEQ ID NO: 188299 - DNA, 365 bp, Homo sapiens
aggatagacatacagatcaatgaaacagaatacagagtacagaaaaaaaccctatatatgtacaggcaaatgactttcaaacaaggatgccaagaccatgcaacagaaagaatagatttttctaaaaatgaagcttggacaactgaacagcctcatgcaaaagaatgaagttgtatcagccggcgcggtggctcacgcctgtaatcccagcaatcaagacagtgtagtactggcgtaaggatagacatacagatcaatgaaacagaatacagagtacagaaaaaaatccctatatatgtacaggcaaatgactttcaaacaaggatgccaagaccatgcaacagatagaatagatttttctaaaa

SEQ ID NO: 188300 - DNA, 464 bp, Homo sapiens
tgggattacaggcatgagccactgtgcccagccagggtccccctttctatagcaacccaacccccctgtatgggggagaaccaactgttttctctgtacacaagctcaacgcagaacacttatgtgaccaaatgtaggggtttttcccacaccaagcagttctctgcagacaccagctgggtgtcctacaatttcaactcagttttgacattgtctacctggagttagcatcagatcccactgttaagggctcagctccagaagactgcccctaacgtcaggtgtcagtagcaagtccaggttatctattggccgtaaattggaggttcctacagccccctccttgagtttgatcacttgctggaacggctcagagaactcaggaaaataacttactagctgactggtttttaatacaaagatacaactcaggaacagccatatggaggaggtgcacagaggaa

SEQ ID NO: 188301 - DNA, 830 bp, Homo sapiens
aggaaggcagaacagagactgtcaaagtaggtaaaaaggaaacctcaatatcagcttttaaaacgatatacacttatgaggtaaagatacaaacagattcaaactgaaaagatggacaaatatacaccatgcaaatctttgttatcaaaaactgcagccagtgtattaatggcagataagacagactacaagaaagacaagcatcaacagggataaagaaggatgttttatgcaataagtccatttgcttagaaaacctaataagcataagcatgtatgcacctaagaaaaataacaaaatacacaaagcaaaagttattgaattaaaaggataaatgcataaatccacaatttgacaattctaattcttatatctcagaaattaatagaaaaaaataactacgacaataaggctacaaggtattaataggagagattataaccagagcactgggagaaaaacagcaatatccaatatgcttacaatattggttgacaactcaaaagttcccaaaataatttttgacactaaaggtaaatagcctggaaaacctaaaagccagcataggaaggaagtggaaaatgaaatgctgattgaaaataaatctggaagtccaggcgcggtggcttatgcctgtaatcccagcactttgggagaccaaggtgggtggatcacctgaggtcgggagttcgagaaattctgtctgtaccaaaaatacaaaattagccaggtgtggcggcacatgcttgtaatcccagctactcggaggctatggcagaagaatcgcgtgaacctgagaggcagaggttgtggtgagccgagatcaccc

SEQ ID NO: 188302 - DNA, 164 bp, Homo sapiens
ccctctctggtttgccctggggtcgctgggtctcagcactcaaggagtctctccttggtgggaagggatttctctctcttctcctcggtctctgactctgtctttgtctctacctctgtgcttcctgcttctgccagcttgaaattctccagcatcagcttccc

SEQ ID NO: 188303 - DNA, 342 bp, Homo sapiens
cccatgaaactatgtgtctaggaactttctacgaacaggaagctactgctgttccctgttcaggttttaagtgtgcaggatgcaagctgtggcacttcccaggactctagacaagttttgctcattctttctgtgagaacaatggtcttgcatgacctggactgctggtttacctctgcagcctcaccaggtatcagcttgtgctttctacttcagcgatgaggaatgtctcccagcatcttgtgtgcttcgtggtcctggcctttggatatatctctgcctggaatgttcctccttcctcccctccccttcacataataaactccttctcctctttcacag

SEQ ID NO: 188304 - DNA, 697 bp, Homo sapiens
gagcaaggggaaagatgatggccggtgttggccggtgttggcagttgaagccatgtctggtttctggcatttctagctggttttactttcttctctgtgctcttctgtttcgtttgggaatctgtaaagcccagacacttctttacgtaaagcagaagccttatttatttgtgtggaggagtgtttagtcgatttgctgctgcccctggtctgagggtgagctctgtgtggggactgtggctttggacacaatcacggcagttcctgttccttctgctccaggacagctgctcaagtcacttatggtttttccaggagcacgagaaagggctgggggtaccgagccggccccgcatcactagctgtgttctgtttagcctgcatgtgtgatatcaaaaaacacattatatataagtacatttaagaatatacatttcaaagtacatcgttttttctttggagatagggtctcactctgttgcccaaatgggatgtggtggcacaatcatagctcactgcagccttaaactcctgggctcaagtgatcctcccgcctcagcctcctgagtaggcgggctgcaggcatgcactaccacacccggctaactttttttttttaaataaaggtggggtcttgctatgttgcctaggctggtgtcaagctcctgggctcaagcgatcttccaccgtgccctcc

SEQ ID NO: 188305 - DNA, 660 bp, Homo sapiens
cacaaatatgcctggggtcgggggagttactgctttttaaaagtagagacatcacttaagaccttattgataaagtaactttaaggaagtgaaggattaagctgtgtggatatctgaaaagacacatttcaagcagagggaaaagtgaatgccaaggccctgaggcaggaaggtacctaaaatatttgagaaactacaaaaaagttagcataactgggaacagagagctaataggggacagatcacaaaatcccttgtgaagactctggcttttattctaagtatgagggaaagccattgaaggtttatgagcagagaattacaagatctaatttatattttaaaaggatcatttgctttctatattgagaatagaagcaggaaaggctattgcagttaacagcataattcaataatccaaaaaagagattatgttggcttagttcaaggtgagagtggtgaaggtggtaaaaagagttgctttcaggagttgaaagcatacatacagaatacctaaagccctgtgtactgatgaggtcactaaggaagtcatgaaatcaatcatataaacttttcaattgtaaaatgttagcagaccaaagacaagtctaccaagaaaatcttggtattacacagaatggggagtcagaaggcatcaga

SEQ ID NO: 188306 - DNA, 533 bp, Homo sapiens
acatacataagcagtatctcttttttgtagcagagttttattatttcaaccaggttcatgtattttattatgtacctactaggaaggtatttaatacaatttgctaagaagtatggcaagctgggggtgaagaatcaaacaagtctggatttgaatccaaccttcactgtatacatgtggaactttgaacaaattacttaatctgactctcagattgcatttcttgaaaagaaagttattgtgacttttagaaaaactgtattaaagtgcttaataacaatttgcacttaagagatattcaagtaatgatagctattaatttctaagttgtcattattaggattgggggagttcctgactgtaattttcacaatttagaaggggaaataaatttacctaggttattgtgataaacaaatgactatgaaagtacggaggaggtaaagatgaaatctttaaacaagaaataagggaagattttctgtaaatttcacttaggctttgagggatgatttttaaaatttccaaggaaa

SEQ ID NO: 188307 - DNA, 579 bp, Homo sapiens
tcacctggcctggttggcgaagatgcttttcagatttttattgagccgtggccttgctgtagttgcggtcattccaaatggagactgatctgctcggcatatgtgagaactgttctctctgtgttcctgggtgagcaattcaagctttctgtgggaccagaaaccttaattattgaactacctttgctggttatctcatcactaaaattgttaatcgtttatctacactgtgggtgtttttcatgatttggcacacagcatagcaggcagcattgccaagatgtttttcatgttgcagaaaaactgtaacagatggaggtggtgattgtgaagcacttatttaaagtgttagtaatgaatcactatagcttgaaactgagtcagttatccatactaagggaagttgaagaacattctaatagcttctaataaaatacgtaatcaggcacctgaagagaactgactttgagtggctctcccattactgttaccctagccagggcccttagaatttattcttaggggctaaagtcttttaaaagcatgcatgcatgtgtgttttctcttttctaggaactt

SEQ ID NO: 188308 - DNA, 508 bp, Homo sapiens
tttatctgctgaccttccctccactattgttctatgaccctgccaaatccccctctgtgagaaacacccaagaatgatcaataaaaaaaagaggagggaatgctatcagcaaaacacaccagggtggaaaagcacaatgcatgttcagaaaatgccaagaaccttagtttgactagagactagcatgttaagagtgaagtatataaaaaggtcaaaaaggaggtttgagccagtttaaaagttgtagggaatatggggagttactaaaggtatctgaatagagaaatcacaagaatgaaagcaatgtttcaggaagaggcacctgacggtatgaatgacaggctggagagagggacactaattagtaggcctgagatgaaatgcagtaggaatgagaaactggtggtaggtgagatggaggaaataaaaatgataaaatgccgcaaaagatgagggataaggcctaaggacaagaagagaatctccagtttctattctgggtaacgaa

SEQ ID NO: 188309 - DNA, 130 bp, Homo sapiens
cacaggagggacagggggcacaggacggctctcacagcaaggacagggctcacacaggacggatggaggggtctagcaggtgtgtgtatgagggctgtgacagtcccacaacacaaactcactccacttg

SEQ ID NO: 188310 - DNA, 281 bp, Homo sapiens
ttaatggactcagtgtagctgtgagttgtattatctcaggagtataatcataaagataagttgaaaacagcattccaggagattgccaacactctattataaagtaaataaatacagatggggcactacactgaaaatgtggcatgaagttgccatccacggcagaggtcaacatttggacctgataaatgaagccaagtcatagataagaaaaaaatatctaggaccaaaagaacaaatatttaagagtggagccctcagaaaaagaaagaatcatccat

SEQ ID NO: 188311 - DNA, 340 bp, Homo sapiens
agggggacaccattgacatttcaatgaaaactgggagaagtgagattgatagaggatattgagaagagaagggggacctggtcaaacacgcctatctgaaaaggcaggcaaggggtggggtagagaaagcgaatgatggccacccgaaataaatcacccaccatccaggacttccccagagccctgtttccttaggggcaggaacattttaccacacactgagttccccacctgtgagggaaagggggactagagaatctgggaaggtcagcaatactgagacagggcacaatgaactggaaggaacacagactgaaaatcacaacatctggttctgatt

SEQ ID NO: 188312 - DNA, 382 bp, Homo sapiens
acagtaaaacctcatctcttaaaaaaaaagaaagaaatccatggtgctttcttatccttattttccctctgtggcattttttttttctaacccactcatttaatgttgccatactgtaaatgtaccattataaggtaccttaacccagttttttaacagaatccttacgttcataaaataacatttgaaatgttttcatatgaaccagttatacatagtgctattgtagatgattgtatatgaatatcttattgaatctcaaataattgtgaagtatgcatttcttttctataaatataccgctataagactgaataatagaatttaattttgacacattaaagtggaaaacaattatttaaccaaggcgctatataagatc

SEQ ID NO: 188313 - DNA, 327 bp, Homo sapiens
agctctttttaattggtgttttatgctttcacagtgatgtttaagtttggatttcttgtttatgctgcttagaattaattgggcttcattgacctgaaggctgatgtctttaacaattctgggagattctcaggcattattattgttgttactattattttttttgagatggagtcttgctctgttgccaggctgaagtgcagttgcgcagtcttgactcactgcaacctccgtctcacgggttcaagcaatttccttgcctcagcctctcgagtagatgggaccacaggtgtgcaccaccacacattattatttaagaaacattta

SEQ ID NO: 188314 - DNA, 1241 bp, Homo sapiens
tttattgatttttctcattataggtcatattttctggcctctttgcatgtctggtagttttttattggttgccagactttgtgaattttacctttttgggtgctggatatgtttggatttgcataaatattcttgagctttattctgggttacaggcaagttagttggaaacagtttggtcttctcaagctcttgtgaagctttgttagatggatccagagcggcctttagtctgtggctaattttgcactacaagtgagtaatacctttctgagtactctaatccaaagccccgtgaagatttccactctgtctggtggaaacaaactattcttacgccataagagctgtgagaattgttccatccgctgcttttagatggttgtttttccatcctcaggagtcccctcacatacatgcactgatcattgcttttgcctccctgaactcccagttcttttttttgtgtgtgtgtgtctttgtttttttctttttccgtggagaacggggatcttgctgtattgcccaggcaggtcttgaactcctgggctcaagctatcctcctgcctctgcctccctaagagctgggattacaggcatgagccaccgtgcctggctgaactccccagttctttatcctcaagtcagggagactgctaggctctgtctgcatttctcctttgccctgtggtctggaaattctccgatctataagttgaggcagttgtaggtctcaccttctttgtttcccctttctaagtaatcacagtccttactacctgaacacagtcatatagccaatgtccgaaaacccttgtttcatatattttgtccagtgttttagttatttcaggcaggaaggtaaatttggtctctttaactcactttggctagaacagcatattttgttttttttgtttcctggtttttttttttttttttttggagacaagagtcttgctctgttgcccaggctggagtgcagtggtgtgatctcagctcactgcaacctctgcctcccaggttcaagtcatcctcccacctcaacctcccgagcagctgggaccacaggcacgtgccaccacgcctggctaaattttgtatttttggtagagatggggtttcgccatgttggccaggctggtctcaaactcctggcctcaagtgatctgccctccttggcctcgcaaagtgctgggagtataggcatgagccaccactcctggccaggacagcatatt

SEQ ID NO: 188315 - DNA, 431 bp, Homo sapiens
tccacctgcgtccccctcccaaagtgttgggattacaggcatgagccactgtgcccggctttactctttattttgaaaagataactatagtaggcttttttgacttctaaggatggaaatggggaaatcatttggaacagtctttatgatagttaaagggagtaacgctaaggacatggtttagggcagtggaaatgaattagagggggcacattttagagagatttggtgaagcagctacttgggatgcataagggagagaagggaggcaaggataactaagtttttagttttaaagtacttgtcacatgtcttagagacttttagtaataggcagttggaaatgtgagttaggagattaggattgagtgagatgaatatagtgatttttgaaatgtttgaaataaggctttaaatctcaactctgacac

SEQ ID NO: 188316 - DNA, 444 bp, Homo sapiens
aaaagagatcctccctcccaagtagctgggactgcagatgtgtgccaccatgttcagctaacttttatgttttgtagagataaggcctcactattttgctattttgccgaggctggtcttgaactcctgggctccagtgatcctcctgccccagcctcccgatgtgctgggattataggagtgagccacctctcttgacctgagttaacttttgtgtatggtgtcaggtagagtccaactcccttctttgcccatgactatgcagttcaatggtcttccatgttgttcatgatggaaaaagcactgtgacacctggggctggcggcttggctctgggggccccagcagagccaggctgtctccctgggaaatgcctcggccaagatattctcctggaagtctgacagggagagggtggtgtcttggtctccctggtgcatcatt

SEQ ID NO: 188317 - DNA, 762 bp, Homo sapiens
accaccgcgaatgaagtttgcattttcctctgttcttgagcccagcttcttctcgtctcccaccccagcttcccggcattggaagaagggaccgtcctcttccttgtcttggccacccaaatcctggtatcgaaagggttgaacggaccggaagtgtgcagcagcgacgggtccccagctaatcgacgccggaagtagcaattactagacaagcattccgccgccggcttcgctatggcggcaattcccccagattcctggcagccacccaacgtttacttggagaccagcatgggaatcattgtgctggagctgtactggaagcatgctccaaagacctgtaagaactttgctgagttggctcgtcgaggttactacaatggcacaaaattccacagaattatcaaagacttcatgatccaaggaggtgacccaacagggacaggtcgaggtggtgcatctatctatggcaaacagtttgaagatgaacttcatccagacttgaaattcacgggggctggaaattctcgcaatggccaatggcggggcagataaccaatggcagccagttcttgtgacctcgccccaaccagggttgaggcaacacaccattttggcgaggtgtgtcaggccttggaaggtgatcgcgggatggtagaacaactccaggaccgcctgggacgacggaagatattaagctaacctcggtaaactgcaaccctgagaggcttgagaggccaggaacatctagaggacaaggcg

SEQ ID NO: 188318 - DNA, 567 bp, Homo sapiens
aggcaatatgaagtaccccacctggacaattgtgttaattatatatgcccaatattagagcacttacgctgcagtgaggtgggtgtctctcaccataccctagacttggaggtccctgataggtgttctgaaagaagatccctgtaaggttatagggaagtaaagccgcatcccaacatggtgcacagacagcagcctcctagcaacatctcttaaagcagatggtgttttcagacatattgaggaatgaggtgggttgggagcagttgcaacaagatagggaaaccttaagtcatctttgaggatactagtttgttgtgctattttttttcttcctaaatgatttggaagtgatttttctgtgcctgatgtagtcttttttttttttccctttctttgtatcctgtgttgggaaatggaaataattcaaaatctgtaaaaacactgggaaaatggaaattaaactttgggattctttactgcagaaaaatgatgatgggaaatgttcttcagtagagaggtagaaatcatttcagaccgcttctcctagccggggcccacaacatg

SEQ ID NO: 188319 - DNA, 399 bp, Homo sapiens
tggggacttgttatgatcgagggctgctaggcagagatgttggctgcttcctgggccctggcaagtcactttctctttctgagatgcctttaccccgtctagaaaatgagggacttggagtcatggattattaagggcccttgtgggattcagaaacactagatgtaaaatattcagccaatttgagcagtatggtctaggttgctctgggagggatcagaagccatcttaaagccagggtaaatggtgtgtttatgattagctcaggagcttcccagaaccctcagaggcggggctgtggaatcagcagggggactggccctcagaactgcagtctgaacatctagttctggaaggagcttgccttttacatatgaactgtgcactcacacaaggcac

SEQ ID NO: 188320 - DNA, 546 bp, Homo sapiens
gttcttttctttgaggccatgttaatggcagtcccttgatttggtctttgtactaggctgtttttaatgatcacattttatttgatgagaaacaattttattttctagttctgcatatcctaggttatgtatttcatttcagttccatttccatacccattgccttaattttgagcttgtctgtttcttacatttctcattttgacagaataagctgactgttattaagtacaatagataaggtacctaagagcctcgaaacatcaccaaataccatgaatgcattaggtatattttttgtcttccatgttactggaagcattaattatagcaactttttatctccaaatactgacaattaaaagaccctagtgaaaactttaaccaaacacttactgaccctacattgaaggccaccagccaaaaatcaccacccatacataagagccaaacatcactagacacttggtgaaatccttcaaatataaaaggggaaaaggaggggagaaaatccaaaggaaatagacaaacggagaataatggcaa

SEQ ID NO: 188321 - DNA, 769 bp, Homo sapiens
aaaaaattaataagacccccaattgtattgtgaaactacttattaactttttttccaagggaaaaaacagtttatctgagaacacagttggcactttaattatatgctttaaacacttccctacagatgccaggcagctatttattttctggatttttttccctaagtctctggttgtttgcacagatgagttttatttaaacatatgatgaaagtcagtaacactcaaagtttattttaagaatatttcctttacagcctctccttcatgtacacaagggggtctctatgtggttgggagggtggcaaaggttaccaaaattacctggggtcgctttttcaagctgtccatatccttcgctcttctctagatttagaagcacttaaataaatgtaaaacaccctacctcacctttaattcctgagactgaaaactataagtcagaattagttgggcagttacataacaatcatgaagaaacagaatagcaatcatagaatactagtagatttagaaggggtattagaggcaatcttgctcaactgttattttacagctaagactgcagaggcacagagagcttaaataactcaaatttggcaggactttaaccagaactgctgtctcctgactccacatttcattcttttccataagaccacacttgttgctctcttagttcatattagatagtgcaaataacaccaatatggaaactccagcgagccaagatggatatactttcgtgggtagaacgaaaaggagatt

SEQ ID NO: 188322 - DNA, 604 bp, Homo sapiens
gtttcatcaccgatgctgtgttccaatactgcctctgatcttgggaaacttgagcgcgcgggaatctgagggttgcttctagatcctcccggtccccctccggctgcccagagctggcgccccttctcctcgcgtcctgtcctgtcccgtgtggacgggacgtggcgagtgtcgctgagtccacactggtgtacagagcacttcggggccagcacgtggccacatgtccttagctgttgggctttgaaagtgtcccttgggtgtcaggcgagtggagggccggagagacgctgcggcgctgcttagcgggtcctcccagagagtgtgtccccttcccttggcctttctgcatcttctgagacgggtctgtgtccccctccccgccacctcctccctcttcctctccactgactgaaggtcatggccatgtccctgtcagggaccccgcctgtgtctcgggcacacagtgtctgtgcgggtccctgcttggccctcccacgtctaccctcggcccgcccgctccagccgctgcctcgttcgcctctcagtcccctcaggtcttctccatcctgcgctcctctcgctgtgtgccttgccttcctgg

SEQ ID NO: 188323 - DNA, 254 bp, Homo sapiens
aggcttcagatttaaggacagcttcactaactataaatctcagtaaaataattctaaagtcaaaacaaaggaagatattttcatatctaggtatctagtaactatattgattatcaagacttcttttcatagaattgactttgaattttcattaatacaactagaatatgtcatttcagttaaagaacagccaaacttgctttaagattgcctgatatggttagtcagatcaaaaggagacaccctgccgggtg

SEQ ID NO: 188324 - DNA, 615 bp, Homo sapiens
gtaaacacttcatggaaccttaactccctgttcctgaaatttagagacaggggcttcatttttagacagaaagtataaagatcagcagtactcctgtatccagtggttctcaagttctagtttacatatcattagcaaaatcacaaagcggtcttttcattcaagatacaaatagagtgatcagtatatcataatcaaaagtgacaagatagtgatttaaaaaacacctggcatttattgacaaaagaaaaggtaggattaagtctgctcaaacagtaaaggattagcattagtatttttttaaaaagaagaaacaacagtgcaggtctctatgctaaagtaataaggactgaagaagttttaagtttggaaaaaatggggatatgtattggtgaaacactttgtaatcatatagaatgattattttatcagcagctgttaagttgactttgaggaaattttgaattgaaatactttaggtgacaagtaaaggcaactgtgaaaagcaacatttgattttaggggacagggtacctgtgaaagaagactggttaggagtggaagtcaggcgtaaaggcactgaaatgtccgaggcagggacaatattcagtttct

SEQ ID NO: 188325 - DNA, 369 bp, Homo sapiens
tgcattcattcctcaatatatttactgcgtgaatatggatcagcagggatggtgtgagactgccacactcaagctgggcgtttgtgcaatccacatcaacacttccaatactctcaagcaaggccaataaatcataaagctcatgtgctcatgtgctactgaattcagcacttcaccatcggcaaaatcaatggagatgcttccagaattttcagttttacagcttcttgaacaaatcttttcccctagtccctctctttgtctgtctggctaaggttgaggcatggacactgggtttgcctcctctccatccaccttctccatccccttttgagaaatgaccacgtggttgaggtcgatcttgtagtc

SEQ ID NO: 188326 - DNA, 245 bp, Homo sapiens
tactgggattataggcatgagccactgcacctggccattgtttttacaatttgtattattttttattgttgttattgttactttttagtggatttttttcacatgttttctatccttggtgggttgaatctgcagatgtggaacctgaggatatggagggccaactgtatatatttttatcatctgctccttctaatagatgtaagctccatgaaggcaggaatctctgttttgttcattgatat

SEQ ID NO: 188327 - DNA, 202 bp, Homo sapiens
ggactgggacttgaggcaggataaaaccgagggtatacagatccagtcttctaccttccctaagtaaagaggctagaaatccattcaaatggattccttccagggatctggaccttcctgagatgcctaaaatccaggcattgttgattaatagctgtccataagaaacactgagagcagctttgaagagttcacccagggg

SEQ ID NO: 188328 - DNA, 251 bp, Homo sapiens
cctataaaacttccctccagctcctgcctcttagtagacagccccttctctgctgtgctgccagtatcgtatcttcgtgctttttctaatacgtacttcctctaaatacatctacgtactttctctaaatctgcctgtctttacctacaactgtcttggtaaatcctttactgcccatgacactggccccaaccagtggcacctgcaacattttggtggcccatctggggagtgcttggggactgcttggg

SEQ ID NO: 188329 - DNA, 520 bp, Homo sapiens
ccatcattctcagcaaactatcacatgggcagaaaaccaaacaccgtatgttctcattcacaggtgggaactgaacaatgagaacacttggacacagggcaggacacatcacacaccggggcctatcagggggcgggaggctggtggagggatggcattaggataaatacctaatgtaaatgatgagttgataggtgcagcaaaccaacatggcacatgtatacctatgtaacaaacctgcacaggtacacatgtgcacatgtaccctacaacttaaataataaaaaagaaaaagaaaatggcctccagctccacccaagttgctgcaaaatagattattttttttctttttatggctgagtagtattccatggtgtatatgccacattttctttacccacgcattggctgatgggcaatttggttggtttcatatctctccaattgtgaattgtgtgggagtgcaaatatctttacaaggtggtgatttcatctcctttgcacatataaccataagggg

SEQ ID NO: 188330 - DNA, 130 bp, Homo sapiens
cacagcatggtcgttggattcagttcaggaagattagttaatattgcagagttgtaaggaaatcaatgagggtaggtaatattattgtgtaggtaatgcagtatcacagagtttatatttttccctccct

SEQ ID NO: 188331 - DNA, 152 bp, Homo sapiens
gggatggctgggcggtgtcagaagcttcctgaggtttgtgggtgtctgctgcctgaggcacttgtcaaggagcagtcaccgcaggcaccacgagatcggctccgttgcagggacactgagcccagcatctacccatgagagacccctcactc

SEQ ID NO: 188332 - DNA, 307 bp, Homo sapiens
tgcccttcctttcatccttcaggacctcaggtcctaccctgatctttcttacctgagcttaagctcttccacctgccccaatcttctgtgccaggaaagatactttaacatacctggacctcattcttgacttctccgtgactcccatgccccacattcagccaatcaccaattattgcttcctgtcatcatcacctgatggtgatgtggaattcatcagcttcctcacgctgacccccacactccatcctctggttcttcactgcggcctccaaagcagccaggattgtcacaaaagtgttcatag

SEQ ID NO: 188333 - DNA, 627 bp, Homo sapiens
acgttgacacttcagatattaaatcttattgtctgctgataactgtctttggcagtttccagttattttcatttaatatttgtttttttttcttttactgtttctaagaagcctgcagtatgaattattttgcctgctttgcagatgaggaaacaagactcagcaaggctgagtcagttcccagtggtcgtgtagtaaattgcagagcttggtttgaaactgaagcttaacttcaaatcctttgtttctactgtagcatgctcgcagtgtgtgcccagaactggattaagtgcttttgatgtggcacttgagataaaccttgaaggaatggcagatcaaggaagagtggattttaagaagggtatttgtgtgagccaagatgcagagacaggagtgtgcttgaagagatgattgagatgctgagacaggagtgtgcttgaggaaatgatcttgactgaagtggagggagctttgtgaaggggaaatgaatgatagaggaaaggcagcacagttaaggattagattccaccatatggatttgggatattctttccctccctagttttgcctgtaggaataaaggtaatttgcacttttagtatactgaaataattaggattatgtaag

SEQ ID NO: 188334 - DNA, 357 bp, Homo sapiens
gacacacacagatacacagatacacagacacatacacatacatacacaggtacacatacagacacacacagacttacacacagacacacacagatacacagatacagacagacacacacacacagacacacacacacaggtacacacacagacacacacacagacacacacacagacacagacatacacacacacagatgcacacacggacacacacacaggtacacacacagacacatacacagacacaaacagacacacacagatacagacacacacaaacatacagatgcacacgcacacatagacacaaacagatgcacatatggacacacacacacacagacacagacagac

SEQ ID NO: 188335 - DNA, 163 bp, Homo sapiens
taaggcatcagcagggctgtgctccttccaagaggctctaggggagaacccttttctcacttctccagcctccagaggcacccccatgccttggctcctgccgccttccagatccccttcctctgacctcctctgtgcctccctcttccacatttaaggaccc

SEQ ID NO: 188336 - DNA, 378 bp, Homo sapiens
attgtatagaaatgctctgatttatgtgaattgatttgtatctgaaactttacagaagtcctttgtctgtgccaggagccttttggcagagtctttagggttttgtatgtatggattcacatcagcaaagagatatagtttgactatggctttcgtttttctatttggatgcctttttttttcttgcctgattgtcctggctaggactttcaatactgtgttgaataagactgaatgggctgcttggctgcattatgaaggagttactgtatctccctggattagcaataacagacctgggggtgcatgcagaccaacggcaaacctcaaagagtaaatatgctttaatttcttcagggagaaagtgaagtcctacca

SEQ ID NO: 188337 - DNA, 482 bp, Homo sapiens
aaacagaaagataaaaatctttgcagtgtgaatttggctaaaatttgttaatttacttgttcatacttcattctttcaatgggttttttattgttttgtgttggagataaaactcagaaatttactgaatatcagagtccttcttacctttctatcatccttcatcatccctttttgttttcaagatttgcatccaaagacagtagctaaaattctgaaataagctgataacaagagtggtatttgttcataaacttcacagctttccttttggaggaaatatatcatattcctccattaacccaggtttatatgtacccactagatttttgataatcacgtctaacttgctcgttcctatctctacttatttagctattttaatttttcccatctatcttttgtttcttccctgcctctgtttagattaattaagccttcctgccatggtttggactccattttatttccactattggtgt

SEQ ID NO: 188338 - DNA, 417 bp, Homo sapiens
aataaatattttttggaagcaagctaaaactaacctaaaccaacccaaaggaaaacataagccattccattcccttcctttgctccaaagttacacagcagcacttcttcaccatctaaaacaaacttgtccaacctgcagccaaggacggctttgaatgcagcccaacacaaatttgtacattttcttaaaacattatgagatttctgctgggcactgggctcacacctctaatcccagcacctcgggaggctgaggcggggggatcccttgagctcaggagttcaagactaggctggccaacatgctgaaacctcgtctctacaaaaaatacaaaaattagctgggtattgtggtgcacgcctgtagtcccagctacttgggtaactgaggcaggaggatcgcttgaacctggga

SEQ ID NO: 188339 - DNA, 292 bp, Homo sapiens
aataaatattttttggaagcaagctaaaactaacctaaaccaacccaaaggaaaacataagccattccattcccttcctttgctccaaagttacacagcagcacttcttcaccatctaaaacaaacttgtccaacctgcagccaaggacggctttgaatgcagcccaacacaaatttgtacattttcttaaaacattatgagatttctgctgggcactgggctcacactcctggcctcaagtgatcctcttggcctggcccattctttatggatcatgcaggtgggctacgt

SEQ ID NO: 188340 - DNA, 175 bp, Homo sapiens
cacactagattgtacaacttaatatagagctaaaaactcaacaggatgccattttagaagcatggacttcttcctgtatataatgccatattttcctggtattattctctatagtttgtagctgccttagctttttaaaatctttgtataatttctaactcctcatctgctctac

SEQ ID NO: 188341 - DNA, 162 bp, Homo sapiens
tacttcagtttctttagtagcattgtagatgtgctgccctttgttgtagcatgaaaaagaagactttttaattaataaaattctttgtccttcattctagatgagattgtacaacgtacattgaccctttccagcctgggagacagagcgagactctgtctc

SEQ ID NO: 188342 - DNA, 137 bp, Homo sapiens
ttgctctctcccagaaaaggactgtagcccttttctgctgtttttagaaccttctgctaccatatccaccacttccaccaccagatccataaccaccaccatagggactgcccgagcttcttccaccaaaactgccc

SEQ ID NO: 188343 - DNA, 452 bp, Homo sapiens
aaaagaaaaaaaaaacccttttggtttacttttcaaataaaacaagtttcccccaccttttttcctcatatatgtgatatgcctggagcttagtttaaactaagtgtaacttaacctgcctcttcctttgccaccatgtgttccacagtttttcctagttatgtggtgattgggtgggtctgtctgaccttggtttcactacactgttctgtaccgttaccaaagttccaggatcttgccccaccgtaaaggatttcctgttttcagtgtctcccccaccctgattcccaaagtagcttcttaatcttgtggctgtccttcggtctcaactgagatgtctcttggctaatatcctcttcttctgtattgttactgatgaggagaagctgactcttgacttcttggcaaagtgacttatactccatcacagtcctgttgtgtaaactgatttc

SEQ ID NO: 188344 - DNA, 289 bp, Homo sapiens
tgctctgttcatgcctgctgttcagatggagctctgccccgtattccagtaaatgctcgaaggcatgattgttaatctcttactgatgtcatgcttctgcgctttctattgaagactctcaaggcccttgtgacctggccgctgccgcactctagtatcccacatgcaggtgctcaacgagttgtgcttctccagcagtgtttggcccttaaggtgtcagtccacatccttggcttggccaattcctacctgccctttatatgtggctaattcttactgatccttccat

SEQ ID NO: 188345 - DNA, 428 bp, Homo sapiens
  misc_feature (70)..(70): n is a, c, g, or t
ttagaattggctcggaccctacttatattctaaaaacagatttctgacgaaataacgtacccattttaantcaaaatgtactttcaagcacagagccctaaaacaacttactattttcctcactctgagaaaaattacatctttactctcctaaactctaataacttttcagataatctgttgaaaaagagaccaccctctcaaaaatcaaagcaaagctgtgaattttaagccaactacaactacggatggaaggaggctgatgccctacacagccatttagggaattattttatatccctaactcacctaaggattgctgagaatggaaaaaaaaaaagttctttgagttctagttttatgaacttccaaaaagctgtcttcactttagtattctggtacttttatcaagttatatctgaaaagtt

SEQ ID NO: 188346 - DNA, 392 bp, Homo sapiens
tgaggggagcaggagctagaaggattttaggggaaagtgactgagagaggggcgccttgaagtaaaccaggattaagactgcaaactgtggtacagagcgagttaatgaagactgaagaaggttcaggatgggggcccagggaacctccgagcagggcctacaggtcatagtacagatacaggcagaattaagtttcagatttgggcccgcccctccaaagggcagtgcacctgaggagggcggggcacccaccagcagttgggcaagtttggcagcaataaaatcagctccacctctggttctgcagaggacaccaggctgaggcactgtgacattccccaccacacatcaggcaaggaagggtgcccgagggcttccactgacccccgca

SEQ ID NO: 188347 - DNA, 540 bp, Homo sapiens
cactgggattatagacatgaaccacctcatctggtttcaatcaacttttttgttcttacccataaatataaatggacagcacaggacaaccagacatttgagaaaaaccactagcaagagcaaccaaaattaaacatcaacaaacaagcaatataacaaaactcagaggaaataaatcactgatcgctaccaggaacagaagagattaaatgataaatcatggaataaggacaggatgctctaaaaaaggaatatttaaagctcttgaagattaaaaagtttaatagtcatacataaatgttatgaaaatttataacataaagcttaatgccattttccccagaaagtaaacaaacaaattaaagagacagaaattaggaggtaaaatataaggacatttgagaatcagtcaaaaagatacaacacctgaataatgggagcacgtcaaagcctactgagtgccaggctccttagtttacaaagaaaggctggcccagtacggtggctcacgcctataatcccagcacagtgggaggccaa

SEQ ID NO: 188348 - DNA, 627 bp, Homo sapiens
ggagggggcgctgggtgccccagcactgccagccacccgtgccacgctcaaattctcgccgggcctcagccgcctcccggcagcacagggctgaggacctgcagccagccatgcctgagcccccgccccgcggtgggctcccgcgcactgcccgagcatcccctacaggtgccaccccctgctctgcagagcccggtcctatcaaccacccaagggctgaggagtgcggtggcacagcgcgggactggcgggtagctccacccgcggacctggtgctggatccactaggtgaacccagctgggctcctcagtctggtggagacttggagaacttttatatctagctggaagattgtatatttaccagtcagcacagctgtgtctagctcagggattgtaaatgcaccaataagcactctgtgtctagctcaaggtttataaatgcaccaatcagcaccctgtgtctagctcaaggtttgtaaacacaccaatcagtgctctgtgtctagctaatctagtggggacttggagaacttttgtgtctagctaaaggattgtaaacgcaccagtcagcactctgtgtctagctcagggattgtaaatacaccaatcagcaccctgcgtcta

SEQ ID NO: 188349 - DNA, 400 bp, Homo sapiens
gaaaaatacttgttggcagatttactagacaaaaacaaccatgttaaagataaacaaagaactaaaggaagatgtagagaaacttaaaaaaaaattcataagcaaaatgaaaatattcataaagagatgcaaaatccagaaaaaaatttttgaagttgaaatgcacaatagaaatgaaaaatccactgagggaatcaaaggcagatttgaggatgcagaagaaagaatcagtgaacctgaagagaggacaatgaaaatgatcaagtctgagaaacaggaagaagactgtagaaaagtgagcagagccaggggacctatgggacaccatcaagctaagcaacacatacattgtgagagttccaaaaggagacaagaaaactcaaagagacccccattgata

SEQ ID NO: 188350 - DNA, 372 bp, Homo sapiens
aagaatgggatgcatgcagttcaagaaggtgttttcaagctaggtagaagtttttgattcaatatgttaataggaggcacatagcttgtcttcaccattaagggttcatagtcaaaatagtggtaatgcaaaactaatagaaattatgatagttttacaagcagtgagcaatatgcagtgtggttagaaagggagactatgaagaggtgtaggatttagcttgcagtcatggcagtgactgaggcagtaggtgagatttaagttggactttcttggcaattctatattacgtattgtaatgaattactcagaacatggtggtaaagctccgtagttacttgagagcagaattaattctcaatagtctggata

SEQ ID NO: 188351 - DNA, 735 bp, Homo sapiens
ttaggttgatacatttaagcatgacaaagggatattttgaaatatggaatatgaaatacagtcacattccacataaaaaatagtacatccatgtaaacttgtgtgctgcttcctacacaagaatatcttgtttctgcgtattttcctttcccatatgctttccttttgctttatggcaaaactagaaatattgatagacttgattttgccagtctatggacttcctatagaaggaatgagtaccccaaatcacttcctccacaaaacctttcactagcactattcttcctcttccctgtagccttgtgtgcttggctctgggcatgatgggtttgtactcatttgcttctttgtaggtcttctatcgcctttctccttatgagcctgtttcatattttaaaagataagggagggggagcacattttccatttttagctgtctactgtgactaagagtctgtggctggtaactaatttgtctggtaactgtctcttgacagttagatgcattttggtttaaatgccagtcttgcagagcttgagagaatgcatgctgctgtattcccaggtctaatttggtttcccagtcctaagccacacaaccccccagcgcctggccattgtggtgtcatactcatggtaggtactgagtacttgtgggattcacttgagtttaaaatataaaaaactgtagctgttattttggaaaacagaaataataactgtgtaatatat

SEQ ID NO: 188352 - DNA, 361 bp, Homo sapiens
gcaggattatttttagctgtcaatttttttaattaagaaaaaactagttcttaagtcttcttaattaaaaaatggtataatagggctcatcctagaaaacaatctactcagggtgttagatgttaaactgtccaagataatttactacaaagtatctaggaaacagagattttcctcaaataatcaattatccacaaccatggctttaatattagtccatgttccagtaacagatggaaaaggatcttctattcaacttttttgaaaccttgtcttataatcataaggcgaacagcctttaaaagaaaacgcttaagctacaaatggcctagataatacatgtggccttagattcccagtc

SEQ ID NO: 188353 - DNA, 295 bp, Homo sapiens
cggccaggcagatgcagtaagacttcagagagcccaggtctttagggcggaactgattgcttagtaaaccaccttcagccttgttttggggaaggctttctaaactgcatcaacttctctctgtgccttggaaatgagaagaagaatatgtccttgagtgggggggcattaattgagctctttttctgatcattaggacctttagccctagggtcacccggggcacggtcacccgtcccctagtgcctcagtgctcatacacacgtggtagaggacaggctgggcctctgccaac

SEQ ID NO: 188354 - DNA, 512 bp, Homo sapiens
agcctggtaatttgtcctagagcttttcattttggtgaattacataatggtatactcactagcttttatcttcatgtgatagaaacaactgtaaattttgcctaattctctcttcctagggtcatgttgtggcaggcttatggagttagactgctgaattaggtgaggtcagggaaggacaatgccattgaccacaaaattgagttgtggttgatgtattcacctgtaaattcacaagggtcacagggatcataacaaaaaaaatgccatggttttgttcagaaggctattctcaaattcatcaggatcctcttttcctttactattcatgaaaagatgactttaagatttcttgcttatatgcctattaggatgatggataaatatttattcattgataaggtgaatacaggagaaaatgaattttgatgaggtagggaagtatctctccaacttgccaagaaaagaagttaaacaatttctatcttatacattctttttgattctatgta

SEQ ID NO: 188355 - DNA, 186 bp, Homo sapiens
tctattgcattagaaggagagaacagatattgggaaataaccagcggtctccaccacagggaaaagataggacgcagggaacgccggggggacaggtgaaacagacaagtgatattaaccaggagttccctcccacctgagttaaactacgcatagtgttgaagttaatgttttcattttctccca

SEQ ID NO: 188356 - DNA, 650 bp, Homo sapiens
accctcaaaatattttctggatatattcacttatcgtcatctccatccctatcacctacagtccaaggtgccataatctccaaactgcaatgactttgtaactagtctcccaacttctactcttacctcccccttggactgattattcacatagtagcccatggagaactttgcaaaatgtgaataagaaagcactgtttccctactttaaactcttcaatggctagccattattcttgaataaaattcaagaataaaataaataaaattcttgaataaaattattgaataaaattcaaactccttgccatgatctaccaggtcctaaaggagctagcccataccaactgctccagcttcatctcatactattctccccttgctcactgatttggcacactgactctctctctccattcctgtaatgtgccaaactcccacagggcctctgcacatgcagctcattctgcctggaacactcttccactgagtcttcataaaagccactcattttttagatgtcacctcaaatgttatctcctcataggggtctccgttgaccatcctatttaacaaagtcttcattcagactctcacatccaagttactctatatcacatcattttgttcttctttttttccttcataac

SEQ ID NO: 188357 - DNA, 827 bp, Homo sapiens
gaagaatagagtgtactccagagctatttgaacaatcctattctagaaacagtgactagatgcttctagaagatccttccagctgaaaaatcaaaggctctccaaatctctcagttcctcactggcatttccaccgccattttctactctcacacttagaaaatctgctagagggaagaggaggtagaataaccccatgtccccaccacacacatcccttctgagcgaggaagacaaggaagagaaaggcagccgaatcaggactgcccctggagccctgaagaggatactctcaggaactccccacatgtggcccataaggagctgacatttgccatattgtgcccacataagggccctgcacagaagtgggcaaggaccagggagcctgagtgactcgaatcgtctcctgcctgcaccttgtgcattgccacacctcccctccaccctaggacctcagcagacacacccatgtgccagcaagcttctccatccctgtgggcttctctggctgccacgggcacatggcatgcatgatgaggccttgtctaaccacacccaagagcgaggacatgggcaaggaggatcgtttcctccctaactcctccccatcctcttcctgtctgaccgaccatgttcatcaacatttgtttatatagcccctgccctaccaggggtgagtgtgggaccacagagccgagggaagcccagcctttgcccttgaggatgtgtctctgtgggtgaagaagagagagaatgccccagtccctagtcctgggggccacgtggcctacacagttcatacgcctcatgcctctgctccacag

SEQ ID NO: 188358 - DNA, 577 bp, Homo sapiens
gacggggtttcaccgtgttggccaggatggtctcgatctcttgacctcgtgatccacctgcctcggcctcccaaagtgctgggattacaagcgtgagccactgcgcctggcgacaaagtattttatttgttttttgtttttttttttggtttttcatttgagacagagtcttgctctgtcacccaggctagagtgcagaggcgccatctcggatcaatgcaacctccacctccggggttcatgcaattctcagtagctgagattaaagacgtgcaccaccatgcccagctaattttttatatttttagtatttttattttttaatttttttattttttgagacacagtctcgctcttgttgcccaggatggagtgcaatggcgtgatctcggcacactgcaacctctgcctcctcctgggttcaagtgattctcctgcctcagcctcctgagtagctgcgactacaggcatgtgccaccatgcccggctgattttatatttttagtagagacgaggtttctccatgttggtcaggctggtctcaaactccgacctcaggtgattctcccaccttggc

SEQ ID NO: 188359 - DNA, 259 bp, Homo sapiens
ggcatgagaatcaagggagcggcagtattttatttttataagacagtataagaaataatgctcaggaagtgacaatggggaacaacatggtcctaatactgcttcctaacaccgagttatgtgagacaaatgaaacctgaacaacttgagagggcttaagtctatgacaatagcagaactaatgctgtgggttcctaacttccaaaccaaagctccatccaatatcaggtatactatagcttttttcttcaaattgatt

SEQ ID NO: 188360 - DNA, 394 bp, Homo sapiens
accaagctctacgcctagcaagcttgggtgagttggctccctttggtgcagaaatttgagttcaggaaatgtaaccatttccatagtacttttgcagttttgttttcttctacaccccttacaaagttccccctttggggaggtttcaatactgctgaggctgaactgtagggaagcaaaagtctcccagaggaaggttcgtgagagattgaaccctacaggtctgtattgtgatagcaacaaattaattacaactaatgagaaaaggaataggctaaactaagaccaaggatcaaagaattttctgattcctcctattttttcttgacaaaatttccttgtttatccttataattaatttacagaaataaatgaaaagagaacatatacataa

SEQ ID NO: 188361 - DNA, 274 bp, Homo sapiens
agtatggatattggggtgtgatcctactgcttgtctgtcccttgttcacctttgtttcctacacagaatctagcagtggcatccatctctgaggaaggaatgataatagatggcctagactaggtttcagagggtggcagtagctatgcaaggaactagaaatgttaaagtctgagtagaccccttggtgtgctccatgcattttgcgggtgtgatttgattgttcgaggtggtatgctctgtgagatctgtggtttgtttggttgttggaggt

SEQ ID NO: 188362 - DNA, 540 bp, Homo sapiens
caccgcaccgccgggaagcgacgcccacctgtttgctcagatattgccatttccaggccatgacacctgcaccctgaatgtgacacagcaaaacattgactctccactggcatcagacatacaggaattatgaaggatgaaaccatctcccccaggccttcaataagtgcaagtggattgctttgtaaacagaagtgcaaactcgttccgatagtggttccgcaccagtgctcggcagccgccctggcacagcgggcagtagagacagctgctgcacctgtcgcctaaggccgagagggccgggaggccgctcctggagggggcgcactgaccggtgatgcgctcctccagtctccagggcatctttagcttctcggcctctgggcttcccagcttgctgcacacctcgggcctgtacccactgctgtcagttgaaagcgtgcattctggaaagccacagtgggacatccctaatgcacacccttccttcttcaccttctccctggacacctttgctaagagatttggctaatttcttct

SEQ ID NO: 188363 - DNA, 1004 bp, Homo sapiens
gggagtctggaccacgcagactcagaacagcactactcacagcagggcctcttgctcgctctagctgctgggaggaaaacggcttgctaatctccacgcccagaaattcagacaagagcattctccttatctcatctgcacaggaagcaggtctaagtgtaatttcacaagcccctgactctgtgtagacacccagctctccagaaaaatgctttgaagacaaaggatacagcatacagtcccgtgtctcggctgagtcatcgcattccttaatagtgtcttctccccgggtttggtggcctgcttctggagtggtcagttctgctgccgacatgcccacccagctcgagatggccatggacaccatgattagaatcttccaccgctattctggcaaggcaaggaagagattcaagctcagcaagggggaactgaaactgctcctgcagcgagagctcacggaattcctctcgtgccaaaaggaaacccagttggttgataagatagtgcaggacctggatgccaataaggacaacgaagtggattttaatgaattcgtggtcatggtggcagctctgacagttgcttgtaatgattactttgtagaacaattgaagaagaaaggaaaataaaggaagttcgtgaatgctaatcaagggctaaataaagtggaaagcagcatccttgaaaatcatcgctctcaggacggggtctgcctggaatagcactgaatgtgtttagtagtgcctttggcttgggggctttggagaaagctgcttgagcccttcccatgctcataaattaggtaaggagcagtgaggaagtgtctacagcaacctcagccaatgtgatgtgcctctacagctgtatgaagtagattctctgattttatcttgaaatccacaacttccacaaaaaagaaaaatcttttaccatttctcattaaaaaagtaatataagtttattgtagggggaaataatcaaatgtaatctcattacccaga

SEQ ID NO: 188364 - DNA, 823 bp, Homo sapiens
gggagtctggaccacgcagactcagaacagcactactcacagcagggcctcttgctcgctctagctgctgggaggaaaacggcttgctaatctccacgcccagaaattcagacaagagcattctccttatctcatctgcacaggaagcaggtctaagtgtaatttcacaagcccctgactctgtgtagacacccagctctccagaaaaatgctttgaagacaaaggatacagcatacagtcccgtgtctcggctgagtcatcgcattccttaatagtgtcttctccccgggtttggtggcctgcttctggagtggtcagttctgctgccgacatgcccacccagctcgagatggccatggacaccatgattagaatcttccaccgctattctggcaaggcaaggaagagattcaagctcagcaagggggaactgaaactgctcctgcagcgagagctcacggaattcctctcgtgccaaaaggaaacccagttggttgataagatagtgcaggacctggatgccaataaggacaacgaagtggattttaatgaattcgtggtcatggtggcagctctgacagttgcttgtaatgattactttgtagaacaattgaagaagaaaggaaaataaaggtaagtaataagctcatctaaaggcagaaatatatccaaagttatgtacttaatgttcatttataccgttcagatctatagacccagtaatgtcatttatagctataatatccagtgcatatattaataattaattgctactattgaattatgtgccccttaaaatattgactttatgtagatattcta

SEQ ID NO: 188365 - DNA, 963 bp, Homo sapiens
ctcaaaagtgtccacccttctgaggtccgtccctcccactgagattcctcatgctgttgctaggaaaatgatagaacatttgaatctggttacataaaaagacaaaaactggagagtttaggaggaagcaacttagcctcctgtatgactgtagtcttggccccagggcagttcctggctcagacactctgggggtatcctcagtctaaggagggtgtctgcctgcccggttgacaggatgcctcttcttcacatacgtcttgtctttcagagtccatgaccaatgcctcacttacaaatatcttttctccttttgctcccacctttgtggatatttaccagttttttttctctaaaatcatccttactttttttttttctttttttttttttgaggtggggtctcactctgtctcccaggctggagtatagtggtgtgatctcagctctctgcaactgagttcaaatgatcctcctgcctcagctactcaggaggctgaggaaggagaattgcttgaacccaggaggcagaggttgcagtgagctgagatcctgtcactgcacttcagcctgggtgacagactaagactccgtctcaaaaaaaaaaaaaaattgtgacagaagctggtgtgaccaaggaactggatgtttgagatgactgaggggatgagttttgcttaggtcccgtgagataaagtagaaaacgtaaaaagacgtatttactcatttctgcttgccagtgtaatttcacaagcccctgactctgtgtagacacccagctctccagaaaaatgctttgaagacaaaggatacagcatacagtcccgtgtctcggctgagtcatcgcattccttaataggtaaataagcctaattaatgccttttcctataggtaacataatgtctgatggggttagggatgatgcctctgtaatctataccagatgtactcttatacacaaa

SEQ ID NO: 188366 - DNA, 825 bp, Homo sapiens
acctgaaaatgatgacaagggtaggtataggtagcagccacacgggctatatttccaggacctctacttcggggtagatcctgatcagtctaaggcagcagtgctaatcccattcctgttgccaataattggtttaagcatgagaacacgatccaagtctggacaacaaaatatgaaggctgattcaccaggggtgggatgctttgaagaacatgttacatgctcttcaacagagacataagaaagggacacgttccctttctcctctgaactttgtactcagtgtttgacatctagaattctggaagccatgttaagaacacagggaaagtgattctaaggaccaagcctacccactaaggatggcaaagcctaaacaacatggggtgtaccttaaagatggcagggtacaaaggtgctgcccagaggtgtcctaccctaggtgtgctatgtaaggcgataaactgcccttacgcttaggccaggagagtaagggggtcttttctagaggctaaaactgatccaaaaacaaatccttatactcattcatactcctggaaatgacttccatgggaatttaggagaaaaatcctactaatattgctagctatggtgtactcatacgtcaaagagaagcaacagtgttgttctgctgcccaggctgaagtacaggggcatgatctcggctcacttcaacctccacctcctgggttcaagcgtctctcctgcctcagcctcccaagtagctgggattacaggcgcccaccactacacccggctactttttgtatttttagtagagacgggtttcaccacgttggccag

SEQ ID NO: 188367 - DNA, 441 bp, Homo sapiens
atttccatccccacagttctagctcaacatttgttccaaatgttgctccacatacggtcatacacaaatacaggtttactaaacagatctttatcataaacagtgaatactgataatcacataaaatggttcacctcttgatactcttgtttggaccaaattctaagaatttcaacctgtaaaacaactaggcacattggctagagaaccaaaacagacaccccctcctttttctcctggactaattctgggtcctcaaatttctgaacagaattgcagatacgttaccaagaacagctggaaccctaagaggtgaggtgatattaaatgcaagcctagagtggcaggttaaacatggccgggtgctttggctcacgcctgtaatcccagcactttgggaggacaaggcaggcggatcacgaggtcaggagatcgagacca

SEQ ID NO: 188368 - DNA, 572 bp, Homo sapiens
aaggaaaggaggcaggaaacagacatctttaatgggccagaggctgatttaggctgttcagacattgttaagctgctcagcatctgaagttcaaagaggctgagaacaaaccggttaggaaatggcagaagggggttgggacctaggtgagcagcccgtcaggagcccctgggtggcttgcactcctagccccaagtgcaatatacaggtgaggcgcctgcagaattttcattaggctgagttcatttctggaagcagggaattggcatccacttaaccatccctaatgcctgccttttcatgtatgtctgcacttacttctggccttccccggatgcagtatgtgattcctggaaggggtctcctgtacgtcgtagttttgtcatcttcaggcaacccaggatgacatgatttctggaaatttccctgatttctttctgcttcactctccctcttttgctagaagggatcggcttaggcagccattgtggtgttcattcaacatgtccagtacagcctgttactgcagtttccaagttggagggtccgtgagtctactcccttttttgaac

SEQ ID NO: 188369 - DNA, 274 bp, Homo sapiens
aaggaaaggaggcaggaaacagacatctttaatgggccagaggctgatttaggctgttcagacattgttaagctgctcagcatctgaagttcaaagaggctgagaacaaaccggttaggaaatggcagaagggggttgggacctaggtgagcagcccgtcaggagcccctgggtggcttgcactcctagccccaagtgcaatatacaggtgaggcgcctgcagaattttcattaggctgagttcatttctgccatttcctaaccgttgtctaac

SEQ ID NO: 188370 - DNA, 220 bp, Homo sapiens
cttaccctagcataatcctgttgttctaggcaaccaactgcaaatttaatcgattttcaactttatttattaagcttctactgtgtgccaaatacctaatgatgggagagaagaaattaaagtcagcctgcttgccttcaaatagaccacagttgagtatgaaacacaaaaagtttaagtgtcaccccacagacttctaaaagatactaatatgtatcta

SEQ ID NO: 188371 - DNA, 252 bp, Homo sapiens
attcttcctctgtcgccaccctaatgcaagccaccattgcctcctgcttgagctactgcagtagccattaactggttttccacccccatactactacctgcttaccacccattttccacgctgcagacagaatgatcttttaaaatcccaaagattatgcccctcctctgcttaacaccatctgtggcttcccattgctctcagaataaaacctagactccttaccacaacgagcaaggctcctgccatctt

SEQ ID NO: 188372 - DNA, 399 bp, Homo sapiens
cttcaagtgactctcctgcctcatcctcccgagtagctgggatgagaagtacccaccaccacgcccagctaatttttgtattttttagtaaagacggagtttccacatgttggccaggctggtcttaaactcctgacttcaggtgatccgcctgcctaggcctcccaaagtgctgggattacaggcgttagccaccgctcctagccggtaccgctattaaaaaaaaaatgtaatagctcatttggaaataagggacattggtagctcttggcacctcctgatacctccttcaggaccaggacagaaataccagctttgtctggagttagggcagcaggttctttcacacctgcagggtcctaacgcatgctacgaattttcgaataagactgcagggat

SEQ ID NO: 188373 - DNA, 338 bp, Homo sapiens
gaagtgcgggagttcagagtaaaacagctaatgagctactcagttaaatattttccagatgacaaggtccaggatgtggctatgggacttagtggctgaaatggagtaaaggaaaacatcactggagaagaggaggtcaaggaaatgacagggcagagaatttcatggtagttcacaagacaatgacaaaacttgggataaaggtaaatgagagggaatgcctagaatgaggtcagcaggtaacagcagagaggatcagtggtctagccggaaagtatgaacctcaaagcagtttttaacagcagagcagagggatggtctagcaatggtccacagta

SEQ ID NO: 188374 - DNA, 373 bp, Homo sapiens
aggtaagtggggaggggcacagagcttccatgccctctgttgggcacactaccctcccaggacctccttgtgtttagcaacacagaagctctccaaaccctgctgtttgggtgtttatggaggcatgattgataaaatcactggccattggtagttaagtcaatctccagttccttttgcctcctggagttcagcaggtgaggctgaaagttccaagcctcaaaaaatgtggttggggccaggtgcggtggctcactcctgtaatcctagcagtttggaaggctgaggcacatggaccacttgaggtcaagagtttgagaccagcctgaccaacatggtgaaaccccgtttctactaaaaataacaacagtta

SEQ ID NO: 188375 - DNA, 427 bp, Homo sapiens
tatacaccgactaccagtcttacggctatttttgtatttttagtagagatggggtttcaccatgttagccaggctggtctccatctcctgacctcatgatctgcccacctcggcctcccaaagtgctgggattacaggcgtgagccaccgcacccggcccagtcaacaaatattttgtctcctgtacaccaggtattgttctaggcaccatggacttacattctagtagggagacaatattccaaatcaggatgtgggagagtcacatgacacacactgtgatggagccaagtaagtcaacgaagacaggtatgggtggtatcagccttataccacccaagatatggatgaattttcccctaagttcaaacctccttagtagcttaaaaatcagttattctctggataagtatggtggcagctgaag

SEQ ID NO: 188376 - DNA, 162 bp, Homo sapiens
aaacaaaacaaaacaaaaccacaaaaaagaaaccatgaaagattctaaagtaaacacccatgcacctaccacctagattccacagcaaccattttgctgtttgcttcaccacaaatccctctggccaccagcatcagccttgtcaagggttaccgagctcga

SEQ ID NO: 188377 - DNA, 429 bp, Homo sapiens
ttctgtttatggcagttgcaggggaagtttcaccatccgcccaccctgcccccgaccctcacccactctctggtttgggaatcacttctctaaattccctattattctaagtaccctttctacaggatttaccctcacgcagaaggtggtgggcattgaagaagccagagctccttacagatgactctccacggataacatgaaggggagggatacctcacaagtctcctgtaaatgggaggtggcaggtggaaagcagcaggcagaaacatggaagggggaactgggcttcctggtgccagaggagaaatcttgaagtggaacttcttggtagtagtagatttaggtacccttcatccacactacataatattccagaggtgttacattatttgatctctgagggctttggtagaggagggaaccctg

SEQ ID NO: 188378 - DNA, 269 bp, Homo sapiens
agagcctaggtggagatatggcttgatgactctggtgggcttccaaagcccctaagtataagtcaggtttggttggagattacctcagtgtctacctggagagtccattaatcgatttttaggggtaacttaccagcaagatatttaatctgagtctgatggaaatcatcacatgtactccatccctaggagtagagagggggctaattgctcatggtccatggcccacataacacttgccgtcagatgtaataacccaagattgggtc

SEQ ID NO: 188379 - DNA, 503 bp, Homo sapiens
agccccacttaacatggacaattccaaagtctgtgttcaagtatagccaaagcccctgccaaaaagcaaacatttgccctggctcagaagttcccaagtgaataccaaatgcttctagagaaacatttatttgagtgttagacatggaaataagaagtagaaataaatgttcatgatttcttagaaggctttgcctggaaatctttattcaaagagtcctgcgttggacaaaaacaaagataaatagatgggacttaattaagcaaaaaagcttctgcacagcaaaaagaaaaaaccagcagagtaaacagatagacaacccacagagtgggagaaaatcttcacaatctagcaatctatacattcgacaaaggactaatatccagaatctacaagaaactcaaatcagcaagaaaaacacaatcccatcaaaaagtgagctaaggacatgaatagacaattctcaaaagaagatatacaaatggtcaacaaacataagaaaa

SEQ ID NO: 188380 - DNA, 417 bp, Homo sapiens
aaagaaggtctgggtgtgggggtctaattttataggggatctgtgactaaaacactgtatggcttttctaactcagtttctacctggctaggggctcagttttctcactgaaaagtaatgatgctggacaaaatttctaaggccccttccagttaaaaaaatactggtttctttcttttttttttttttttggacactagagtcttgctcttcaagagattctcatgtctcagcctcccaaatagctgggattacaaccatgcaccaccatgcctagctaatttttgtatttttagtacagatggggtttcactatgttggccaggctggtcttgaacttctggccttaagtgatccgtccgcctcagcctcccagtgctgggattacaggcgtgagccaccatgcccagcctttgt

SEQ ID NO: 188381 - DNA, 195 bp, Homo sapiens
ttcaaatttcaaaacatatatgagttaaataattcaaatttcagttagaaaaagcatagcaaaaaattgcaaagtaaaataacttctaaatgaaatttcgatttagcaatcttttttagcaggtcacttctatcctcttctctctgataagttaacagctttattcatttgggtaaaagtgtggggaaattttaa

SEQ ID NO: 188382 - DNA, 880 bp, Homo sapiens
acctttgacatttggaagcatgtcagtattctacatattcaaaatggaagtaaaatcaacaaagatagggaaaatacctggaatggaatacaagcagtatttcaaatatataattgtatctcagatacatggcataaccacaccaaaaggggaaaaagaactaatccagataatttgagcacagtacttggccctgtatcttacattcttttagtaggtttctttttttctagttacatgagtgtagaaattctgaaaccctatttgtttttattacagaattcgacaaaattgagtaaatgtattgatggtgttgagagccagggtactcacagaagggagatgcaaatatagaataaggatggtgaagaaccttatgagtttggattaaaattggttgtaacaaaatgacttcagggtttctaacgaaacataatatctaaatgtaatacataatcctagactggaccctagaatgaagagaaaaagtatattataaatgatgttgttcgaacaattggcataatggcaatatgcactatagattttttaaaaattagataaaagtattgtatcaatgttacacttattgcatttgataattatattgtagttatataagcaaatattcttgttctcaggcaatacatgctgaggaattaagcaaaactttcagagaaagaataataaaatacattttgcaaaatgttaaaaaattggataaagaatattttttaaacatttctgtaggtttaaaattatttcaaaataataagtcaaaaagttatgtatcacattctgaattgttccttgttaccttgcttgtctgtatcattatgttgtaattttcccatgtttttcaacctttctaccctttcta

SEQ ID NO: 188383 - DNA, 535 bp, Homo sapiens
aataatccataacgcagaacagtcgaggggcaggcaagggcggggcagagagttaactggacttagcttaccagtgtttcccaaaatgtgggagtgcctcatggggtgcatgagatgatttaatctagcccacagatacagaattatatagtattcatctcccttaaataatgagaaagttattcccgtttgaattatctttcaaattgctaatatcggtatcagtgagaaagcctcagtttgatgccagtatactttcaccacctttcttacacacttatcttccttttaagctgagtgattactgactccaggctcagagccctcagaaagcaataacagctcatgaactttttttccactgtattcatttttattgtttccttctggttatggcaagtgacgttggttcccctctacggcaacggcataaatattcccttttaaataaatgtattacctaacaagatgtgtcaatttaataaaaagagagagtaaatatttcagttaccatacagctatacaaaaattgtgg

SEQ ID NO: 188384 - DNA, 410 bp, Homo sapiens
cttgtttactcagctaagaagtgaaacagttgatttacctatttctaaacttaagaggaaaaacaattatcttttaagtacagttatgcgccacataatgacgtaccccatgtatgatggtggtccaataagactataatgaagctgaaaaattactcttgcctggtgacatcttgataatgctgaccccatgtaggcctaggctaatgtgtgtgtgtcttagtttttttaaaaaaagtttaagaagtaaaaaaaattttgtttaatagtaaaaaaaggttatagaataggatataaagaaggtactttcgtgcagctgtaaaatgtttgtgttgttagcgaaacgttactacaaaagagtcaagtaaaaggccgggcatagtggctcacgcttgtggtcctagcacttt

SEQ ID NO: 188385 - DNA, 481 bp, Homo sapiens
ctagggcagccctgggaggtggtctcctctctgagcactccctgccccattagaccctgctgacccccgcagacaccctggctcgctctaataagacatctttggggctgccacccttcctggttaggaccaatttcccacagctgatcttagatcacagccctgggaaaaaacacttttcccctgggatgggggaaggtactgcacttcctgtcccccttgtgagcccagccacctgtccctttcagaaaggagaacagcctggtggttgaaggcagtccctggtgccgcaaggcatgagtttaaaacccagggcaccacttgagaatggcgtgaccttgagccggttactgtaattcgtcgaatcccagtccctgtcggatgcaaaatgagtcattcatgtaaggaccaaaagcagctgccaactataactgaaggaagccaagactgtgaggcatcctgggggcccagatactaccat

SEQ ID NO: 188386 - DNA, 345 bp, Homo sapiens
agataaggactaagagtatgtaggatgactaggacaagaacaaatggcatgtgatggtaaatgcagaatgtctttgtctttacaaaagtgcaatattgtctatacttagacgaagatgctgggatggagagtgggggctgcccggacagagctacaatcagggaattcaaggcctgccactgtcagtgacttacattgtttccttggagtttttcacaaataaattcaagtttatgttattatttaaaaaatcccaaggcatacaagtatttttggataaaataaatatatctgtgaatctattgagaataaaggtagcatgttaaaactcccatcaacattctg

SEQ ID NO: 188387 - DNA, 352 bp, Homo sapiens
ctttgttcttttcagtttcagagatcttttttatttaacttagaattatttcacttttgaatctcttaatttcagcatctgtatttatttcaaaccttttgggaataaagaggcaacttgttatgttggaaaggcttttggagcctgatagatctgagttttaatcctgtctttgccacttactaggtatttaatattcaggaatttatattatctttctaaaccttttttttttttttctgtaaaatgggaagttcttagtatggtacttggcttagatggctcccaataaaataatgcctgctaagattattattatcacacagaaagtttgtccttagtaccaaatcaa

SEQ ID NO: 188388 - DNA, 319 bp, Homo sapiens
gctcatacatagaaaaaaaatctgttaatagaaactgaggaaagctcagacattggacttaacagacaagactttaagtcaattattttcagaaaggtcaaagaactaaaggaaaccaggagaatgatgtctcaccaatattggtaaagagactggaattataaaaaggaaccaaatagaagttctggaattgagaagtacacaaataaaaaattcattggaagggttccagagcagacttaaaaaggaagaagacaaaaatcagcaaacttcaagataggtcaattgagattacccattctgaggtgcagaaagaaaa

SEQ ID NO: 188389 - DNA, 329 bp, Homo sapiens
agactgaccaagctggtaaatatataatgggaaccaggtatcttactatcagaagagagttacaaatccagttagggaaagaatgagaatgaaccccacggtgtcaaactggaactgaatgtaactgtggggcatcatgatgttcagtagacaggtaggaaagtagagacagataaaataaatagaaatacaaatctatgtacatacataccttccctagttttagtcactgagaaggcctggaagcagagatatcccaattataatgagcacacttagtgcccagatattggtttctaaatactattctccagtaataggaacctggg

SEQ ID NO: 188390 - DNA, 417 bp, Homo sapiens
cccagctacttcagaggctgaggcaggagaatggcttgaacccgggaggcggaggttgcagtgagccaagattctgggactacactccagccttggcaacaaagcaagactgtctaaaaaaaaaaaaagctaggttctaaattatttagtcttagaatctaacaagatattttcattttttaagattgttttcaagtaaaacttgctgtttctccctatccacttccaacaattgtctgatttatatgaggcaaacacatctcatataaatatgacctataatagcagataaattatttcttaaaaaaggaaagagtaaacatcttgcccctactacttctcagttctttccacacttcttaggaacaaatgtcaacagtaggctgggcaagtggctcacgcctgtaatcccaacac

SEQ ID NO: 188391 - DNA, 467 bp, Homo sapiens
cccagctacttcagaggctgaggcaggagaatggcttgaacccgggaggcggaggttgcagtgagccaagattctgggactacactccagccttggcaacaaagcaagactgtctaaaaaaaaaaaaagtccaagtctttcttaaatatagctttctaaaatgtagttttgagttaaagctaggttctaaattatttagtcttagaatctaacaagatattttcattttttaagattgttttcaagtaaaacttgctgtttctccctatccacttccaacaattgtctgatttatatgaggcaaacacatctcatataaatatgacctataatagcagataaattatttcttaaaaaaggaaagagtaaacatcttgcccctactacttctcagttctttccacacttcttaggaacaaatgtcaacagtaggctgggcaagtggctcacgcctgtaatcccaacac

SEQ ID NO: 188392 - DNA, 141 bp, Homo sapiens
tcactgacagtggtcagaggtctcggcaagaaaaatgaaggttctgggagttctgagagcaataggaccagagcctaagggagagataggggtaacaggtaagcaagattccagtctcaaagaagctgagacctaaataca

SEQ ID NO: 188393 - DNA, 399 bp, Homo sapiens
tgctggggcagcctggggctggcaggggaggccatgacgacaggatgagcacaggcctcaggggggtgaaagggatttgtctggaccatgcaaatgtgtgggagggcagagccgcctctggaagtggtgagcagccaggatgtggcttgcagacacggcctcagcagcctgcttggggggcccggccagaaggcccctggctctctgggagcctctcctccctctgtgggcttttgagggggtgccagggaaaagaggtcccatggggcatgagtggacggcagagcctcaaatgctagtttggggcagaatgagtgagctttgagctcaggggtcagggctgagcagaggcagcctggcctcaccctgtctgtggggaggcagaggcccacagcacag

SEQ ID NO: 188394 - DNA, 316 bp, Homo sapiens
taagctttttctcccaacaaagctgaaagaaaacccactttgtcacttctgagcggtgacagtccatggggagcctgtggtatgtaggatgggcattggcaaccataaatggattatgtttgtttgagattacatagtgtaccatttgaatctcctgaaaattgcttctggaacaaaatggggcttggataactcttgggctgatacatgtacttggtatgagacattttgaactcctcctgctgatagatgtcacgagcaacaccagagtggtaagtgttaaacaaggaataaagcaagtagttaatgggttgtg

SEQ ID NO: 188395 - DNA, 702 bp, Homo sapiens
cttggagaacattatgctaagtaaaataagccaggcacagaacgacaagcactgcatgatatgacttgtatgtggaatctaaaaaagttgaactcttagaaacaaagaatagaatagttgttgtcaggggatgggccagctggagacagtgggtagatgttgatcaaagggtacaaagtatcacttaggatgaataagttctggggatctattgtacagcatggtaactacagttaatagaaacatagacatgaaaattgagaagagagtagttctttggagatcttaaatgttctcaccacaaaaaatgacaagtatgataagtgaggttatgggtgtgttaattaggttgatttaattgtttacaagtatacacatgccaaacatcatattgtccaaggtaaatatatacaatttttatgtcaattataccttaataaagctgaggaaaaaataagcacctcacttagtgcttatgatttagtagcacataagattatgtaaaaagcattttggccaggtgcggtggctcacgcctgtaatcccagcactctgggaggctgaggcaggcggatcatgaggtcaagagatggagaccatcctggccaacatggcgaaatcctgtctctactaaaaatacaaaaattagctggatgtggtgctgtgtgcctgttgtcctagctactcaggaggctgaggcag

SEQ ID NO: 188396 - DNA, 178 bp, Homo sapiens
aatttgctttaaggcttatccaggagaaaattacttagctttgggaacaggtggtggaagaaaatcagccttagctccagaaacgggtggtgtagttgggcaaccttggatgacctgtgacgaggctggcctgagttagcaggctgggaaacgccaggtgggtgctgggcaaagtgag

SEQ ID NO: 188397 - DNA, 789 bp, Homo sapiens
gcccttcaagaccagacatgtacctgtctcctctccaggtctcacctggcactgaccccaagccccaggcgtctcctgtccagccacacctccaagagaagcctcaggcccttttgcatgcaggcccctagcctggaaggctccatctctgcttgtccggcctcacctgacctctggagtcaccatttccagggtgcttcctcccctaggtgggtcagagtctcctctgggctctctcatccttgtgtttccccacactctataccatgatgtcctgatttagagtctgtggttcacaatgcagtccacaagcctcagggggacagggacctgtggaggacggtggaggaaggaggggtggagggtgcctctgggctccgagtgtgcactgtgcccctgaccccttgctaggtttccagcccctcttgccgcacatgactgggtgtggttttctgtgagtccctgggaagcgcctgctgtggactggagcctttgggtcccagctccaacattcactgagggtttgttctgtgccaggtgccctgccagaacctggggaggatctacagatgggaaagcaggccacgccctgggggcaccagcccctaacttaatgtgtgaccttttctgaacctcagcttcctctgctgtgaaggggatgaggacccaagacccttccctgttaccttgggtacatctatgctgtggctgggatcagacatggccccgcatgaccctgaggctgcagctagaccagaacttgccctccactgggcctctggaacactg

SEQ ID NO: 188398 - DNA, 227 bp, Homo sapiens
ggaatttgggagacatcaaatccaaattctctccctgcaactcatttcttccttctctgtcttgcctccctcctttcctttctatgccttttctgtgtattttatcttccagggattatgctaaacactagggccaaataagaacatggctttattctcaaagaattaataataacaatgtatttttgtctatgatttgtagacagtatggagtgtggattatggaa

SEQ ID NO: 188399 - DNA, 166 bp, Homo sapiens
agccaatgattagtgagagattgggcccaaacacttcaagccagcaaaatctcccgctgagttgatgggtctctatgtggattcaggaaaaagtttatagttcagacagtttttagttcaggctgttttgcagtttctggtatctcctctgcaaaacacagaggtt

SEQ ID NO: 188400 - DNA, 439 bp, Homo sapiens
tgttggacaattatgcaacagaactgctttatgtgtacttcccattttatcacacagaatattaagaagatgtatattcgaaggccaacacttaataaaaaaaattttttttgctgtttcatcaaagatattaagtgaaaagtaaaactgacattttgtttgttttcaatgtgcatgttggggaaaaactcaatcgttattattagctcggtttggtaccactaaccttgatttgtgctaaggtgccagcagcaaatcaattgtgcaagtcactttgcttatgcctgtaatcctagcattttgagaggctgaggtggagggatcgcttgagcccaggcattcaagaccagcttggggaacatggctaaaccctgtccttacatattcttccctttttttttttttggaaagggagtctcttggtgtcgcccacccaatg

SEQ ID NO: 188401 - DNA, 369 bp, Homo sapiens
attggttggctgtaagtatttggctttatttctgggttctctattctgctccattcgtctccgtgcctatgtttataccagtaccatgctgttttggtgactatggtcttatagtatagtttgaagttgggtaatgagatgcctccagatttgttctttttgcttagtcttgctttggctttgtgggctcttttttggttccatatgaatttttggattgtttttttctagttctatgaagaatgatggtggtattttgatgaaaattgacttgaatttgaaagaaaaagatttctttaggcaatataggcattttcacaatattgattctatccatccctgaacatgggatatgtttccatttgtttg

SEQ ID NO: 188402 - DNA, 416 bp, Homo sapiens
tttgatgtgttcaggggtgcagagaactattgtgacttccagcagagatgtgtctcaggtttctttgagtggctttcagcaaaggaaccctttcttggtgctattgttctcaataccttgttgttaggcagtttagaggctttgctgttcaactggctcctctctctggcattcagaaaatctgtcaccagtaacgcagaccctggccttggaggaatagttaagattgtgaataataggattaagtgagataatatatgtaaaagtcccgggtaaacaataaaagtctatttcaatggaatggattattataatactattttttcagtcagcatctcttttctgaattgctcagagcacttcgttaacactaactggttaatccaccatccatccctggttggaggctggcattt

SEQ ID NO: 188403 - DNA, 270 bp, Homo sapiens
ttcagctgcttagttgggttaacagtttcctttccactagtatggtgtgaggagtgggaaaggcagcagagtaccactcacagcctgcccagtgagcccaaagcagtagtgagcccagtcagaagaaaagcctggcatactagaaagagcatggcctttgaaagattggtcagcctgggttcaaatccactgtttgcctcttcactgtgtgaacttgagcaagttcattaagctctgtcctcatctgttaaatgtgcataatcgtttaca

SEQ ID NO: 188404 - DNA, 146 bp, Homo sapiens
agttgatttaacatataaaaatcaattgatataatataccactttaacagaataaatggtaaaaactctatgattatttctttagatgcaggaaaaaatttgacagaattcatcacctttcattatagaaatgtttaaccatcaag

SEQ ID NO: 188405 - DNA, 255 bp, Homo sapiens
gtgtgaacccgggaggcggagcttgtagtgagccaagatcctgccactgcactccagcctgggcgacagagcgagactccgtctcaaaaaaacaaaacaaaacaaaaaacagaaatttaggttatcgattagaaaactttcgtcgtcctcctcctcctcctcttcttcttcctcctctttcttcttcactacttcttctccttctctttctctttttccttctctttctctttctcctccttctcctctcctcct

SEQ ID NO: 188406 - DNA, 513 bp, Homo sapiens
agacaacctagccaacaagagccctgcagagaagcatcccaggaacttctatcttccaagccctaattccctttagttatatcacaactctaccagccatatccacttacccaaatgtgttactttccctctgtcaagatttgggagatctgatttaaaaactataaaaacaacataggcttgacatagactacactttgccatttttagctatttaacctttactataaacatttttagctatttaacctttactacatatactatatatagtcaagaaatatttttgtaatgagttttgtaagttacacatttttattatacttatgaatacagtactattctttaaatataaatataatgaaaagatcattaattaaagaagaaagtcaagctgagcactgtgactcacatctataatcccagcactttggaaggctgggggtgggggcgcgaatcatttgaggtcaggagtttgagaccagcctggccaacatggtgaaaccctgtctc

SEQ ID NO: 188407 - DNA, 300 bp, Homo sapiens
tgaaaagccgtatttcatttcttctagctaaatttcctacttctttgtattattaagtaggtcttttccactcatgatcctaagcatcacacacaggttaaggcatccaaaggtcaaactgccatcctacctgccccatttttacttgagtttggctgagaacattctctattcacctcttcatccctccctgattggtttaggctaatcttgggttctgcttaggcaatattgcctaccaaagctgttcccagaggaagagctccagaagtcctagctgtaaatcaatcgctcaacgat

SEQ ID NO: 188408 - DNA, 244 bp, Homo sapiens
tctcgctatgttgctcaggctagtcttgaactcctgggctcaagtgatcctcctgcctcagtctcctgagtagctgggaccgtaggtgcatgccactgcccctggttcccagcccaccacagctcacagctctgggagtggcaggaaggctgggcctgggcagggggagcagcagaagtgcctgcaggggttggcaggggctgtgctgcactggcctgtgggcctgggtgagaggtgaggatgg

SEQ ID NO: 188409 - DNA, 448 bp, Homo sapiens
cagctatttccaggaaactgaactgcatcccaagaaaaagctcaagaatacaaaaatattcagcccccaacaaggtaaaattcatgatacctagcagctaatcaagacctgcaaagaaacagagaatacaactcataataaaaagaaaaacaaatcaatagaaacagacacagaaatgacacaaatgatacagttagtagctgaggactttaaaacagttattatcactgtatttcttatgttcaaaaggtggaagaaagatggagcacattaagcagaggcaaggaaaagatagcaaaaaaaagttgaatgaccatttttgaagattctgatgcctgagatgaaaaatacataccaaacaggattagtagactagacattgtagaagaaaagattagtgacgtttaatacgtagcaatagaaatgacccaatatgaaacacagggag

SEQ ID NO: 188410 - DNA, 475 bp, Homo sapiens
atctgtactggagagagaaaatcggggtcatgatggtttgtaaagtcatgcaagtgatgagcttatttaaaaagtgaatgtagatagaaaataaaaagttccactcctgaagtaccttactgtgtactggtcaagaagatgaagaagaaactgcaaaaaagactgagaaggaaacagcaaaataggaagaaaactaatttatttaatttggtaaataggatattattgatggacctaccaagatcagtgttagtagagtggtgggaatgtaagccaaaaatcaaggggcttacattttaaattggagatgaagctgaacccccagtgattataattcatatgtatcaatgaagtttgatggtgaacaaaagccaaaagatgatagatcacttaaggatgaggtataatgaagaaatgactgtttctggaatggggagacaaacatttttataggcagaagggacaaaaaatgtgg

SEQ ID NO: 188411 - DNA, 292 bp, Homo sapiens
atactattcagccataaaaaggataaaatcatgccatttggctcaatggggatagaactggtggccattatgtaaagtaaaataagcccagtacagaaagacaaacattgcatgttctcactgattcatatatattaatacagaataaagtaaagtagattctatggaagcatagagtagaattgtggtaaccaaaggttgggaagggaagtgagaaggaggagatgaagagaagttggttaaggggtacaaaaatacagttagatagaagaagtacgttttagtatttgac

SEQ ID NO: 188412 - DNA, 439 bp, Homo sapiens
gttctgggataactggctagacatatgcagaatattgaaactggacctcttcctttcaccatatacaaaaattaactctacatgtattaaagacttaaattcctaggaacaaacctaggaaataccattctgaacatcagccttggcaaagaatttattactaagtccctaaaagcaactgcaaaaaaaataaaaattgacaagtgagacctaattaaactagagcttctgtacagcaaaagaaactatcacagacaacctacagaatgggagcaaatattcacaaactatatatctgacaaaggtgcaatatctagactctgtaagaaacttaattcaacaaacaaaaaataaccccattaaaaaatggacatgaacaaacactcctgaaaaaaagatacatggagccaacaaatatacacagaaatgctcaacaccc

SEQ ID NO: 188413 - DNA, 768 bp, Homo sapiens
gctgggattacaggcgcccgctaccacacctggctaatttttgtatttttagtagagatggggtttcactatgttggccaggctggtctcaaactcccaacctcaggtgatgcacccgccttggtctcccaaagtgctgggattacaggcgtgagctaccatgccccaccgtttttgtggttttaagccacccagtctgtggtactttgccatagtagccctgggaaattaacacatcaataagaagtgatctgccatgatgaaggtattatgggagtttgggcaagaagatgactcaccctgatgggaagatgaaaaagacttcagaaaaagttttccaaaggaaaatggctcttgcactagtacttggacgatatacaaaaattaaacaggtgaaaaaggagaaaggagtgtcttgagcgaaggtgcttgtggatatggaaacgtgtttggtgacctgcagggagggggctgtttctccagcaagaatggctgtggaggttccccaaggcatgacacaggatgggcaagtgtaggtggagtcataaggcactttacccttcacccatggaatttacattttaacaggagggcaatggggctctgtcatgagggcaatggggctatttccacccggagtcctagcaggcagttcatggtgggcattttaaaacaaatttagaattttggggtctaagaattttgacaccctatcatagagccgagtttctcagtcttggcagtattgacatttgaggctaggtaatc

SEQ ID NO: 188414 - DNA, 313 bp, Homo sapiens
aggggacgggggaggatgaagacaagtaggttaaagagtacaaacatatagttagatataattaaattcaatgtttgatagcagagtagggtgactacagttaacaaaatcatagctgggtgatggacactctaaatactctgacttgatcacgatacattatatacatgcaacaaaattttacatgcaacctatcaatatgtacaaatttttctaaaaagctcagcaaactggaacttccttgctctgacagagtagcaaaaccaaggaagattcaatattgtagcactgtcaatactccctaattaatctt

SEQ ID NO: 188415 - DNA, 371 bp, Homo sapiens
aatcttgttttatccataaaccttgttttatttagtttcatgaggaattaacctgtgacaggcacaagctgggtgcagagttaccatgtttatttctttccactagaggtcactaaagaagtaacttcttaaacttaaggcaaatcagtgatattaatgtgtaaactaatatttccattaataaattttttgaggaatttttatcattaatttggaatctgttacagctaaaaagtcacaggaaaactatagagatggacaatctagtggttggcagggggcggggagggtatgactacaaagcagtgactgagggagtttcggggagggaactgttctatattctgactgtcgtcatggttacattaatc

SEQ ID NO: 188416 - DNA, 561 bp, Homo sapiens
cagaggatcccccgagtggcctgctcactgccgagtgggtccctgcagcagtggggaaggggaggacagagggagttcacaagaactgggaatgagagaatttaccatagacagaggcacaggatgctaaaaacaagacttttctggcaactttaggcgccaccatgtaggaaatgtttattggtgtgacctttggtttagtatgtgaaggtttacatgattggggagaaccacaggactcagatttgcagaaatgaaagatgcatagtaatgaagcttgttctatattaaaatggccacaagtgagctatatatttaggcaggtgaggctataggcatattataaatccacaacagaaggcaaagtcaatggtgcctcctgtatcaccataacaatgcataaaatgtatatttcaaagctagaaagtgataatcatggaaaatttataggagggatatctgaaaggcagctgaaaggcccagaagccatagggagtgcatgatttcataaatactgaaaaagaattattgcaggtctcctaccaagcccattatatgtgt

SEQ ID NO: 188417 - DNA, 614 bp, Homo sapiens
aatgcccaagaccggatggtttcatatgctaattctaccaaatattcaaagaacactaggccttcttaaactcttccaaaaattaaaaaagagaatgcactcccaaactcattttataaagtcagcatcaccctgattccaaagctaaagataacataagaaaattaccaggcaatatccctgatgaacataaatgcaaaaatcgttaataaaacactagcaaaccaaattcaacagcacattaaaatgattatacaacatgatagagtgggatttatccataggatacaaggtcagttaacatatgaaaatcaaccaatgtagtaaatcacaataagaggaaggaaacacaaaaaacagatgatcacatcagtagacctagaaaaagcatttgacaaaagtcaacatcctttcatgataaagactcaacaaaacaagtatggaagaaatttacctcaatgcaataaaggtcacttatgaaatgcccacaactaacatcacactcaatggtgaaagactgaaagcttttctttcctctaagatacagaacaaggaaaggatgctcactcttatcacttttaatcaacatagtactggaagtcatagccagggca

SEQ ID NO: 188418 - DNA, 596 bp, Homo sapiens
ctctgtgccatctcttatctgaatctctttgtgtttctcccctattcagatcaaccagtcaaggctcccataaagattttggcctcatcttgtttttttcatctttgctgcttgtagtcaacaggaattcagtacctttagctgtactgatgtgtttactctttcctagaaaagcaaggaaatgttttgcttctgcgttgttttttctttgcccccacacctagaatgtcttttttcacagcccacgtttaaagctgatctacctctcataagccacacattctagtttgtagagatgcttccccttgttatccttaagatctcattctcttctgttattttggtgcttaattttaggtagatgtatacattggttctggtatcctagtttttgcgaatcttgtccttttcatatatcgtacttcttcagttacacatctgtagaccaggtcttgtaatctccctttgctcttcatgtgcatgctcttggtttggaggacttactgttgagctgagtggctcaaagaatacctagaatgagatttttagccaaaaactaattcaggagtggcaaaagcttccgtcttcatttatac

SEQ ID NO: 188419 - DNA, 476 bp, Homo sapiens
atgtcataaaaataactactattttatgtgtgcgccattatctgaaaaaagctaggtggcactaacttactgcatgtatttatccttctgtataaagatgttcaacaatggctctactttagggaatacttcaccttccttgttagagaaaggaacatatgactggcaaaggaaactccaggataattaaaaacccttgtatgtgtcttcatttcacacattctttctctaggacttcttttgggaattagaccttgaaatagctcagacttttaaagatagagctgaaagttctattatatctagaatgaaaaagtccagtctaaatgaagaaacaatctttttgagggaatatataacttggggttgcggctattatagagtaaagggtacttcgacttgccttcctgtcatagacaactctcacattggccaaaacatacccagtggctgcttttaggcatcggaccatacat

SEQ ID NO: 188420 - DNA, 439 bp, Homo sapiens
tgaagaaaatgaacacattgcataatctaaaacctacctatcctgatagagtttccccttttctcatagctttcccatcttttaaaagccttcaagtatgaatgctctcaacttccctcatcattactcataaacttatcagtaacaggaccattcttattttctttacgcttacctcaatggaccattctctttttatgcctatttcccatagacataaaaggtaggaggtaaataaagtcagaaagaccaacagtctacagccagtttctaagctatcagaatatgacatttttctttgcaaatatagaaatataccttctgttaagtaaaagtaaagtgttaacaagccaccatagacagatactcctgcctatctgggtctcaaatcacagttttaagggctagtatcaaaagcaatgtgttcaagggtccctaa

SEQ ID NO: 188421 - DNA, 307 bp, Homo sapiens
caatagatacctgcaccctttattcactccctttcccaagtctgactagcatcctttcagatcgtttcctgtgtatttgaacacccactcaggcttttgttgttatataaaatgggctcaaactacaatctgctttttttcatgtaacataacttagagatctttctatgtcattacatgaaaacctctctccttctttgtaaggactgcttcatctcccatagtatggaagcgccaacagaactgatttcactgttccccactgctggacgacgggatcctctggaacgctatgcaccctagatac

SEQ ID NO: 188422 - DNA, 343 bp, Homo sapiens
tagatacctgcaccctttattcactccctttcccaagtctgactagcatcctttcagatcgtttcctgtgtatttgaacacccactcaggcttttgttgttatataaaatgggctcaaactacaatctgctttttttcatgtaacataacttagagatctttctatgtcattacatgaaaacctctctccttctttgtaaggactgcttcatctcccatagtatggaagcgccaacagaactgatttcactgttccccactgctggacatttaggttgctttcaaaatcccccctacaaaataaccaaacaacaaacatccttgtgcactggattgaggctgg

SEQ ID NO: 188423 - DNA, 529 bp, Homo sapiens
agaagtcattatgggcattgtgcgagtagagaaaagtaagctggtctgtagagggagaataaagcagtcatgggaagagaagcattaggcagggctcccacactcaaatgagtcaggcaggatgacagaagtaagataactgaattcaaattcaaattccagattctttcaactaggggctctcaaaagtgtgatgctccagcatcacctgggaacttgttagaaatgcaccttcccaagatccaccccaagacatgttagaaactctgggatggggctcagcaatcagcatttttacaagcccttttgggtaattctgatgcacgctttagactgcctatcgaactgtagacatctgacgaacaaatccaaaccacagtctgacaatgggtcacctctgttgaaagtgaaacagaacacagcagtactgatttttaatgactttccagaccctagttctagttccccatgattcctggtaacccaagtcctggagctgatctggcagtttcaaaacatttcttttcct

SEQ ID NO: 188424 - DNA, 198 bp, Homo sapiens
caaataatgcatcttttcctagtcacttcccattccatcttcaaacccaagcaatctgcttttgtttcattctccatggaaagtgttctgaccataaagatcaccaatccttccccttacataatctccctgtagccttttgatgtgttcttgagactcctaagtactcaggactctatactgttccttcttagtctc

SEQ ID NO: 188425 - DNA, 377 bp, Homo sapiens
gggagagagagggagagagagagagaaggagagagaggaagagggagagagagggagagagaaagagagagagggggaagagagagagagagagaagacacagagggaaagagaacacatatgtattgccaataattgaaggctgttgtgctgggagctgagacacattaggaagagtattagactgtattgaaggtaccaagaaggaaaaggatattgttggtagagcattaattttcagtactgcattagttctgggtggtagccccactctgttcttcatcccaccatgcacctccccacagggcaaggaggccacagggccaaggagacatgcctactccgaccctatatgtccctttctctctccactcctt

SEQ ID NO: 188426 - DNA, 366 bp, Homo sapiens
tgattggtaacttcataggagatttggcatatataagttaaagagcagacgttactgcttatatttatatcttgggcctgtagcacttaatattgtggataaccatttacttgtgattatgaaaactcctggggggcacaccgtggcatgcatgcccttcacataactttgtaagggtttcccttctccaggcattttccgttcttagccgaaataagaatgagttgctttcaagatgctttcataaagatttaaaagaaattgacccatctgagataatttttaatataacctgctcctagtataaaacccaggatataaatcatgaaacagaatacttcttcagtcttcatgaaaagctgggtg

SEQ ID NO: 188427 - DNA, 359 bp, Homo sapiens
ggccgatgaagtttcagcctcaactgatggcagcagcctctccagatggcctgccactgccatcacaccagctgtagcagggaggtgcagccggggttgaccgctccatggagttgacaggagctggggacaagtgggagccctgccccttccaagctggggcaggagctccccaggtgccgctgcagccattcataccacggctgcaggcctgggcttcccactccacagagcgcgcaggagccccaccctcctgtgaggggttgcaccagcccaagtcatggctgcagatctgagcctccctgtgctctttgggggctgggagcaggcaggagccctgcctttccaggtgcagctgc

SEQ ID NO: 188428 - DNA, 438 bp, Homo sapiens
aggcctctgtatatcttcctgtgtcattttgctggagtctgtaagccctcagaagacaggaatcccttctaagaaactccttttactgaaccccagagagggtgatcagggataaatgcttcagggtggtgggcacggcccctcttatccttacgggaagcatcttgactggatattcaggtcagggacagtgttcctcagcacgaggctggccttcagcacagaactctccagggaggggcagggctgggtgagcaagtgcaggggtggactgaggagggtgaggcaggctgagctggggacgcgtcctccaaaggtttcagtctttcattcttctaggtgcctttttaccttcaatgacacttttccactctcttttctcccttggatcacttctggaaagggttttaaagagctctgccatattctgaccccatt

SEQ ID NO: 188429 - DNA, 382 bp, Homo sapiens
aaaagttggtttcagggcctaaatacccatctcttatatttatgacatggtccttagcaaagtaatgtagtaggacacgagtttttcagtaaatggacaggtctgaatcctgtggatatgagttgttgaagggattactttgagcaaattatcaaatctttttgaacaccgtaaattttcccatttgttaaaatgagtgttctgagtatgtcacaggctttttgtaggaattaaatggtatattgtggctcttcaagtgtggtagctggacctgcattaagaagcatttgaggtgcttattaaaaatacagtttctggagccccacttcagagctactgaccttttgggggatatattctagggtcttcattttagtaaact

SEQ ID NO: 188430 - DNA, 403 bp, Homo sapiens
ctgcttcttgaccctggaagagtacagtaactcgcttcccttgctatttggtggttccaactctgcgatacaaactatatacgtttctgagccctcatggcaccaggctgagagctttctggaggtatggtttgccttgatgctcctctgccctaacccatctttctcacacccctgtaggtttccctgagagcagttcctcagtaaatcacttgcacaaacatctccatctcagctctgcttgaggggacctaaagacagagtggaactcaaggtcattatatggaggagctaaaacccatgctatagaacgtcagtgcaatggtttagggtggaggggcagctgcattgagatccagctcctcccttttgtcccagctgcttttttccttttctcccaccg

SEQ ID NO: 188431 - DNA, 374 bp, Homo sapiens
agagattgagaccatcctggccaacatggtaaaaccccgtctttactaaaaatacaaaaattagctgggtgtggtggtggttgcctgtagtcccagctactcaggaggctgaggcaggagaatcgcttgaactcaggaggtagaggttgcagtgagcagagatcatgccactgcattccagcctgggccacagaccaggactccgtttaaaaaaaaaaaaaagtaataagacaggggtcccaggaggctatatagtatgatatgcaggataatgagaatgagctaaaatgcctgagaaaaaaattgctgattcctagcttttattccttaactacaaaatattgatatttttgtttatatatttgaaaatattt

SEQ ID NO: 188432 - DNA, 687 bp, Homo sapiens
atcccagcattttgaggggctgaggcaggcagatcacctgaggtcaggagtttgagaccagcctggcctgcatggcaaaaccccatctccactaaaaatacaaaaattagctgggtgaggtggtgtgtgcctgtaatcccagctattcaggaggctgaggcctgagaattgcttgaacccaggaggtagaggttgcagtgagctgagatcgcaccactgcactccagcctgggcaacagagctagactctgcctcaaaaacaacaacaacaaatcatcaatgatttaccaatgaagatatactcaacctccttaacttgaaattggcagttcttccccatcttgctcaaccttaacttctgcgtatcacattaaaaactacatcctagccaatctggacccctagttctccaaacatatgacagctactcaccaactgaatgtcaaactctgcaaagtggagttgctacttcaacaagatgcatctgcttggaagctccttctggctttgctgcacatattcagtgtttgcttatttacacaggcaaatgtagcatttccctaccacggcaccaggaggctctaaagggatgaatatggctgtacttggaaggccaaggaaatcctaggagcatggaatgaggtggaacaatctaattctgctctcacctgactacagcgtaagcca

SEQ ID NO: 188433 - DNA, 487 bp, Homo sapiens
tcctcactcctaataaaatccctcaagagggttcaagagataacctcttcaccaaatctgttagaaatagattagacagtagtctgggtgcagtggcccacttctgtgatcacttgaggccaagagcttgaggtcagtttggacaatatagtaaaaccttgtttctgttttaaaaaacaaacaaacaatttgagagtctttctgagctacctgtggctcaggtagctgcccaataagcaacaacaagaaatacattacatgggcattgtggctcatacctataatcccagcactttgggaggccgaagcaggaggattgcttgaggccaggagtttgagaccagcctaggcaacatagcaagtcccccatctctatgaaaaatataaaattagctgggcatggtggcttgtacctgtggtctcagctacttgagaagctgaggcaggaggatcacttgagcccaggaggttgaggttgcagtgagcc

SEQ ID NO: 188434 - DNA, 304 bp, Homo sapiens
agttgatacctcaagaaaagaacctggaatcatcatgcagggccagagagtgaaaaccagctgactgctgagaagaaagaaggatcaaactaggtctttagggacattatttgagaggtcaactcaaacctcacctgaaactagtcctaaacctaacttttcaattatagaaggtgataattcccttgactctttaagctgcttgaatgaggtttttgttacctgcaatctaaagattcctgaataatatatacagtcggccaggtgctgtggctcacacctgtaatcccagcactttgggagg

SEQ ID NO: 188435 - DNA, 516 bp, Homo sapiens
cctcctttctctaggaagagttctaccattttcctcattgcccaagctcagggcaccttcttcccttcttgcttgtccaacatgctctaaatcatgctatcactgtgatttcccttgatattctgaacaaaatgagcacatccttaggaagcaagacctatgaagtagtttttttttctctctctctctttctgtattcttttggagtgggagtgggagagtggaggcggcaggtggtccatgtccaacttcctgcctgagctggagcaggggtctggaggtaggttcttgtggctactgatgcagaacagcgactcaggaaggtgtcactcagcttagactaaatcattctttggagacagttcccacatctaagtggagttttatttcaccctgatgttaacattaactgtggctctgggtgatgatcaggaaagctgaagaagcttctgtcagtgccagcaacattgagaagtataccatcatcatttgtgaattaagtgtaagacagaatta

SEQ ID NO: 188436 - DNA, 557 bp, Homo sapiens
atcatttagccttccttgaaggcttggtggtgacaaggacattagctttgtcctggacgaacgggatgtgaggcctccccagcacgtggccgggctcttggggtatctgtgtgctcatctcattcactcaccttgtgacccaaccactgctcaccagaggctggtagctcctccccccattcagagtcccgtccctctgctgtcgagctgtttcaggcccccagacattgttggactgatctcctgttgtccctgtcttctgagctttgccctcacacacaccattgttcaaactctgccacagctgcagtccttgcagacagtgtgtgtccctcctctgctcacaagcaatccttggctcccaactgcctgcagaatgaagtgggatttcttagcatagccctgcagactttggccatttgtcacacactggagccagcctgccccctactacacccgcccaaggatgcacttccttcccgtgcgtaggacaacgcacagcggacgctggtttcagagcgcaccaagcaggcacttgcctccacgcctgggtgtgc

SEQ ID NO: 188437 - DNA, 283 bp, Homo sapiens
  misc_feature (126)..(126): n is a, c, g, or t
ttacaaagctgtgccaccattagacaggcccatggacttcacagctaaattttaagtcactcagctccaggagctgagtctctctcctgtggttctagacaaggagaggagcccctcagagctttncccacggggtgccaccagccgaaaaccactggacgctatataatcccctttacgaggcttctctgagctcataccactggcctttggtccctctatcctcccagactccatcctttttgattacttatccctgccttgatgctaaaaagacatgaaa

SEQ ID NO: 188438 - DNA, 501 bp, Homo sapiens
cctatcttggtatctcactgtctcttagtctctgtctctccctgcgtacccagcttccagcctcccccaggctctctgctcctcatttctggttaatgtgtcctcccgctccagcccccccgaatcccgcttcttccctgcttaggtctatttttaggcatctcctagtttggggagaatgttctggccaaagatggcagaaacccagagcccaggcaggcaggctgggtgggagctgggtggggagggcaggtcctcttcgcccccgcccccctcccgtctctgatctctccccccacggaatgattctcacggggcagtgttaaccaggaccctgggggttgagggaactctgacctctgacctctcccatgacattgtctctctgtcccccacacctctggccccaccatgtctgccccatcctccccggatcggccttggtaagtgaacatccagccattctacttcctttccagtcatggggtggtgtttttaggg

SEQ ID NO: 188439 - DNA, 567 bp, Homo sapiens
cttcctgcttctgccgcttcctgcttctgctgcttcctgcttctgccgcttcctgcttctgccgcttcctgcttctgccgcttcctgcttctgctgcttcctgcttctgccgcttccagcttccagcctcccccaggctctctgctcctcatttctggttaatgtgtcctcccgctccagcccccccgaatcccgcttcttccctgcttaggtctatttttaggcatctcctagtttggggagaatgttctggccaaagatggcagaaacccagagcccaggcaggcaggctgggtgggagctgggtggggagggcaggtcctcttcgcccccgcccccctcccgtctctgatctctccccccacggaatgattctcacggggcagtgttaaccaggaccctgggggttgagggaactctgacctctgacctctcccatgacattgtctctctgtcccccacacctctggccccaccatgtctgccccatcctccccggatcggccttggtaagtgaacatccagccattctacttcctttccagtcatggggtggtgtttttaggg

SEQ ID NO: 188440 - DNA, 445 bp, Homo sapiens
tgtgctaagtcatcgggtagaaatactttcagctccaaaccatgccaggtgtgaaaagtgtctaactccattgctggatgcagtggaaggagagttgaggtgcataactgagaccccgttctagaaagtcttcccagatctttagagggtaagatgtctagaacaattatactctcattaattcataattaactcttaggtttaggagttaatgcgatttaaaggttttctattatctgaaagttagtattatggagaagagatatgtaatgattaaaagaacaacctgggatgcagtttaagggtgtgaggccttgcccctggcagcgaatgtcctttgcctttgctgacaagtggggattgcatctaatgagcatgagggttttcttcattattgttcatctactttctcacgttccccttttctttaacatactcacagttg

SEQ ID NO: 188441 - DNA, 382 bp, Homo sapiens
cagcacacacactaaaattcaaactcataagcttggtaatacttactttgacaatttgatcttctgctattcttattcatagacattaaaccataccaatcataccactaacaccattccccaaacatagttatactttccagcacctaaccatttacatctactactctctgtaagctgcacatctccatttacccaaatcatttaaagccagtatcaactctatcttttctcaaacttctctgaacttaggtaatacagctctcaggctactcctctctttcaccttgtcattgagtcctttatggacatcttagctccccccactacaaagagagttcttgaggaccagggttatgtctcatcaacttcccatttccca

SEQ ID NO: 188442 - DNA, 446 bp, Homo sapiens
cctatggaaagagaagtttggcaccatgctttctccctgactgtgaacttcttgaagacagagatcaagactgtgtttttcatcttttcttctttatctgagcacagtgccaggcactatgtaaacattcagtaaacactcagtaaacgttgaatgaattaaaggacttaatatgcattcagagtagctgactcagtaattccaaatctgagaaaatatcctaaggcagcgattctaaatatgaattcacagaaagaagcaaattaagtgcacaaagttgttctttgtaaacgtgaaaaattagagacaacctgaaagtccaaatctagaggattggttaagtaaattgtggtgaatctttagcccaggatcttacgcagccattttgtaaaggagcacgaagtttgaatgacacagaagtgttactacagggcttgaaggaaatc

SEQ ID NO: 188443 - DNA, 363 bp, Homo sapiens
tccaaaaaggatgccacaatatttagaccatccatttcagtgttttatcacgctgctacaaagggccttttgtacagatacatagtctttgtcttacaaagccccaaaatataggaaatatgctgagttttcctaactgcctaatgaataaccatttgtaatcaactgtccatactgaaaacccttaaaggtattatggaacacattttatatttttattacctgccaaatataacaattccattttagaactgaatctagccaaaagcataaagtgggaagagtttcctgtgatgctcttggcatatcctttcttaacccttctctctctctcatttcaggactctatttttttttttcttt

SEQ ID NO: 188444 - DNA, 338 bp, Homo sapiens
ggtgtctttctatgtgtgactcaggcacagttgacccagctcatagttatccaaagtggatgggtggcacacattgaaaggaaatgtgtctatcccatgcttagaaagttaagatcaaggttcatggcctggttttggaagcctacatcatgtttcaatcatggtataggatagaaggaagagtcaataagataaaagctacctggccgtctttgcccaaagctgcctggtgaagataagtgaaggtaaaataatcacattaaaatgttctgtaaaatgcacaacctccttgtgagcctggaagatgtcctgctatgctggaccagataacccacagg

SEQ ID NO: 188445 - DNA, 344 bp, Homo sapiens
ttttctcaaattttgttttaggtaaaggtagagttggaagcagttagaggtgtaacatgttgtagtgttttggaatattttgaagttaccagagtagccactactttgtgtgcatgattcctttctttagaaacatctattaccctctttgtacccatccagggagtgtggtcatggaaaagcaatccccatgcggcattactacattacagtgttgacacagggacacttcccttgcactaaattcctaatctaggcaggtatgtttgtctaagtcttttccataatctaattcattcactcagtattaccttaacaaatgtatcgtgagaacctgtgtttac

SEQ ID NO: 188446 - DNA, 323 bp, Homo sapiens
cattctgtgcgattcttgagtatgaaccatatattattttctggcctttctttacaattccacttatggctgaccttgaaccagaataggtctgtgattttactttccaaagtccaatacatgtatttttcttttgttcatgttgatatctgcattggcacacgtgaatttccaaatttggtcttcaccttttcagttttcataggcaaaaaataaatttggatgatgcaatagtcagtaaagaactccaaacaaaggttttcttgactagctggaggatatatggaaatccctaactgtggtgtatataaactgtaaaccca

SEQ ID NO: 188447 - DNA, 505 bp, Homo sapiens
agggtcttattgcaactggcgctagtccatctgtgtggacactcagtcacctccataaatcaaaacttcaagagtacattttcatataatattttatcaggcatctgaaggtttcaccaaagtttatattttcctactgcaaaactatgttccatgtagatctggcccatctggaggctattgttcctgcgttcatcctcccatggtcacatttcttggccaacagaaccatagaaatgggtctgccatgtgttaacgtttagtccaaatcatttttccactttagctctgcttcaaatggggctggcctggtgatactggagacaataaatgcgcctgtaagttccagataacaggctcttgtcattttcccaatctttcctcattgcaatgttccacagatgtaggtgtgccaaggcctctgggtcccagtgtagcaccttgaatgcaacagttcacacagaggtggcttcaggatgccagccaggagaagttcaggagcact

SEQ ID NO: 188448 - DNA, 420 bp, Homo sapiens
agaccctcccaatcctgaagagtttaactgagagtatagcaccttttaaaggtctaaatggaaacatttgccatctattgtcatctttagcgtagccacctatgagtcttcatctaaacactaagaatcttaggctgagtgggctgagtgcaggggctcatgcctgtaatctcaacactttgggaggcttaggccagaggattgcttgaggccaggagttcaaaacaagcctgggcaacacagtgagatcctgtctcttaaaaaaaaaaaaattagatgggcatggtggcaaatacctatagccccagctactcaggaggctgaggtgggaggattgcttaagcctaggagtttgaggctacagtgagctatgattgcaccactgcactttagcctgggtgacacagccagattctgtct

SEQ ID NO: 188449 - DNA, 484 bp, Homo sapiens
tgtaaaccagttccatccaccacccttttcttctttctgtaaatatttatcgtgttgcttctgtgtactatataactataagccgatttttcaggtaagaagggtaacataaccactaggttggcaaaatgaaggtttacattgtaggaaatttaagttggaattgagctgctggtgggacttagaaaccaccagtagatagttgaaaatgtggaaagttggagatggagatgagcactgagaactcagtatcataaacactatctttaaaggtggaaccttgtgggattgccccaggaggattaagtacagatattaccttggaagtgtgtatagttctagtattgttaccattgttcaggatatttttgaaactcctttaagatttccctttggattcttcagtacactcgtcttaatatcctcattttggcaaatctttgttctgaaagttaatttgaatttcagccaaggtttaaccaga

SEQ ID NO: 188450 - DNA, 301 bp, Homo sapiens
tcccaaacctgatatctccccactagtcatctatttatttattcttcccaaggctacattctggggggaaattctctggactaaaaacttaatggaatacgaatgggcatcagagtgttacagaaagagcactggactaaaagtcagagaagtggacattgatgtgggagtttctactatctggatgaatttgggcactatacaatctcgcttgcccacattttctatgtcaggaaaaagatgtagttaggtcattatgtgttctttccagctctaaatattgtctctgaattatttatat

SEQ ID NO: 188451 - DNA, 195 bp, Homo sapiens
ctgagattcaaattcagataatgcttactgaagagactgcattctttcttctactatttgtcctttttgacttcttaattaaaatgcaaactttgaagataaaaactgtcatcttacatattttctcagtaatcttacagtgcgtatcacagtgctgagcaaaatggtgcttgatgcatgggactaatcttaagc

SEQ ID NO: 188452 - DNA, 545 bp, Homo sapiens
tagtctatgcatctcatgtttaaattcataagctaactgagtaattgtcaaaaacattcccctattgcttagtggtttctattacttgtaggcaaaatatttataactaagaaaaatcagaaattaattgcaagtagctgacccaaacatatggaattggctgaatttgcagggaggagggtgatgatagttctcaagattcctccatcctgggaagaaagctggtaattcctgttaaaccaacagcctactgaggccaatgctttagaatattttttggcaaatgtcatagaatcaagatgtgttgactgcctcttactgcctttagtaagaatctaaatgagaatacgagctttgatccaaggttactgcctggaagcaaaaatgaaagaaaaagagagagggggagagaaataacagcagggcaagtatattatttattaagggaagtcctttctcctgatttccagcaatataatactgctaagtttcagataaataggccatttgcaaaacttaaccatttctaaagctaaagttgaagt

SEQ ID NO: 188453 - DNA, 829 bp, Homo sapiens
tggtctcgatctgacttcgtgatccgcccgcctcggcctaccaaattgctgggattacaggcgtgagccactgcgccggccccacattaagtcttttaagtagcctgctgttaattctgtcgtagtcttttctataaaacaatactgatccaatttgtgataaactcacccactctcatcgcagaatatatatttctcccgttcgtcttccttctttggcccactttatctgtctacctccttcattttgtttctccaggaaggactgatgtaaatgggattttcagaaactccctccagcatgcccctctctgcatctggaatacaggggtcagaggatctactctgtctagggtccttcctctccctggcaggtcttatggtagtgtacactgtggtttgcctctatcagtctgtccttcatttctgtgaccagatctccaacaggacatgttctaaagaagtgtggtagaaactagcccatttcaaactttgcaccgtgatttttctacacgccaccccactggggcttttgtgatcagttttataataaagagtggatctagattgaaccttagttttgctacagtgtttcattcagtcattccataaacatttattgagcgtgtactatgtgtcaggcagtgttctaggcatttgtaggaaagcgggagagagcagttggagcagtggacattgtgttcatttcagttgcagtcctccctgaagttttacagatctatagcaactcattttttttcagttcaaagaagcagtgggaaacctatgtctcctgctctcccccatgagatgtgtattgttttttcct

SEQ ID NO: 188454 - DNA, 170 bp, Homo sapiens
cccacttggcctctcagccttgtgtgctccgagccccgtggtgggcaggacactgctaggccatggcgggctcatggggaaggaagcaggcagagatcaaattcctctgctggggcccaatgagagttaagggggaggactccaaaaaggagcatggagcacacggtagg

SEQ ID NO: 188455 - DNA, 492 bp, Homo sapiens
cggtcatctcaaggaggctgaaaggtgaggaaatggtgtcactatgctttcctctcgcctagctgataccacaaagcggggttggataagcatctgtaggttagggcagagtgaatcttcatgaccaagcgtttggagttcgagcctcttaccatgagagctctgggcccagggtctttgactctgaaatttctgcgaggctaagtcatgcattgtgctggacagccagtgcttccagttgcctatggaaggtggcagctctcagacctctagtgcttggcttaattcactacatcacagacaaccttgccacttacttcctaaccactactgccaaagatctagggttttgaggaaagatcaaattattttccagccagaaacaaaacacaaatactgttacattataaacctcggccacctaactagtctccccacttgcaatttactttttagtactaccagattcatctccctaaagcaccacctttc

SEQ ID NO: 188456 - DNA, 253 bp, Homo sapiens
cagttctggacatgaatgacagtaatggttgtacaacaatgggagtgtactaatgccactgagctatacacttaaaaatggttaaaacacaaattttggccaggcacagtggcttgcacctgtaatccaagcactttgggaggccaagccaggaagatcacttgaaacctaaaacttgatacctgcttaggcaacacagtgagatcctgtctctataaaaattttttaaaaaattagcaaggtgctttcctgt

SEQ ID NO: 188457 - DNA, 263 bp, Homo sapiens
agcaaaggagatagaaagggaagtatcaaaaagaagaaaaccaggcatttgattgtccagaaccaaagggaggttaagagagcatggttaacacctacagagaggttaaggaaggtgaggaataataaaaggctatgtttgttgacaatctggacaggcatcctaattgtccaatcaccagttatctgatgattttggagagagggtttggagaggtagcagcacagatgtgttaacagcaaatgcttagtgtgggaaagtaa

SEQ ID NO: 188458 - DNA, 473 bp, Homo sapiens
ttatcattgagctgtatgagtttttaaatatattctagaaacaagtcctttgccagatgtatgtattacaaacatgttctcccagtgggtggcttgctttttcattttcttcaagtgtcttttgaagagcaagagttcaacatttcaatttgtcgaagtcttctggttagtacttttttttttctttctttctgtccctctcaaggttaagaagaccttcacctagaagtttgtgattttggcttttgcatttaggtctaggatctatttcaagttactttggtgcgtgtgtgtgtgtgtgtgtgtgtgtgtgcgcgcgcgcgcgcgtgcatgtgcgccttgaagtaaggattgaggtttattttcttttccatacagatatccagttgttttagcaccatttgctgaaaaaagctattctttctcctttaaattgcctgggctcttgtcaaaaatcaattgacggctggggg

SEQ ID NO: 188459 - DNA, 354 bp, Homo sapiens
aaatcccacagctaacattatattcagcggtgaaagactaaaagcttccccctatgaccaggaacagacaaggtgcccacttctaccactgctattcaacactttactggaagctctagtctgagtaattaggcaagaatgataaataaaaggcatataaattggaaaagaagaagtaaaactatctctatttgcaggtgacatgatcctatcatagaaaaccctaaaggagctacaaaagaatatattagaggtaatagacaaattcaacaaaattgcaggttacaagatcagaaataaaagttctacttctatatactagcaataaacaatatgaaaagaaaattaagggaa

SEQ ID NO: 188460 - DNA, 292 bp, Homo sapiens
aaagcagacattatgatgtcatttcatctattcaccatgttccacaggaacctgctatgaattatgaggccaccacttagaattgaaactgtagaagattgtaagcattctaagccgacatgcacatgcttcctattttagacctcactgatcttcagataacatatggtggtacaagtaattggaaaattggcacacctgtcaagaaagtatactagatggggcaaaaaaatgccatgctggagcacatgaagtgtcttagcaattaaatttattgttttttgtcaagcag

SEQ ID NO: 188461 - DNA, 191 bp, Homo sapiens
tccttgagatgagtgaaatttctgctctgagatcttctacctcgggatatttaaataagaaaagtacatgaacagcaggatcccttttaaagtgttctatacaatcttaatcttaggaatgcagaatgccatggttacacttgagaccacatttaaagtaatacttctttgatcaggcaatgatatactgt

SEQ ID NO: 188462 - DNA, 263 bp, Homo sapiens
gccaggcaaggggagggaggggagaagcaaacagaggtgcagcgtgtgaaggcccacaggggcttctgagcgatcaaagtacttgactatggctggcgagaggatgagtgttgatgctggagaggcgagcagggtgagcctgtggaggttctgcctgggccacgtgacagaggagaatgaatagattattgggacagggaaggcttttggggtggggttccgtcgacagggtgctgggggctctctctcaagccggccagatt

SEQ ID NO: 188463 - DNA, 148 bp, Homo sapiens
agtcgggggcgcggggaccgcgaaggaaagtgagagcgccgcgggagccccgagcgccctgtgcccattagggcatttgagataaagcgtttgagataaagcgatgagaagggtgaggggccctggagctgagtgggcgcgcagatag

SEQ ID NO: 188464 - DNA, 474 bp, Homo sapiens
taaaaatattctaaaattcatttcattctaatttctctgttctgaaatattcttttctgtatattaagttacagtaatgtaatttcctggtgtttaacctgactaacggcggtattctgactgagaatctttttcgtaattttataacaaaaattggatttgaaaggtatgacagtattttttatgagaatgtgctgctctgtataactcctgtgtatgtatggtgcatactgagctttattattgtcacagatttagagacagtttcttattttcacactgaatcatggtaccattataattttaaaagcagtgggattaattgatctctgcccttttaataaaatatgggtagagttttgggggctttttttgagacaggatctcactctgtcatctaggttggactgcagtggcacaatcacagctcactgcagcctctaacacttgatctcaagtgatcctcctgcatca

SEQ ID NO: 188465 - DNA, 593 bp, Homo sapiens
ttaattctcagtcagaatgagagattcgtacaatttgaaaataaatttgcactccttccactttccataattccttgaaaacatggcctaaataagtagtgatgtgtgggtgattatatttcaatggagagagaaagaaagagagagaagaaagaaaaaaggagaaagacacagagatagacaactagtttttgtgtctgtctgtgtatctgagagatacagactgatgtaagaaagaagagcaaaatgctaaggttggttggctcatggcagaaagatgaggtggcccagcaaagcagtaaagaagaggttactgaaaaaccacaatgaatgggcttgaattggctttcaccaaacagcttctgaaggccagagaggcccaggtggaaagaaacaggtggaggaagatggaactgcaagcagaattgcaagataacctcgtgaggataaatggccttatagaaaagggcaaaagagggctgtgggagggccctttgtacagccacttagaatttggaaagaacaagtctagtgggatgatgaatgaggttgatgggattgctaaaaaatagaaggcagtgatggtctgtggt

SEQ ID NO: 188466 - DNA, 297 bp, Homo sapiens
agagaagcagttgtggccagtgtcccatagggaagtagatgctgggtgacagtaaatgggagctctctgtattaattgtaccaattttctgcacatctcaagctcttttttttttttttgagacagggggcccccctttgtaaccaaggcgggcgggggggggcccatcctaagctaactgaaaacccccttctataaagggggaaggaggtttccctccaggcgaaaaactctggcaaaccccccttttcccctctctctttggacggacccaaagaccggtccccggcccaaaat

SEQ ID NO: 188467 - DNA, 454 bp, Homo sapiens
cataccaaacccacaagaccctgtgatgtgctgtgagcgaagcctgtgtcttggctggtagacagaaatgtgtccattactttctggcttggggaagacttcaggtatttgatgatatgtcctttggtttcagaagtcaattaaatcttagctgctctgagtaaacagccatttgtggttgtgtttagaaaatacagtaagatcagatttgtgctgctaggtattaggttggcattttacatgtggaatttgaaccggactatgaaatctatttcttctctaatttggttcaagacctgaacatgtaacctttgagtatacaacacaggtttagattataaaggcttcttttccttttttctttttttttttttttttgagacaaggttcttgctctgtcacccagatgaagaacccgcccactggagtgcagtggcataatcatggcttgctg

SEQ ID NO: 188468 - DNA, 214 bp, Homo sapiens
aaaatagttcagagtcctgtacagccttacccagcttccctaatgctaacatcatacataaacataaccacagtgaaattatctaattccaaaatcagcactaacaccagactattcaccaccacaaagacctgactccgacgcaatcaccctgctccagggcccacgcgggtggtgccgggtgctctcttctctccatgaggctgattttttt

SEQ ID NO: 188469 - DNA, 110 bp, Homo sapiens
cttctaccctgttgtcaacttctatcccattgcaattttattttcttcataacacttaccactctctaaaattatcttatttatgtttgtttacctgtttatggtctgtt

SEQ ID NO: 188470 - DNA, 256 bp, Homo sapiens
agaaaaccaaatatggcatgttcttacttataagtgggaagtaaatcttgggtagacatggacataaaactggaaacaatagacgctggggattccaaatggagggacagagggggaaagggctgacacccttcctcatggctaccatgtccactatctgggtgacaagctcaatggaagcccaaatctcagcatcatgcaatattcccttgtaacctgcacatgtgcccatgaatctgaaataaaaatggaaatt

SEQ ID NO: 188471 - DNA, 428 bp, Homo sapiens
actggttagataacaaagtcagcataaatcgagctctgctttcttatcacagtgaagcagctgtgccaagggtgtgagacacctccactccatgtacccaaagctttcttattctcagtgtttgaaatagattcagcttcaggtgagtgagtcttttgtgccttctttttctctgactcctatattcatatccagaaatacctatgaaaaacatcaaagaaaaaaatctatctccctcccccaaatccaaaggctaatcaaaataaaatccccagaaagactggattagttaactgtgttctcaaattgaatttgagcttccgaataaagacacatgaaaatgcaattaaattaaatctaatgcagaaacattttactaagttgagaggcaccacaattttaataaaactgtgggaaattatgctatt

SEQ ID NO: 188472 - DNA, 444 bp, Homo sapiens
gacttttcccctccctttctagcagctgcgatcaccctgaactctgtcctttggttctctaagccagtgggacagaagatcttctattaggcttccagtcacccagtgagcagagtgggccttgccccctagcttaaagccataataggaatgttgcctagtgccattcccttcacctaaagggagaaacccctccagtatgtttcttctttttcttgttctctggtgcctttagaaagttgttttttgtattttttccagagtgtatacttattcgaaggtagacagttggtctgacagaaactactcaaccactaaccaaaagcagaaagaagtgtacatctttgaaaacagaattccatttagttttaaatagtctactcagactgatcttttttggttatgtctcaattaatatgatgttgttggtaagtcaagtatata

SEQ ID NO: 188473 - DNA, 360 bp, Homo sapiens
caataaatgtatgtgttctgactgctccactgactgctccccgcccctgccccaatctcttcctctgctcaggcctccctatcctctcagacacaacaatattgacatgaggccaattaataaccctacaaaggcctctaagtgttaaagtgaagggaagagtcacacatctctcactttaaatcaaccgctataaatgattttgcttaatgaggaaggcatgtcaaaagccacgacaggtcaaaactaggcctctttagccaaacagtgaaccaagttgggcatgcaaaggaaagttcttgaagaaaacttaaactgctaccgcgactcagcaaagcttttaaatgaatttcttccaga

SEQ ID NO: 188474 - DNA, 859 bp, Homo sapiens
tggtgaaactctgttctactaaaaatacaaaaaaattagcctagcgtcgtggtagctaccacgctaccaagcatggtggtagctgtagtcttagctactcaggaggctgaagcagaagaatcacttgaacctgggaggcagaggttgcagtgaggtgacatcgcgccactgcacttcagcctggacaacagagtgagactccatctcagagaaaaataaaaaagtcttggatccattttgatgccttttgtggcacttcacatgaggaatctgtgcttatcagttatcaaagtaaggaagactttattatgagccactagtttctatatatggtgtactccctttaatgacagactgatcatcttccacaagtatttacccagcattttaaacactttgagttccgctcagaagaaaacaactttcaaaaaattttttccatgcattttccaagggagaatgataaggtttcaactgggtgacttgtccaccatggaaaaccaaacatggatggcagggatgttcttgaatctgcagcccatgttggttagtgcagccctacttccaaagcatggaatatgctttcagaaaatgcatattctatttttcctccttgcatctttctggtccttctgcagaaggtgctgtcaccgtgtaagtattgcctggcctcttcagagacacagaatgaccccataccccacaggaaatgaccttagattatttccctttgtggaaaatgtgtctggttgaaaatgtcttctggatgagaaagcatggggtaggtgtgaaccgttacaacattgaattatcgttttccttttcaattagcaccagtcactgccaccttgtgtgacca

SEQ ID NO: 188475 - DNA, 1216 bp, Homo sapiens
cctgacgaggagacccaagaggcggccccatcccaagacgctgctataaaatgaagcgactccctgccccatcctcttcctctggccacaaagctgagttaggtcgtagagcggcaccgccctctccctctcctgcgctagtctgcaggagcagccccttccctaactggcagattcaaggttttggaagacagaccattgccccatcctcatctcctggttctgtctaaaaggggacagttgccctgccttttggcaagacctaggttctcaccccaatttcagggatgtcccattcacccccctacccccatccccaatgagaagggacctgttggctggtatgccttcttgctagtgactggctgagctcaccactgcaggtgggtcacacacagcctcataggcaggcacagctggaagggaccagagagacatttagatccactctcttcagctagtaaatgtggaacttgaggctcagagagggacacttcttctgcctttaactgcagccagctcctcatgaacagtgagattgttcctgcatgaatagtgtctgttcctgagtttggaatcctgggctatgaagggacaggtccaaaggctacatctctacctacctgtggcctgatccatctcttaccttggcagtgggatgagaatctaagctgctctccaagaagtgtagctaggggtggaggtaggttactcattaccccacgccacaatgtcatcgcatgggctgtggccagtccctaacagcttcttccagaggctcagctccaaggacttcagatgctgccctaaagagcccaggtttctcaattccagggttccgctttctgcagctggtcacacctgctctctggctttctccagaaagtgatgcccaaacccctgactgaccttgaggcagctgagtgaaatgttctagaagagcttcctgcagcttcattgtccttcccttttctaacatggttaggccttgatgatgggcatgtggattacccaatgtgtggatcacccatggaaaatctggaaggccaggaggccttcccacacactctggggttgaagtggggtgtaagggggatgggtggggaagtgtctaccctcaactaccagcacacatgcagaaaatgcaagtggaccttaatagtagcctaaataaaatacccggaggagatataatcaacaggggggaaaagtgtgt

SEQ ID NO: 188476 - DNA, 823 bp, Homo sapiens
caggcggatcacctggggtcaggagttcaagaccagcctggctgacatggtgaaaccccatctctactaataatacaaaaaaaaaagctgggcatggtggcatgcacctgtagtcccagctactagggaggctgaggcacaagaatggcttgaacctgggaggcgaaggttgcagtgaaccaagatcgcgccactgtactccagcctgggcaacagagcaagacagagactccatctcaaaataaataaatagaaggctctccaggacattttgatgcccactgggatatgggaactcctgccatggggaggagggcgtctttaagaaggaataggccctattgagatgccagctgtagacctctaggagttgaccatcgagcctgagaaggtaaggagagggtgtaggagacccctgactctgacctccaccctctcattcctctccagggcagtcccgcactctgatggccacatctggtgccaggtagtttctcgtaaagatctacactcacattacaacctagacatcccactagtaggtatttacccaagacacctgaaagcatgtgtgtacccaaagactcgtaaatgaatgcaactctatatgtaatagccaaaattagaaacaatccaaatgttcatcagcaggtgagtggtaaaacaagttgtgatatgttcatacaatgttgctactcagtaataaaaagaaatgagctacagatacagataaggaaacttggaggtgatatgttcataatcttgtttgggtcaaaggtttcagggatgtatacatgtgtcaaaacatatcaaaccgtataat

SEQ ID NO: 188477 - DNA, 491 bp, Homo sapiens
catatggagaatgccccccacccccatctcctcttctcacttcagcaaaaaaaggaaagacaacaacaaaaaacaactaaccccactgcttcctgtaatcaaaggaatacgaactggctaatcacccaaccccctacaaccttcttaaggttaggggaaaatctgggctccttcagaaaaaaggccacctgataggactcatggcgtcagcttccttcatctcggttcatgcttaaaaggcctcttcactgggaagcttcccagtgaggttttccacgcacatctggacactttccacaataggcctttgaagaggcctgaagtattccgggaaagtctgcctcactgggctgaggtttaaagagcagaagcccacatttatttttctttcccgccttctttgacaaaactcccctcagtggtttgtgggcatttgcaaagcagccctgattttcagcttgctacttctagggctgaaatcttaaagaaaa

SEQ ID NO: 188478 - DNA, 1985 bp, Homo sapiens
  misc_feature (961)..(961): n is a, c, g, or t
  misc_feature (1500)..(1500): n is a, c, g, or t
  misc_feature (1587)..(1587): n is a, c, g, or t
  misc_feature (1589)..(1589): n is a, c, g, or t
  misc_feature (1591)..(1591): n is a, c, g, or t
  misc_feature (1597)..(1598): n is a, c, g, or t
  misc_feature (1600)..(1601): n is a, c, g, or t
  misc_feature (1603)..(1604): n is a, c, g, or t
ggtcaggacccccaaacgcgtctcgcgtccctaggcggcggcggccgggcgtcccgggatggccttcatggagaagccgccagccggcaaggtgctgctggacgacacggtgccgctgacagcagccatcgaggcgagccagagcctgcagtcccacacggaatatattattcgagtgcaaagaggaatttctgtggaaaacagctggcagattgttagaagatacagtgactttgatttgcttaacaacagcttacagattgcaggcctaagtctacctcttcctcccaaaaaattgattggtaacatggatcgtgaattcatagctgaaaggcagaaaggtcttcagaactatctcaacgtgatcacaacaaatcatatcttgtctaattgtgagctggttaagaagtttttagatccaaacaactattccgcaaactatactgagattgccttgcaacaggtttccatgttcttccgatcagaaccaaagtgggaggtggtggaacctttgaaagacataggttggagaataaggaagaaatatttcttgatgaagattaaaaatcagccaaaggaacggctagtgttaagctgggctgaccttggcccagacaagtatttgtcagataaagattttcagtgtctaatcaaacttctgccttcttgtttgcacccttacatctatcgggttacctttgccacagctaatgaatcctcagcgttgctaattaggatgtttaacgaaaagggaacattgaaggatctgatctacaaggcaaaaccaaaagacccatttctaaagaagtactgcaaccctaagaagattcagggcctggaactccagcaaataaaaacatatggacggcaaatattagaggtactgaagtttcttcatgacaagggattcccttatgggcatcttcacgcctccaatgtgatgctcgatggggacacttgncggctgctggaccttgagaattccttattgggcctgccttccttctaccgatcttatttttcacaattcaggaaaatcaatacattggaaagtgtggatgtccactgctttggccacttactgtatgaaatgacttatggacgaccgccagactcggtgcctgtggactccttccctcctgccccgtccatggctgtggtggccgtgttggagtctacgctgtcttgtgaagcctgtaaaaatggcatgcctaccatctcccggctcttacagatgccattattcagcgatgttttactaaccacttctgaaaaaccacagtttaagatccctacaaagttaaaagaggcattgagaattgccaaagaatgtatagagaagagactaattgaggaacagaaacagattcaccagcatcgaagactgacaagagctcagtcccaccatggatctgaggaggaaagaaaaaaaagaaagattttagctcgaaagaagtcaaaacgatctgctcttgaaaatagtgaagagcattcagcgangtacagcaactccaataattcagcaggatctggggccagctcacctctcacgtccccgtcatcgccaactccaccctctacatcagnananctgcannanntnnacctcctccacctccaccaccaccagcagctcccttgcctcctgcgagcaccgaggcacctgcccagctctcgtctcaggctgtgaatggcatgagccgaggggccttgctcagctccatccagaatttccaaaaaggaactttgaggaaagccaaacctgtgatcacagtgctccgaagatcggctgaagcttcctgtttacacttggagggaaaagttcttttttattcctactcacccctaccccccaactaccctcttcctgggaaagtaattgctgagccagtacagccacaaacagtactattttgcagatgctcatgtaagcagcttttcgagagaaataattctttaagcagaataaagttaggctggcatgc

SEQ ID NO: 188479 - DNA, 1747 bp, Homo sapiens
  misc_feature (723)..(723): n is a, c, g, or t
  misc_feature (1262)..(1262): n is a, c, g, or t
  misc_feature (1349)..(1349): n is a, c, g, or t
  misc_feature (1351)..(1351): n is a, c, g, or t
  misc_feature (1353)..(1353): n is a, c, g, or t
  misc_feature (1359)..(1360): n is a, c, g, or t
  misc_feature (1362)..(1363): n is a, c, g, or t
  misc_feature (1365)..(1366): n is a, c, g, or t
agcgggcgtgttgacagcggcggcggtggaaccgggcgggcggcgggagtcggcgcctcgggttcctacctcgcgtccctaggcggcggcggccgggcgtcccgggatggccttcatggagaagccgccagccggcaaggtgctgctggacgacacggtgccgctgacagcagccatcgaggcgagccagagcctgcagtcccacacgagattgccttgcaacaggtttccatgttcttccgatcagaaccaaagtgggaggtggtggaacctttgaaagacataggttggagaataaggaagaaatatttcttgatgaagattaaaaatcagccaaaggaacggctagtgttaagctgggctgaccttggcccagacaagtatttgtcagataaagattttcagtgtctaatcaaacttctgccttcttgtttgcacccttacatctatcgggttacctttgccacagctaatgaatcctcagcgttgctaattaggatgtttaacgaaaagggaacattgaaggatctgatctacaaggcaaaaccaaaagacccatttctaaagaagtactgcaaccctaagaagattcagggcctggaactccagcaaataaaaacatatggacggcaaatattagaggtactgaagtttcttcatgacaagggattcccttatgggcatcttcacgcctccaatgtgatgctcgatggggacacttgncggctgctggaccttgagaattccttattgggcctgccttccttctaccgatcttatttttcacaattcaggaaaatcaatacattggaaagtgtggatgtccactgctttggccacttactgtatgaaatgacttatggacgaccgccagactcggtgcctgtggactccttccctcctgccccgtccatggctgtggtggccgtgttggagtctacgctgtcttgtgaagcctgtaaaaatggcatgcctaccatctcccggctcttacagatgccattattcagcgatgttttactaaccacttctgaaaaaccacagtttaagatccctacaaagttaaaagaggcattgagaattgccaaagaatgtatagagaagagactaattgaggaacagaaacagattcaccagcatcgaagactgacaagagctcagtcccaccatggatctgaggaggaaagaaaaaaaagaaagattttagctcgaaagaagtcaaaacgatctgctcttgaaaatagtgaagagcattcagcgangtacagcaactccaataattcagcaggatctggggccagctcacctctcacgtccccgtcatcgccaactccaccctctacatcagnananctgcannanntnnacctcctccacctccaccaccaccagcagctcccttgcctcctgcgagcaccgaggcacctgcccagctctcgtctcaggctgtgaatggcatgagccgaggggccttgctcagctccatccagaatttccaaaaaggaactttgaggaaagccaaacctgtgatcacagtgctccgaagatcggctgaagcttcctgtttacacttggagggaaaagttcttttttattcctactcacccctaccccccaactaccctcttcctgggaaagtaattgctgagccagtacagccacaaacagtactattttgcagatgctcatgtaagcagcttttcgagagaaataattctttaagcagaataaagttaggctggcatgc

SEQ ID NO: 188480 - DNA, 2033 bp, Homo sapiens
  misc_feature (1009)..(1009): n is a, c, g, or t
  misc_feature (1548)..(1548): n is a, c, g, or t
  misc_feature (1635)..(1635): n is a, c, g, or t
  misc_feature (1637)..(1637): n is a, c, g, or t
  misc_feature (1639)..(1639): n is a, c, g, or t
  misc_feature (1645)..(1646): n is a, c, g, or t
  misc_feature (1648)..(1649): n is a, c, g, or t
  misc_feature (1651)..(1652): n is a, c, g, or t
agcgggcgtgttgacagcggcggcggtggaaccgggcgggcggcgggagtcggcgcctcgggttcctacctcgcgtccctaggcggcggcggccgggcgtcccgggatggccttcatggagaagccgccagccggcaaggtgctgctggacgacacggtgccgctgacagcagccatcgaggcgagccagagcctgcagtcccacacggaatatattattcgagtgcaaagaggaatttctgtggaaaacagctggcagattgttagaagatacagtgactttgatttgcttaacaacagcttacagattgcaggcctaagtctacctcttcctcccaaaaaattgattggtaacatggatcgtgaattcatagctgaaaggcagaaaggtcttcagaactatctcaacgtgatcacaacaaatcatatcttgtctaattgtgagctggttaagaagtttttagatccaaacaactattccgcaaactatactgagattgccttgcaacaggtttccatgttcttccgatcagaaccaaagtgggaggtggtggaacctttgaaagacataggttggagaataaggaagaaatatttcttgatgaagattaaaaatcagccaaaggaacggctagtgttaagctgggctgaccttggcccagacaagtatttgtcagataaagattttcagtgtctaatcaaacttctgccttcttgtttgcacccttacatctatcgggttacctttgccacagctaatgaatcctcagcgttgctaattaggatgtttaacgaaaagggaacattgaaggatctgatctacaaggcaaaaccaaaagacccatttctaaagaagtactgcaaccctaagaagattcagggcctggaactccagcaaataaaaacatatggacggcaaatattagaggtactgaagtttcttcatgacaagggattcccttatgggcatcttcacgcctccaatgtgatgctcgatggggacacttgncggctgctggaccttgagaattccttattgggcctgccttccttctaccgatcttatttttcacaattcaggaaaatcaatacattggaaagtgtggatgtccactgctttggccacttactgtatgaaatgacttatggacgaccgccagactcggtgcctgtggactccttccctcctgccccgtccatggctgtggtggccgtgttggagtctacgctgtcttgtgaagcctgtaaaaatggcatgcctaccatctcccggctcttacagatgccattattcagcgatgttttactaaccacttctgaaaaaccacagtttaagatccctacaaagttaaaagaggcattgagaattgccaaagaatgtatagagaagagactaattgaggaacagaaacagattcaccagcatcgaagactgacaagagctcagtcccaccatggatctgaggaggaaagaaaaaaaagaaagattttagctcgaaagaagtcaaaacgatctgctcttgaaaatagtgaagagcattcagcgangtacagcaactccaataattcagcaggatctggggccagctcacctctcacgtccccgtcatcgccaactccaccctctacatcagnananctgcannanntnnacctcctccacctccaccaccaccagcagctcccttgcctcctgcgagcaccgaggcacctgcccagctctcgtctcaggctgtgaatggcatgagccgaggggccttgctcagctccatccagaatttccaaaaaggaactttgaggaaagccaaacctgtgatcacagtgctccgaagatcggctgaagcttcctgtttacacttggagggaaaagttcttttttattcctactcacccctaccccccaactaccctcttcctgggaaagtaattgctgagccagtacagccacaaacagtactattttgcagatgctcatgtaagcagcttttcgagagaaataattctttaagcagaataaagttaggctggcatgc

SEQ ID NO: 188481 - DNA, 1982 bp, Homo sapiens
  misc_feature (958)..(958): n is a, c, g, or t
  misc_feature (1497)..(1497): n is a, c, g, or t
  misc_feature (1584)..(1584): n is a, c, g, or t
  misc_feature (1586)..(1586): n is a, c, g, or t
  misc_feature (1588)..(1588): n is a, c, g, or t
  misc_feature (1594)..(1595): n is a, c, g, or t
  misc_feature (1597)..(1598): n is a, c, g, or t
  misc_feature (1600)..(1601): n is a, c, g, or t
agcgggcgtgttgacagcggcggcggtggaaccgggcgggcggcgggagtcggcgcctcgggttcctacctcgcgtccctaggcggcggcggccgggcgtcccgggatggccttcatggagaagccgccagccggcaaggtgctgctggacgacacggtgccgctgacagcagccatcgaggcgagccagagcctgcagtcccacacgattgttagaagatacagtgactttgatttgcttaacaacagcttacagattgcaggcctaagtctacctcttcctcccaaaaaattgattggtaacatggatcgtgaattcatagctgaaaggcagaaaggtcttcagaactatctcaacgtgatcacaacaaatcatatcttgtctaattgtgagctggttaagaagtttttagatccaaacaactattccgcaaactatactgagattgccttgcaacaggtttccatgttcttccgatcagaaccaaagtgggaggtggtggaacctttgaaagacataggttggagaataaggaagaaatatttcttgatgaagattaaaaatcagccaaaggaacggctagtgttaagctgggctgaccttggcccagacaagtatttgtcagataaagattttcagtgtctaatcaaacttctgccttcttgtttgcacccttacatctatcgggttacctttgccacagctaatgaatcctcagcgttgctaattaggatgtttaacgaaaagggaacattgaaggatctgatctacaaggcaaaaccaaaagacccatttctaaagaagtactgcaaccctaagaagattcagggcctggaactccagcaaataaaaacatatggacggcaaatattagaggtactgaagtttcttcatgacaagggattcccttatgggcatcttcacgcctccaatgtgatgctcgatggggacacttgncggctgctggaccttgagaattccttattgggcctgccttccttctaccgatcttatttttcacaattcaggaaaatcaatacattggaaagtgtggatgtccactgctttggccacttactgtatgaaatgacttatggacgaccgccagactcggtgcctgtggactccttccctcctgccccgtccatggctgtggtggccgtgttggagtctacgctgtcttgtgaagcctgtaaaaatggcatgcctaccatctcccggctcttacagatgccattattcagcgatgttttactaaccacttctgaaaaaccacagtttaagatccctacaaagttaaaagaggcattgagaattgccaaagaatgtatagagaagagactaattgaggaacagaaacagattcaccagcatcgaagactgacaagagctcagtcccaccatggatctgaggaggaaagaaaaaaaagaaagattttagctcgaaagaagtcaaaacgatctgctcttgaaaatagtgaagagcattcagcgangtacagcaactccaataattcagcaggatctggggccagctcacctctcacgtccccgtcatcgccaactccaccctctacatcagnananctgcannanntnnacctcctccacctccaccaccaccagcagctcccttgcctcctgcgagcaccgaggcacctgcccagctctcgtctcaggctgtgaatggcatgagccgaggggccttgctcagctccatccagaatttccaaaaaggaactttgaggaaagccaaacctgtgatcacagtgctccgaagatcggctgaagcttcctgtttacacttggagggaaaagttcttttttattcctactcacccctaccccccaactaccctcttcctgggaaagtaattgctgagccagtacagccacaaacagtactattttgcagatgctcatgtaagcagcttttcgagagaaataattctttaagcagaataaagttaggctggcatgc

SEQ ID NO: 188482 - DNA, 2079 bp, Homo sapiens
  misc_feature (1055)..(1055): n is a, c, g, or t
  misc_feature (1594)..(1594): n is a, c, g, or t
  misc_feature (1681)..(1681): n is a, c, g, or t
  misc_feature (1683)..(1683): n is a, c, g, or t
  misc_feature (1685)..(1685): n is a, c, g, or t
  misc_feature (1691)..(1692): n is a, c, g, or t
  misc_feature (1694)..(1695): n is a, c, g, or t
  misc_feature (1697)..(1698): n is a, c, g, or t
gatggcgcccgcggggccgtggcggctgagcgtgatgctccgggttctcggcggcggctgtggccttggccggggccttgggtctctcccggtcgtgagcgatcagcgcctctccgccggccgggctagccgggacagagaggagacggccacgaagagaggaggcagtgagcaacaggacgagaccgcggcgtctccagcctcggtaccatggccgggatcatcaagaaacaaatcttgaagcacctctccaggaatatattattcgagtgcaaagaggaatttctgtggaaaacagctggcagattgttagaagatacagtgactttgatttgcttaacaacagcttacagattgcaggcctaagtctacctcttcctcccaaaaaattgattggtaacatggatcgtgaattcatagctgaaaggcagaaaggtcttcagaactatctcaacgtgatcacaacaaatcatatcttgtctaattgtgagctggttaagaagtttttagatccaaacaactattccgcaaactatactgagattgccttgcaacaggtttccatgttcttccgatcagaaccaaagtgggaggtggtggaacctttgaaagacataggttggagaataaggaagaaatatttcttgatgaagattaaaaatcagccaaaggaacggctagtgttaagctgggctgaccttggcccagacaagtatttgtcagataaagattttcagtgtctaatcaaacttctgccttcttgtttgcacccttacatctatcgggttacctttgccacagctaatgaatcctcagcgttgctaattaggatgtttaacgaaaagggaacattgaaggatctgatctacaaggcaaaaccaaaagacccatttctaaagaagtactgcaaccctaagaagattcagggcctggaactccagcaaataaaaacatatggacggcaaatattagaggtactgaagtttcttcatgacaagggattcccttatgggcatcttcacgcctccaatgtgatgctcgatggggacacttgncggctgctggaccttgagaattccttattgggcctgccttccttctaccgatcttatttttcacaattcaggaaaatcaatacattggaaagtgtggatgtccactgctttggccacttactgtatgaaatgacttatggacgaccgccagactcggtgcctgtggactccttccctcctgccccgtccatggctgtggtggccgtgttggagtctacgctgtcttgtgaagcctgtaaaaatggcatgcctaccatctcccggctcttacagatgccattattcagcgatgttttactaaccacttctgaaaaaccacagtttaagatccctacaaagttaaaagaggcattgagaattgccaaagaatgtatagagaagagactaattgaggaacagaaacagattcaccagcatcgaagactgacaagagctcagtcccaccatggatctgaggaggaaagaaaaaaaagaaagattttagctcgaaagaagtcaaaacgatctgctcttgaaaatagtgaagagcattcagcgangtacagcaactccaataattcagcaggatctggggccagctcacctctcacgtccccgtcatcgccaactccaccctctacatcagnananctgcannanntnnacctcctccacctccaccaccaccagcagctcccttgcctcctgcgagcaccgaggcacctgcccagctctcgtctcaggctgtgaatggcatgagccgaggggccttgctcagctccatccagaatttccaaaaaggaactttgaggaaagccaaacctgtgatcacagtgctccgaagatcggctgaagcttcctgtttacacttggagggaaaagttcttttttattcctactcacccctaccccccaactaccctcttcctgggaaagtaattgctgagccagtacagccacaaacagtactattttgcagatgctcatgtaagcagcttttcgagagaaataattctttaagcagaataaagttaggctggcatgc

SEQ ID NO: 188483 - DNA, 608 bp, Homo sapiens
tgaagtgtttttccagaagtctgataccaatcttattttcttaattttataacagttttagtctggatgcccaatttctggtgactttgcagaatgtgttggcgctgattgctctggactgaccataccaggtacacagtatgccttttcaatagagagcttcaagtcattttcctttcaaggaagtttttagaatgtgttatagctagaatatacaatttgttatatagtttttggaatttgttctttgccaatgttttgccttagatcatactgttagaagaatgttttggctttttcctttagggaatcctattacatctattttttatcttgtcttctatacttttatagtttctatcatttcaaaatttctaattgtttttgcagctattttcatattcacctgttacacagacgaattattcccaagcttttctaattcagatttaaatggttctttcatatcatgttattttcttaattttttaagttcattttgtagtatcaggtggcagttttctgctgctttatggtcatatttttctgttaagtctgcactttctgaagatgtattattcagattgttgttctccccctttgttttc

SEQ ID NO: 188484 - DNA, 344 bp, Homo sapiens
agatcatattcctcaaactctagagtagtatttgggtagtatctgggtagcaatttccccttcctggacagcaatttgattcagtgggtccgggttgaggcacagttatctacatgttaacaagctccatggggtcttccaggtatagaaaccacccctacacttggtcacccctctacctaccagcactgcacagagggctgagaggtccctatgaagggactgctatggggacatcctctggaacccatacatcaaagggctcctgaccactgggtcacaagtcagagccctgaaaacaaacaccagccttgaaatctcaaacaaagaatgcttagaatggg

SEQ ID NO: 188485 - DNA, 394 bp, Homo sapiens
cctgatcccttttgatgatctactagatgctatttcatctggtccattcctcctcctgctgccctatttcataccctcaactccttgatcacgttgtctcaaccttcttattggtctttctgtcctgaatttgctaagtttgtgtcctctgcctagtatggtcttccctctgtgaatctttgcagtgttccctgtctttaggcccaaatgttacctccttaaagagggcccaaggatccacctaagtaagtagtccccctgcccacctcctctgcatgttaacttgtacttttcccccccctccaatgtggcacttgccactatttgattttttccttgttttctgtcttcccctctctgaaagcttcaagagagtagggagcttaagtcttaa

SEQ ID NO: 188486 - DNA, 520 bp, Homo sapiens
aggtttctttattcgtgttgcacgagactatggcatcctttcttccttactttttcatgtgactcctgtttgaattgatactctcatgtattgttatattaaagctaccagaggaagctaaagctgcatgaattttatagttctaccttcctgtgaaagggatgatgatgctatttttcttctgactaacaaatatttggagagatacattatagcttttcagtatctaattattactctctagctatctatagataaatttggtagttctgaaatagttatagtagctttcttataacctaatacattggtatctaaacaacacagaaacttatatactttggccacagaataagtagttttctgtccagtatttttcatgttatctttatagcatttttgagaccatgaattctttttaagaacatgagtcttttaaaactaaattgaactatgttaagaaaataatataccatgaccaaacgggtagggtgcaacacgaataaggggatcctcgaga

SEQ ID NO: 188487 - DNA, 658 bp, Homo sapiens
ttggggggcaaacatagtggattatacctgtaacctggtttcagcttcagcgtaagctttcccatccccttttattactttatatgagttgagtttattatgcaatttcttttctggtctctgatagcaacattaaacagcaagctgacattttgcagacgaagactttttctgagagctttgcaagtattacacaatctatttgttgcaatgtgaaatgtacttttctattacatttgttaccatgtcaaatttatcttgtgagaacattagttattaaataataatcacagtaccgaaatgatcattaaatttatgctgagaatcagagttttccaggctctatcaggatctaacgaggaatttaaccaaagttctctttgaataagcagtggactccttcctgtgtgttatgcttgccagactaaggggtgattatcttttctaggccatgtatagtttttatttaagaattaacaatgaggcagagcttttgtgacaccaaaacacttaggaaagagtattgctgatgtctctttatactctattcaaatcattattacacagcatttaaatatcacacttgtttcaacccactgtgcatccatccattcattcaataattttttattgaataatttttatttgccagacagtg

SEQ ID NO: 188488 - DNA, 659 bp, Homo sapiens
ttggggggcaaacatagtggattatacctgtaacctggtttcagcttcagcgtaagctttcccatcccctgtaaaacttctcttagcagtgaaatggttgacaggaatggcatccagtcacaaatttattactttatatgagttgagtttattatgcaatttcttttctggtctctgatagcaacattaaacagcaagctgacattttgcagacgaagactttttctgagagctttgcaagtattacacaatctatttgttgcaatgtgaaatgtacttttctattacatttgttaccatgtcaaatttatcttgtgagaacattagttattaaataataatcacagtaccgaaatgatcattaaatttatgctgagaatcagagttttccaggctctatcaggatctaacgaggaatttaaccaaagttctctttgaataagcagtggactccttcctgtgtgttatgcttgccagactaaggggtgattatcttttctaggccatgtatagtttttatttaagaattaacaatgaggcagagcttttgtgacaccttattacacagcatttaaatatcacacttgtttcaacccactgtgcatccatccattcattcaataattttttattgaataatttttatttgccagacagtg

SEQ ID NO: 188489 - DNA, 227 bp, Homo sapiens
aattctttaggtatccattatctgagaatgtttctattttcctctagttcctgaggcacaatttcaccagatacagaaattcacgattgacagtccttttatttccgcacttgaaaaatatcatgtcttgtccttcttcgtgttttcatacagaaaatctactgtcatttgaactggtgttccctataggtaatgtaacatttcagatggcctccatgttttcagat

SEQ ID NO: 188490 - DNA, 275 bp, Homo sapiens
agggcaagaaaatatttctagcttcccagggacacacattttgcaaatgttatcccataatgtacaaaagaagccatcacctttctgaaagcaactttttcatatctgcatagcaggcctcatgcaagaaggttaaaaagatagccacggagcacacccattcagtagttagcccatacctgtagctttacacttccctctctggactatgtcttcactctaaaaaaccaaggaaagaaaaataagtgggccatgcctagacgtctctcatgact

SEQ ID NO: 188491 - DNA, 231 bp, Homo sapiens
tctaacatatgtgtaactggaattccagaaagagagacaataagacagaaacaaaatatgaagagataataaccaaaatttttcaaaattaatacaaaagaatccaaaaagctcagagaacactaggcagcatcaaataaacaaacaacaacaacaacaacaacaaaaatccacaattagacacattatattcaaactgatggtggaaaaaatcaaagataaagagaaaac

SEQ ID NO: 188492 - DNA, 212 bp, Homo sapiens
ctttcaacctgcactcaacagaaataatgaaagatatttatctcaaaggcagataggtaagaatgtcaagaaaacaaaatagagacatgtaaaataagagaaaaaaatcataggaaaaactaagattagtgaaagaaacattattactttacctaatgcatctaaaagacaaaaagtgtaaaactggcataaatatgattgttatattaatg

SEQ ID NO: 188493 - DNA, 204 bp, Homo sapiens
acacctagagtagttcagtggagccattatagtcttctgaactccagaactgtaagatttgtgttgttttaagccactaatttgtggcactttgtgacagcagcaacaggaaattaactcagcaaggaaccctaaaaatatcaatctgggatgttatagaagaaggcttgtattaacagacctcctcccctcttggagaccaga

SEQ ID NO: 188494 - DNA, 602 bp, Homo sapiens
tctgatgctgagccgaggctggactgtgctgccgccatctctgttcactgcaacctccctgcctgattctcctgcctcagcctgcctagtgcctgggattgcaggcgcccgctgccacgcctgactggtttttgtattttttggtagagatggggtttcaccatgttagccagactggtctcgaactcctgacctcaagtgatctgcctgcctcagcctctgaaagtgccgggattataggcatgacccactgcaacccagctggtgttttatatttttatataattttcttccatcttcataatgaaaagttagcttcatttaagcatcattcagtaagggctgctgtccaacagaacttctgcagtgatggttatattctgtatctctgctatccaatatggtagcctttcatcatgtatggcagttgagcatttgaaatgtggtttgtagaactaaagtgtttaattttaaacttggttttattttaattaaatttacatttaaatagccatacatggccgctggctactgtattggtcagtgcagtatcagactcttttgtgtttgaattgcaaaatcagaatttatctctgcctttt

SEQ ID NO: 188495 - DNA, 321 bp, Homo sapiens
atcttgaacacactgcctgagatccttcctgggacttgaaataagtgactgaatttattttgaccaagtggtcccttgccctggacattggtctgtgcactctgaaggcagttgggagtaactgggatggctgtaagttggagctagaagttgctgttcactctcttctccaagcaatccctccgaagattgaaaaaacagattggtgtctcaaaaatacatgacagcacctcccattgccctgctgtgaaatccctccatgaacctgaaagggcacagaacacgctgcttcccactttctgggtgaggctgttacacatc

SEQ ID NO: 188496 - DNA, 416 bp, Homo sapiens
acgggacacttcagttctctcaaggaaaatgggatgtgataggaaaagcaaaaccaacgaacagagattcaccatgtcagagtgagaaagagtagtgggttatatttaaaaaggattttatacattggaaagtattttcacaagcatcttatttgctcctttggttatgaccccataggcctttattccaaggcaacagattttaaaaagactgagaagttaaatggcttgcctgtgtaatctggaaaattggtaacagactcaagactcacccagagtctgttatgtttcccatagcacctgtgacacccaaggtggaggtgccttaattaccagcacatacaaattatgagaggaggagcccctctaggcagtcacagtcagagcagcacaaagagactgtaatagatgatctt

SEQ ID NO: 188497 - DNA, 271 bp, Homo sapiens
gtgattgagtcttggattagaatgatcgtagaaataagtaaggatagaacaagaaatgacatggaagaaaaactgataaaactgggcaaatgtttaacgtgaaagtaacaaaacttatagagggctcactctgttgaatttaaatattaggctgtttcattggagtgagtgtggttttataaaactttgaagacctcagtcgttgaagttgaaaatgtcttaagattttgagtctggatagaagcttataggttgggatgggtgtcagcgt

SEQ ID NO: 188498 - DNA, 133 bp, Homo sapiens
ggtctcgaactcctgacctcaggtgatccatctgccttggcctcccaaagtgctgagattacaggcgtgggtcactgcgcccagcctcaggtgatttcttctttcccattcaattttactttttcaataaact

SEQ ID NO: 188499 - DNA, 722 bp, Homo sapiens
aatgagaacaaggcattagttcactgctgtattctcagcatctagacccatgcctggaacatggtaggtgttctgtcactgcaatgttgaataaataaatgaatgcatggtcctggcttcaagaattcacaacttagaaagagaaacagatttatgaacatcatcaaatgtatccgagtgaagtgatagtaatatgaagagaatattaggaaagccagaaactaaatatgaatcaaggaaaaatattgcaagatccctactgtaaaccttctttcttattaattttaaagaaaattgcatcaaaaacaaagggctgacagttgcagttccatgcatttcaaagcttgaggaaggaagatgaaaaggggaagaaaacaaaaggaaaaatacaggtatacagtagacatgattttataagcaaggattttgaatcatttataaattggttgttccaccatttcccaggcttattgtttactatcattacaagacaagacgtgaggcccagtcatgctactcctttgtgcatatcacatactcagagggtagaaaggatatatgtcccctcatggaaagactcttcctataaagtattcaatgcacttgacattattcactcttcaatcttaacctgaatcttattatgtggggtctgttatttccattctactaatgaggaatctgaggcgaagagagacagcgactttcctaaagtcacacag

SEQ ID NO: 188500 - DNA, 590 bp, Homo sapiens
tgcaaaaaaagtattgttacttacactctttggaataattcacacgttaaagctacagaaaaatatcaatccttcatttaagacctcatagaggatggggaaataatctttccatttacaaatttgttcagtaaaacgggttctgaaaaggggcttttaacttttccttgaatgatcaagtaccaatggtgtttcagaaataaaggtcaagaatgaagaaaacgagaaaaaaaaaagtacaattatatctgaaacaaacatccagcctaaaataaaattaaaacaaaaaatctcttcacaatacagtgaccaggctccatctataccttatacacttcagcttcacatcctgcaaactataaagttacttggccaaaatcacaacagtcttggccgctgttaggggctgaaatgtgtcccctcaaaaattcacaaatgtaagtcctaacctccagtacctcacaatgtgattctatttagatttagggccctaatccaatctaactggtatccttttaaatgaagattaggacacagacaacacagacaaaagaatgaccatgtgaggacagagagagaagacagccatc

SEQ ID NO: 188501 - DNA, 181 bp, Homo sapiens
cccttggaccctatccctctgtcagctgttgactcaatatttgataccttgatcattttcagattaacctaccccctctcctgcctgtttctcattaatgtgaatttcatactggaagatgaatttcatacccaccacctcaccagtattggcgagacggtcaggattaacacctgtttct

SEQ ID NO: 188502 - DNA, 236 bp, Homo sapiens
tcagcagatttctgctcatggcagatcttcttccaatgtaaacggtggacctgagcttgaccgttgcataagtcctgaaggtgtgaatggaaacagatgctctgaatcatcaactcttcttgagaaatacaaaattggaaaggtcattggtgatggcaattttgcagtagtcaaagagtgtatagacaggtccactggaaaggagtttgccctaaagattatagacaaagccaaat

SEQ ID NO: 188503 - DNA, 379 bp, Homo sapiens
gtgtgattagttaagcttctgtctcctcaactagaaagagaatgcaagccccaagagggaaaggatcatacttgtcttgttcatcactgtgtctccagcatctaacatagtgtctggctcaaaatagacaaaataaataattggggacaaaacagaccagctgaacggagtctccatggcaggattctgagccttcagggatcctcccatgggtcctgggttgatgtcccagggctaaggtactggcctgagatcagaaactaggataagctaagggaacaggagtgacgtgggtgtaatagaaagaatgtcatatattagtggaaaagatcaagcagacgcccaaagactgtgacagtgaaacaagaatgagagagaa

SEQ ID NO: 188504 - DNA, 621 bp, Homo sapiens
taaacttgggggtgctgttatacaaacgaactgtatatgtttaggaagatccttaagatactctacagcagcaactcccaaacttttttagcactagggactggtttcgtggaagacaatgtttccacagaattgggttggttgggggatgtattcactttggttgcagaagaatatatagttgaaccagcatcatttattgaaaaaattcttctttccccactgtactgtgtcacctttgtcataaatgagacaaccgtccatatatgggtttgtttctaaattttttagtattctgttgagctatatttccttgtgccaacaccatcctgtgttaacttctatagtaatatgtttttttttggcggaggggggagcaatggagtctcactctatcacccaggctggagtgcagtggtgcgatctcggctcactgcaacctccgccttctgggttcaagtgattctcctgctttagcctcctgagtagctggaataacaggcatgcaccaccatgcctggctaatttttgtatttttagtagatactgggtttcaccatgttggccaggctggtctcgaactcctgacctcaggttatctgcctgcctcagtttcccaaa

SEQ ID NO: 188505 - DNA, 251 bp, Homo sapiens
ttctagtaagaaaaaaatgcctgtctccaagtacagttattttcacgttagtgaaggtcaagacattcatttaacaattatttatttactgtgcaatattggctgtaagctaggtgctggaaatcaaatggtgaacaaggtagatatgtctctgcttttagagatctcacagtctaaagtaaacaggcaagtacaatatcatacaagcgctattgacagaaaaagaaaagacagcattcaacgaatgcaca

SEQ ID NO: 188506 - DNA, 615 bp, Homo sapiens
tcttccatgccaaaacatcaacaagcattaattgagcaatagccacagtatgttgtaaacatactgtgggaaaacaatgaccagtaacacagatacaacaccggtcaggcaaggcagatgattaagaagtaaacaaacaataactacagattatggtaagtactggttgtgctaggggatgacaggagagactacttagataggtttgtaaggaaatatccctatgaggaattaacacctaaactgagacctgaaaaataaggatttatctatatggagagtagcggaaagagcatttttatgtagagagaacagtgagcattgaggctacaggtaaagtctctggcatgttctgaggacctaaggtcacagtagataatgattgtaagtgtaaacagagtcagctggattgatagatcatacagtgtcttctagaccacagaaaggagtttgggttttattttaattgcaatgagaagccactgaaatgttctaagcaggctgtgtcaaactctgatttccatttctaaaatactttctggcaactgtgtggtgaatagttggggactggacaggagggaggaaggaatagggagacgtggttggaaactcaac

SEQ ID NO: 188507 - DNA, 536 bp, Homo sapiens
cataatttctggctgtagctttactgggtgattgtgcctaagggtctctcatagtctggggctcactcacatgacttttggcaggaagccttggttccttattggttgttggctggaggcctcagtttcttgacacatgagactctctataggccacttgactgtacatgcaacattgcatctggtatcccatagagtgagtcattcaagagacagaaagagatgacacagaagccacaatatcttttataacataatctcagaagtaaccaaacattacttttgctctattctattggtgacataaactaaccctatataatatcagtggtgactgcacagtggtataaatagcaagaggtgagggtcatcgggaaccatctcagaggctggctaccacagtctgccttctggcctccagtgattcacgtttctcgcacatgtagaatgcactcactctctccaaaggcccactagaatgggccttccgtcccattacagccattacagcatcagctcaaagtccagaatatcat

SEQ ID NO: 188508 - DNA, 337 bp, Homo sapiens
catctaataatcttagaatataacaacatgaaaatgtgacttgtgactaggaaactgagaactgtaaatgatgttaataaaaatacaagctgatctgtttggggagataagaggggggttgtagattttattttttggttgtgaaaatagaaatagggtttaaatatatttttgccttcttcaaacaatactgaagagtgaaagaagaggtagtcttgtaaaccagtggttaaaaaccatagctattctatcctacgtcttcactatcattctaagtggattgtatgagaaatgaggggggggaaaaagtactattttccagttaaggctctcattt

SEQ ID NO: 188509 - DNA, 140 bp, Homo sapiens
cctgcctcagctttccaaagtgctgggattacaggcgtgagccaccacgccaagtccttgattgattttcttaaccccttgatggcagcttttgtagatgtttcttacttccaacaataataataatgataaataataaa

SEQ ID NO: 188510 - DNA, 660 bp, Homo sapiens
gtgccattacggccggggctgcctcagcctcccgagtacgcgggaccacaggcgcctgccatcatgcccggctaattttttttcgttggtttttcgttttttggtatcgttagtagagacggggtttcaccatgttagccaggatggtcttgatgtcctgacctcgtgacccgcccgcctcggcctcccaaagtgcgaatgaaagctttaagagggctgcttgtttctggcagctctcaggttcttcctgtctgcctcagaagtggcatattccacatacgggctgcatcttcagtctggactcatcctcttcaagatgagacaggtggacgcagagctgcaccaacctccggtgatttccacacaatgtgtcctagaagaagagaccctacactgggcttgtgaccagcggaaactgaatcaatgctggagacacattctaacagtcgaatgggcagctcacaggaggtgttctaatctattatgagtcagccaaacccaattttgtgaaccaatgcaacacggacaagaatgtttgaaggcaccatgataatgccatcctatgagatcttcttttggaaacatccattagccttcaatgtcacatcttaactgcagtcttctgtctccctacaaatcgtagtcatctctattactaca

SEQ ID NO: 188511 - DNA, 386 bp, Homo sapiens
gtggggaagcagtttagtctcatgtagttccttctatagatttccaatttgagacaattttggaaggtatagggaggtagcacattcagtggttaagaacatagtcctctggagttaatgaccttggaaaattattcaactttctgaaccttagtttcttatctataaaactgggacaagagccaggtgtgggcaacacagcaagattctgtcttaaaacaacaacaacaacaacaacaacaaaaaacatggtacaagtacactatcttagaggattgttggaggactaaattaggtaactcatgtaaagtgcttagcattatgcttaatgcataataaattctcaatagtgtcaggtaatgatgataacagaaagctataatagt

SEQ ID NO: 188512 - DNA, 477 bp, Homo sapiens
agctatgttaaaagttagaagggaactctattcctgtcaagggaattatatgttttactcctgtgcatttttctcattgatagtcttatggaggaagttaaagctgtagaaatgatttttaaaattaaatctttccaatcatttctactattttggttattttgataaggacaggaagtaaccatggtttcactttttggacttgtttgcacgcaatccaggaaaaaattttacagacttatttctaaatctttctaaaataaaaatgtgtgtgtgtgtgtgtatgtgtaagtatgtgtgtgtgtgtgcgcttttaaattttgaaccccaaaccctctctagcaatcccaccttatgtttgggttgcagtgacatttctttattaatttttatgcttatgtaaacttcctgtgtttctgcaagttggaccaacaaagaagttggctacctctgtcacatcagatgtttgaggtacaa

SEQ ID NO: 188513 - DNA, 303 bp, Homo sapiens
gcatgtgggagaagacagcatgtctaggacattacgctgaggctgaggcagtaggcaaggaagtccaacctgcaggctaagagtcagttttcactcctgtgggaaaagcatgcccagctctcagcaaaagcatagaaatcaagagagaacagtaaaggcaaacaggatatgtagcctagttccagttgaaggtattattcctaacaatgaaaaatgtcaatataactatttccagagttaaaacttcagacacatgctatgacaatgagacagtatgtttgaaactacagatgtccaaggaaa

SEQ ID NO: 188514 - DNA, 550 bp, Homo sapiens
atccgtttcttgaatgcaaccagtgcatggcagcctttcctatttctgttaatgctaaaaggctgctgcatggaatctctttggttggtaaatagaacagagcaggtcacaggtcatcccacacattgggcagccaccggatcattaaatggttggggacaagaggaggctcctactcggcaatcagcctctaatactcccagctccatggattgctttctctcccctaccaagaatactgccatccaaggagacgaaacataaacttggtggagctggtggggaagaagctaattttctattacagagcatctccatttcgcacagagccctgaaattgtgtttatgaacctaatgtgtactttagaggaatgtggttggcagtaatgagctcataactctcaggagtttggaggccagcgagtagcagattgttgaatcaataaaaatagcagtaagtacctctgcggctcttctgttcaaggacaaaagtggctactttgggggcaggagacgtactttctcccttgcttgtagaaggtgcatattc

SEQ ID NO: 188515 - DNA, 433 bp, Homo sapiens
ctaggaatgataggagctagggaagtagagatggggagagcactggacaaacagcagaaacagcatgtacaaaagccctgaggtcagaagagctgggtactccttgtactgaaaggaggccacagtgagggagcaaaagatagaccaaagatgaggttgggaagtagacagggctgaatctggcgagaacacacaggtcttgggaaggactcttgactggaaccagtgagtggttttaagtggtggggggcatggctgcagttcttgctgtactccagtagctgaaggggtaatggcttagagcgggtttcaggagaccagggaggaggctatcttccaggggaagagtggttggacttggaggggatagtggagccggagagaaggggcagagccaagatgtgcgcagggagtgggtacaataggacctggt

SEQ ID NO: 188516 - DNA, 261 bp, Homo sapiens
acataggagtggtaaccagaaggaaatgaggagtctaaacaaggttagctttttaaaatgggagatattgtagaatgttggtatgccaaaaggagtgattcagtcaagaggaaggaattgatacaaaagaaagaggggctaattatagaagccaagtcccttcgtaggtgtgggagataatccagtgcataactggaggagttagtctttgaaagtatatgaccatggagtggttggctgtgtgtggtggaagaaaagata

SEQ ID NO: 188517 - DNA, 321 bp, Homo sapiens
tatagaggtcaaaattgttttcataataatactagtgagttatttgcctttttcaccatatggacaaatgctgctatagcaattgtgggggaaaaaaatagatgaagccttatcaaggggccaaatcaaagcagtggcacccaactgtactagtagtcaactcttcatcaccatgctctcacagtaaaaattattaattttactaaatcttgaccctgaatacacatcttaacattttacatgacaaaccgggaagcatgcatgaagcactcctgttgtgtaaagaagtatgaagactgaagaaaaagcactgtgcaattg

SEQ ID NO: 188518 - DNA, 409 bp, Homo sapiens
gtgttaagggaaggaatgcagggatcttaacgctacttcttctatcatgtaaaacccactcaaaggactcagtccacctctgtttttggctcttacccatggtttatgcagactgagtaaccaagctaagccagcaacggaggacaaccaagtacgttgtcatctccatagtgggctggtaattatactccagtccatctgaagcagcctcattgtctggggtgataaccaaggttcactgtctcatggccagggaagtcaaggacgcagacacacaaagagtgaagtaaagagtggaagtttaacaggcgtaagaaacagaatagctctctgctggagagaggggtcctggaggaatggatcaccggatccacagtggaatgcaggggggtttatagatgcctggtga

SEQ ID NO: 188519 - DNA, 272 bp, Homo sapiens
ttttttgtagagatgatctgtgttgcccaggctggccttgaactcctggcctcaagcgatcctcctgccccagccttccaaagtgctgagactatagacgtgagctaccgcacatggcctcaccttcattcttaaaagatgttttggttggggatagtattttaagagccttagttattttcaacatattgaggattctgttgtcttttagtgtcttattgaagagaagacagctgtcagtctttttgtgcctttgaagttaatctaccttt

SEQ ID NO: 188520 - DNA, 358 bp, Homo sapiens
aggatacattgtgaaagcatcactaccatcaagattataaacatattcatcacctcccaaagttctccctcccattctaattattatttttattggtaagaataattaacataaaattcaccctcctattatattttaagtatgcaatacagtattcatagctataagcactaagctgtaaattagacctcctgaacttatttatgtggtatatctaaaactttgtactgtaatcacacctacacacttacctgcaccacagctcctggccagtctaccctctgcttctgagtttgtttttttgagatttcaaatacaagtggaatcatacagtatttgtcattctgtgtttggttta

SEQ ID NO: 188521 - DNA, 577 bp, Homo sapiens
tcaggccagaaggtcagattcttactgcttttacccacagctcagcagttttccaagcatcagtgcttctcagattatccttatcagtttcctttttgtcggagacaaggtctccctacgttgcccaggctggcgtcatgcggtcctctggccttagcctcccacgtagcatatgctaccatacccagttctggattggctgatctgaatcggccctacccagaagtctgcccccaacaatttttgctcattcactctcctgtctttaccttctgggaaatcaatatgacagcccaaatttcatctaccaacctccacttctatcccaagctctactctcgtgggacaagacacactcaatgtctggcacagggcgtggcatacattaatgtttcacacactaacaggaactaggccaactgaaaccttgctcacccagcagcggtctcggaccttgacccctgggcctcagtgtctcccacacccttcggcatcaacaagaaccagcgccctctcatcatctttacatgctgtgtacccagccctggctgctggcaaacatcgctgcacacgccct

SEQ ID NO: 188522 - DNA, 211 bp, Homo sapiens
agaagatgcaaaagccagaataaatgctaactcccagcttttttacttagacaaactggatgtatgttgatgaaattggctgagatgaaacaattgaagaggaacagatttgtgagacacatgaccaagagttgttcttgggacacattaaatttgagatgcttgttagagatccatgtgaagagtgtaggcagttggaaatatgagtctg

SEQ ID NO: 188523 - DNA, 457 bp, Homo sapiens
gtctggtttcaaaaagctctatgacctgaatatttccctctaaaaatttatatgctgaaatcttaaccctgaaagtgatggtattaggaggtgaggcctttggaaagttattgggtcatgaggggtctacccttatgtgattagtgccattacaaaagttccctagagagctacctgctcctttcaccatgtgggaacacagcaagaaggtgccatctatgaactagaaagttgggcctcaccagacttgccgctaccttaatcttgaacttcccagctttcatagctatgagataaaaattttgtgccttataagccactcagtctatagtacctatttcaatacaacagctacagaaacaaagataggaagaatcaccaactctttctttttctttttaagaatatttgaattgtgtttattctaagatctgcccccgatttatacttttccttt

SEQ ID NO: 188524 - DNA, 342 bp, Homo sapiens
ccttttcctagacaaaatagtttcgattccactcaagtgcaatgtcaacaaaaccagcaacgaggcaaacttcccagcaacagagccactaaccaaatttcactcatgtatcacagtagtagcaggaacttggaaacccttgtccactcaacaattattgttagatatttaggagagagcctgccatctgtgacgtatgggcaatcccagcgcccggctcagtcctgagaaactcatgtgctttctggccctgagtcataaggacccgatggcattccacagccaaagaaaagagtgaatcatttaaaacagggcttggcgtcaatcttgagactaagtcac

SEQ ID NO: 188525 - DNA, 262 bp, Homo sapiens
tgggtcggttctgcaaatgacttggagaactgggctcttcttcatcaggcttatgtcagcctgaggttataagccaagcagacagctctattttcagtcttcagtatacatgatgagtatcttctacttctaggaaagttctgttcactggagaccctctggcccaccctgaaattggatacagggacagggacctgatctgtgttttattcttctgccttgtcatcagcttctttcccatttgattttcctaatttctatg

SEQ ID NO: 188526 - DNA, 373 bp, Homo sapiens
aagtcttaagtcagtctgcctccatgctgagcccagctgaatgaaactggttctgagcacagcacaactgcagaagtggatcacactgaaaggaaagagaccagactgagccgaggctatcaacacccaaagaaaagaaagcggagttactctgctagtgctttttatggatgtgcattccaactcaggagcacacagagctgaactagggaagagcaatccctcttgattgggctcctgtcacttgaacttgagtggtaaacactcaactacagatctgaatggtatgagaggaagaatggcctgggtacagtgcggctgcttggaagacttggccacgggtgggcaaaagatagtgctagacccacaactt

SEQ ID NO: 188527 - DNA, 473 bp, Homo sapiens
tgaggctagtgtcttgacaaggcattcaggggaagactttgcagaaggcaggatcaaagtagtctgagtgcatggagaggttaaagtaagcaaagatattttctgtagagatgcattacaggagaattaaagaggaaacacttttggccctgctctctactaaaagaagacaaaattggaagcacttcagtgaagcagtggggttgaatttcacttctaagggacagggatcagtgggcactaggaaattagtgagtctggactatttctaaagaaagtaatccattctgaaacaaagttcacaagtgtaataaaaagtatactgttttcatgaatcttcatctttcaggctgagtttcagttttttctttgtctttaaccgtgtcagtgggctgcttactctgcttctcatttgctgttctttccttccatgaaaagaacccgtttgtaactcttccatttcttagctgcat

SEQ ID NO: 188528 - DNA, 372 bp, Homo sapiens
caggaggctgaggcaggagaatcacttgaatcctggaggtggaggttgcagtgagccgagattgcaccattacactccagcctggacaacagagcaagaccccatctcgaatgaataaatgaatgaataaacaaataaatagctatatgtggcattattttaagcaaatggtagaaggtaagaaagagattccatctgaatgttctctgctgagtagcatagtgattataacactggagctgcaaggaaggaaatgtaatcacagacctttccttttctctgcagagaatatttatatggttgctagaatgtaagcactatttattgtattttgatttttaaaatttaacctatagccaaagctctgaacaa

SEQ ID NO: 188529 - DNA, 206 bp, Homo sapiens
gggattctcagatcgtgcaccgttcagccgtttgatggaattcgcgccaccctgaccagcgagcccagatggcgcttaaatctgtcactctttaacgaccctactgttttttaaaaatatttttatatttgagctcattcagttaatctgagagattaatcttttccaagatatgtctggggagggctttactgagggtttcactt

SEQ ID NO: 188530 - DNA, 337 bp, Homo sapiens
ctcaaacagtgagtacattttgccccatcaattacatctctcagaattcatcctaaggaaaaaagaaaatgtgtaaagatcaagtacaagaacattcatgaaagtgctatactatcacataaactagaaatagatgtcccacaagaagatctataatatactgtggcacttacatacaatgaacttctgtgcagcaattaaagtaatatagaattatcatagagagatgtcatattctatggctattgcataacatggaatctatgacaatatctcatagaggacctatgaaagggaagggaagcacgattgacccaagcctcaaaattaaacttga

SEQ ID NO: 188531 - DNA, 551 bp, Homo sapiens
tgcctgtagccacccgcctaggagcattaattgaaaattaatccgctcggtacgtgccggcgtgcaaatcaaagctaagtgtctcaattaggaagagaaatggagtcgggcactcttctcagatgctggcttatttatggggataatatcatttttaatgagggaagctactaaaaggcacaacaaatgcaacatttaatagaaaaatattacagcattccatcagcagaacacagccaggagagtgggttccagggatgcaggagcacgcgggtgtctctatggttgtccaagcaccttgtacaagcatgtgtgtgcacacgtgtccccatgagccctcgtgtctgcatgcacactgtacacggacggctgcatgcatctccttctctggatatgtgtgtatgtgaatattagtgtctgggtctggtgtttggggagtagtgaagctttccgctgtttttgctgcaaaagatgaatttcccatctgccgcctaaagaactgtcattctgggccctgggccagccaaataaaaatctaaggtatttcccaa

SEQ ID NO: 188532 - DNA, 422 bp, Homo sapiens
caggctcgtaggtgaagagacttgcgtagtctcagatgagactttggactacagacttttgagctcacgctgaaatgagctaagaattcagagactgttgaaaagggaggattgtattttgcaatgtgagaaggacatgagatttgggaggggtcaggggtggaatgaggtggtttgaatctgttttcctgcacaaatctcacgtcaaattgtaacccctaatcttggtggaggagcctggtgggaggtgattggatcatgggggcagatttccaccttactgtccttgtgatattgagtaagttctcaagagatcaggtggtttaaaagtgtgtagcacctttcctttcattctctctgccttctcctctggccacataagacatggttcctccctctttaccttctgccaagattgtaag

SEQ ID NO: 188533 - DNA, 524 bp, Homo sapiens
ataattttttacagagtgaatgtagagatggggttttgccatgttgcccatgctggtcttgaactgcctggctcaagtgatctgctcacctcggcctctcacattgctgggattacagatgtgagccattgcatgccagggcgatactgactgattttcataacttagcttgcaaagtggatatctatttttctttatttttatttttttggagacagagtcttgctatgttgcccaggctggtcttaaacacctggccttaaatgatcctcccatctcagcctcccaagtagctgtgattacaggtgtgagtcactgtacccagctattttttcaattttttaaaattgtggcaaaatatacgtaatataggatgtaccatctttttaaattatacagttcagtgatattaagtacattcatattgttctgtaagtatcacaaccatccatctccagaactgttttcttcttgtgaaactgaatttctatatcctttaaacattcactctgtaccagtcttgc

SEQ ID NO: 188534 - DNA, 382 bp, Homo sapiens
acctgactaatgcacactcactgccgagggggcctttaggcctctggtttcacacttcttttgtcttgtctgtcccttggtgttgatcttgctttagagagagtaattggaacgagagcgtgttatttctgcttgagaatgggtaccccaaatccagtaggtagatgcattccttcatttctacagaggaaaaaaattgccagtactatcctgatttggctggttgcacttcagggtttcagctttaaccattttagggactattgacaaaagtaaactttttatatgctgaaatggtgatgtttgggggtgtcagtggtcttaacaggaaagcccttcttcttcactagcaaccttgcattgttctaggaaattccagtcc

SEQ ID NO: 188535 - DNA, 506 bp, Homo sapiens
ctttgctcactgctgtatcaccaaatgattagaacagtgtctgtcgcataggagctcgacaaatacttgttaaatgaatgagtggcatagaggtcatggtgcactagaaagtgaacgggccctggagtgaagctcacctactccccgggaagctcagcttctcggagtctcagctgatgggatacctgcttttaaagatctccaagtcccttcttaccttcccacaaaaaacgcagatcatggcccatgcctgctgttccacctcagtggaaagcagcgggaatgaagctcaagcaaagaccaggggtggggcctggctgtggagcccactcctaagtggcttcagacggcatcacgcaattggtgtggagacaaattcacccccgactgcatttgcatatgttgaggttaagatgaactttcactctctgggcacaacacacaagcagggagccccaaaactgagtgaacagtggcaggggcagccaggaacgaagaagctgctg

SEQ ID NO: 188536 - DNA, 713 bp, Homo sapiens
ggtggtgcatgcctggaatcccagctccttgggaggctgaggcaggagaattgcttgaaccagggagttagaggatgcagtgagccgagatcgggccactgcactccagcctgatgagagagtgagactgagacagtgaaaaccctctcctgtctctctcgcctgggcgatagaggagggacatgttgagatggcaagtcacacagggtgcagcctgactgctgagtccctttagagagcagagatgtcctagagaaacacttgccttgcattcaatttgatgttagctggaataaaacttgggttcagccattgagatttcagggctgtttgtcgtcatgacgtaactctgcctacgctgctagtccactaaggtggggatccactgtagtcatctgccatggtttagttacctacctcctagtgctggacacttgggttacttccagctctccaccgccacaaacaaagctaccacatgtcctcataaggacctgagcaagtttctgtggagtccatgtccaggagtttgcaggaacatagaatataggcatagttcatgtctctaagtacagccagattgcacactagagtggctgcagtcctttatgctcctactcacagttcatgaggttaccatttctgaaaccacagtatattttagcagcttaaagcatggactcaagtcagatggcttgacttggaatccaaga

SEQ ID NO: 188537 - DNA, 320 bp, Homo sapiens
cactgtgaaggtccgcggcttcattcctaagtcagtcagatcagaaacccagtggcgggaaccaactccggacacaccgggcccaccaaggggaagaatatggtagactggaggatctgcagagtcaacgtgtataagcaagacctgagggagtatgattgggatgggtcccaagggtgctgaatcaagggagactggatttggaagtggataagggagagtttgtcagtctaagagcacggtcccatgatgccggttttccaccatggcaagtgccttagggtacggggctgatatgcttatgggttggccgttggaca

SEQ ID NO: 188538 - DNA, 349 bp, Homo sapiens
ccagagcttgcttatctgcagttattcttccaaatcacggagaaacacaaaatccagataggtcttttaagtacagcaaacacacttccgtgtgctttaactgacacaaatatgtgtgatgaaatgaaatgcacagaatcgcaaatgttatccttataggcaatgtgttccttcatttcacattttaggcaatcacaaagcaattaaacttctgtgtgcacgggacactgaagtcatgtgtggcatgcttcctgggactcaaggcgtcgggcttgttaatgggaaggagggagtcagaaagataggcttattcattccctggcagttaaaatacagactggctgaatca

SEQ ID NO: 188539 - DNA, 305 bp, Homo sapiens
gcccttttctctcttctctgcttccatacacaaattcaacttcttcaaccccttgttttacacatttttagtgacactcttgcccgtgatgttatcatttaaaaactttatttaggctgggtgcagttgctcacatctgtaatcccagcactttggaaggctgaggtgtgcggatcacctgaggtcaagagttcgaaaccagcctggccagcatggtgaaatcctgtctctactaaaaatacaaaaattagtccggcatggtggtgggctcctgtaatcccagctactcaggaggctgaggcagg

SEQ ID NO: 188540 - DNA, 595 bp, Homo sapiens
ctgtgagactgtaaaataaaaaccaagttgcatacttccaagatacaattgtgttccaggaattaggtaaatattctcataccaaaggaaaaaaaatggccaaaagaaaggggtaataagccccacataattctgaaacccagcagagctgtcattaaatcttaaatccccaaaattatctcctttgactgtatgtcctgcatccaggtcacactactgcaaggagtgggctcccaaggctttggtcaggtccactgtggctttgtggggtgcagtgtggctgctttcatgtgctggagttgagtgcctatgacttttccatgacgagattgcatgatgctgttagatctaccattcctcagtttggaaggcagtggtcttcttcccacagctccactgggtagtgttccagtggggacattccatggggttccaatgccacatttccctttggcactgccctattcaaatatctgtgtgggactctacctttgtggcagccttctgcctgagcactcaggctttctgatacatcttctgaaatctatgtggaagctgccaagcctcctttattcttgcattctgtgcactagca

SEQ ID NO: 188541 - DNA, 121 bp, Homo sapiens
gaatattagaaatcagtattggggtttcttttaaaatgttttgtactaagaatgaaactattttcaaacagtctttgaaaattttgttttctcttcccactcttgaatcctctactaggct

SEQ ID NO: 188542 - DNA, 515 bp, Homo sapiens
  misc_feature (510)..(510): n is a, c, g, or t
tagaatcgagctcggtaccagattccctttcaatcctccccctttccatccctattactttttaacatcattaagattcattataaccaaagtgtgtcctagaataacctcctacggtttactcgtgtgcagaatgtggatgagaaggcctgcctgcctgcctcagaagtgcaagctgtgcatgtgttcaccatcagcaggagcttattacacatgtattgaatgactaacatgggctgtcaactgtaagccctgacaaattcgaaggtgtttgttgctgtgcttccgaatgcatagtgctggttctaaatgtgcttgttgccttgcagtgcatttattgggcatgttgctcttttggcctatgtggtgatgttatcagcccaggtcctctgagaagcagattccaagaagggattagacctgcatgagatgagattgactgggagaaagacctgagaaggaccaaggggagggagcaggagctggcagactgccgtgcaggtctgacancccgt

SEQ ID NO: 188543 - DNA, 327 bp, Homo sapiens
ccactgcactccagcctgggtgacagagtgagactccgtcttaaaaaaaaccttaaagaatcagttagcgaagcaaaagccaatagggagggaatataatttctggaatgtctgtctataagggaataaaggctgaacctacaaagaagtccctaaagttctgatttaaatacaagaacaacgttatttgcatcatagcactttggagctggaaggatcctcaaaccatttagttgtagtggctaattttgtagaggaggaaaactagggcccagctaggggcctggtctcccaacttttggcttgacagtggcagctctaccctcc

SEQ ID NO: 188544 - DNA, 512 bp, Homo sapiens
cttgcactctcccctccccaccttcaggcctggatttctttgatatccagaggggccggagtttgtcctgctcctgtgacactgggaacttcattgttggctcctccttggggatgaaggcccaccctggccttgctccacgctgcctgatgccctctcctgctgtccttctgctgatggccagcacagctcccaatgagaccctgaggggcacctcccttctgcacctcctcagtccctctccctttccctctgtcgcctggctccacctccagctggacctgattgagaatgggaacatccttagtgtgggtggctaggtctgctgaacaggatgagggcacattaggtgcatttagaagaacctgggaaagttgcaatgaatcagtgtccctcctgtctggtgtttctgcctgttagagggtagggactctggggctggtcatgtggaagattggctaggggtgcttgcgatgggcttatggtttcgaggaagggaagagggaaatggt

SEQ ID NO: 188545 - DNA, 429 bp, Homo sapiens
  misc_feature (118)..(118): n is a, c, g, or t
agagctttaggctgacaccctgtgagatcttgggctatgctactgggcttacgagggccttgatcagcctggcacgtgctctcatggcctaggcatagtcggcctgcatcttctttgngcccttatagttgtgcttcttggcaaagcgcatgttcctcaggaacttggggtccacccccttaagagattcgtatctacatgatggggttgcttgtttttttcttgtacatttgttcatgttccttgtagattctggatgttagccctttgccagatggatagattgcaaaaattttctcccattctgtagcttgcctgttcactctgataatagtttcttttgctgtgcagaagctctttagtttacttagatcccatttgtcaattttggcatttgttgcaattgcttttggtgttttagtcataaag

SEQ ID NO: 188546 - DNA, 797 bp, Homo sapiens
cagtcatgctcctctggttcatctcgcatcctgtgttgtccacattgcacccctgtccctttccatttatcacgccagtcttgacaaagaggcatgctgtttttttccctgctttaacctgtttcagaaatgctgaccttgcgaaggtcttcaccaccatgaagtttcccagagagactctcaccactgctgttcagacacaaggaccatgccataacctgtcatcaggaaagagactatgttaaagaaggattttcatcctgtcttatgaagaaattccatttcaatgctgcgataatgcaaagtaattcttctcaaccatctgaaatcacaattgttcctttctggagatggcatgtgaagatattcccaagactgtgactaagttggttggaggttgtaacaccatcattccattgcctctcgctgctctgctgttgctttccaccagcgtaaaatcaattaagggaaaggcatggaaggaatgccctgtccaccgttgataaaattgggagaccctaatggacttaagtcccagtaagaataaatccagatatccctggtaggttgtaaaatggtttgttggtcagaagcaatgttgtgggggatactatgacagtaaacaaggcatctggtaaatccccggggccaaaacttagagaatgcaagaaaggcaaatccatattctcgcagagtacaaaaataaatatctattccagtgacaataaatcactttcttctctgtggacaaaaacgaatctcatgtaattgacctgccatgagttgccagttagtgc

SEQ ID NO: 188547 - DNA, 708 bp, Homo sapiens
agtgtcttcagtgcaggaggtagggagcaagcgtgaagcagggtgggcagcaggcctggctcagatgccggccatccctctatgtgtgtgtggttttagcatgcagactagaagtaaaggtgaatccgtttataatctgtccacctcagaatctggggaaatccactccccatttcaactgcttttaatgatattctataccccaggttttaaggatatgaagagcaaatcataaatgtgttaattttgtaaatgaatacaaaagtaattccagagtttaactctaatatataagagcgcttaagttatttttattgattctgccatggccctccagtgtcctcctaattgattagctaagcatgtccagtttaatgtcagtggctttcagaggctggcctcttcatatgagctactgctgggaggaaggggcataaacccacacctgaattactctctattgtctggactacgaaaagaatacttgactacaacaaagaataccggaatatctagagaattacaagtcttagctctgtgatctagtggttgtgagaatttggtcaagtcctttaactttcagggagggcctaaagtttcctcagccctcaaatgaagacagggtgaggtgaggatcaacttaaataaatggagtaactggtttgaaaagagtcaagttccatatgagaataaggtattatgttcatt

SEQ ID NO: 188548 - DNA, 465 bp, Homo sapiens
gaggatccccatggccggtgaagagccacatcacaaaggagcacctccaaatggccaagaagcatatgaaaatatgttcaatctcattagccaacagggaattcaaattagaactacaccaggatggctgaaagtgcaaagactgacaatatcaagggctggtggggatgcagaacaactggaactctcctatgcactgcggaaggggtaaattaataccgcccctttggaagaacagtttagaagcatcactaaagctgaatatattcatgcctactccggaaatcctgagcccagtggctccctttgaagaactgccttggggttcatgttgcagcatcaaacagggatggaagatgcatcttgctttagcagcaggagcctggaaagcagctgaagccctggagggtgcctggcacacagaatcttgtgctgagcccggagcacaatgggagcgggctggcg

SEQ ID NO: 188549 - DNA, 498 bp, Homo sapiens
cttagacattacacattcttaattttgattcaactcctggaatatttttaaacttcattttagttgtctagatttcactttttccaggaatcctttcttagcctctccaagtttgagatttgcccccttctttgtgcagtgataatcactctgtttcctttatcataagcatttatgctattttttaattgcttgtttttttctcaccaagttcaaagtgtatgtgtgtgtgtccacaaagaagtgtgtaccatattttccccttccctatctttctggcacttaccaaatacataaatatttgttgagtgaatgaatttttaatacattcactctttcagtgcaaaaaaaaaaaaaaaagaaccacaaatctaatggaaattgagtaataaacttagttactctctgtctttgttttgttcggttagatgtgcagagttaccttaaaatgtgttattgtcaaattgtgctaaaagtttttaatgtgccaggcatctt

SEQ ID NO: 188550 - DNA, 618 bp, Homo sapiens
gagacggagtcttgctctgtcgcccaggctggagtgcagtggcgcgatctcggctcactgcaaactccgcctcccgggttcacgccattctcctgcctcagcctcttgagtagctgggactacaggcacccgccaccacacccggctaattttttgtatttttagtagagacggggtttcaccgtgttagccaggatggtctcgatctcctgacctcgtgatccgcccgtctcggcctcctaaagtgctgggactacaggcgtgagccaccacacccggcccctgacccggtgaaaacttttaacccctaaacaagaatgactgctgtagcctctccggatgggatgagaatattcacatttcattctcataaaaatgctaccaaggtcaggcacagtggcacatgctacctgtaatcctggcactttggaaggctgagttgggcagatcacttgaggtcaggattcaaaactgacctgggcaacatagtgagacccatatctattttaaaaaatgttttttaaattaagctgggcatggtggagcatgcctgtagtcccagctactcaggaggctaagacaggaggatcacttgaggccaggagtttgagatcagac

SEQ ID NO: 188551 - DNA, 400 bp, Homo sapiens
gcaagtcaggacacgctcagtgagcaaccctcagaatgcatggacagccagccactagtttaccatgcactggctcattcacgcacccagtgaacaaatggttatgacgacccctgtcctcctgagatttacatgataatcactctaatttctctgagaagaggactcagtggaatgtatttgggtttggggcttggagtcatgctggcctgggtctgaattcttgccctgctacattcactgggcagcaaagggcatgtgtgccacttcctctttctggacccaagaatgccaccacttccctcccaagattcagtaaaaaaaaagctaacatgacacatgtgaggcatccagagtccctgtcaccttagtcacttaaatgttggtgcgtccgtagcgg

SEQ ID NO: 188552 - DNA, 292 bp, Homo sapiens
atctttaggcaatatcagtatctcagtttagtagatacataaaattaaccaccgcagataatgattttttgcataaattcatttatcatgtatttattgaacctctgtcttgtatttaatcttttgaataatataaagagctatgagataatttttttagctggaggaacataacatccaaattcctctcttaagaatagttttggacatgggctgggaagaaagtcttagcatgttcaaaacagaattcttgatttccaccacccatcacctgccacatttgcctacacaa

SEQ ID NO: 188553 - DNA, 115 bp, Homo sapiens
ggtcccaactccattgttttgttaaaagtaatcatttaaagattagctcttcataaggccagttaccaactattaaatattcaaagcaatatagttttaaaatctcctacatata

SEQ ID NO: 188554 - DNA, 340 bp, Homo sapiens
aactagttatcctactccctcggtaaagaactaataggctcggcacctacttttcaatcatttacattttgttacaccctatcagcctcaaaaagaaaagaaaaaagctataccaaaaaaaaaaaacaaatttaagttgacaggtacaataactcttacaggaaaagagatgtgaattatgttattctagtaactgattcttaaatgatacacctacagttttctaatgctctaatctttctatcctcaaggttttccagatttcagagacagcacaggcagaaactaagtgtatataccacttgatcaagcttactgcggatttattcttggatagcta

SEQ ID NO: 188555 - DNA, 556 bp, Homo sapiens
ttcaaactaatattgttctttgatgagctacagagtgcatttgtttaagcagttgttggaaagcagaccctgcatggtagactggaaagaacattggactagaactgggaaaatcagccatgtgaccttgttaagatagggacattcgttttctatagcctcagtttcctcatctgtaaaatggccataaaaattccaattctgcttatttcataaagatgatgtgatcaactccctcacttcacacatgaggaaactctcttgaggtcatatagctaattggtgacagtatcaggactcaacataaaagtcttttgaagacttggactttctgtagtaacaaagctgccattgaagcaacagataggaaagtgctttgaaaaatgtcacataagggttttgttcagtagaagtaataggactatatctgccaaagtcattttgtggcaattaattaggaaatgccttttgagactgtacctgtaccttcagatacaaccatctttattttaaaatcaaatacactctatttcatttctcaacaatgacactagaa

SEQ ID NO: 188556 - DNA, 299 bp, Homo sapiens
tgctgtgctggcaggtgtctcccacaagaagcttctaaatatgacttcacagagatttcttatatctgcaaaggatggtacttttttgcatttaatagtgaagaattgcttgttttgtgctcaagacagaaagacatttttattgttgttgttgttgttttttgagatggagtgtcgctctgtcgcccaagctggagtacagtggcatgatctaggctcactgcaacctctgcttcccaggttcaagtgattctcttgacttagcctccttggtgccttggcctctttggtgcctctgg

SEQ ID NO: 188557 - DNA, 387 bp, Homo sapiens
gtcaataagagactgaaaaattactggctgaagctcagagaacctttgcttaaaaggagcctggctgggctgagttatggtgtcttgccttttctgcgtcctgctagactaaggatatgatggctggcactgcagtggccacattgcaattttgaaataatcctaaagttggaagccatgtgctccttaggaactaagagagaaggaacctgagttccaatgactatagagtcgccaaatagacctagacgactgaaatataaacccctaatttgtttataccaaatgctggggagggtaggggaggtgtctctgttatgcaaagctgaatctaattcttcacagacaaaatgtctaaatcacttctgtgtgactatggaaagacat

SEQ ID NO: 188558 - DNA, 183 bp, Homo sapiens
gcagtaagaaacttacaaaataaaactttgatttcactgtcttagccactcccctaaaacaatacctttttcttctttccatattaagaaaaaatcacttgaaataaaggaataaatgggggaaaaaaaaaagtcccttcagtgaccaggcgcagtggctcatgcctgtaatcccagcacttt

SEQ ID NO: 188559 - DNA, 282 bp, Homo sapiens
cagtccctttggagagaccgctgtggaagttaacacaggtgaggtgtcagcaccttgcctggtacaggctgtaagcgcttcatacatggcagttgccatttttatggcctcatggaacaagggacttaggtaagattttcagaaaccatgatgcttcgaagacagcagcgggccaggggtcaggagcctggcactgacttgctgtgggacctcgagccatcatttcccttgtctggaagctgggggcctgggctttaatgagggccatagacccccctaagg

SEQ ID NO: 188560 - DNA, 236 bp, Homo sapiens
tcctacaagaagttacatgctacttgccataggcatttttgcattttatgattctaaaagaaagaatttttgtgcataatgccttcttgcatagctaaagatctacagagaatagaattgaaagtcttctatatttcaatggaatttagacagtccttagatagcatacgtgtaaagggatgttgattgacccagtgccataaattatgttgtgatgaaaaggaactatgtgaaac

SEQ ID NO: 188561 - DNA, 502 bp, Homo sapiens
ctcatttccaagtagtcgccttttaaggataagaacccacagaagttaagagtcaggcaaaattgggagggaaagagtaagaaagccaagtattggatgtgtgtgatctaaccaaggacaaatcacaactctccagaccaaggccactgcaactgaaaggttacagaacaaaagatactggactccagccacaccctaactccagaggactcagaagagatcttaccacgacctcagctagagaagcctacacagcacacaggagcctgaacttaggaccactttgttaggaaagggacccagggacaagtcaccactcactttaacttcttcccacatgggacaacataaaatgtgtagagagacaaaatccatgggagccccactatttttgagaagcaagaatatctgctgctctctgagcgccagggatttccaaaatgaagcactgcatacctcataacagctcccaccaatagaagtcaagccaatatatcactaa

SEQ ID NO: 188562 - DNA, 403 bp, Homo sapiens
aggctttaatagagcaacatatatcacgatgtcctaagcaaggtgatatatacagtgtattactgccttatttaattatagaatgctttttctgtgggtttcttgaatttgagcatagtttgggaaaaaggacaagcacttaccccgtgtgctggatacttactggttgtcccggggcatctatttctcacattcctctttccccagatatatttggtaataagttatttaataccagatttgatttgataatcagttgttcaatttacagtattgggtgaataagtttttttaatgtattttaaatgtatgacagttgtattttatcatacaattattatgataaaaacactcatttacttcttcggtctcatctggtctcttgctatcctgatggcaggca

SEQ ID NO: 188563 - DNA, 388 bp, Homo sapiens
attcacttccaaggctttatgtaccataccatctacatactgactgccaaactgtttatctgcagtcccaaactgtttatctccaggttctgtttctgagctccagatttgtagaagcatctgcctacttgacatttctcctttgatgtctaatatgcattcaaacatagtatgtattaaataaacctcttgattttttcctccaaagccttttcctcttctttttttatctcagtgaaagttaccatctactcatttgcttaagtaaaaaatctagatgtcagacttaattcatacctcccctgcctgtctccccaaacctcacatctaatttatccgtcctttgttggctcatctttaacataaatcctcaacctctccatttctc

SEQ ID NO: 188564 - DNA, 791 bp, Homo sapiens
cacagaaaaaaccaaatggaaattctggaagtaaaaagtcccataactgaaacgaaaaattcactagagggactcaacagtatatttgggctacaagaaaaatctactaaagacagatctatagaaattatgcaactggaaaacagaaaataaaaaagaagaaaaatgaacacagccttagagaaatgtgggacaccattatgtgcaccaacatttgcataacgaaagtatcagaagagggaaaaaaaagtagaaaaaatatttgtggctgaaaacttatccagcttaaggcaaaacattaatctacatattcaagttcaatacactctaaacaggataaacacaaagagatctacacccacatacaccacagtaaaactgttgaaagacaaagaccaaaaaataatcttaaaagcagaaaaagaaaaatgatttaccacacacaagggaactcctgcaagcttgacagctgactactcatcagaaagttctgactagttctcaccaagatattatcaatagaagtacagtgtgacatttctaggctggagcaccgcattgccaaaccctagaacactttttcttccggcacagtgaatagcaacactcaagatggcggctggtccatcagcccggatttcataattacacactttgacccagcattcccacttctgagaattcattccctagagatatcagaacatgtatgaacacatatacaatgacacaggtacaagattattccctacagcattacctattaaaacaaaagattaacacaacccaaa

SEQ ID NO: 188565 - DNA, 289 bp, Homo sapiens
ggtagagccaaggtttctctatgttgcccaagctggtcttgaactcctgggctcaagctatcctcctgctttagccactcaaagagctaggattgcaggtgtgtgccactgtgcctagcctaaatgatacgctttcaatggtgaaatgtatggtatatgaatgatatcttaataacggttacaaaatgaaatgaggaccatactatatgctagccataaagggttcgacgtatcagctgtattttctctatgaacagtaaaaataatatttttatatgtgtgtacaaat

SEQ ID NO: 188566 - DNA, 616 bp, Homo sapiens
ctgtggacgctgaggagtgggcctggtctcgctgcagccacgggatctttatcggtcatcctcgaggaacacgagccctattaagtaaaatgcccaagtgctgcctgcattctctgctctggagtttatgaatatgatttgttttgtggcatttctaatgaacttttaagatctttttcctatctctggttctcagtcagattctttcctactaaggtatgcaaggcaagcctgccatcccattcctaaaccctgcgtccactgttaggcagtgttactcaccagggtggattctccagaacgctgaaacagcacagcttgtcttaggtggcaaccatgtcaaaaagatgcaatttggctcttcctgagatgtccataggaccttgcagtgaggtgtggagccagaaaacagggccctcccggctcctgctccccacagataggcagtccctatgatcttgcccagagggaacatttttatagagctgtaaacagtatatggccttggccctcagctgcaagctcttaaagcgagtgcagagttaatatcttcatgaacttatgcttcattagaaaagagacagtcacagtatgtggacacctggctgcctctagt

SEQ ID NO: 188567 - DNA, 456 bp, Homo sapiens
gtaattagattttgcaccgtacctgggtgcagtcaatagctaataatgataaacattagactagagagtgataatgagatagatgatagggatttgcactgagtaggacatgcccggggcatgaatgaaattaaaatgtgtctgaaagaaatgaaatagtgagacataaatcagcaagaattttatcaggtttgttttggcccctattatatgttatagatttaagatcatttatgtttataagttaactctgtatatgctttcaggtttcaccttttaaattaataaaaggttgatttatgtaatatttcaagtaaaaacagctaagtgaaccaggctaacaaagcattatttaatagacatcctcagggacctaatttaatgaataggtagagggatgttatttgtaacttagttcacaaattatttctatatcaataggtgactttaaatggc

SEQ ID NO: 188568 - DNA, 246 bp, Homo sapiens
atacaaaagagggactaacaatctatatgtagactatgctgtgttagtggctgggggaaaaaagattcttaatgttttcctctcccttgaatggcaaatagaacatgcctaaaatgaagaaaatattgattttaaaccaactgatacgtctgcaaactttattttaactttgagccactgaaagggatttaaaatcaaaggaacaatatatttcctatatcttttaggctactctgtatgggggat

SEQ ID NO: 188569 - DNA, 256 bp, Homo sapiens
gaacaggcctactttttgcagaccaggctacctgtggccctgggaaacgttaagctctgcactttcctaatcatcttaggttttagcatgcccatccagatgcggttttggtgtttcagctgacctatctctgcccagtgtggaggatatacagtactctgtggttcttcccttcaagtaataataggattctccactgcccaggaagcaaagatcctgggtgagggattggggaaagagtagaatgccccagcaa

SEQ ID NO: 188570 - DNA, 560 bp, Homo sapiens
taggtctggatctggctgtgtgttcatcagacgtcgtggaattggaaaacccttgcgggtcctacctgacccacggcacccaaaaggcacctctgcatggaaaggctccccctgaaacccctagcccacctcgagtgggaccgtcttacaggtgaggtgcacgaaaggcttctccgaagtgacagctcggaaggatgcacgtccggctgcgccaagctggttaccccgcctttatcccacttcggcgtcagcctgggctctgggaactgcagcctgtgcctccagccgcgcgcttcctcctgcttccagaggagcagggcagtgcagccaggcctcgcaaaccccacttctggggcccccagcgggagcaggaaggaaagccgctgagatgcgccgtgagtgtcgcacggcttggagaagtgggttgctgggttgcataaggtggaaggaacttgctagtttgcaaaagacagctcttggcgggagccggaacccggagcccgccgactcgcgcacccctcctcatttactgccttcgacgcgcgccaccccgactgcgc

SEQ ID NO: 188571 - DNA, 351 bp, Homo sapiens
ccctacctacctgaagcctccagtgggttctctgcacacccacaatgcaatccaaggctctcaccaaggcctgcaagatcctacatgaactggtccctgcctactctctgattccattttccacgacttttccttgctcactccagctcagcctccatgctgtccctcaagcaggccaagcacaggacctacacacagcctatctgctctgcccagaatgctcttcccacaggtagtaaggtcattcctttactcaattcagggtgctgggtcacatggcaaatccttgcagcaactgtccctgaaccatgatgtgtatcggcctctgcgtttttcctctattcttttttt

SEQ ID NO: 188572 - DNA, 1492 bp, Homo sapiens
gccgccttgacctcttgggcttaagctatcctcttgcctcagcctcccaagtagctgggactacaggtgtgcaccaccatgcctggctatttatttctatagagatggggtctcacatgttgcttatgctggtctcaaattcctggcctcaagcaatcctgccttggcctcccaaaatcctgggattatagatatgagtcactgtgtccagtacacttaaaatacgtgtgcacacacacacacacacatgtgagccatatgtctcaccacttgacatagtttgtgtttaaggtctttctctgccattatcatgctatcttctattttgttcattgctgtgtctccagcacttagaacaatgcctgacacatagtaggtgctcaataaatatttcttgaatgcaaatacactcaataaactaggaatgaaggaaaagttaaccaactgataaaggtcatctgcaaaaccccccacagctaacatcatacttagtggtgaaagactgaaaactttcatcctgagtttgaaacaagacaaaagtgcctgttctcaccatttctattcaacattgtactgaaggctctagccagggcaattaggcaagaaaacaaaatagaagggatccagattggaaagaagtaaaactatctctacttgccaataatgtaattttgtgtataaaaaatttcaaggaatccacacacaaaactattggaatttaaaaacaaatttagccaagtggtaggatacaagatcaatatgcaaacatcagttcaatttctatacattggcaatagatactatgaaaatgaaattagaaaaacaattcctaaggcatcaaaaataataaaatacacagaaaaaaatttatcaaaagaagtatcacatacactgaaaattgtaaaacatcattgaaagaaattaaagaagacctaaataaatggaaagatatcctgtactgatgggttggaagacttaatattgttaacatggcaataatccccaaattaatatacagattcaatgaaatgcctatcaaaatcccagctgcctttttgcagaagttgacaagctgattctaaaatttatatagaaatgcaagtgactcagaatagccaaagcaatcgttttattttattttttgagtcagagtctcactctgtcacaaagactggagtacagtggtgcaatctcagctcactgcaatctccacctcccaggtgaggcaggagaatggtgtgaacccgggaagcggagttgcagggaaggcgacgaatgccgccaatggcagtccggaagtacgggcatggagcgacaggagcgaagactccgtcacaaaaaaaaaaaaacacaaaacaaaaaaaacacagaactgaacgcgccagagccaagacacggattaaaacacgaaagtgagaaaagaacaaaagaaataaaaaagggcacagaaggacacaagaaaacccgagcaaaaaaggaaggaaaaaacaca

SEQ ID NO: 188573 - DNA, 633 bp, Homo sapiens
gcaaaagacagtaaaggaaacacgcccccaccccatcctaactcacacacaaaaaagcccattcaagtcctcttcccccatttcctggatgagtgtcctgggcaagtaacttaatctctctgagtctatatcatcacctgtaaaaagagagacaactgccctcaccatatatgagtgttacattggaaacaccttgtgaatgtaaaagggtagagaagagtgtaccacttctgttttgatttctctgaatcagtatgtagtagttttctgttgttgcgaaatgaattaccacaaatttagcagcttaaaacaacatccatttaatatcccacgattctataggtcagaagtccaggcagtctcacctggactctgctcagagtctcacaaggccaacatcaaagtgtcagccaactgggttcttatctgggggatttgggaaatattctgcttccaattttttacagttgttgacagaatcctgttccttgtggcttcaggtctgacatccacattttgtcactgtcagctgggggttggggttggtctcggcctctccaggctgctcatattccttctcatggggttccctccaccttcaaagccacagaaggaacatcaaatcctcacctt

SEQ ID NO: 188574 - DNA, 386 bp, Homo sapiens
gagtaaaactctgtttgcaggccattattagttctggcaataggtgagggagaaggtcaaagctaatattttaaagaatagtttggaattattgatggttttcaattatctctgctaaatcattttatttagggagtatctgcacagaattaacaaggaaagagagcaaagtcttgtatcactggcccattattgcctgttttcctcatctgtaaaacaggagtagtgtagcctaccttcaccttggtttcgtgcttcaccaggaattttgtgctgtgtgcaatcttgtattaggcattgtcacgacttaatgacctttttgggcagcgttttcctatatagagttatgagtgcatcttttataaactccatttactccttattgg

SEQ ID NO: 188575 - DNA, 708 bp, Homo sapiens
taagacaaggataaattcttccatggctgtaaactactctgtgggcatagagctaaaggttttgaacttactcttagaggactctggtaactgatatgatacaaagaacctaggaagatataaaaagaaccaaaggcattctgttacctcacctgagaacagagagagcaaattttctgaattaacagagtagactcctattgctgcatatttttgtatatatgagtgtgtgtgcacacgggaggacacacctgtgtgagtggggggggcagtgtgtgtatatggggcagaagtcagggcataaggattgaggaacacatggagaatgtatctgagttgatagagttaataacagactctacacaattacaggaaacacttgcacactgaaaataatcacaaaaaatatagaaaatttggccgggcgcagtggctcacgcctgtaatcccagcactttgggaggccaaggcaggtggatcacgaggtcaggagatcaagaccatcctggctaacatagggaaaccccgtctctactaaaaaatacaaaaaattagccgggtgtggtggcaggtgcctatagtcccagccactcgggagtctgaggcaggagaatggcgtgaacacaggaggtgaagcttgcagtgagctgagattgcgccactgcactccagcctgggcgacagagcaagactctgtctcaaaaaaaa

SEQ ID NO: 188576 - DNA, 345 bp, Homo sapiens
agagcgaagaaactccacctcaaataataataataataataatgtgatgcaatgcaaaatgcagtattacaacttttattgtgatttttataaaatcctaaatatctttgatttatgttttcgttgagtatgtcttcctttctgtttgatacaatctaaaaattttagagctatgaacaccagaggaaataatgcccttcttttacagtaaaggaaactgaaggccatagagagtaggcacctttcctagggtcatacaaatacatcagtcagaactggattgtagctcctgactcagtctaaggctgtgaactttacctggaaatagggaggtgtatagacacg

SEQ ID NO: 188577 - DNA, 1321 bp, Homo sapiens
cgtcattttgaattccacagggctacacacttattagcattacattttaaattatcagctgattttaaaacatcacttttagtatctaaacagaacatacaatctgcagttcataaaagagactgttcataaaactccaggttggcacggccaatgcgtaaatctcaaatacgctcacaaggcatttcagccacataactggaattgtatttctataaaaacagttggagtaatcactttctgtcatgatttagaacaaatggggagagtgaagctgttcaaaatctccctcaatgtcttcccctttcttttaaaagtcctttaggaggagtctaaagctctcactaaatgaaaaatacattcccaggaggaggagatggtttccatcccttcacatctggattcagagcatgaggatattggatggaacaattacacggtgatgatactaaaggggaataattattttacaattacctgagagcatcacatttgctgctctaattagtttttgtttcccacataggtttttcccaggaatgtgcagctccatttctcttaagtttagcaagagctgtttcttaaggaaaaataaaaatacattttctgcactgctacacaagtagcacaccactgatactggcttcattatattactcggcacctccttggtggaggaaacaaacaggatgcatgagaacttgtaggtgctaatgaactggaaatcattagtagtttccaaaccctcccttctgtggttctgtaaaacaaacattacactgacaaacatctaactctttgtgatggcctaatccgaaaacaaaaagcgaaaatgtgaccctcccgtgaagaaacaaaatctcccaaacggtaatactctaaagtggaaataatgacctattaagtttgggtaaagtgcagcattgaacataagcaacattgatgacttattaattttgctccttgactcatgttgaaaatataacattttccatttaaatgcaaattagatacggaatgcttatagtactgcttaacatttatgagagtttgttttcatttttgtcggtttttacaaaaaattcaacaatgacatcatattcccattataatctacatataagtctcaacaatgatcgctaccctgattttttgcccaagagctgggtcatattgggcgctggctgtattacactcagctgtatcagatcattttgcatgccaaacgtaacctgtctttttatgctaagtaaacgagtgtttaacctttaataaaagtaaggaaggggtaaagagaaatgaagtttggggatttatgtaa

SEQ ID NO: 188578 - DNA, 380 bp, Homo sapiens
caatgtactctacaaagcttttaaaacataatttttggtatttagatattccttgagagagtcgttttgtgagtatttatttactggattataaaaagtagtagcccaaaaggcttggttatgaatcaagcaagcaagtaagcaaagcaattagaaaattgcacaggcaatttaggcagtattaaattaaataataaagaagtgactcagactacgaaaacatatctacttaaaatatacaaatgctgttaaaaaaaaatacaaatgctggaaaaacataagcattccaaaaagtagctagtgcttttgtctaattctcagttgcccccacaaaaagataccttaaaaactcactgttattttaaattaaattcttctct

SEQ ID NO: 188579 - DNA, 522 bp, Homo sapiens
ttactgagcagacactattcatcaggcaattttagccattctgtttttaatgagggaaatagtaacatctccattatatagaagggactgaagctcacaaaggttttgatatttcccaggtcacacagctaataagaagtagagagaggaggattgggagggcaggcctctctgacctcaaatccatccacagtcttcttttcagtacactagcattgccctgccagggctgagacaagatatgccaaaggaagcaatacagtcacctatgaacagaggccctatctcagaggagctcctttgctccagacaacccagtgttactctgtctgtctagaaacaaaagaacccctttttgccgccatcaagggatataaaagcattccactttctcaaaatttgttgaaatggagttggtgacatctggtattaattatataagcaaatctaaatggtagacacattgggtatcgctttttaaaaatctttctcacagatacatacataccataccacccaccg

SEQ ID NO: 188580 - DNA, 170 bp, Homo sapiens
ctttgaccctgttggcccactgatggtttaactggctaatgggggcatcttggagaaaaagctaattcccataactatggggatgtgaaatggcttttctggcctttttgggaaagtagctatcagattcaataaaaagggctgccttccatcctgcttagcccggcctt

SEQ ID NO: 188581 - DNA, 513 bp, Homo sapiens
cctgttctgtatgtgtctaatttacttctctctttctggatcagctctctctccacctgcctactggtagaatatggtcaccagtacacagctattatagggctagccatatctagagactcatcaccgttctctctccctgtcttcatttcttccttctctcccaattcaaaattcctgggagaagaaactctagttagggcagtaaggttatctgcaaatttgcctatctcattcttactttccacaatgtgagaaagtaagggtattctagtaaagtggaaaaccattctcaactgctaataatacaagagaattggcctaacataggactgtctttagaaattttcagccaagcattagttgagataattgtaaatgaactcccaaaatatctaccaacacaaactcaatatttattactatttttgccactcttattttatgtatacttttcttcctttcttcttatccaagtgttgaaagcaaatcctatatattatgctatcattc

SEQ ID NO: 188582 - DNA, 352 bp, Homo sapiens
ggttcttctccatatctaggcttctctggggactaggcagaagtggctataggctctgcagtcagacagctcaggagcatggaaacctctcgagctccatggcgcactcacattgggtttctcatcagactgaaatgcaagtggacagatgacaacaaatatgagaataaatcaaaggcaagttcctcctccttactgtggaaacttgttctctgaaacagggaagggcaggaggcagggggtgaaaaaagtggactttccttagaaggtgggacacctgttgaataaagcactcaagcaccgccctcctcatttaagttgtcaaagaaggaaactaaaagccatgtgcatc

SEQ ID NO: 188583 - DNA, 652 bp, Homo sapiens
ttttaattcaagagctaatgataatgataactggagagattgaactttatataaattatttatgagtctaatcgaggaataattgacagtgaatgaaaaaagtaagaaaaagcactgccattcttttctactgaaaattatgttaattttcagtagaaatctgtatgcaccatccatattgtgaaactaaaattcattaaacaatatttacgtaagaacaactgtcataacttattttaatagttaaagaaaatgagactgtttaagtgatgtggaaaaagttatagttttagaatttcaacacattttacaggttaatcatatttagacttcaacctttcaagtgtctattgcatgtctattttatgccttgaaccatgaccaatcttatcctaagggaacttcaagagtaagtttcaaatttgttttgaatcctcactggcttagactgagcagaagtcttttaaaaatgcatattcctggaatccacacacagagatttctaatgtgtaggcctagaatacttccaaggaattggtaatatgaaccccatggggttgttgtctatactgaaatttgagaatcactgagctgaaaaataaatagtctttactttttcttgttatttatcatttaattcaaatattgcata

SEQ ID NO: 188584 - DNA, 1215 bp, Homo sapiens
gggggagcggggggctcgtctgttccaggagccctgaaccaaagagcagcggagtttgagaagccagcagctcggggttcggcagcagcggtcccatcggctgaagttcggggggggtggggcgccgagcgcgcggggtggggggggtcctggtctttggcttctcgactcggtcctgtttcgacagcgaacatgtcgcggcctgtcagaaataggaaggttgttgattactcacagtttcaggaatctgatgatgcagatgaagattatggaagagattcgggccctcccactaagaaaattcgatcatctccccgagaagctaaaaataagaggcgatctggaaagaattcacaggaagatagtgaggactcagaagacaaagatgtgaagaccaagaaggatgattctcactcagcagaggatagtgaagatgaaaaagaagatcataaaaatgtgcgccaacaacggcaggcggcatctaaagcagcttctaaacagagagagatgctcatggaagatgtgggcagtgaggaagaacaagaagaggaggatgaggcaccattccaggagaaagattccggcagcgatgaagatttcctaatggaagatgatgacgatagtgactatggcagttcgaaaaagaaaaacaaaaagatggttaagaagtccaaacctgaaagaaaagaaaagaaaatgcccaaacccagactaaaggctacagtgacgccaagtccagtgaaaggcaaagggaaagtgggtcgccccacagcttcaaaggcatcaaaggaaaagactccttctcccaaagaagaagatgaggaaccggaaagcccgccagaaaagaaaacatctacaagccccccacccgagaaatctggggatgaagggtctgaagatgaagccccttctggggaggattaaaagtgatgatggtctggggagagattttattaaaaacaaaaaagaaaacaagagggaggaaaaaaaagaacctacttaagatagaacatggtttgggctatggcttgactcatgggctttcagtgcttttttccatttgttgaaagtaacatttctctctctctctctttttttttttttttttttaaagcaaaccattgtatgtgtaagtgtttaagttacctttttgtctattggtctctttgccagccctcccctttcccaatgaaagccatgtcaaattaatcactg

SEQ ID NO: 188585 - DNA, 535 bp, Homo sapiens
gtatgtgaagttgttttgtgtactttggttgtttggtcataattgtagtttgtgaccttggttactttggcattttctaggatgctaaatgttacaaccagtcccttaaattgggtagatactccgtgttaaaagagatgactgtattggttcctgttaatatttttaaaggttcagagattctcacgattgcccaccatttgtaatggttgcaccctttatttaatgatgtctgtgttcaaacactgaatgaacaatttgcttaagtaacagtcacattaggcattgtgattgagatttgtattttgccctggtggaggaggttgtagacctcttttcacagaaaaaaacatgttaataataaaatttaggtgtttcacaggttattcagattagttaattctatgtatttttgttttgtgtttggttttcttgtttcacttattcataattggaccaaaaaggccctgtcagttcagttttgtttccctggtctcaaccagtactacttggaagtgatggaactaccaaaagt

SEQ ID NO: 188586 - DNA, 273 bp, Homo sapiens
cttccagtgtattcctgcactgacaccttcacatactgctctttcttccttgaggtcttatcttgtaagactcgtcataaatgacctttttcccagagatgccctccctaatcccaatgcatcagtaggagatcttccttgacactctctcaaattacctttctcttgccttcataaagtgctcgtttttgatgtataaaaaggtatgccagcatccatctgcacttctctggtcaagtgggcagaacaaattacattggagcagaagtttca

SEQ ID NO: 188587 - DNA, 281 bp, Homo sapiens
tggtattacaggcatgcgccaccatgcctggctaattttgtatttttagtagagacggggtttctccacgttggtcaggctggtctcgaactcccaacctcaggtgatccacctgcctctgctcccaaagtgctgggattacaggcatgagccactgcaccaggcctaaatatctcttaagtctgcccacctctccccatctctcacctagacgactccaaaacattcaaacatggtctgcctgcatcactgggacggagccagtgacactgtagtagcag

SEQ ID NO: 188588 - DNA, 393 bp, Homo sapiens
cgttggacttcatttctttattatagtatttatggcagcatatttcatattagaattgttcacacttgggtgtgactcccccattatattttgaatctctggagagcaggatctaatttcagctggaatgagatgaggctggggaatgctggaaattgtacagactgtgtaatgggatattcacaggttagaatcccaagtctgacacttgggaattgtgagcttaagaaagttattcaatgtctccaagtcctaaggtgctcatttgttaaattgggtaactgtgcccattttgtggaatacatctttattaataactgctctggactgtatgctttggcaactaccaagaaaataaaccattttaaagccagcatatagtagatgctcaat

SEQ ID NO: 188589 - DNA, 173 bp, Homo sapiens
ttttgaaagttggtagcattgacatatcctggaattgtgaccatttaaattctcagataacacaccatgtgataatctttttatagggttatgtcaagaatcttttgtatataccacctcttccccacagtgatgaagaaacaaaggaatgcatgttagttgcaaaaagtctg

SEQ ID NO: 188590 - DNA, 342 bp, Homo sapiens
ctactgctactacagaggcgccaggaggtttcgtggagttagggtaccagtcggtgataccatgcatggggtctggaaatggaaaatacatgaaatacccctcagaaaacctctgagacttgtcttaaaataattactcctgttccaccaaggctctgaaaaactggcttcatctagagtgcggagaaacaaacaacaggaataactcttctaccacaggccagtgtttcttagagtagatgagggcttgccaacactacttggccagcaccctaagatagtggtttagacatgaccctgaattcaaagagaaaaatgactattcagtgtacaccctgccct

SEQ ID NO: 188591 - DNA, 422 bp, Homo sapiens
tccgccttgctcctctcttcactggggtttatatgccctctgagccctcggctcccggggtctaactgcctagaatgtcagcagtaggcctgtaaaaagtgcttcttcccacatactgtaacactgggcttcagtgtgggggaccctggggctcagaccaggaaactacatgcccgatttgcaacaacttggctgcgacttttatgacgttttggggagtccagaaaagcagagctgtggaaagaggtttcattcaagctccagacttgggtggcccttcatccccactgaagtggctatggtaaattgtcttccgttgcaacacgaatggaaaagtaatttggggttgggccaatacaaaaacagttgaaagaggcaaaatattggattaaagccatactatggaatggggagagaggagg

SEQ ID NO: 188592 - DNA, 598 bp, Homo sapiens
ttgtcttagtaagtttaagagtctgagtgaaataactcagtgagttaggaaagtggtgataatgtaggtcccatcggcattcctgacccccttttgcctttttgttctatttactgggtatccataggaccttaaaaccaagagcaaacaattgaatgagatgaatttgttttaatctgcatgactagattacagccacaaacccaataaatacgcagaaggtggctgtgggcagatgcagggcatggagggccatcgggctggcaaggctctgtggtcaaagggaacatgctgaccttggcgatggcagaagagcaaagtgaccagggacgtgtatggagccatgtgagagctgatttcttcacttgcccaatggaggtgataacaaggattcctgtttcataaagatgatcgtgaaaacaaaatgtgatagtgcacgagaaagtgtttggaaaagatatgaagatgttatttgcaagaagcccttggagcagaggtcctgcttatctaccatttaaatgaatatagggtatgtttgccatttcaactctactgtgtgagcactaagggatcctcttgctggtgatcattttcaaag

SEQ ID NO: 188593 - DNA, 397 bp, Homo sapiens
aaaaggtgattgcctgtttcctttactggaaagcaatgttatacttttcatataaaaaaaagccctttcctttgattttgtaaaaaaaaacaagacttttttttattggagcagggcccaggaactttttttgagattatattcagggatgataatttttttagcccaaaaaaaaaaaaaaaaaaaaaaaaaaaggtgaatttgaacatctggctcttgctcatggatatattacaaaagcaaagtaatcacactgtgctcctggagcgcagcaataacattgttgattcagaagtcagacagtaagaaaattttagagtgcccacatatgtatacacaaatacatgctaatgcgaattagaactgcctgtaacgaggtttcatgatagccctattt

SEQ ID NO: 188594 - DNA, 643 bp, Homo sapiens
tactcatcctactatagtcattcctcctatctagctgtaacgtattcctgacttattcctcctatgtagctgtaattttgtatcctttaacaaatctctccctatgccccccttccatacccattttatactcagtcaccacatacacacataatacccacaaacttctttaagaatagaatgatacattccttttttgtttttttaagatggagtttcactcttgtcacccaggctggaatgcaacggtgtgatcttggctcactgcaacctccgcctccccagttcaagtgattctcctccctcagcctcctgagtaactgggattacaggcatgtgccaccatgcccggctgattttttgtatttttagtagagacggggttttgccatgttagccaggctggtctcaaactcctgaccttaggcgatctgcccaccttggccttctaaagtgctgggattacaggcttgacccatcgtgcccagccagaatgatacattcttaacatgaaggacaatgtttattggaaacctgcagtcaataccctgtttaacagtaaaattgggaacaagacaagatgtccattattttttaaacttaatttggaagccttagttgtagcagttagataagaaaatga

SEQ ID NO: 188595 - DNA, 222 bp, Homo sapiens
cactgcaaacagggataagtgggctcgtgctccttagtgggactcattgataaggaggcacttagtagagtgataatatcttcaccctctataccatctaataagtcaaacaggtagcttgggatcggtgcagtagcatttgggtatatgttctggcctggctttactaaacaatttgcaaggcaaagctaaaaccaaaacatatggtggccactccaaaag

SEQ ID NO: 188596 - DNA, 330 bp, Homo sapiens
ttcccaccaccatatgcacaaacacaggcacacaagtgcagatagaagatgagctgtttggacttgcgagggcatgtgtgcttggtgtgtggcacattgaatggcctcttgctatatatagtgctcagaggggatgatccagatgtctggcatggggagactggtactgagatttctgctcttgttctgttagtgagagtggattagcagcttccctctgtttctgctaggtactgccactggcatcactgccaaaatgccacctcagatcgttggcagcaaactggagctggagtgaaaataacctcacgtagtcactcagccaaggga

SEQ ID NO: 188597 - DNA, 685 bp, Homo sapiens
atttaaagaaattttttcttcaagttttcccactgtatataataaaccctagaaaaaaataaaatacattctagcaaaaatatttgttcaaataagcactttcatcttagaatacctatttctatggtgagcaaagacattaagtttttgaaatctgggcttaacttccataaatagtctgcatttcctccctacttttctctgtaaactgagatttaaagcatttaaaagcagtacttttggctgagcatggtggctcatgcctgcaatcgcagcacttgaggagactgaggcaggaggattgcttgagactaggagttccatgccagcctagccaacatagcaagacccccatctctaaatacatgcatacatacatacctacatacataaaagcagtatttttttttttaactggcaggagtcttgatatggtttggctctgtgtccccacccaaatcttatcttatagttcccataattcctatgggttgtggaagggacccagctgggagataactgaatcatgggggtaggtcttttccatgctattctcatgatagtgaataagtctcataagatctgatggttttaaaaacaggagtttccctgcacaggctttctgtctttgccctctgccatccatgtaagacatgactagctcctccttgccttccaccatgat

SEQ ID NO: 188598 - DNA, 373 bp, Homo sapiens
cattcttctataaatcctttaaaaaaatactctatttcctttgagtttaatgtgttgctattcttctaactacctgattttcagcatgtcttcttttctaatatacgtattttaagctataaatttccctctaaacatgacttcagctgtaccccattttatatatacatatttgctattgttcaactcaaaatatttaagctttctgtgactcataaattacttagaaatagacatctaaaatttccaaatacattgagattttctttttattgatcctggcttaattctgttgtcagaacatactctataatttcaactcttttgaaagctgttgagacttgtgttatggccagcatatagtgaatttcga

SEQ ID NO: 188599 - DNA, 171 bp, Homo sapiens
ttgaataacaacagaatcagagcctctggattttcctttctcatccatctgaatttctttccttttttgggggtggaggtgtgttcaattgaaacttttgatgtggtgataggattcccaatttttctgcaggagagttgggagtttattcctgagttttctcagttcatt

SEQ ID NO: 188600 - DNA, 469 bp, Homo sapiens
tacagtaactatgtaaggtaagattgctcatgagtgcctaccctgttgaagatgctttggcagctgctgagtgtgagagggtagcaggatgaataggaccctcctgcctgtcctaaagaaggctgcaactgcagcacacaatgtgcgtggagacaactgcctgtaatgccagatactgcagggccttagagagtaaacacaggccttggagtcagacagacctgtagcatggggaggagcctgtcttcccagtggctggtggtgaatttgatgaggtagcatgtgtagagtgcctagtgcagtgccggcatatgagaggctcccaataaatgcagctgatgttgtcatggtccagcagcatatgggaagaggaaggaattattaacttgaccagggagaagaagaaggaaagcactacagagcaggtagtgttggagcttggagccaggccctgggaggatttccctag

SEQ ID NO: 188601 - DNA, 255 bp, Homo sapiens
acaacaaccccctgtggcacaatttaccttctaacaaacctgcagatgtacccgaacctaaaataaaagtttataaagaaaagaaggccaatgagtttgaagttaaaggtgttgactttagtaactataaagaagtctcttataagaaacttattttagttttagaaggtaatcatttagaaggtaattattgttcctgttatctaatatctatattaggagatgaagcagtaacgtcccaacttgaaatgaaca

SEQ ID NO: 188602 - DNA, 430 bp, Homo sapiens
acaaaaggccatcttgggagcagcccacccctatcttgggagtggcccgccacatcttgggagctctaagaacaaagaccatcctataacatctggtggcccgtatgggtattcttcaaagtggtgagtaatattggacccctttcacttgctattctgtcccatccttccttagaattggaggaaaatactgggcacctgttggctggttaaaaagattagcgtggctgctggacttaagactcaggtgtgaggctgtctggggaagggctttctaacaacccccaacccttctgggttgcgagcattggtctgcccagaaccagcttccactttcaattttcctggggaagctgagggccaactagaggcagaaagctggcatcctgaactcctggcattagctggttgagatcatggcacagtcaga

SEQ ID NO: 188603 - DNA, 515 bp, Homo sapiens
gcctaacctaccgaacatcatagcttagcatagcctaccttcaactgctcagagcactaacattagtctgcagctgggaaaatcaactaacacaaagcctattataatcaagtgttgaagatctcatgtaactgaatgagtactatactgaaagtgaaaaacagaatgggggtaggagtacctgaagtacggtttctactaaatgtacattgttttcgcaccatcggaaagtcaaaaaatcattaagtcaaaccatcctgagttggggcctgcctgcatatagagatagagtctagttgggggggagaaaaaaagaactagattctaggccaggcacggtggctcacacctgtaatcccagcactttgggaggtcaaggcagatggatcacctgaggtcatgagtttgagaccagcctggccaacagggtgaaaccatctctactaaaaatacaaagttagccaggtgtggtggcacatgctacttgggaggctgaagcaggagaatctcttgaa

SEQ ID NO: 188604 - DNA, 170 bp, Homo sapiens
tcagcatcactactctgtgctttggggccataatgaagtagaataaggttgacttgaacacaagcattgagaaacatgacagtcgatctgataaccaagccagctactgagtaacaggtgagtggccgtaggcagtgtggatacactggacaaaggggtgattcatgtcc

SEQ ID NO: 188605 - DNA, 520 bp, Homo sapiens
tccagactgccttcagactctccagactgccttcagactctcccttcagtattctgtccttgctgagctctgaatcggagcagtaccagtgggatggaaacctgaagccacaggcaaagtcggcccacctggcaggcttgcttctgcgaagccccacacactacagtagttgccgttggcctctgctgcttgaccccagcaacgaggccctcatctggttggacccgctgcctctggaagagaatcgatcttttgcgccagccctcactgagggtagagggaaaggcctcatgagaaatcaaaagagagagagtaaaacggacatgaaagaggaagatgatgagagtgaagagagtaatgaggctgaggaccagacaaaagagcagaaggcagaggaaaggcctcatgagaaatcaaagagagagagtaaaacggacatgaaagaggaagatgatgaggtaagagagtaatgagtctgaagcagtctggaggtccgcgctcgattctatcatgtctactt

SEQ ID NO: 188606 - DNA, 155 bp, Homo sapiens
tcattaaggatttataaattcaaatgtctgaactttattttatgcaaatatttaaaaagcaaatttataaacatacacaatatcaaagaagacgttaaaatatttcagaagaaaatcattattgaataaatccttttgttttaggtgaagctatg

SEQ ID NO: 188607 - DNA, 280 bp, Homo sapiens
ttggacatccctgttctgccgtcctgatacctctagttgtgggttttatgtgtagcacagggtgaagctttagttctcagaacccacccctgctgtaccctgtgccctcgccctccgctgtgtttgccctgaccctcctgtaccctgcgtcctcgccctctgctgtgctcacccgaccctgctgtaccctgcgccctcgtcctctgccgtttgcccctgaccctgctgtaccatgccctcgccctctgctgtgttcaccctgaccctgctgtaccctgcg

SEQ ID NO: 188608 - DNA, 358 bp, Homo sapiens
ctaaactatactgtctccctccaatgcagtgtttctcacccattttcttcattattgtcctcctaagtagccttttcagacattcttttcctcatcacgctccctgtgaaattttaataccagatacactgcacacttgtttgtgctgcatgtacatctgtactttatatgtaaaaagaataagatttttttttcacacatgcatccctcaagagttaatttctgcccccttgagggtaacaccacacccactgagaacataaactctggggcaatgttcctcgctgtgggcaccgttgacacttaaagccagacaatcctttggtgtggggcgctgtcatgtgcattataggaggtt

SEQ ID NO: 188609 - DNA, 300 bp, Homo sapiens
agtggcatggcagcctgtactttcggggagtgagattagatttagtccctgcactctgcttctctgtgctgcagggagatgtactggctgcttctgaggaggaaaaggctccaatccaaagccctaaaggagtagaggctgccaaggagctgtacacacacttgtgtgatgtggtggacaaggtggatggagactctgtgcccatggagatactaaaacaagaagtcaggaatacccttctcaatggggctgccatcttctttcctaatcgacagacccgacggaaccatctcttcacca

SEQ ID NO: 188610 - DNA, 496 bp, Homo sapiens
ccattgcactccagcgtgggcaatagagcaagactctgtctcataaataaataaataaataaataaataaaataaaaaatagccaggcatggtgttgcatgcctgtggtcccagctacccaggagactgaggtgggaagattgcttgagccttgacctaggctgtggtgagctgagatcctgccactgtactctagcctgggcaacagagcaagaccctgtctcgaaaaagataatctgaaacaaaaagacaattgatgcctctgcttgtaaaaatatgcacaaataccacagacccatggagaaattgtctccgaacacctttccaatcctccgttttttttttttccttataaattggagtgagcaatatagcaatatcttctttattgagtagttgaacagagtaaaggtactaagatttggcaagttcttggagcagagcatagtaagtgctacataaatgtttgctattattactcctgaagtgtcaacgt

SEQ ID NO: 188611 - DNA, 532 bp, Homo sapiens
cccaggaggcagagattgcagtgagccgagatcacaccactgcactccagcctggtgacagagcgagactctgtctaaaaaacaacaacaaaaaaaaaacccacaaagactggtgttatatattgagccatcatgtcatttaagttttttaattttgaaagaactgagctttggaaaacttacaagaataactcaaagagctcccttctattcttcacccaaattctaactgtttagcattttcccacattttattgtgtgtgtgtgtgtgtgtgcgtgtgtgttctgacccatttgagagtacatttgcctatgtcataccccttgaatactttggtatgtatctcctaagacaaggaggtgtgtacctagccacagtaatccaaatcaggacacgcaactttgatacaatcctgttatccagtctatagccgatattgcagattcactcaccgtcccaattctgtccttcatgcccatttcttgcagaccaggacctaaactcttaccacgcatggggtttagttgttag

SEQ ID NO: 188612 - DNA, 263 bp, Homo sapiens
cctatacctagacagtctccgcccactcatccagcactgcaaagcccagacattccttctttagggaagcttgttctgattcccaagaccagatcacttcctgttgggaaactcttttatagcaccccatactttacgctccaaacatctaaaatgatttgtaattagatatttttgtttgtgatggttttatttaactccatccattaggataaaatggtgactgtatcttctgtgcttggctcataatgggtatacataat

SEQ ID NO: 188613 - DNA, 513 bp, Homo sapiens
aatccgtaccatagctctggtaggaaagagaaagaaactacagttagctttgtatgtgctaggcctgtgtgagcctctctccatgtgttatcttatttgatccttaccacaaccctctgaagcacagctgggattctcaaacttgggtgagcagcagaatcacctggaggacttgttaaaacaaatttctgggccccgccccccagagtttctggttaggaggtaggcctgggatgggctgagaatttgcatttggcttaggtgatgctaatgctgctggcccagggaccacactttgagaaccactggtgtagatgccatgattctcatcttgtagctaaggaaccaaggctcagagaggtcattactttcctaaggcgcaccagacagaaagtggcctagcagatatttccatggaggtcgcctggttctggggtctgtaaagtttccgcttcttcctcctggttttctgcctcatcctctgttccactatgcctgtctttaggaactaat

SEQ ID NO: 188614 - DNA, 353 bp, Homo sapiens
aattctcctgacaggaattggaattttgcacacatcccaagaatgaactgactcttaatgtgctgtgtgtgtgtgaaggatggagtattaaaaagcatcaggaagggtcactaagctagggaagagtgcctgctgattctccagcatgacaacaaagggtctgggggctatattttcctcctgctcatggtcattataatattagtgatagtcaataatatttactgagttctggcctctgtgacagtcactgtgctgggtgcttttcatccatgatctcgtttaaggagagagagagagagaatgtgtgtgtgtgtgtgtgtgtgtgtgtgtgtgtgtgtgtgtgtgtgtgt

SEQ ID NO: 188615 - DNA, 291 bp, Homo sapiens
tgggggattgcagcgagtgacatgtgtgatgctctggaggtgggaagaaacaagtagagtgatgagaacaacacattgatttcctggcatgaagagaaatatggagaattctcttcatgaaatgtggaaagcagatttagcaaatagcttgaaggctgggcagagatactggatgtgatagaataaaaaaaacaaaggtagagttatgttctgtgtcaaagacacgaacggcatgttaagaaaaaagtctttgtaaggtgttgctgctgcagtggattgcaatcccctcga

SEQ ID NO: 188616 - DNA, 387 bp, Homo sapiens
tgtttagggtcctgcgtaccacaccacactgggctaatttttatatttttggtaaagatggggtagcttcagcatgttggccaggctggtcttgaattcctgagttcatgcgatccacccacctcacaaagtgctgacataacaggcatgacccagtgcacctggcttttctgaacttttttagcttatattaggtttgtctgttctagaattttgtatacatttatttatattataggacactttttagcttagctttccccactcggggttagaaagattatattgatccatgatcatgatgtcgattcatagagttgattattcccatttattgataaatattactccataatatgcatataatttatcaatttcctctcaata

SEQ ID NO: 188617 - DNA, 560 bp, Homo sapiens
tgatgcatgcctgtaatcccagctactccggaagctgagccagaagaatcacttgaaaccaggaggcagaggttgcactgagccaagatctcgccattgcaatccagcctgggaaacagggtgagactccatctcaaaaagaaaagcaacaccaaggaggctaacaaaatctacctgaagaatgccctcaagaagattcataaaacaccaggataccttagtgttgggtaaaaatggaatcaagaccgctcaactcagtcatacagcagattgattcagacccaaatgcctctcctacaaagaaatatctcccacctactaaacgagtctaggacacaataagaaactaatctaaaaggaatactaagaaataaatatttagcaaaatttaagtccagccagatgctatagctcatgcctataatcccagcacttttggaggccaaggtggacacatcacttgagctcaggagttcaagatgagcctgggcaacatgacaaaacctaatctctactaaaaacacaaaaattagccagacatggtggcatgtgcctgtagt

SEQ ID NO: 188618 - DNA, 365 bp, Homo sapiens
caccacgcccggctaatttttgtattgttagtggagacggggtttcatcatcttggccaggctggtcttgaactcctgaccttgagatctacctgcctcggcctcccaaagtgctggaattacaggtgttagccaccgtgcccgaccacattcttctttcagttcatatttggatatcctttttttctacagtgagaagaactctggtaacaacataaacgcactcatttgttcagttgtacaatatgtgcataatgaaaattgtaataccaatagtatttccagctacaaacctactaagtttgatttaatatttctttgcaattttttgtgtgcttacatataggccactaagggtgtgcttt

SEQ ID NO: 188619 - DNA, 535 bp, Homo sapiens
gcaggagacattggtggctggttaaatgtggagtgaagggatgagggaggaagaaaattattgaaaggtttcatggtacagggcaatgttctcagaattaggactctgagtgccagagaagcccagaaaaaaacatgggtttgcataaaggtgactcattggtgacaaaacatgatgtagacaggcagatccagattttgtaaggactgtagcttagattaccttgagaatgttgttaagaacagtagtcgcaaagttaatatacaaaattgagtaggaatgtgaatttttttaaagaacagaaaatcacaatatatcaaaaattgtgctgccggggcaacatggcgaaatgctgcctccacaaaaaaaatataaatacaaaaaattagctgggcatggtggcacatcctgtagttccagctactcaggaggctgaggtgggaggattgcttgatccaggaaggtggaggttgcagtgaaccaagattgtacgactgcactccagcctgggtgacagagtgaaatcccatctaaa

SEQ ID NO: 188620 - DNA, 347 bp, Homo sapiens
ctgtgtaagtgtgaccctgcagtagggcagggagaacagttggaggggtctcctccctgcctccccttgggggtatccagagtgcctagggttgaattggaagggaggacacgcaggtagagaggacacagggttagctgtgtattcctgctatgcagacccctgcaactgagctgctgctcaattgtcctttattcatttgagaagcaggattgtgtcattcagtgacagcagaaagattccatctcttgtgccatttcaatcgattggtagtggctgccagccagactcctagggagaaagactgcggggatccattagtgatgtctgctacagcaggagcgtag

SEQ ID NO: 188621 - DNA, 299 bp, Homo sapiens
ccccagcccctcatgcacattaggcagagccaggctgtttccattcactccacaggaagtgaactccccccagcctcctccctccaccttttgtccttgggatacatccccggcccgggcctctctgggtacgggtgtcagcactgggatgaactgtggtttctttctcgttcatcctggcctggaccccaatttctgagaatcatggggtggtgggaagtattccaggaaagttctggctcatgtccttctggaaagacatgtgctttccctaacaaatcactctgtgctacactcac

SEQ ID NO: 188622 - DNA, 238 bp, Homo sapiens
ggtagcagtgagcctagataatgccactgtactccagactgggtaacagagtgagactccatatcaagaaaaaataaatgtgcaaaactggaaggaaatctattactgtaagatttgaccagtatgtacaagatgaaccaaagcaaggtattttgatcataatggtttgactgataactactgagttttttgcacttcaaattattaacagttaagcatgagaaagtacagttataat

SEQ ID NO: 188623 - DNA, 421 bp, Homo sapiens
tcttatcaaacagttaaataaaggttgctgcaatagacttaaatgttaggcttagcttgagatttaatgaagccttggtctgagagaatgaggaatgttaagtgtatggaatctggagtccctcctttactttatattatgatggagctgaagaagtatgttgctagccttctgatataccccgggagtatttagttgataccacatttcagttgttttccaggtttctgaaagagactctggtgagagagatatctttactgaacatttcattctgtttcattattcatttcattcttgttttactggaatcagcccttgttgtaaacaagccacaattctttactctgagtcactggagagatttctgtctcctaagtttcacctggcaaactgatcaaaagtaggcatgactggcaaa

SEQ ID NO: 188624 - DNA, 347 bp, Homo sapiens
ctacatttttattagagatggagtttcaccacgttggccaggttggtcttgaactcctgacctcaaatgatccacctgcctcagtctcccaaagtgctgggattacaggcgtgagccactatgctcaggcagggactaccctcttatatgtggtatccattgactgaaatgttcttatgcggtgcatgactgtattttacttttgtgtttgtatataaaattcaagatatcaatcagatgacatggggaatttttactatctctcatggtgttacgatagtccttcctcattggaagaatgtagattgattaattgttgttagaacctgttgattgtgaccccctaa

SEQ ID NO: 188625 - DNA, 145 bp, Homo sapiens
tatcaacagttatcaacacagagccagtcattttcatctataagccagcatacttctcccccaggccccatctctgatgatttttagatttgctcctttgatctctcagcatctgcttcatagttatttggttaggagtcagcat

SEQ ID NO: 188626 - DNA, 255 bp, Homo sapiens
ctcattacaatgatgtactatataaaacgaacagactttacctgtgattgctacaagcatctgctataagacaagggatctgacaaacagcatacaatcacaaattaccagtgttccacagaatagaaagattaattccaatatggtacaactgacagatggcaaaaagaactgaagacaaaacagaccattagcactcacgtaccacagagactatgcctctcctagttgattttctctctttcataaaatatt

SEQ ID NO: 188627 - DNA, 302 bp, Homo sapiens
aagacatgaaatcatctaaatggtagaccagataaagaaaatgtggtatatatacaccatggaatactacacagccataaaaagagtgagatcatgctctttgcaagaatatggatgaagctggaggccattatccttagcaaagtaacacaggaacagaaaaccagatacagtatgttctcacttataagtgggagctaaatgatgagatcacatggacacatagaggggaacaagttcttttctctccttccttcctcccttccttccctccttccttcactttctcccttccataccta

SEQ ID NO: 188628 - DNA, 430 bp, Homo sapiens
ggatcacgcgttatccgtaccagtgcttcccatactgtgctagcgaggaggaacaacttcatgttgcagctgaagaaactgtggtcttagagattaaatgacttgtcttcattcccacagttcaaaagtggtaaacacaaactcaaacccagcttcctaatgtctagccaagtgtcctcagtcttgaaactaaaactgtttatttctcccttatcctccatctactgccctatttttctccttcgttttactgtcacaattcccacagttgcagttaagttcctagactgttttctacttgccttctccataagcccagccagttgggttcagtgcccaccaagactgaaggtaccagttgcaagggcactaagtgagcagcatctttagcattcaatgctatctaaggttagtctttcccgatatacca

SEQ ID NO: 188629 - DNA, 450 bp, Homo sapiens
atacagtggggaaaggacaccctattcaacaaatggtggtgggataattggcaagtcacatgtagaagaatgaaactggatcctcatctctcaccttatacaaacatcaactcaagatgaatcaaagactgaaatctaagacctgacaccacaaaaattatggatgataacattggaaaaattcttccagacactggcttaggcaaagacttcataaccgagaagccaaaagcaaatgaaacaaaaacaaagataaacagatgagacttaaactaaaaatcttctgcagagtatacaaacaacccacagagtgagacaaaatctccacaaactatgcatcagacaaaggactgatatccagaatctacaaggaacccaaataaatcaggaagacaaaacaacaacaacaacaacaacaacaacaacaaataattccaccacaaagtgtgc

SEQ ID NO: 188630 - DNA, 409 bp, Homo sapiens
ttaaatattctgcccaaagaaaaacaataaaaaattagagcaatcagttttagaattcaggcattctggcttcaaagcttgtgcatttttcaaaatcctacgtatcaagaaaaatgaagtcagtagctaacctgccatctgggcctttgcagtttctatgcctactctcgaagtagcactgaattccgttccccattttcaatgtgtagtccaagggatttggtaccttgataggactaagaaagggaaaatggtcataaattaaccaggtgaatattaaattacagagaataagactattcatccaaactgcatttcctacagatttatccaataatgggcaagtcaagctgcacacatcatgcttgctctcattatctttaacaaagagtttgacagtctttctaaa

SEQ ID NO: 188631 - DNA, 284 bp, Homo sapiens
tgagctcatcctctccttgtctactccttgtcagaggtttggcatttgaggaatttggccttgggcaaggtgctgaagctgactgctttgtggttttaagggaaagcttaaaagattttctcgctatgggtattctctgcaataaaaatccattttaattgtttatgacattaatcaatgaaagatttatctgctttgggagaaatttctctagaacagttgaaagcttctgcctaaaagttgattaagagagatttttcttctttggcctccaacggataccc

SEQ ID NO: 188632 - DNA, 208 bp, Homo sapiens
ccctgatggaccaggacagcgccagcactaagacatgccctgaaactcacaggaagacctgatcaagaagacgggaacagcacagggcactgggagctgcaaacacccacgatactgtcagagatggagaaaggtatgacaggaagagcagatcaagaagacgggaacagcacgaggcactgggagctgcaaacgcctgcgataatgt

SEQ ID NO: 188633 - DNA, 135 bp, Homo sapiens
ccgcacccggccatataacaagcccctttcagccacaccttggtacatgttaatagggtgatttttgagaagtccctagattaccacattctggttggctggttgccataggaaccaaccatgtgctcagaggct

SEQ ID NO: 188634 - DNA, 397 bp, Homo sapiens
ttaacttccacagacaattttgctccccttattcataaagaaatccagccaatgctcatgtaccttttaaagttcttggagtctctaaatataatccttgtaatttataaaaaaaagaagggatacaacttcattaattttctctcctacatacaagtggcttctatgttcaaagatatttcagaatgcttaccatacaagtaaaagtttatctttataatgactaattcacattcattatcaaaaccactaattctcaaaggatcaacaatgtattccacttctctggcctgctttgtattttaactcatcagtatttaccaagcctacactataatattctagaggttagaaataaagtgaggaacacactggataagatcactaccctcctaga

SEQ ID NO: 188635 - DNA, 677 bp, Homo sapiens
cttaaatattgttcactcagtctgccttattttcagtccctacattttattcccctttccagaggtacatggtgttgtcagttcctgaaactttgaagattctgtgctgtaactggagtgtttatccagttttactccttctggcttgaggtttgtctcagatgtactaggtcagttatttctcgtctgttcttttgccaacttccaaacatctgtgttgtgtgcactgctgttagtcccgcttttgtggttttatattatttgatgtaaaaatccctttactgtcaattagtggagttttgggatttaatgaaattgggattaatcctcccttgtgagcagagccaggtgtgaatttcttttaatttccctattgggctttgttgaatttactgattctgaggattggcatctgtcaacagctctggaacattctctgttatctcgagaagtattttatcttctgcattctttctgttttcttcttttggaactcttattagaccttcatctttcattttattctccttgtctcttaatttcttttttatatattctcttttttggtctctttgtactatattctggatactgtcctaagattcatctttcagttagtgaattttgtcttcagctgtgtctgtctatttaatacataaaaggtgcttttattatta

SEQ ID NO: 188636 - DNA, 161 bp, Homo sapiens
taaagaactgttaagccacacagaaatccagaattatcacagaatcaggaatatacacaaatcacagaaaataatattcaaatatattaaatactcctcaataataccagagccctaaacacactgctctgggtcttcaattaaatacttttagttttctg

SEQ ID NO: 188637 - DNA, 190 bp, Homo sapiens
  misc_feature (6)..(6): n is a, c, g, or t
ggtccnaattgaaaagcaagggtaagacccagagagtgactggctcaccagatgctcctgagtccaactgaaacagggaggacggcctcttagaggtggaacaagatggctgggggaatacaccgtgtaggagaaaggacagagtggatggattgatcctttctagaaggagacaggtcacgtcattgtg

SEQ ID NO: 188638 - DNA, 341 bp, Homo sapiens
atgtaagccttcaggcgtaattggagttcttagcaaaatactttggtttttaatatttctatgaccctctaagggggacttagcaattactcttaaattttcaaagtggtgcatggagttttagctgtgtgacttccattaaagtccataggagtcttgttgctaaaacatcacacaactcacgaaaatgtgccccttcttgtgaaattgttagaagtaatgggtatggaagtatagcacagcatttctggtacatttacaagctttctgtacttgtttcaaactttatacctttatgaaaactcaatagttctacaaaaattgaaggggggaaaaagcct

SEQ ID NO: 188639 - DNA, 529 bp, Homo sapiens
gatccttttctcctttgtaatgggaaagatgaagatggtgtaaatgcaagtttatttgctggtggcatgattatgggtggggaggtgccatttgatagtttctattttctcattagttaggcagcagtgtcatcacctaacagtttagcaacagtgtagtatggattgatgtgaagtgaatcatttgaaaaaatgtgaagtaattatcggtatagtgttgctgtcattgctggataatagaaagtgttcccttgaaattgattattattactttagagtgatattactcttcccaattatgctattttctaagaatgccatacaaatgcaggcctgcaaaaacatatagaagcattaaggggaaagtgcattagataatgattactaatgtcaaggaatacatcttggaccatggaatttaaactagacagggaggcaagtgaggacaggagaggaatgatggatggtgggtcaaagagctggtggcttcattgacatttaataattggttcagcagggttacttgatc

SEQ ID NO: 188640 - DNA, 447 bp, Homo sapiens
tccctccagaaggtatgggtttgatacagtttctataaggacagaaaggctgggcacgctggatacacacactgtgtgcattcctctaagaactcagaggacagctggataaatgggtttgagagccaaacggacctgtgtgtaaatcttggctctgcaatttcctgcctatgttaccttacacaagtcatgccatctaaggttctcctttcctggtctacaaggtgggataatgatatctccttctcatggggctgttgtgaacattaaatgagatggcatgttaaatatataggactgtgccagggatgtaccaggcactcagtaaatgttagtttccccttttcttaaaacaaatcagcaacaacaaaccctctgaaggccaatggcatacacaccatgcttgcttcctacagtgcctaaggtcaggaccccttttcccaggag

SEQ ID NO: 188641 - DNA, 481 bp, Homo sapiens
ttcaggctctacttctaattctggttctctagctacatctccctcatctgcagtgacctctccacggaagtcttgaactcctcaaaagcaaattattgaaaaagatgaaggtcctttttatacccatctaggagcaggtcctaatgtggcagctattagagaaatcatggaagaaaggtttggacagaagggtaaagctattaggattgaaagagtcatctatactggtaaagaaggcaaaagttctcagggatgtcctattgctaagtgggtaagtgtgacttgataaagcctttggtcttaaatcttgggcattttgatttgtaaatctgaccctgagaattgggttacccagatcaaagactcatgccagttaaaaagaacattacctgtattttttatcatgtgttatctcttaagaagaggcagattagttctaaaatcaacaaattgtatttaattgaaataatttagtgatgag

SEQ ID NO: 188642 - DNA, 339 bp, Homo sapiens
gacaaccttatatcatcccacaagtcactgagatttctgttcaatttttttctatgatttttggattgggtaatttctactaatttatatttcagtttactggttctttctactgccgtacctaatgttatgttgagaccatgtagccaataaaaattctttcacctattttgcttttcagtttagagtttccatttttgtagtttccatttctctgtaaagatttcctgtctggggctgggtgtggtggctcatgcctgtaattccagcactttgggaagttggggagggggagcatgggatcacttgagcctaggagttcgagaccagcctgggcaa

SEQ ID NO: 188643 - DNA, 440 bp, Homo sapiens
cctcccaaagttctaggattttaagtgtgagccactgtgcccagcctacattcttattgtatcacaatatcacagtgggacagaaggaatcgttatgatatattattaattgataacaaattgatataattgatatgatgtttatgattaaaagggtcagaacccttttagtagtaagtcctgtggacacacctggttgctaggaaggttgggacatagagtgtttattctcattggccacagacttactattaccaaggaagaaagggaaaatgggtattgggggacaactggcaattcctgtcacaattgtctgcaaagatagcaaataatctgcctatggattaactaacaatggcagcctccaaagctgtgttgagaagaattctgaaattttacagtgagaagacgatgtgatagattgcttatgtctaaaatgt

SEQ ID NO: 188644 - DNA, 365 bp, Homo sapiens
gaaaagaaaaaatttagccagacatagtgacatgcacctgtattcctagctttggaggctcaggggagaggattgcttgagcccaggagtttgaagttgtaatgagctatcatcacaccactgctcttcagcctggtaaaagactctgtctctttaaaaaaaattatattttgaataagtaatatgtggttcaaaattaagtcttatactcaccatgatcctgtctaccaccccccactgccaagttagtaatcgactactttttttttagtctgtgtgtgtccctctctagtgttttttatgtaggtagatgaaagcaaatgttttcatccttttctggtacaatgtggcaaactatataacct

SEQ ID NO: 188645 - DNA, 359 bp, Homo sapiens
tgtgcggagataaatatgtgggagtatgcaatgtgagatgaacagggtgggggctggaatcctgttaacaactgatacatttaagaaaaagcagggatgaaggatcagagaaatccaatatgtaagataaaggctaaaaagtgttcagcaatgacttctggcttctcctagactaggttgaaatttaagctctaccatttacaagcttggtgtccctgggcaagttacttgtttgtgcctaaatttcctcatggataggatcgttgtgagcatgaaataagttaatacctgaaaagctctcagaatagtgctggcacggagtaagtgcctgcatgtgttagtagttgctacatccaaca

SEQ ID NO: 188646 - DNA, 621 bp, Homo sapiens
ttcaagcaattcctttgcctcagcctcccaagtagctgggactacaggtgcgcatcaccatgcctggctgattttttgtattttggtagagacggggtttcaccatgttggccaggatggtctcgatttctcgtgatccacccaccttggcctcccgaagtgctgggattacaggcgtgagccaccgcgcctggccaactttgatctttttaaacaaaattcacattacattgtgaatgggatccttgtcattaggtcttaatcttaaatttaggctaagacttttaaaactagcttttgataaatgaatgagcattaagttcttgtttgcaaacacccatttggccatgcggaatcaagaaagttgttacttcttcgaaagatgatttttcagtaatctctaagtcatcgtgtatttgtgatcatatatttcttaggtatagaaaattagacccttatactgaaataaagtataaagatttagcttgatatgctactgaatctaatttgagagacctggggaaggggataataatggtcttgtgtccttgtacacttttgtctaaaagaaggctttgatgactttttagagtaagttttaaagtcattctatatggcttg

SEQ ID NO: 188647 - DNA, 114 bp, Homo sapiens
taaacacccttcctccctaaagttccacatcctggaaatctgtcctccagcctactacaacaaatgtgcaaagacatgtcaacagggatgttaactgcggcactcggtcatagc

SEQ ID NO: 188648 - DNA, 543 bp, Homo sapiens
atgcctagttttcctctgcactgggctcctgctctatgatcggccatgtggaaggagatgatgttcagaccaggagcttgtgggaagtctgccagtgctgcaggtagggcccagagcccccagggcttcgtcagcccacaggcacaaaggtgggcctcctccctctctgtagaggagtatcccacttgtcccgccagtcaagccctggcagaacagtagcttcccaatcttgctgtgctgggtgttctccgaggaacatagggaggcagattcagagagccagacttgcctttgccctcatctccaaagggagtcctggtatgaggtttcattctttaaaaaaaaagatatatatttttttttttcagcaaaatcgacagttctgggtgagcgtgaaggagggaatcagttgcctcccttatctggcaggtgcttgctgtgcccactgaatcagagatccagtgaggaaggggaactcagcccctgggatgggggtatagacacatgttagaatgcatagcacatgcacagaagggaggcaca

SEQ ID NO: 188649 - DNA, 374 bp, Homo sapiens
agatagatgaaatctaaattacctaatttcacatttctctatcagaaaattcagcaatgtttgtgtgcaatgatttattaaagaatgaataacttttttggattaattctgagtaaaaaaagacttgtaaacgtaaatatacctttttcttcattcaataaatatgtatttagtacttactgtatggcaggtagtactctagagacttgtagtatatctctgaaaaaacgggcagagttctctctttgtagagcttgcttttgagaaggagggggacaagtaataaataatgagcagggtaagagatttaagtattgggcggtggcatgatagggcaggtggcaatattgaatagcacagtcagggtagacctt

SEQ ID NO: 188650 - DNA, 330 bp, Homo sapiens
tggatcctacactgaaaaaggagagggccactggtagcccacagcagggtgtctgagcctcagttaggcaagagggcatctgcacatgagaacagctttgcatagagtgacagagcccacgagggataaggagcccattcacgcagaggagggggtggcaatggcaacgagagattggtggcatacagggtgactaatctaataaattcatgtactaaggataatttgagctaggcttttcattgtcagaaaagggaattacaagcacaaaatggagaaaaactagaatgcatcctgcggtggtttttgttgttgttgtttttcttgaga

SEQ ID NO: 188651 - DNA, 250 bp, Homo sapiens
ggtggggggagggcattggcattcctgctattcccgaggtttccctgcctctcctgtgagttgagggcacccctgtgaaacctaagggcacgctgtggcagagaacatgcacggagctcctgcttctctcccgacagccctgggaaggccttactactttaggtcctaactaacaatatccaaacgaccaggtggtggtcccacagcaagggagctgtcagtcagagctgtgcctctgcccccgtatttt

SEQ ID NO: 188652 - DNA, 668 bp, Homo sapiens
ttgctatttccgccgcaaacacctcctgttggttaacaccttttcagacctcaagactcagtcaagatgtaacttccagaaagccttgactcagcctacgactagttcagatcagtaacacttctctggttttctcttttctcacagctctctgtgagtacttgatcataatacttatcacataggattgtagctatctgtttccttgttggttcctaccactagataggaagatccttgagggtagggactgtgttttagtctcccttgaattcccagaacctggaacacagtaggagcttaattgaagtttgccaaatgaatgactgaaagtctttctttggtagagattctcatgctcaaacttgtatagctgtactgttcttggcctaggtggtaatcttatcagctcaaatgggaaggggaggggaagggtaggaaggaaagggtaacaaaagattggctagaaccactgctattgttatacaactcctgctacatgaactcttatctaagacagagtagaagaggccctcataagggaaatcacgtcaataaaaaaattttagactgggcacggtggctcacgtctgtaatcctagtgctttgggaagctggggtgggatgattgcttgaggtcaggagttcaaggctgcagtgagacatga

SEQ ID NO: 188653 - DNA, 309 bp, Homo sapiens
ttaggtataagtcaaaatatgtataaaagtatgagaaaattgataaaacttggatgaaagaaattaaaaaagaactaaatgaatggaaagatattacatattcatcaataggaagactcaatattgtcagaatgtccattcttctcaatttgatctatagattcaatagaattcaattcaaaatcccagccaattactttgtagctattgacaaatgaatgctgaagtttatacaaagaggcaattgactcaaattaaccaacacaatattgaagaacaacaaacaaagttggaggactgaggctacct

SEQ ID NO: 188654 - DNA, 273 bp, Homo sapiens
tcgtgggtcttgcccgcgctgttcacccgacgacctgcagtgggacctggtgggagactttgcctggctggcgctgcgtcgagttctgtgccccgccggtgttctctcaccagggcacatggttttctccgtgggttcagagcagaagctcactttgttacgccgaggaagaaaaatacaaaccatttacatccaatgatttccctgcttgctgcccaggaatcggagggtttgtttcttgaagttcccgtaaacgtctgtagacacttccga

SEQ ID NO: 188655 - DNA, 326 bp, Homo sapiens
gaattatttacaagtgcaggagcctttaggcctctttctttagaatggaattgttttgaaagcatttcaaataaatatttcatccattattacttaaaaattttgcactttattctactgtaacactaaaacttatctttgagtttagtattaccaagtgcatcgaattacagattaaccgattgaccagctgctatttagtaaggtctcaactcccttaagagtaacccaatccacaaacttgactatgactaagcacttatcttgagttatttgaaagaaatatgaaacggtcgtcttgcttttagagtaattttaatcaactg

SEQ ID NO: 188656 - DNA, 501 bp, Homo sapiens
ctagactcattgcttcaaagaactttatatactgatacctttcaagatgtatatctctagacccaagctccttgcctgagctccagaacttgtatatccaactatctactcagcatataacttggatgtctaataagcatctcaaatttaacatggccaaaaccaagctatcggatttctatcacaccccaagtctgcttcccctgagcctttccggtcctagtaaattacacaattatacactcagttgctcaggacaaatacctaggagccctatttgtctcttctcttttcctcacacagcacattcaatccatcagtatctacttccaattcatcaataggttccattagctccaacttccaaaatatattctgaacctaaccacttctttccatctctactcttccaatctaggtcaatgccatcatcacttctcactggtctctgtggctgcactcttgattcctcattgtccttcctctatccacatagcagcc

SEQ ID NO: 188657 - DNA, 549 bp, Homo sapiens
aaccatttccttgggagaagattacagctcaagtctgttgaactttattgccttgggcctcatgacagtcttcagaaacatgcaaggcatttctgttaaagaaattcagatgtgctaggacacagatgacattcttgtgcatagcagtgtcctaagggggtgaggaataagtcaggaagaaaaagatgattcatactttttgctgcattctgggattattatatataatccatagagaggatggagaccttgcagagataccacataggaaaaaggtgcggtgttttcctacatggcctgactgtattttaaaataaaaacctaaacacgactccaaggtaatgactgccttcaaagtaatattttagttgattttaatattctctttgaaggaagttctcattgactcatatttcttttctccctctcctttctcacacacattcatttccagaggtttgactgagggagagctgctactgagttttaacagtcactctttttatatgtaaaactcatgttcttgaatttaaaacaaaagattacttg

SEQ ID NO: 188658 - DNA, 712 bp, Homo sapiens
ggtccggcttaggatgttcacatgagcagaggagcttgagactagtcatgggaaacatgatgagttcccatctctactaaaaatacaaaaattagccaggcctggtggtgggcgcctgtaatcccagctactcaggaggcttgaggcaggagaatcgcttgaacctgggagactgaggttgcagtgagcggagatcatgccattgcactccagcctgggcaacaagagcgaaactgtgtctcaaaacaaatgaaaagaaaaggctgtcatgttagatccaccctcctcctcaggggaacccctgggctgctctctgggtagagatgggaacccaggcctcgggccagtgagtggaaggaaactttgggatgattgacttgggactgggctagaggtgaagaatctcccagtaggcaaagttcggccttacgtttttttgtttcaagcaaaccacatcattacccacagaggccattggtgagatatttgtaagtctcctgacagtggctggagttcgttgcttggttgttgtttctctgtctcagccctggagatgggagtgaccacctgctctctctggacagaggctgtccacgttcatgcaattccttggacaccggtggtgcagcgggaggcgtaactgggagtgggagaccctgaactgtgccggttcttgcagagtatcactgtgacttcaggcgagtcaccccac

SEQ ID NO: 188659 - DNA, 403 bp, Homo sapiens
gttttactgtatgttgtaagggggcccagattcctgggtgtcttgcaggtaggtcatactagttacttaaaggtagagctttcttcagagggagggaatacaaatgagaaaaaaggcagacatggcgaacaagaaaacctattcagctgctacacttacaaaggcatattcttaaaggctaaatccagttatcaatagtattccctgtgctgagaaaattggtgccaattttaactgctttttctgcttttccaaattatgtgacatttttggagcctaaacaaacctgcaatgattccgtattgaccacctaccaataaacctcaactacacacataccttttctttcttgcctgtgaccctttctctctgtctttaattgtaactgcaactctaaggcatt

SEQ ID NO: 188660 - DNA, 287 bp, Homo sapiens
gcacagtgggccgggcactgctcacatgttctgtgtttgttgattcattccatcctcccagcaacaccctatgaggaaggttctgtcatctccatcattccagaggccacacttttagccctaccccacacttctcacctaggaagaagccaagaaagcgtgtccaggagagggagcaagggagggaagcttctgatactactgggaggcaaagtggggacagttgcagtggattcaggacccggaggacaggggagttgaaaaagtgagggctgaacccgggacgg

SEQ ID NO: 188661 - DNA, 299 bp, Homo sapiens
caggctggtctcgaactcccaacctcgggtgatctgcccgcctcggcctcccaaagtcctgggattacaggtgtgagccactgcacctggccgatcccgtcccatctcttaaaaaaaaaaatcaaaaagataaacatacatttgtaatggctggctatctggagacagagggccagagcagatgactgactgaggtcctttccaggggtagaatatgccgatgtcataaggctaaaggtagcatagttttggcggctgaagccattcctaggctggaaagggaattaggatttggtacg

SEQ ID NO: 188662 - DNA, 501 bp, Homo sapiens
ggtctctccacacggacgcgcataacatttggtgccgaagacccgggacaggaggactgcttcaggagatcggtcccctgtcatcgccctcactccatgaggagatccacctatgaccttgggtcctcagatcaaccagcccgaggaacatctcgccaatttcaaatcaggtaagtggtcttttcactctcttctccagcctctcgctacccttcaatctccctctcttgctatccttcaatctccctgtccttccaattccacttattttcctttctagtagagacaaaggagactcattttatccgtggacccaaaactccagtgccagttacagacttgggaagacattcttcccttggtgtttaatcactgcagggacacctgcctgattattcacccacactccattggtgtctgatcaccgcggggatgcctgccttggtcattcacccacattcccttggtggcaagtcagttgcagggatgcctgctttggct

SEQ ID NO: 188663 - DNA, 386 bp, Homo sapiens
ttgccaggataatggagggggtgcgggcaggagggaagtgggtgtagctattaaagagcaacaagagggagccttgtgatgatgggaatgttcagtatcttgactgtggtggaaacacaaacctatgtaagtggtaagattgcacagaacttaacacacatgcacacatacacaaataaaccagtatcctggttgtcctatgctagttttgcaaaatgttaccattgagagaaactgaacaaagtatacaaaggatccctctgtgttatttcttactactgcatatgaatctacaattatctcaataaaaattaccaataaaaaagtctccaaatattgccaaaggtccccatggcaaaactgtccctggttgggcaatcaagctt

SEQ ID NO: 188664 - DNA, 455 bp, Homo sapiens
tcctgccttggcctcccaaagtgctggacttacaggcatgagctgacatgcctggcctgatatgtcagttttcagtggttgtcagtgtttctttgttttctcctctgtcctaggcacttgtcactaggaaagtgcctaatgactccatcaggtgtggcatttattattgttgcaacagggaattgataagagaaaagaaggctatctgggggatgagttagccaagaagtggaagaagacagctgttattaggttgctgtcaaaatagcttgctttactctctggcatgtatcactccagggaatgaaataatccaagaatgataagctctcaattgccatctgttggtttgtgatgctgcttgccttgttctagttaacattgaacactgacctcacatggcacttggagaaacttagaggaggataagatgatcatagggtgtaaagcaaact

SEQ ID NO: 188665 - DNA, 400 bp, Homo sapiens
  misc_feature (302)..(302): n is a, c, g, or t
  misc_feature (320)..(320): n is a, c, g, or t
  misc_feature (384)..(384): n is a, c, g, or t
ctaacagcaaatttagcaaggtcacagaaggcaaggctgatataaaagatcaattatacttttatatgccagagagagacacttagaaaatgaaattaatgaaatagtaagctgttcaagacttcgcattgaaaaccacaatacgttgctgagagaaactgatgagacaaataaacgtatagatacaccatgtaaagatagaaatactaaatatcgttaagatgttctaatgaacctgtcttggcctctcaaagtgctgggattacaggcgtgcgccaccgtgcccggccccaatctttttnatagtttgtggttggttngtcctatctaaaaagtctgcctacccaaaggttttgaagacttatcagctttgttactagaagnttgtagtcagctttat

SEQ ID NO: 188666 - DNA, 238 bp, Homo sapiens
ttcaaaggagattacaccaaaaagcacattgcttttcatttattcattacagatctgtcatagcagcatttttatttttttgccctgaattgtagtgtcgttgtaataataaattttgttccagactcaggatattttaaaggtttataagccttttaactaatgttaccgtcttatttaaattgatcaaattggcatttcaacacgataatcttgcatttcttaaagttgaactaac

SEQ ID NO: 188667 - DNA, 603 bp, Homo sapiens
aaatcaaatgcaagccattgctttgggaggtcaaacattattttacaaaatagtgaaaatcatggagattattttaagcgtggattaattaagatgagtttatccaaattttagaagctgttatttctcttaggttttattttcagtgttttagctggaactgaaagaggattagcatctagggtacttgctcaaaggcacattgccctatgttttcacatttatataaataaatatctgtaagccccaactctcaatgtgactatatttggagatacagcctttatggaagtaattaaggttaaatgaggtactgaggatagggccctgatttaacataagtgtcattataagaaaagacatcttgctgtctgaaagccagaagcaagccctcaccagaacccaaccatattggcaccctgatctcaaacttccagcctccagaactgtgagaataaaaattgcttgtttgccacccattatggtagcccaagctgactaatacagactgcagaggagatcaccgtttatatgatcagtttaggtgctggatcagccagtagcagacagtcagccctccatcctccctcccttcacgtatgc

SEQ ID NO: 188668 - DNA, 713 bp, Homo sapiens
aaatcaaatgcaagccattgctttgggaggtcaaacattattttacaaaatagtgaaaatcatggagattattttaagcgtggattaattaagatgagtttatccaaattttagaagctgttatttctcttaggttttattttcagtgttttagctggaactgaaagaggattagcatctagggtacttgctcaaaggcacattgccctatgttttcacatttatataaataaatatctgtaagccccaactctcaatgtgactatatttggagatacagcctttatggaagtaattaaggttaaatgaggtactgaggatagggccctgatttaacataagtgtcattataagaaaagacatcttgctgtctgaaagccagaagcaagccctcaccagaacccaaccatattggcaccctgatcgagggccaaatcagtgggttttaaaaaacttataaagaacagaggtttatttggcttacagttctgtaggctatacaagcatggcaccagcatctgctccacttctagtgaggccacaggaagcttttactcatggcaaaaggcaaagaaggaacaaatgtatcacatggcaagagagtgaggagccagagatagaggggggaggccccagactctttttaacaaccagatttcaagtgaactaacagagcaagaactcattcatttggcccttatcgaggggtaccg

SEQ ID NO: 188669 - DNA, 409 bp, Homo sapiens
gtgcccctcaaggactctgggaagcaaagagctgtgcaggaaacaagaggctggaagacataagggagcagattagtccgttttaaaactagcctgatttacagaaagacatgatgaatgctttcatcatgttctcatatcaaggtgaagtcctgttatgaacttctgcccctgacattatatctctaaactagtagtaccataaacaactagcaaatttccctcctttcagacttgtgatggtggtaaaaagtcactgtagcacctaaacacgcaactaaattctacttcatttaggtacctgacatatacctctagaacagcaccagccaacagaaatataatgcaagcaatgtggataattttagcttttccaggaagtacaataaaaagtaaaaagaaacaaagg

SEQ ID NO: 188670 - DNA, 548 bp, Homo sapiens
taatagccccaaattggaacagcccacgtgtccaatgggagacgacacaaactgtggtatattcgtacaaaggaacactatttagcaacagtaaaatgaacagatatacaacaacaggaatgaatttcagaagtatttcattaaacaaaataaatcagacccaagaatactcctgtatgattccatttctatgaagttcaacggacacaactcatccatggtgacagaaatcagaacgtggttgccgcaggaagtgttacttgaaagggcagagagaactctgggcaggaggcttgtggaatttggatgtggtttctaagatgtaagcatttgtcaaaatcattggatggaacactgaagatctgtgcagttttctaaatttaatctcacctctatttatttattgagaaatggagtctgtgcagtggcgccatctcggctcactgcaatctccgcctcccgggttcacgctattctcctgccgcagcctccctagtagctgggactacaggcccccgccaccaagcccggctaattttttgtatttt

SEQ ID NO: 188671 - DNA, 437 bp, Homo sapiens
aggcacacatggcttccacttatgttccattctcttggattgaatgacatggttacacataagtgcaaagggggctagggagtagtttagctgcattccccaaaaatcagatttgagagacaacacttggtccattccacaactatccttcagtagtctaagtgaagttttgttcaattaaacattaaacagaggcacagaaaagttaaataactttccctaatttacacagttagcaagtagccaagttaggatttaagcccagagcccatacttttaaccactgtatatattaactctaaaagtattaacatctaaaagtattggcatctataggccgggcgcggtggctcacgcctgtaatcccagcactttgggaggccgaggcgggcagatcacgaggtcaggagattgagaccatcctggctaacatggta

SEQ ID NO: 188672 - DNA, 827 bp, Homo sapiens
cgtgaccaacaactcaatgagctctgattactctaaaagaactcatgtcactgactcatatgccttccagcactttaccctaaggagtccatagcattttctggctgctcgagaatagtgaggttgctgaatgtgttggtgtacgacgtatcggagaccgatacgtcatcctggtcataatctattgccaggaaacatagatgcttccagagtacggacctcttgtgtgctctagaactccccattgcctgtgagggtgagattagagactctgggccacgagctttaggaaaagggaaaagaggcctactgagtagagcattagtttgttccttttaggttgtattctgaaacaaatttaaaaataggagattcaaacaaaattattactcaagtcttgggcaaagatactggggattattttttaaataagacagacatcatttacaaaaagtttctgaaacaaaaaagttctgtcctgactatatctaggcttctgtatccttctcttctttatcataatgacatgtagaaattgaatgagtattttcttttactttgattttcccactaatttctgaaaattttaaactcttgccctaggaattcaactcctgcagaaaactcacatactcctggctgacactgaacaattcagggttattctttcttagtcccactgctgaattcttcatgctagtactttatgagatagcctgtgtccctggtcgcggctgtgcctgtcatgtggctcaggactgctttatgctaaatcatcagaggcactcacatacgttgctatatcgcttgatgcatgtagctccata

SEQ ID NO: 188673 - DNA, 552 bp, Homo sapiens
gtctcgaactcctgacttcaggtgatccacctgccttggcttcccagacagagtgttgggattacaggcgtgagccactgcgcccagcctcttggcctattgtttatgactatccttgatgtttcataggtgaaaaatactcttactttgaagagtccacagactcaccagggaaatagtaaaatttaaaaattaaaatgcacttttaagggccacaatagttaagtttgggaaaaacagatgagggggcatgtgttaatatttcagacaggatgtagacatgggggctttgggaggtgatgctggggctgatcctgaagcataggagtttgccagatgaaaaaagacatttcaggcagacaagtgcaaaggcagaaggtgaacatggtcatggtgtccccagggagctgtaagatacaattagggtgagggtacctatgagatgataactcgatgatgttggagatgtctggggccagatcatgaaaatcaagaaatctacaccagctaggagaaccattgatggctttaagcagaggagaggcactagtg

SEQ ID NO: 188674 - DNA, 208 bp, Homo sapiens
ctttatcagaaaatgctaatttagcttatgctttatgctctttatagtgcagaaaaaatgatttttaacttttggtgtgtcatagagataagtgggattaaccttttggtaactttagcgtcgagtgcctaactcttcctaaaccctgattttccaatgcagtcttttattgttattgggggtggtggtatatgcttttacttagagg

SEQ ID NO: 188675 - DNA, 523 bp, Homo sapiens
agaacatcacaacttatctgatgcttcacagtcctcagggctaagtcttaaagcatttccacagagagtggaacaaaacaaagggagcttttgttccttaaaaacacatctttctctacttcgatcatagctatttattccaacattccaggcacttaatacttttttatcacttgcaaaaaattacctgtttcctaaaccttttcatactccttaagaaaaaaaaaccttgtatttccttaatcttggccaataactcaggaatgttcatatttatttcccttgagccacatgaattggtgattgtgtatttggttcctactgttatctcagcagcccttcacattgctacacaaatgttagtattttatctttgctcaacctcacactcataatgtatccttattgaaaactcatttgtttgtaaatgttaatttattctggaagggtattctgggacaatattacaaattaagaagatgggctaagaaaataatttgtatttgctttgaattattctgta

SEQ ID NO: 188676 - DNA, 435 bp, Homo sapiens
tcaacaataatcaactcttgactacatccacatgtagattgctttgaaacaaatcacaggcatcatatcattttatctgtgtatatttcagtatagaatatataaagattaggacttcaaagcatattcacagtactgtttttacacctatacaaatcgatagtaaacagtctctatcttcataacattgctgagtcccagtcattactagaagcttgtctttctgtttggctgtgggcgcctgttgtggatttcttcttatctgtcctactcccaccaggtgacagggacattctacaatgattctgtcttattttggatttgtgaatccacatctgtgtcacatcgagtgctttctgcaagggggttttgcagtgcattttgtgtgggttttagatgcaaaaaagcgtatgtgcaaatggtatgcaaactctg

SEQ ID NO: 188677 - DNA, 411 bp, Homo sapiens
tgctcaaacctaagatacctgcatcatctctcaaatgtgtatgtgtgtatacatatttacatacatacatgctcatagtcacaaatatatatacatgttatatatatacattttatatacatatgtataaacagagtaaatattttagtggcttttcatatttttcaactgcataaaataggaacccagtaaatgttcactgaattaattaatttaattaattatttaagaagtatttagcataagcaactttcttcagaataaatttcaaatcactgatgccgtgcctacctagatatttggctatataacccttggttatcagtgattgcaattctttcctattccttggtggcctcctctcctttctttgtgtgtctctgattgtgatatgctataacccacacataa

SEQ ID NO: 188678 - DNA, 451 bp, Homo sapiens
aggtgccagagcgtgtgagtgtggatggagaagaggcagctttgatgatgacttcatttgctggccaaggcacggaggaagcagtgcttttctcttcgtctcttattttggtactccctttccaagctgcctcctgagctctttataaacactggcattctggctgagaaagactcgccaacatccaagagtggcaaaggggaacaggagacacatcgttggcttgggaaccgctcccgctcgcaggaagtctgctcacaggagatttttctctgtcagtgtcctcgtgtggtttctagtctggggagaacacatcagcacactaacggaagaaaggggagcccgcaaagaccaaagctgctgtgctgggggcgtggattcgagggctcttctccaggctgacagctgggaccctcattttgtcagccctgtggagttcctactagagtgc

SEQ ID NO: 188679 - DNA, 527 bp, Homo sapiens
aagagtgatgccctgtatggggagcattacactgaatacaccaatcaccgacagcacggataggaaatgttggtagctttaggatgatataattggccagtacttgattaaaaaaaattgttagaacaattgttagaataaaaccggccactttggggtcaaaatttgcatatgtatgcacatatttttagttgctaaatcacctatgattcatgatagtaatttaacgctttgacttaccttagtattaagcagatgctgttaaaccatataagaaattttgatctttaacgtatctttaaaaacattttaattcagaagtttgtagggtgtaaataaatggcatttttaggtggactttaacatttttgaaatataattttgggtttatttaaatcaacaataagctacttgtcaagaaagtaatacacttttgtatgttaacagtgccctaaaataaagatccccactctgctggctgtcattaaccattatttatttgctgaaataatgctatgtccagaagt

SEQ ID NO: 188680 - DNA, 322 bp, Homo sapiens
cagcattctacttacaggtccctgagggagctgggaagagaatagcataaaacaaagcacttcaatggcggataaaccgcttttcctcaaatttgctaccactcatcctgaggcttcttttgaacctaacagtgcagggaccagccccacagggtcggtgggcttctccctgtgtgcggcgacgagagagtgtagaaataaagatacaagacaaagagataaaagaaaagacagctgggcccgggggattactaccaccaatgcgcggagaccagtagtggccccgaatgtctggctgcgctgatatttactggatacaaag

SEQ ID NO: 188681 - DNA, 214 bp, Homo sapiens
tggaagccagcctgggcatgacatgaatgcatttttagctgggatgcctgattttcttttttctgacagagtgagattccatctgaaagaaagaaataaaaggaaagaagaaagagagagagagaaagaaagagagaaagaaagaaagaaagaaagaaagaaagaaagaaagaaagaaagaaagaaagagaaagaaagaaagaaagaaagaaag

SEQ ID NO: 188682 - DNA, 367 bp, Homo sapiens
tagaggctgaaagtcatggatccctcttttccagtcaggatgtgctgggccaacttcaccttggacaagttccccttggtgatgatcataaggagtgatagttgtcaatatagtatcttcctcagcagagatggccaagaagccctgcaatatgctaggctagctactaggcttgtggtcaaggtgacccaggataggcttaaaattagggaaagttgatgagaaattgggtccaaattatccaaaatgaaaattattcctaggctaccaaactgatctttctgctgaagtcaaaacacaattccagacaaaattcaaattaaaaaactagttaaattaaaatggaaaagcagaagaaagaaagaac

SEQ ID NO: 188683 - DNA, 4964 bp, Homo sapiens
gcggcggtcgcagctcgggtccccctcgggcgcccccgccgccgtccgcgcgcggccatggagctggaggtaccggacgaggcggagagcgctgaggcgggggccgtgccctcggaggcggcgtgggcggcagagagcggggcggcggcaggtttggctcagaagaaggcggccccaacagaggttctgtccatgacggcacagccgggccctggccatgggaagaagttgggccatcgaggtgtggacgcatccggcgaaaccacctacaagaagaccacctcctccaccctgaagggtgccatccagctgggcatcggctacaccgtgggccacctgagctccaagcccgaacgcgacgtgctcatgcaggacttctacgtggtggagagcatcttcttccccagcgaaggcagcaacctcacccccgcccaccacttccaggacttccgcttcaagacctatgcacctgtcgccttccgctacttccgggagctctttgggatccggccagatgattacttgtactccctgtgcaatgagccgctgatcgagctgtccaacccgggcgccagtggctccctcttctacgtcaccagcgacgacgagttcatcatcaagaccgtcatgcacaaggaggccgagttcctgcagaagctgctccctggctactacatgaacctcaaccagaacccgcggacgctgctgcccaagttctatgggctgtactgcgtgcagtcagggggcaagaacatccgcgtcgtggtcatgaacaacatcctgccccgcgtggtcaagatgcacctcaagttcgacctcaagggctccacctacaagcggcgcgccagcaagaaggagaaggagaagagcttccccacctacaaggacctggacttcatgcaggacatgcccgaggggctcctgctggacgccgacaccttcagcgccctggtcaagacgctgcagcgggactgcctggtcctggaaagtttcaagatcatggactacagcctgctgctgggcgtgcacaacatcgaccagcacgagcgcgagcggcaggcgcagggcgcccagagcacctcagatgagaagcggcctgtgggccagaaggcgctctactccacggccatggagtccatccagggtggcgccgcgcgcggggaggccatcgaatcggatgacacgatgggcgggatccccgctgtgaacggccgcggggagcggctgctgctgcacattggcatcatcgacatcctgcagtcctacaggttcatcaagaaactggagcacacctggaaggccctcgtccacgatggggacacggtgtccgtccaccgccccagcttctatgccgagcgctttttcaagttcatgagcaacacggtctttcggaagaactcctccctgaagtcctcgccctccaagaaggggcgcggcggagccttgctagctgtgaaaccgctggggcccaccgctgccttctcggccagccagatccctagcgagcgggaggaggcccagtacgacctgcggggggcccgcagctaccccacgctggaggacgaaggccggcccgacctcctgccctgcacgccaccttctttcgaagaagccactacagcctccattgccacgactctgtcatccacatccctctccattcctgagcggtccccctcggagacgtcggagcagccgcggtacaggcggcgcacacagtcgtctggacaggatggcaggccgcaggaggagccacccgcggaagaggatctgcagcagattacagtgcaggtggagcctgcgtgcagcgtggagattgtggtccccaaagaggaggacgcaggggtggaggcttccccggccggtgcctctgctgctgttgaagtagaaactgccagccaggcctcagacgaggagggcgcacctgccagccaggcctcggacgaggaggacgcgcccgccaccgacatctacttttaatttctatgcagcccccgacccagagccgagctccacttctgctccggctgcccccgaaggcgctgcccaccccgctgaggcccagagctcgggagatgcccgcctcgccgccccaccggacctcgtcctccccctgcacggatgccgacggccgggcccctccccgacaagcctcccagggccccggcaccccggtcggcagcctgcccctgtgagacccaccctcccgagcggccaatcgcatttgagtccttatttggcacagagacggaagcacgtgtgtgccgttttaggaaaagaacaaaaaagacacaaacaaaccaaccagagggagaagagcccctgcccactgcactctttggttctctgctgtgcctgcctgtgtcctgaggaagaagccaggctgttcgcggtggcctctggggacctgagccccgggggccccatcggcctgcagaggggacggctggggtcccgagcaactctgcctccatccacgtgggaagcggaccctcctgccctcagcttgggtttgggggcctcagtgcaggacatctggcctgaacatcgactgtggggacagccctcgccctgccaagcactgcggccactcagcagctatgttcccgccgcagtggggccctgacgcccacctcccaggtgcccctcgagcaaaaacctctggcgcctccaatccagacccaccacagctggagggccaggcctcctcttccccaggctgccacccacgctggcggagctcagggctggggacttgtccttctcttccaacgtaggccactcagcaactggcatggagggcccaggcaacggagacgttttctccatggcaggacagagcgggaggccgggccttgggccacaggagaccagctcagggcggaaggtcaggctccccgccccctccacgtggagacatggcctagggggccaggcccggctccacaggagtctccttcaggactggtgtggatgtccgccgcctctttcttgtttaagtgatgtgatgtctccgaggaggggagagaagactttgtttccgactcatcaccctccaagagggcagcgctcccagtggtgggactcagcccagactgccctggggcagcttcctgggcccgctgcgctcagagggtgctggttggaggccagagctcggcagagtcacccaccctgcccttccccaggacccctgagaggggcttattggtgatggctgtgggaatcccccacttccaagatgtgcccaggatgtgaggagctggagtggaagctgcacctttgggaagaattcctctccagacctggcagagcctggtgtggggtctgagacggccggagaacctcccaggcagggctctgtgttttgtctgttacaacctccgtatgacgccacgccacccgctgttcacgtcccgtcggcctcctgcacagcccacacgctgcgcccggaaggcccctgctgtggagaagccggacccatccccgaggtccccagcgaggacacacactccacgagagcagcccctccactctgcccaggagaggggccgaccctcctcgggaaccggccagccgcgtggctcccagcatccatcaggacaagcccacgtggggtcctccctgcgtgctcagagggtctgtccagccctgggaagcgaccttggcctcagttcacagcctggtgctcatctgctggcaccgggcatccacccatcagcccccgccctgtccctccgaaggacacccagcaggcaccccccggggaggcaggggcagaggtcagaaggggtgtctgggacctggatggccagcagggacaggggcattgtcatctcaaaggcccaacccccagaggccacaccagtcctcccagggagtcctcgagtcgccctgcccagagccctggcaccagagacgccaagagcctgtggggtgactcggagcagcaggtgtggccccgggcgggcggcaccgcgtccagggcagcctccctccgctgagtgacacgggacaccagtgcccggccgacgcgcctttgcaggagaaatgtgcaaacctctgtggataccatttcatttccattcttgtgttgtctccaaggcccctttggagatatacttggtgttggttgtgttttttggttccttttcagagaactgtaaaccgaggctgacgtgctccactgactgtgccgaggggcgggggcaggaggacggcaagacctatttataatatttagcgaactcggtctccctcagatcccccgcgagggaggctgctggacccaccccgctgtcccccatgatagaagtctgtaaataccttggtgaccaatgcccacttcccctcctgggtcacctctgatggctgctgtccactgagaacgtgggcagtgtccaaattcctgtactgtaaagactaaaaggcgtttgctctgagactgacaaggcggaaacttccatgtgtctcctgccaggctctgtccccctacgccatcccgacacgtccccgttcccccgaaacctggctcagtgcaatactcccattgccatggggtccttcaccatggtactgtctccacagccctcagtccccaccccaggagaggcgcctgccacctcctcctcatctccggtggttcaatcgctccgcctgtccccaacccagtcccatttttatggccaaactgattctgaaacaaaatgaaactgcaaacctcgtgtgtcttaactccccccagggatgccactccattcctccgccccgtggtctggtgcgtgacaatccaaagcgccgagacgagggtgctgtgtccctcaaacccagagtggtgggcgcctctgaaaccatacagccactcctggccccaaacactggtttgcatcccaggttcctcgcccacctacccccgccacaccccgtctttttagagatctctctaataaatcgggtaataagca

SEQ ID NO: 188684 - DNA, 5211 bp, Homo sapiens
gcggcggtcgcagctcgggtccccctcgggcgcccccgccgccgtccgcgcgcggccatggagctggaggtaccggacgaggcggagagcgctgaggcgggggccgtgccctcggaggcggcgtgggcggcagagagcggggcggcggcaggtttggctcagaagaaggcggccccaacagaggttctgtccatgacggcacagccgggccctggccatgggaagaagttgggccatcgaggtgtggacgcatccggcgaaaccacctacaagaagaccacctcctccaccctgaagggtgccatccagctgggcatcggctacaccgtgggccacctgagctccaagcccgaacgcgacgtgctcatgcaggacttctacgtggtggagagcatcttcttccccagcgaaggcagcaacctcacccccgcccaccacttccaggacttccgcttcaagacctatgcacctgtcgccttccgctacttccgggagctctttgggatccggccagatgattacttgtactccctgtgcaatgagccgctgatcgagctgtccaacccgggcgccagtggctccctcttctacgtcaccagcgacgacgagttcatcatcaagaccgtcatgcacaaggaggccgagttcctgcagaagctgctccctggctactacatgaacctcaaccagaacccgcggacgctgctgcccaagttctatgggctgtactgcgtgcagtcagggggcaagaacatccgcgtcgtggtcatgaacaacatcctgccccgcgtggtcaagatgcacctcaagttcgacctcaagggctccacctacaagcggcgcgccagcaagaaggagaaggagaagagcttccccacctacaaggacctggacttcatgcaggacatgcccgaggggctcctgctggacgccgacaccttcagcgccctggtcaagacgctgcagcgggactgcctggtcctggaaagtttcaagatcatggactacagcctgctgctgggcgtgcacaacatcgaccagcacgagcgcgagcggcaggcgcagggcgcccagagcacctcagatgagaagcggcctgtgggccagaaggcgctctactccacggccatggagtccatccagggtggcgccgcgcgcggggaggccatcgaatcggatgacacgatgggcgggatccccgctgtgaacggccgcggggagcggctgctgctgcacattggcatcatcgacatcctgcagtcctacaggttcatcaagaaactggagcacacctggaaggccctcgtccacgatggggacacggtgtccgtccaccgccccagcttctatgccgagcgctttttcaagttcatgagcaacacggtctttcggaagaactcctccctgaagtcctcgccctccaagaaggggcgcggcggagccttgctagctgtgaaaccgctggggcccaccgctgccttctcggccagccagatccctagcgagcgggaggaggcccagtacgacctgcggggggcccgcagctaccccacgctggaggacgaaggccggcccgacctcctgccctgcacgccaccttctttcgaagaagccactacagcctccattgccacgactctgtcatccacatccctctccattcctgagcggtccccctcggagacgtcggagcagccgcggtacaggcggcgcacacagtcgtctggacaggatggcaggccgcaggaggagccacccgcggaagaggatctgcagcagattacagtgcaggtggagcctgcgtgcagcgtggagattgtggtccccaaagaggaggacgcaggggtggaggcttccccggccggtgcctctgctgctgttgaagtagaaactgccagccaggcctcagacgaggagggcgcacctgccagccaggcctcggacgaggaggacgcgcccgccaccgacatctacttttaatttctatgcagcccccgacccagagccgagctccacttctgctccggctgcccccgaaggcgctgcccaccccgctgaggcccagagctcgggagatgcccgcctcgccgccccaccggacctcgtcctccccctgcacggatgccgacggccgggcccctccccgacaagcctcccagggccccggcaccccggtcggcagcctgcccctgtgagacccaccctcccgagcggccaatcgcatttgagtccttatttggcacagagacggaagcacgtgtgtgccgttttaggaaaagaacaaaaaagacacaaacaaaccaaccagagggagaagagcccctgcccactgcactctttggttctctgctgtgcctgcctgtgtcctgaggaagaagccaggctgttcgcggtggcctctggggacctgagccccgggggccccatcggcctgcagaggggacggctggggtcccgagcaactctgcctccatccacgtgggaagcggaccctcctgccctcagcttgggtttgggggcctcagtgcaggacatctggcctgaacatcgactgtggggacagccctcgccctgccaagcactgcggccactcagcagctatgttcccgccgcagtggggccctgacgcccacctcccaggtgcccctcgagcaaaaacctctggcgcctccaatccagacccaccacagctggagggccaggcctcctcttccccaggctgccacccacgctggcggagctcagggctggggacttgtccttctcttccaacgtaggccactcagcaactggcatggagggcccaggcaacggagacgttttctccatggcaggacagagcgggaggccgggccttgggccacaggagaccagctcagggcggaaggtcaggctccccgccccctccacgtggagacatggcctagggggccaggcccggctccacaggagtctccttcaggactggtgtggatgtccgccgcctctttcttgtttaagtgatgtgatgtctccgaggaggggagagaagactttgtttccgactcatcaccctccaagagggcagcgctcccagtggtgggactcagcccagactgccctggggcagcttcctgggcccgctgcgctcagagggtgctggttggaggccagagctcggcagagtcacccaccctgcccttccccaggacccctgagaggggcttattggtgatggctgtgggaatcccccacttccaagatgtgcccaggatgtgaggagctggagtggaagctgcacctttgggaagaattcctctccagacctggcagagcctggtgtggggtctgagacggccggagaacctcccaggcagggctctgtgttttgtctgttacaacctccgtatgacgccacgccacccgctgttcacgtcccgtcggcctcctgcacagcccacacgctgcgcccggaaggcccctgctgtggagaagccggacccatccccgaggtccccagcgaggacacacactccacgagagcagcccctccactctgcccaggagaggggccgaccctcctcgggaaccggccagccgcgtggctcccagcatccatcaggacaagcccacgtggggtcctccctgcgtgctcagagggtctgtccagccctgggaagcgaccttggcctcagttcacagcctggtgctcatctgctggcaccgggcatccacccatcagcccccgccctgtccctccgaaggacacccagcaggcaccccccggggaggcaggggcagaggtcagaaggggtgtctgggacctggatggccagcagggacaggggcattgtcatctcaaaggcccaacccccagaggccacaccagtcctcccagggagtcctcgagtcgccctgcccagagccctggcaccagagacgccaagagcctgtggggtgactcggagcagcaggtgtggccccgggcgggcggcaccgcgtccagggcagcctccctccgctgagtgacacgggacaccagtgcccggccgacgcgcctttgcaggagaaatgtgcaaacctctgtggataccatttcatttccattcttgtgttgtctccaaggcccctttggagatatacttggtgttggttgtgttttttggttccttttcagagaactgtaaaccgaggctgacgtgctccactgactgtgccgaggggcgggggcaggaggacggcaagacctatttataatatttagcgaactcggtctccctcagatcccccgcgagggaggctgctggacccaccccgctgtcccccatgatagaagtctgtaaataccttggtgaccaatgcccacttcccctcctgggtcacctctgatggctgctgtccactgagaacgtgggcagtgtccaaattcctgtactgtaaagactaaaaggcgtttgctctgagactgacaaggcggaaacttccatgtgtctcctgccaggctctgtccccctacgccatcccgacacgtccccgttcccccgaaacctggctcagtgcaatactcccattgccatggggtccttcaccatggtactgtctccacagccctcagtccccaccccaggagaggcgcctgccacctcctcctcatctccggtggttcaatcgctccgcctgtccccaacccagtcccatttttatggccaaactgattctgaaacaaaatgaaactgcaaacctcgtgtgtcttaactccccccagggatgccactccattcctccgccccgtggtctggtgcgtgacaatccaaagcgccgagacgagggtgctgtgtccctcaaacccagagtggtgggcgcctctgaaaccatacagccactcctggccccaaacactggtttgcatcccaggttcctcgcccacctacccccgccacaccccgtctttttagagatctctctaataaatcgggtaataagcaaaaaaaaaaaaaaaaaaaaaaaaaaaaaaaaaaaaaaaaaaagggggggggggcaaaatttcccccgggggggcccgacgcgaatccccagccttccggtcggcaaaggggggccgccgcaatactgaggacggtcagaatcaaaataaacgcacaggcgcaagggggcgcgggcgtgttaaaaacaagcgtcgggaacgtggggaaacacgggcaaacctggggaaactttggtggaagagagacc

SEQ ID NO: 188685 - DNA, 1175 bp, Homo sapiens
gcggcggtcgcagctcgggtccccctcgggcgcccccgccgccgtccgcgcgcggccatggagctggaggtaccggacgaggcggagagcgctgaggcgggggccgtgccctcggaggcggcgtgggcggcagagagcggggcggcggcaggtttggctcagaagaaggcggccccaacagaggttctgtccatgacggcacagccgggccctggccatgggaagaagttgggccatcgaggtgtggacgcatccggcgaaaccacctacaagaagaccacctcctccaccctgaagggtgccatccagctgggcatcggctacaccgtgggccacctgagctccaagcccgaacgcgacgtgctcatgcaggacttctacgtggtggagagcatcttcttccccagcgaaggcagcaacctcacccccgcccaccacttccaggacttccgcttcaagacctatgcacctgtcgccttccgctacttccgggagctctttgggatccggccagatgattacttgtactccctgtgcaatgagccgctgatcgagctgtccaacccgggcgccagtggctccctcttctacgtcaccagcgacgacgagttcatcatcaagaccgtcatgcacaaggaggccgagttcctgcagaagctgctccctggctactacatgaacctcaaccagaacccgcggacgctgctgcccaagttctatgggctgtactgcgtgcagtcagggggcaagaacatccgcgtcgtggtcatgaacaacatcctgccccgcgtggtcaagatgcacctcaagttcgacctcaagggctccacctacaagcggcgcgccagcaagaaggagaaggagaagagcttccccacccagtcccatttttatggccaaactgattctgaaacaaaatgaaactgcaaacctcgtgtgtcttaactccccccagggatgccactccattcctccgccccgtggtctggtgcgtgacaatccaaagcgccgagacgagggtgctgtgtccctcaaacccagagtggtgggcgcctctgaaaccatacagccactcctggccccaaacactggtttgcatcccaggttcctcgcccacctacccccgccacaccccgtctttttagagatctctctaataaatcgggtaataagca

SEQ ID NO: 188686 - DNA, 417 bp, Homo sapiens
ctggcctcagggaccggtaggggtctggtgggccacagggacgtggggtatatgtgggcggcggccctgtctgggctttgctatgagcccccagcaaccccaagcaccaacccccacccttccctgcagccctgaagtcctcgccctccaagaaggggcgcggcggagccttgctagctgtgaaaccgctggggcccaccgctgccttctcggccagccagatccctagcgagcgggaggaggcccagtacgacctgcggggggcccgcagctaccccacgctggaggacgaaggtgaggggcagagggcagagtgcgcttgtgggcgctacagggggtgccagcagcagccccgtgggtggggtgccgcctcatcctgagtgcccatcgctcagccaccccctccggatctgcagg

SEQ ID NO: 188687 - DNA, 5048 bp, Homo sapiens
gcggcggtcgcagctcgggtccccctcgggcgcccccgccgccgtccgcgcgcggccatggagctggaggtaccggacgaggcggagagcgctgaggcgggggccgtgccctcggaggcggcgtgggcggcagagagcggggcggcggcaggtttggctcagaagaaggcggccccaacagaggttctgtccatgacggcacagccgggccctggccatgggaagaagttgggccatcgaggtgtggacgcatccggcgaaaccacctacaagaagaccacctcctccaccctgaagggtgccatccagctgggcatcggctacaccgtgggccacctgagctccaagcccgaacgcgacgtgctcatgcaggacttctacgtggtggagagcatcttcttccccagcgaaggcagcaacctcacccccgcccaccacttccaggacttccgcttcaagacctatgcacctgtcgccttccgctacttccgggagctctttgggatccggccagatgattacttgtactccctgtgcaatgagccgctgatcgagctgtccaacccgggcgccagtggctccctcttctacgtcaccagcgacgacgagttcatcatcaagaccgtcatgcacaaggaggccgagttcctgcagaagctgctccctggctactacatgaacctcaaccagaacccgcggacgctgctgcccaagttctatgggctgtactgcgtgcagtcagggggcaagaacatccgcgtcgtggtcatgaacaacatcctgccccgcgtggtcaagatgcacctcaagttcgacctcaagggctccacctacaagcggcgcgccagcaagaaggagaaggagaagagcttccccacctacaaggacctggacttcatgcaggacatgcccgaggggctcctgctggacgccgacaccttcagcgccctggtcaagacgctgcagcgggactgcctggtcctggaaagtttcaagatcatggactacagcctgctgctgggcgtgcacaacatcgaccagcacgagcgcgagcggcaggcgcagggcgcccagagcacctcagatgagaagcggcctgtgggccagaaggcgctctactccacggccatggagtccatccagggtggcgccgcgcgcggggaggccatcgaatcggatgacacgatgggcgggatccccgctgtgaacggccgcggggagcggctgctgctgcacattggcatcatcgacatcctgcagtcctacaggttcatcaagaaactggagcacacctggaaggccctcgtccacgatggggacacggtgtccgtccaccgccccagcttctatgccgagcgctttttcaagttcatgagcaacacggtctttcggaagaactcctccctgaagtcctcgccctccaagaaggggcgcggcggagccttgctagctgtgaaaccgctggggcccaccgctgccttctcggccagccagatccctagcgagcgggaggaggcccagtacgacctgcggggggcccgcagctaccccacgctggaggacgaaggccggcccgacctcctgccctgcacgccaccttctttcgaagaagccactacagcctccattgccacgactctgtcatccacatccctctccattcctgagcggtccccctcggagacgtcggagcagccgcggtacaggcggcgcacacagtcgtctggacaggatggcaggccgcaggaggagccacccgcggaagaggatctgcagcagattacagtgcaggtggagcctgcgtgcagcgtggagattgtggtccccaaagaggaggacgcaggggtggaggcttccccggccggtgcctctgctgctgttgaagtagaaactgccagccaggcctcagacgaggagggcgcacctgccagccaggcctcggacgaggaggacgcgcccgccaccgacatctactttcccaccgatgagaggagctgggtgtactccccgctccactatagcgcccaggcccccccggcctccgacggcgagagcgacacataatttctatgcagcccccgacccagagccgagctccacttctgctccggctgcccccgaaggcgctgcccaccccgctgaggcccagagctcgggagatgcccgcctcgccgccccaccggacctcgtcctccccctgcacggatgccgacggccgggcccctccccgacaagcctcccagggccccggcaccccggtcggcagcctgcccctgtgagacccaccctcccgagcggccaatcgcatttgagtccttatttggcacagagacggaagcacgtgtgtgccgttttaggaaaagaacaaaaaagacacaaacaaaccaaccagagggagaagagcccctgcccactgcactctttggttctctgctgtgcctgcctgtgtcctgaggaagaagccaggctgttcgcggtggcctctggggacctgagccccgggggccccatcggcctgcagaggggacggctggggtcccgagcaactctgcctccatccacgtgggaagcggaccctcctgccctcagcttgggtttgggggcctcagtgcaggacatctggcctgaacatcgactgtggggacagccctcgccctgccaagcactgcggccactcagcagctatgttcccgccgcagtggggccctgacgcccacctcccaggtgcccctcgagcaaaaacctctggcgcctccaatccagacccaccacagctggagggccaggcctcctcttccccaggctgccacccacgctggcggagctcagggctggggacttgtccttctcttccaacgtaggccactcagcaactggcatggagggcccaggcaacggagacgttttctccatggcaggacagagcgggaggccgggccttgggccacaggagaccagctcagggcggaaggtcaggctccccgccccctccacgtggagacatggcctagggggccaggcccggctccacaggagtctccttcaggactggtgtggatgtccgccgcctctttcttgtttaagtgatgtgatgtctccgaggaggggagagaagactttgtttccgactcatcaccctccaagagggcagcgctcccagtggtgggactcagcccagactgccctggggcagcttcctgggcccgctgcgctcagagggtgctggttggaggccagagctcggcagagtcacccaccctgcccttccccaggacccctgagaggggcttattggtgatggctgtgggaatcccccacttccaagatgtgcccaggatgtgaggagctggagtggaagctgcacctttgggaagaattcctctccagacctggcagagcctggtgtggggtctgagacggccggagaacctcccaggcagggctctgtgttttgtctgttacaacctccgtatgacgccacgccacccgctgttcacgtcccgtcggcctcctgcacagcccacacgctgcgcccggaaggcccctgctgtggagaagccggacccatccccgaggtccccagcgaggacacacactccacgagagcagcccctccactctgcccaggagaggggccgaccctcctcgggaaccggccagccgcgtggctcccagcatccatcaggacaagcccacgtggggtcctccctgcgtgctcagagggtctgtccagccctgggaagcgaccttggcctcagttcacagcctggtgctcatctgctggcaccgggcatccacccatcagcccccgccctgtccctccgaaggacacccagcaggcaccccccggggaggcaggggcagaggtcagaaggggtgtctgggacctggatggccagcagggacaggggcattgtcatctcaaaggcccaacccccagaggccacaccagtcctcccagggagtcctcgagtcgccctgcccagagccctggcaccagagacgccaagagcctgtggggtgactcggagcagcaggtgtggccccgggcgggcggcaccgcgtccagggcagcctccctccgctgagtgacacgggacaccagtgcccggccgacgcgcctttgcaggagaaatgtgcaaacctctgtggataccatttcatttccattcttgtgttgtctccaaggcccctttggagatatacttggtgttggttgtgttttttggttccttttcagagaactgtaaaccgaggctgacgtgctccactgactgtgccgaggggcgggggcaggaggacggcaagacctatttataatatttagcgaactcggtctccctcagatcccccgcgagggaggctgctggacccaccccgctgtcccccatgatagaagtctgtaaataccttggtgaccaatgcccacttcccctcctgggtcacctctgatggctgctgtccactgagaacgtgggcagtgtccaaattcctgtactgtaaagactaaaaggcgtttgctctgagactgacaaggcggaaacttccatgtgtctcctgccaggctctgtccccctacgccatcccgacacgtccccgttcccccgaaacctggctcagtgcaatactcccattgccatggggtccttcaccatggtactgtctccacagccctcagtccccaccccaggagaggcgcctgccacctcctcctcatctccggtggttcaatcgctccgcctgtccccaacccagtcccatttttatggccaaactgattctgaaacaaaatgaaactgcaaacctcgtgtgtcttaactccccccagggatgccactccattcctccgccccgtggtctggtgcgtgacaatccaaagcgccgagacgagggtgctgtgtccctcaaacccagagtggtgggcgcctctgaaaccatacagccactcctggccccaaacactggtttgcatcccaggttcctcgcccacctacccccgccacaccccgtctttttagagatctctctaataaatcgggtaataagca

SEQ ID NO: 188688 - DNA, 3031 bp, Homo sapiens
agcggggggagtttggatgccgccgctgccgcgggctggaacggcgcggcgcgggggctgcaggctatttcgggaagggggcgtgaggaggcggctgcccccgaaggcgctgcccaccccgctgaggcccagagctcgggagatgcccgcctcgccgccccaccggacctcgtcctccccctgcacggatgccgacggccgggcccctccccgacaagcctcccagggccccggcaccccggtcggcagcctgcccctgtgagacccaccctcccgagcggccaatcgcatttgagtccttatttggcacagagacggaagcacgtgtgtgccgttttaggaaaagaacaaaaaagacacaaacaaaccaaccagagggagaagagcccctgcccactgcactctttggttctctgctgtgcctgcctgtgtcctgaggaagaagccaggctgttcgcggtggcctctggggacctgagccccgggggccccatcggcctgcagaggggacggctggggtcccgagcaactctgcctccatccacgtgggaagcggaccctcctgccctcagcttgggtttgggggcctcagtgcaggacatctggcctgaacatcgactgtggggacagccctcgccctgccaagcactgcggccactcagcagctatgttcccgccgcagtggggccctgacgcccacctcccaggtgcccctcgagcaaaaacctctggcgcctccaatccagacccaccacagctggagggccaggcctcctcttccccaggctgccacccacgctggcggagctcagggctggggacttgtccttctcttccaacgtaggccactcagcaactggcatggagggcccaggcaacggagacgttttctccatggcaggacagagcgggaggccgggccttgggccacaggagaccagctcagggcggaaggtcaggctccccgccccctccacgtggagacatggcctagggggccaggcccggctccacaggagtctccttcaggactggtgtggatgtccgccgcctctttcttgtttaagtgatgtgatgtctccgaggaggggagagaagactttgtttccgactcatcaccctccaagagggcagcgctcccagtggtgggactcagcccagactgccctggggcagcttcctgggcccgctgcgctcagagggtgctggttggaggccagagctcggcagagtcacccaccctgcccttccccaggacccctgagaggggcttattggtgatggctgtgggaatcccccacttccaagatgtgcccaggatgtgaggagctggagtggaagctgcacctttgggaagaattcctctccagacctggcagagcctggtgtggggtctgagacggccggagaacctcccaggcagggctctgtgttttgtctgttacaacctccgtatgacgccacgccacccgctgttcacgtcccgtcggcctcctgcacagcccacacgctgcgcccggaaggcccctgctgtggagaagccggacccatccccgaggtccccagcgaggacacacactccacgagagcagcccctccactctgcccaggagaggggccgaccctcctcgggaaccggccagccgcgtggctcccagcatccatcaggacaagcccacgtggggtcctccctgcgtgctcagagggtctgtccagccctgggaagcgaccttggcctcagttcacagcctggtgctcatctgctggcaccgggcatccacccatcagcccccgccctgtccctccgaaggacacccagcaggcaccccccggggaggcaggggcagaggtcagaaggggtgtctgggacctggatggccagcagggacaggggcattgtcatctcaaaggcccaacccccagaggccacaccagtcctcccagggagtcctcgagtcgccctgcccagagccctggcaccagagacgccaagagcctgtggggtgactcggagcagcaggtgtggccccgggcgggcggcaccgcgtccagggcagcctccctccgctgagtgacacgggacaccagtgcccggccgacgcgcctttgcaggagaaatgtgcaaacctctgtggataccatttcatttccattcttgtgttgtctccaaggcccctttggagatatacttggtgttggttgtgttttttggttccttttcagagaactgtaaaccgaggctgacgtgctccactgactgtgccgaggggcgggggcaggaggacggcaagacctatttataatatttagcgaactcggtctccctcagatcccccgcgagggaggctgctggacccaccccgctgtcccccatgatagaagtctgtaaataccttggtgaccaatgcccacttcccctcctgggtcacctctgatggctgctgtccactgagaacgtgggcagtgtccaaattcctgtactgtaaagactaaaaggcgtttgctctgagactgacaaggcggaaacttccatgtgtctcctgccaggctctgtccccctacgccatcccgacacgtccccgttcccccgaaacctggctcagtgcaatactcccattgccatggggtccttcaccatggtactgtctccacagccctcagtccccaccccaggagaggcgcctgccacctcctcctcatctccggtggttcaatcgctccgcctgtccccaacccagtcccatttttatggccaaactgattctgaaacaaaatgaaactgcaaacctcgtgtgtcttaactccccccagggatgccactccattcctccgccccgtggtctggtgcgtgacaatccaaagcgccgagacgagggtgctgtgtccctcaaacccagagtggtgggcgcctctgaaaccatacagccactcctggccccaaacactggtttgcatcccaggttcctcgcccacctacccccgccacaccccgtctttttagagatctctctaataaatcgggtaataagca

SEQ ID NO: 188689 - DNA, 1299 bp, Homo sapiens
gcggcggtcgcagctcgggtccccctcgggcgcccccgccgccgtccgcgcgcggccatggagctggaggtaccggacgaggcggagagcgctgaggcgggggccgtgccctcggaggcggcgtgggcggcagagagcggggcggcggcaggtttggctcagaagaaggcggccccaacagaggttctgtccatgacggcacagccgggccctggccatgggaagaagttgggccatcgaggtgtggacgcatccggcgaaaccacctacaagaagaccacctcctccaccctgaagggtgccatccagctgggcatcggctacaccgtgggccacctgagctccaagcccgaacgcgacgtgctcatgcaggacttctacgtggtggagagcatcttcttccccagcgaaggcagcaacctcacccccgcccaccacttccaggacttccgcttcaagacctatgcacctgtcgccttccgctacttccgggagctctttgggatccggccagatgattacttgtactccctgtgcaatgagccgctgatcgagctgtccaacccgggcgccagtggctccctcttctacgtcaccagcgacgacgagttcatcatcaagaccgtcatgcacaaggaggccgagttcctgcagaagctgctccctggctactacatgaacctcaaccagaacccgcggacgctgctgcccaagttctatgggctgtactgcgtgcagtcagggggcaagaacatccgcgtcgtggtcatgaacaacatcctgccccgcgtggtcaagatgcacctcaagttcgacctcaagggctccacctacaagcggcgcgccagcaagaaggagaaggagaagagcttccccacctacaaggacctggacttcatgcaggacatgcccgaggggctcctgctggacgccgacaccttcagcgccctggtcaagacgctgcagcgggactgcctggtcctggaaagtttcaagatcatggactacagcctgctgctgggcgtgcacaacatcgaccagcacgagcgcgagcggcaggcgcagggcgcccagagcacctcagatgagaagcggcctgtgggccagaaggcgctctactccacggccatggagtccatccagggtggcgccgcgcgcggggaggccatcgaatcggatgacacggtcttcgctggcctggcgggggagcaggtgagcgtaccagcctgtggcgtgagcagagcgtgcagggcgccagcccagcgggtctgggtcccagtggcttcaggatgactgctg

SEQ ID NO: 188690 - DNA, 355 bp, Homo sapiens
tgtcacatacaagctcctggaaaactccatcatatgcttgtaagagaatgagagtattaaccttgtagacttctgtaaggggctaagagaaacactgagctaaataattgaggggatatactatgttcatggcttgaaagactgtaagtattgtaaagatgttcttccgaaaccaatcacagatttaatacaagtccaaacaaaatcccagatatgtgtgcattgtctgtttgtgtatgcatgtgtgaaaaatggtaaattgatataaagatgaaaaagaccaggcacagccaagtcaatctttaggaacaagaaagtgagaggactgaccgactctgatggacattaagactta

SEQ ID NO: 188691 - DNA, 455 bp, Homo sapiens
ttaataatactgaatgaggacaaaaagcactcgaaacagcagagttccagaagaacaccaaatttatatttaatttaaaaaggacagcctcttaattaggcaaatttcacatttttttataaaaaagaaacaattagaattgtttagtgtgaataaaattagtgtgaaatttctcactatcccaaattctatcacagcaaacacagagacatacaacagctggtcaatttaacttacatatcctgttattaaacattacctcaggtccattaaactcactttcttccccaactccttccccacaaaaaagactataaattgtatactgcatgtcataatgggaagatgattacctttttctggggcatgatacatgcagaagctgtaactacaagaaactgaagtaaaagtaacccatattatacatcttcaatgtaagtctcagagacacacca

SEQ ID NO: 188692 - DNA, 366 bp, Homo sapiens
tctctccctattccatgttaattcaaatttgtctatgtggtttaataaggcagaccctgccttcttatgatgagcttgtaacctggacctggtccgagtacttcacccatctgaccatagtaattgttcaggtatagaaatgtggctcaaatcagactaatcatcatcctccctaagactggtattataagaaaggatatactctcaatttctagatagaagcctataaggaccagacagcttgaaactgaagggggtatcttgcctctgagtagagagacttctgaaaataaggccaagcagagcagaaggactggggaagagagaatccagatgacatctctgaccttctggatgtggctctca

SEQ ID NO: 188693 - DNA, 587 bp, Homo sapiens
gtctcaccttggaatagattatatatacttcggtgagcctgaataatttaactttgcaatgctatgtgtgccttttgctgcaatatcccagagcatttattaagggcctttatgagggtgtcatcctaaatgccacactggtctaggctggtgtgcatggcacaaagaggctaaatggtacaaaacattagagatgaagcccagatacaataaagatggagcagcaagagcagagctgagaagcccagatggcctcaaatcccaagataagacgaaaatccccaaactaaagctgtcagacattgaaagataaacatgactctgaaagatgagtaaaaggaagatgaagacacatgggtgtaggaatctgtgaccacattcacagagagctgctagaggtcaagggcacgaacacttggctctgcaaagtggcaaatgggattgttttctggttttgtttgggttttgtattttaagataatagccaactttagcaaaagtacaaggaaacaggcactgtcttattcagagtgggagtaaagacaacacaacccttctggaaacaaatttagctccatgtaacgaga

SEQ ID NO: 188694 - DNA, 272 bp, Homo sapiens
tgaacatacacagattgggcatctaaatctgaggtgggatgtgaaatggaaggggcaagaagcccttcctgggcagtatcttcaatgtggtactttgaggataaaagaatgttaaacagacctgtttgggagacaaggatggcatgggaacattagagatgtggaactatggcaatacctcgcacactcgaaatatgatgagttaggcagagaaggagccaaggtgcatttatggatgcgagtgatgggagataagggtggagaaatggcta

SEQ ID NO: 188695 - DNA, 292 bp, Homo sapiens
accataagaaatgaacccccaagatgatgcttttttgtgctatagtaattttttttaagaaatgaaaaagaaagttttaaaatatctacccagatatttacaagttctaaccttcattgttttctgaagattcaactttccatctggtatcatttccctacagcctgaagaacttcttttagcatttcttatagtgcagatctactagcaatgaattatctgacaatgtctttatttcatattctttctgtttttttttttgttgttttttttttttttttttgagacagag

SEQ ID NO: 188696 - DNA, 350 bp, Homo sapiens
tcttctccctgacatgagaaactgtaagtccaataaacctttttcttttataaattgcccagtctcaggtatgtctttatcagtagcatgaaaatggactaatacatagacagcatgaaaatggactaatacatagacacacacacacacacacacacacacacgcacacacacatacacacaaacaccctagatatacaaataggaagatgattttttctagtcatctgattatctcaggctacaattgtaataactataggtattataggtgtattggtcatggtttcctgattagtattcagccagtttgaccaatatgaaaatctcatttgcaattaaagaaattt

SEQ ID NO: 188697 - DNA, 384 bp, Homo sapiens
agccctgggaagccggaaccacttagagaccatcttttgccagtgtgctgacctctgctccacctcccccaaatggatcttcagttcaaatggatgataaacaccttttcattaaaaaggccagttctgggatggttaaagcaccatcagtcatttacacatccatttgtattaaaaggaaatccagagactcacactgacgcctaggggagattagcagctctttgtgatgtaagtgaaaggaaggtctgtaactttggcctaaggagtgcattggagaaaattggtaggttcctgaggaaattcagtttttagagcaagctcactttttagggcaagctcaccttggtagatgagagttgagtgctggaagtggtaaaataa

SEQ ID NO: 188698 - DNA, 153 bp, Homo sapiens
cttccagggggatcgtaggacgagaagaagaatattctttctggttgtgttgcgtgtgtacgtgtatgtgtgtgctggggttgagggtgtttatgggggcgaggtgtgcaaaggattctggagagctggtgcatgtgtgggagttgtgtggag

SEQ ID NO: 188699 - DNA, 665 bp, Homo sapiens
  misc_feature (660)..(660): n is a, c, g, or t
tcttgccccctgcctagtccgagatgagattgtggaatccagagcctccactgtggccaaccaagccaactgcccttagggctgttccccaggctgtgccttcagtggctctgacatccatatttttctagctggccttcagaatctagaacttccttccccagcacaccctccccgcagatcatgtctgtctgtctgtgtaacagctgcttctctaccctaccacagtcgaaccacataacatagcatttcgtaaggataagatggtgacgcacttgctaggagctcagcactgggttaggtcctccgcacgcctcatgcgattctcacaccaccgtgccaggaaggctcccaactggagtaactggctgggagtggagcccaggaaggctgaactccaggctctttctaccacctgacaatggccccagtgacaccacacaagctttcagctacgtacaaaattgcctttcctgcttgcctctagaatgaagctactgactagaggtgaggggtgacgtatgtgggaccctctccatgacgttagtggtcaggacactggttctgttggtgaggttcctcaggaagcatcctgtagctgaaaaaacaataagcattatccagcaaggggactgagatgaagggaaggcagcagcatgnagaac

SEQ ID NO: 188700 - DNA, 397 bp, Homo sapiens
aagggttctgagggtatgaatatgctggctagtgcctggcaaacagtaggcactcaaatattacttatattttacttatacaaatattaccttttatattttacctatacaaatgatatatatcagaggtactaaaaccataagaagagaaagagaaatcttatcttccttttccccattgagatgacagagtggcatacaaattagagacccatcataaatgcatctctgggttatctactaaccacaggagtactggtggtagtaacagtactaataggattactatcagcagctaacattatgggttacattcataacctcatttattcttcacaaaaccctgatacaattagatatgttcagttattatcccacttcacagatgaagaaactg

SEQ ID NO: 188701 - DNA, 150 bp, Homo sapiens
gctgccctgcgttgctattcagtattagtccggctggttgggttggggaggaatgggcagagaaatcagcccaatgagcctcccctcctctttccctaaaagtaacagccacgggctctggagaacacggtgtgaaaaccacaggaggga

SEQ ID NO: 188702 - DNA, 348 bp, Homo sapiens
agatgagttaggaatgggaggggcaggaaaggaaaaaaaattggcattgagttttttgctagggcaagggggaggattatgggtggcattttagaggaacaggcccacaagccagttactggggaggagacagaagggcaaatgttatattctgaaactattagatagctgaatggtggtgtcagtgaacatgcaagtctggaactcaagagagaagtcagggctaaatatataaacttgagtggccagaataaatatgaatttcaagcaatgggaacaaatgggattacctagaaaagcgcagagatctgccttttataatttaaaatggctcaccaggcgattctc

SEQ ID NO: 188703 - DNA, 445 bp, Homo sapiens
acaccctgcacccagatcttggcatctaaataccatttgctacaagagaacaagagctccttggagagagggctgatgccagggctgggacagggaaagtctaagatgagcctggaacatcttgaaccagaaagcaatggaataatgaggaagatgggccaaggggacagagaagcttgctggaattcaccccatctgtccaaaaggggacaatgtaagcatcaaaagaaataatgatagcattgaatataataggaaaccataagtccatgtagatacaaataaataaatgaacaagtggcaggtttgatggtgaatgagatgttgcatggtttcaaaatccctcttcataaaatgcttaactataaagggcaaaagagtaacttctctgtggagaagcctggcagtcaccaccttaagtgatcagagtgaatgtcatcaataa

SEQ ID NO: 188704 - DNA, 330 bp, Homo sapiens
gaaaatacatgtagactatgacccagtaattccttttctggatatctatctttcctcatattaagtcctgtatgcaccaaaatacatgtacaagagtattcatgccagtcccaaactggaaataacccataaactgtagaatgaatgaacagtcatctatatggtgaaatactatacaggaattaaaatggataaaccatagctaagttcaaaacaaataaatctttcaaatattgttgggtgagacaagttatataccgtattcagtatggatgcttccatttatataaggtacaaaaacaggcaaaactatagtgttgggatgtttag

SEQ ID NO: 188705 - DNA, 271 bp, Homo sapiens
ctttgtaatttttgaaactgaaactaagagaaaatatgtcttgctcacaaaagagcctcatgaataaagcaggttaaaaagaaaacttttaaccaatatatagaagataaagaaacaagggacattgttccaggccctagatccagctgtcatttatgccacagcaccctcctcacctaactttcagtttgctcatggaaagtgaggttctatcacttgcaaaaaaaattacccatattctttttttttttttttttttttttttttttgg

SEQ ID NO: 188706 - DNA, 370 bp, Homo sapiens
aacaaattacctacaccctcccatggcccccagccacagccttggagcctcctctcttccagtcaagcctctgaacagaatagtctctaccagcagttcccaaatgtgtgttacaagaacaccctggtccgtgaaaaagggttcacaggttagcaacaaaagtagaaaatgaaggcacaattgcagcaagctcttcttagaattaaacttattccacttacaggaccatccttcattctgatgagccattacaacatttttgtattaaaacataatttattttagaaaataatgattggataattagagagtgatttggttttcattattctcatctgatcaaataaaagcgggtgactcaacatcaaga

SEQ ID NO: 188707 - DNA, 509 bp, Homo sapiens
atatcaaaatgccatcctgtgattatttgagggctgcaagagagtaatctaacctagcagtgggacatagggtgggacagtcctgctgccaggatgcagtaggaaggtatcctaccaaagccatatgactggatttgaacgcagccttggcactcaatgtccagtgtccagaggcccttgggaatagatgacaccacaaggaagcaacctgcctgacccagaaaggggctgttccatagagcaacgggtcccgtatcctctgcaaatcagtgtcatggggggagaaaggagactggggagagaggctgttctagatgaaaagagatttacggggtccaacacccaactgcaagaggggtcgtcaatgagatgctggcgtaaatgagagagtcgtcaaagggattagggatcattgggagagggtgattatggggtggccctcggaaggaagtaggggatcataactgctcatgtgttggatggatagtggcactgggtcatggaagaaa

SEQ ID NO: 188708 - DNA, 606 bp, Homo sapiens
ggggttgtccattggacagctcaaagctgggctagtgagcaacaaccagctacaaggaagtggaccaaagggcaagctggcttaatgattgctgctgcaagcccggttggattttattgttttgtttttctcttgctcaattttatacaattttcttgggatggttttagtgctagcctattcctggcccatgcagaactcctctattaggcaacttttgctggaagactccccatattcgtgtccaagattttctcagaactgtataacactgaggatcttgctactcaatcctctttccttcggtcctttcatagaatgaaagttgtcagactcaaaatgaggtcacttgtgtcaaacacgtggagctggggccatgaagggaagattctcatgcacatatgcctcataacaagaactctcacaaaaggctctgcaaaaactacaactttgcacaaaagctacaaccttacacaaaaagtacttctgcaaggacatctgcctagcaactgtctgtccagccttggactgattctacccttgttgatttttgtagccaaggatatttgtctcaaacaacttgtatcaccctcctttcctcacttt

SEQ ID NO: 188709 - DNA, 488 bp, Homo sapiens
cattctgtaatttcccaggcaagctatttaaggtgactatctctctacatatttgagatgaaaaacaataacatgacaatccatcccttcttaggtttttgtaagcagacttactacctgtgactcagttttgttctcacagggtactaattaatccttcacgataataacttgtcaaattccattacttctgtaaaggcaatactttatatttgtttgtattcaaattttaaactgatgttaaatgccgtgggtgcaactgcaggttaaaaatatgtgtttgaatctcttattctttttgcttggcaatgtatgaaataactgctctttctagaaatcttgatgatgaagtggcctgttgttttgtcacctaaaaatgcaataatgttcaaattaagcttttctttattaacatcacttgattgtgtgccatatttagagcttagtgaaattttaatctacacattgattaaatacattttatttat

SEQ ID NO: 188710 - DNA, 245 bp, Homo sapiens
cgactctttgaggacccctgaccttccgtgccctgagatgggtgcggggagatgagactaggctgtgggcgtccatgatgatctgggcaggcttgtgtcagagaaggagtcaactgtggatgggacaggcagccccagggattcaggagtgatgccccagcctcttagataggagatggagtgtccacgtcaaaaacgttgtatatatttttactcacttttcacattaatgggccaaaagttaa

SEQ ID NO: 188711 - DNA, 630 bp, Homo sapiens
gagtgaccgtgcccaggcagaattttttcttttaggtttctgcaaatacataaaagtaaatctcaagcagcttaaattaatcaaggaaaaatgtgaggctctgggatcttgaacaaaaagagactgaaaaaaatttggatccactacaaactagtcagtctgtagtacaaaaggcaggacaaaagaagacagccacactaagtccacctgttgtctactacagccgagtggctgttcttcttttgttctgaatattggcatggcaggctgcctcctatggagagctgttatcttagtatgaaaggctaatagaatacttgcttagaatactaccacagcccatttgtgaatattaatgacccaggctttgatatcttgcctttgccaatagactttttaccaaaatcaaaaggattgtatgcccagggctgtcttggtttctaagaattgtccaaaagacatatgacatgttttctgtccccatgttcattacagttggaaccacaaaacagtctcattatgtaacacctggggttcattcagtacatttggtgattgacactgtcacatggtaagatttatgtggaccggcatgtatagccctttcaagaagtagtaattaagtcaaaa

SEQ ID NO: 188712 - DNA, 758 bp, Homo sapiens
ggaatgttgtgactgttttgatcttctatacaaaccactaaaactttctccagatcagcaataaggctgttttgctttcttataatttgtgttcactggaatggcatttttaatttccttcaagaactttccctttgcattcacaacttggctgactggcataagaggcctagcttttggacaatctgggctttatacatgccttcctcactaagctgaatcatttctagcctttgatttacagtgagtgagatcagatggtgtgactcttccttttatttgaacatgtagaagccattgtgggggttttaatggcctaatctcaatattgttttgtctcagggatagggaaccctgaagagggggagacagatggggaatggcaggttggtggagcagtgagaacaaacatttatcagttaagtttgcagtcttatatgggtattagaattttttttaataaaaagctcctcaagtgagtctaattccactctctaaaactcatcccttgagaaaggctgaataacaatccacatatacctccaaggcagagagaccttgctcacccatctcaaaactgcccccactcacctacctagtcagtacctgaaatgtaaatattatttggggctgggcatggtggctcacacctgtaatcctagcactttgggaggtcaaggtaggcatatggcttgagcccaggagttcaagaccagcctgggcaacatggagaaattctatctccacaaaaaatgcaa

SEQ ID NO: 188713 - DNA, 460 bp, Homo sapiens
ccggggccccctttttttctgcccctccaacctgggggaaaaaataaactttttttcccaaaaaaaaaaaaaaaaaaaaagagagagagaaatatacacacagagagacagaaagaaacaaaggcaaagagaaattgaggcagaaaaaattagaggagagacagacagacaaggctcaagaaagggtctgcagaggaatgagagaagacaggcaagtgagacccagagagaggctgcactaacctgacattcttgggtgctcacagaccaccctccctccagctggggccagtgctgagcctggtgtatacaggtatcacttaacaagtgcagaataatgcccggatgactggagagccctagatgtagaaagaagagattatgggggagtaacaggtgggggtagaaagatggttttttatttgttttaaattagggacagggtctcactctgtaccca

SEQ ID NO: 188714 - DNA, 589 bp, Homo sapiens
gcctcaaatgcaagaaagatgaaaggcagcaaattactattaaaattactacacaaatcccttgaatatgtaaatgttttaatattagcagctaatgaaaaacaatggtgacaacaaaagatggctcacatgctgtgtcgctaacattactgaaatgctactaattactaatcattataaaaagttactaattactaatcagaaacagtatatcctatttcctctataattatgatttcctcgattattaaataatacctgaaatcacggtggttcacacccgtaatcccagcactttgaggggcgaagggaggaggatcacttgagcccaggagttcaagaccagcctggtcaacataatgagaacgcatctctattagaaaaaagaaatctgagccaggcacggtggctcacgcctataatcccagcactttgggaggccgaggcgtgcggatcacaaggccaggagattgagaccatcctggctaacatggtgaaaccccgtctcccctaaaaatacaaaaaattagttgggcgtggtggtgggcgcctgtagtcccagctactctggaggctgaggcaggagaat

SEQ ID NO: 188715 - DNA, 385 bp, Homo sapiens
gccataggtgaaagcttacagtcttctcaggatgtttctgagtgtgtatctttcctaggcatactgtgactttctaaattcccccccccccccacagctgcctttgaacgtcctaatttcccaaagcgtcaaaaacaattctattttaagactaaataatacttttcaatccttttatgtatgtaacagacgtttattcttctcttgctaacctgaagtcttctttgcattaaatttgacatgtcagagttgatcaacaatgatgaaagagtgagattaacactgtaaatggaatgttccaggggaagatagaatgaatcatagttcaggttctcattattatccacagatgatatagttttctaaagattctttctgcccagtc

SEQ ID NO: 188716 - DNA, 532 bp, Homo sapiens
ctggattcagtttgctgtcattttgataggatttttacatccttgttcatgaatgtgttagacagtaattatgtattttttagatgcggcttattttttcccaaactatttaaaatagttttttattttgtagtataaatcagattaaatgttaagccttcagagttggctggtcacatagacaactatggctgagggccttgactcaaagttttagttataaaattataaaattacacagcgtagttagccgtaaaacctaccttgggtaaatgatacatactttattatatgacttactattttctatcttcttccattatcgttttataaatttctaaattcttatagttataaaaagaaaaaatatatagaattattccaaaaaaattatttttccattttttattgtggtaaaatacatgtaacttaaaatttaccaccttaagcatttttaattatacagttcagtgatattaagtacattcacattgttttacaaccatcaccaccatctatttccagaacattt

SEQ ID NO: 188717 - DNA, 1362 bp, Homo sapiens
gtaccattttgtatcttttatactatattgttcttgtagtttttctatgtttagatatacaaatatcattgtgtgcagttgcctacaatattcaacacagtaacagtgctgtacaggtttgtagcctaggagcaataggctatatcatatagcccaggtgtgtagtaggctataccatctaggtttgtgagtacactctgtgatgtttgcacaaggacaaaatcacctaacgacacatttctcagaacatgtcctcatcattaagcgacgtgactacacacacaatttgtgcatttgccttaactatttccttaagtggaattacagaatcaaaacatttaattgtttttttctttttttgtgagatgaagtctcactctgtgtcccaagctggaatgcaatggcaggatcgcggctcactgcaacctctgccttccaggttcaagcaattctcttgcctcagcctcccgagtaactgggattataggcgtgtgccaccatgtccaccttaatttttgtgtttttaatagagatggggctttaccatgttggccaggctggtctcaaattcctcacctcagatgatctacctgcttcggcctcccaaagtgctgggattacaggcgcaagccactgcatccggccagcatttaattctttaagactttagaatttctctctactcaatagaagtttattcctactctgtggcagtactattctaggcactgagaatacgagaggaggctcagtgaaccaaacagttcctgctcttaagaaggttggtgggaggtcaggattaataagacaataaataagtaaacaaataaagaattaatttcaggtagttacaagtgctatgaagtaagacaagttgaagtagtttctggggtgaaaatgtggagtaggtggtcagataagcagccttcattgtagaagttaggtttgagttaacatatggaagaaagaaaaagcatggaaggatctgtggttaaagcatttcaggctgagtaaactgatatgcaaagacttaaggcaggaacaagtttgacatgtttgaggaataaagtcccagtgttgtgggaattcagccatgggaagagtaatagggatgagatcgaagagctaaaggaccacagtcagaagcttagattttatccgaggtgcataagagaggtatcagagattttatgtaataggatgacatctaatttacatatttagaaaatcatttggctgctgtgtgaggaatggattagagataggagtatttgaaaagacaaaatggaaacagagagacaaattgaagttctgccctaattcggaaattgatggttgttctttgtgctaaggtagtatcat

SEQ ID NO: 188718 - DNA, 200 bp, Homo sapiens
tctgttttcccagctgtaaaagggagctaataatagctcttgcggctagcgttggatcacccaataaaccttgtaagcatatgctgagggcacacccacacaggcatgcacgagaaggaagaatgccatagttgccatttcataagcaccacgaagataaacatcatgggaaaaatagcaactttaggctgggcacggtg

SEQ ID NO: 188719 - DNA, 405 bp, Homo sapiens
cctgcctcagcctcctgaatagctgggattacaggcgtgtaccaccacaccaatttttgtatttttagtagagacagggtttctccatgttggccaggctggactcggactcctgacctcaagtgatctgcccgcctctgcctcgcaaagtgctgggattacaggcatgagccaccacacttggccatgagatgagctttatctgtgcaaagtctctctgtggtcagctggggctggggccgtgggtcagttctgaagggcatttccatgagggtttgaggcctgagattgtgtcctgggccctctggccccagtggtgagccgcatgctcatgtggcaggaaggatctggttcctctgataacctgcttaggctgacccctctttttcctggaggacggctgtc

SEQ ID NO: 188720 - DNA, 348 bp, Homo sapiens
tacagtagtgcatgttttctgcagtagaagaaagaaagaagcagtctatttctagtggctgggggtagggaggtgctggggaagagcaggaacctaggaagagtcagcagagggtagccacaccccagccccatggacgagactcctgaggaatccataaaactgcgaagtactaagttctggcaacagatctcaaacctgctccttagcaagagagctaaaaagagagtgtttcttatgtactctgttaatttgactcttaaggcatataaacaatagggagaccctgtctctacaaaaataaaaaacttagccagatgtggtggcatatgcctatggtcccagcta

SEQ ID NO: 188721 - DNA, 600 bp, Homo sapiens
ttcattctgtcaagtaggaggggaccagccctgtggggaagtaaaacagtgtttggaagctcttgctgtagacatggcctgaactaagacagtggaaatgggaatggagaggaggcatcagatgtgagcaatattaagaagatagaatccatagaattggaggctgattatgggaatgaagaggtaagaatagcgcgattgcctggctttctggcttagggaactgaatgggtagtaccattcagatagagagtatgagaggtaaattagggaagtgacatgggaaaaaatgcattttgaatgtttttagtttgaggtgtttgtagcacatccaggcaaagatgtctaataaggtgggtcagctaaaggaaagagcaagagtaaagatacggaggcaggagagggcctaaattgttcagtgatactggggcctggagttttgcagaagaccagactgcaaaaaaggttagatgtcggccaagttgtgaagggctttttgtttgtttgtttgttttgagacggagtcttgctctgttgcccaggctggtgtgcagtggcacaatctcgggtcactgaaacctccacctcccaggttcaagg

SEQ ID NO: 188722 - DNA, 311 bp, Homo sapiens
tcatctctctaacatttttgatatttagtgtttaatctcttttcacatgttttttcttttcatttagggagagctttggaagtttgtcctctacatcactgagttgattctccgcagtgttgtctgttattctattcatggaaatttaagcctgttgtttatttgtatggtggtctggcttattgaggcttggtctatttcacttcagactgcttctcagtctgctttctcattttgataggaagtattatgaaataagttttaaatactttaaacttttgagactgagtgcacggacttaaattctagct

SEQ ID NO: 188723 - DNA, 267 bp, Homo sapiens
gtgggagggcctagaggccccaaaatgggaagccacagcagtggcatccagggctaaggctggggccacggagctggtggtggcaaggccaaggccaaggagtaggtccccatcatcaaactgggcagcatagtcaaggacatgaagattaagtccctgaagctctatctcctctccctgcccatcaaggaggctgagatcatcgactttttcctgggggcaaccctcaagaatgagtttaagattatgccagtaaaaatggagact

SEQ ID NO: 188724 - DNA, 357 bp, Homo sapiens
cagggcagctctatgctgcctatggctgagccccagggcacacagtacaggggtagtggggagaaagataaagaaagagagaaagagagagaactggggggatgaattggggggtcagttgttgactgactgagggacactacaggtggtctgaggtccaagtataatggtgggggaaaagccaccatggttagaggctgggcagacaggctggggccagagtgggaaggaaaggctgtgaacaccacagaagggagcaaggatgtaagccccagggccatgaatagctgtggacaactatggacaactgtggtcagctgtggagactcttgaaagccagggagtaacacgatcaac

SEQ ID NO: 188725 - DNA, 581 bp, Homo sapiens
acacaaaaaaacctctatttgcatttgcacttaaattcctccaggtgttaagttacatttttagtgaaacacactaaattgtaggtagcactgtttgtagacaccatcattgcaacactgatcaacaaaatagccactaggcacctactagatgaaactgatcagtcagatctggacttggcctcagattctttctctgcaagaagattagaaacatacatggaataactataatcccacacagaaagcagtaagtgccttgggagttatatatagtacttggtataattaaaaaagggagcattcaaaaagggagcgcttatccttaggttgtaagggaagggggtaggggctggagagggaaatacagatgtagagagatgccaaaacaaagtcagaaaccccctctgcccagccatgaatgttctaccatgtgctaagccatagtcccaaatccccaaaccctttggacagaagcaaggagacaacagcaaatacgtggtggtggcaaagtacagcgcaggcacaaggtgtttctgttgggctggaatctagggtgtgtgtaagactgtgaaggaaga

SEQ ID NO: 188726 - DNA, 299 bp, Homo sapiens
ttgaagtattcatgagacacctcaatagctttctctacaggcaattggatatatgaatttggcaatcagtgatgtgggtggaattagagatacggtattattagcatataggagttggttgatacattgggaattgatgagctcactcaaggacagtgtataatttacttgaagcaaaaaagaaagtgagggacagagtgctatccttatatttaagttgtacagaataaagtaaatgagccaagatgggccagagatcagaaggatgggtctcagccagatcaccctcatatccagct

SEQ ID NO: 188727 - DNA, 507 bp, Homo sapiens
ttggaaatgtgagagaacatttcacaagcaatccagacccacttcagaataaatcggaatgtggcaaaaatattatgagattttgaacttgggtaactgagaaagcagtggaagtattactattcattgctcaccctaagtgcgctgtgaaagacctgactgacagtaaagatggtttgtgacgttaatgctggggctggttatggactttttcatttggtcaatgtgtaggaaagatttttttcttttttctttttcttttgtctttttgtcagttgcatcggggcttgcaaaagctgctgttttcaatacaagactgttaagtgctgaaatacaaatcatttctaccttcaacagatttggccagtataattaaataaaaaggaggtgctttctaaaaaatcctaagaggataaaagcttttatatagtgctagccgtagataatgatttcaacccgtattctagcaatgagggtgaatgttgatggatcaaatatctttctgtg

SEQ ID NO: 188728 - DNA, 317 bp, Homo sapiens
gatgtttatcaagacaccattaatagagaaagaaggcaagctagaagaaggcaagtagaagaagatatttaaaatacatacacctccaacaggacttaaaaacataaataggcactttacaatagaggatatgcagatggccaatacacatgagaaggtgctcgacctcattgatcatcagggaaatacaaattgaagccacaatgagatgtgtatacctttaccagaatggttacaatctaaaagaaagtaatactacaatagactcaaaaacaccaaatacctagcaatacattacacaaaaaatatagaatact

SEQ ID NO: 188729 - DNA, 508 bp, Homo sapiens
ctggcagcatcttcagaagataaatgacacactgctcctatttgagcaccatcaagaagagtcttgtataaatttgttcagtcctgtcacattctcatgagaaaacaagataagattatcttattttaaaatgacatattggatttaaataatggcagccagccttcattatttcaatttcataaaacaatgcaacaaattccttttcttaatgattctttaatatggtgtcccaatttctctcaaatcactagtgtgaatgtcaagtggatgctggctttggcactactctaagagatgtatctaagaacctaacagaggactaagcaatcttgatgtgtgtaccacggatgtcttagagataatggcagggaattccataggaagttggcagatggtcttttattcctataacactccttggtctttcataatatcttaggtactaactcataatgtcaaattttagaggcttaaatccttgtctttcaccttagaggaaaagctt

SEQ ID NO: 188730 - DNA, 1034 bp, Homo sapiens
tactttttgaaatatccgccatcaattcatcttgttgagaatgtttagatttctcttcttttaagtctttttctagacagaggatttcatcctcaagttcagaattggacctgttcagcttttcacaggttgcctccaaacttcgtgcttcttctgctgccgccttctcaaagctggcatcctctaaagatgactctacttcatagccttcatactctttttgaataaggctaaacttttcaagtagtttacatttttcttcaattagtccagaaagcgttgcaccaagtttttgctctcttcccacgtaaagccgactcctaaccgatctaaaacttctccacaaaaaaaggagaacaacaaaaaatccaataacagctgcacataccaccagttccgatggaaaaccataaggattctcatctggtctcatactctcaggtagtgctgccacaactctgcgtagctcctccaggaccagccccaggtagggctgaggggtagcaccaggctcctccatagcgtcgaggctgctctggcggtcaccgcagtaacactggccacaacaagcggtggagaacacgcagccttgggtctggaacccgaatgcgcacgtgacaaccaaccggagcggaccactgtggagcgggctgcggggggagctggggaacgcgggcacccacaggcctcacaggcccatgttgtcccccaccacctcccctggccctcttgttacacttcacatcctgaggcagcgctggtctgagcccggcccgccttagttctggcagttttcacatcacatattttgaagctttattttttggtgaatacacttttaaaattgctgtcttcttcatggattaaacctttgatcattatataatctctggttttggtagttttctttgctttatctgatatgcacacagacactcttgctttcctttcattaatgtttgtgtaatatatcttttttcatcctgttaatttggcctgccctgtattggtaaaattcaagtgagtttcttgta

SEQ ID NO: 188731 - DNA, 266 bp, Homo sapiens
gaccatgcccgactaatttttgtatttttagtagagacgggatctcaccatgttggccaggatggccttgatctcttgacctcgtgaccccgtgacccacccaccttggcctcccaaggtgttgggattacaagcatgagccactaaggatttgtttttaaaatttttttgctttatttttttcttctctttttttgtactagagatggtgtcttgctatgttgcccagacagatcttgtactcctgggctcaagttgtcctcctg

SEQ ID NO: 188732 - DNA, 530 bp, Homo sapiens
atatttgaacccgggcaagtctgactccaacatctgtgttcctaaatattccccacgtggccgtggggaaggtcaacgcaatgaataacgagaaagaagacacacagcttagacagattttatgaatcagaattaagcaacataagttgcccgtctcccccttcttccctcctcccttcttccttcccctgcgggcatcgtcggcccttgcattcgcatcctttgcaggtgaaggaatggcatggaatctcgcgtgagaacttcatggttccaatgtcagaattatgtagggataattagaattcttaggccctggtgtgatgtagtaggaagaaaagaggttatggagttggccatagataaaatagaatctctgctctgctaacttctaattatgtgctttcaaaaaatacatttcccttcctggatattcagtttcctgatgtggataacccatcctgatgggcaattatacaagaaaattgatgttaagttcctagcacggtgcctggcacattgtcaatgttcaa

SEQ ID NO: 188733 - DNA, 111 bp, Homo sapiens
aaggtcctttggaggggaagcccaaaaagacaatcactgacttcctgggagggcagaggatgaggatggagaatgcacttcctactaggacatgaaaccagttaaaacact

SEQ ID NO: 188734 - DNA, 314 bp, Homo sapiens
gccccacccctatctcccttcgctgactctcttttctgattcagcccgcctgcacccaggtgattaaaagctttattgctcacacaaagcctgtttggtggtctcttcacacggacacacatgaaactccctattgcaattgtttccccacaatcacccagcttcctcccttcctcccatccagcctgctctcatcaccatagccagaaaccatccttttaaagcacaattcggatcctgaccctctactgctcaaacatttccgaagcttcaggtcactcagagtcagggccaaagtcctgatacagcctgca

SEQ ID NO: 188735 - DNA, 461 bp, Homo sapiens
ctctttagcttttttcaattagtgtgtgtatggcatatcttttcccagcctttcacttttaaactatttatgtctttatatttaaagtgggtttcttatagacagcatagactgagtcttgcttttttgttttttgacgctaacctgacaattctgctttttactttaatttttaattttttttttttgacagagtctcactctgtcacacaggctgaagtgcagtggtgtggtaatagctcactgcagcctcaaactcctgggctcagtggctcctcctgccttagcctcctgagtatttgggactacaggtacgtgcctctgtgccaacctaattgttgctttttaattggaatgtttagaccatttatttgatgtaattcttgatacaactgggttccatctactatcctgcatttgtaccccaaccccatgtttgtcccatcttctttcttttctcg

SEQ ID NO: 188736 - DNA, 395 bp, Homo sapiens
ccacaggtatcctgttaaggacgttcaagagatgtgtagtattccgtgtgggaaatatcattagtctatttaccaggacataaaattaccagcgtatttattagaaaattagactcagtcagttgtcttccttttttccctgagagtgttccctggtaaagtgagtgaatgtatctgtctagctgctttagctcctaccttcctagtgattcacccttatttttgtacgtagcaatagtttgttccttttcattcatatagtattccattgtggtgcatcctgcacagtattttatccaatcatcactggtggacatttgttttccagtttggggctattacaaataatactgctataaatattattattgtacttatcttttggttggtacata

SEQ ID NO: 188737 - DNA, 417 bp, Homo sapiens
actttattcatttcgctgttccaccagtacccaggtagaaagccttccgctcttgtgagaggctgaagctgctgaagtttgtttttggtttggcctatttaatgtgtgttcactgaatggacactacagcaacaatgaacaaataacctgttttcttcgtctgtggggagttagaaaaacccttcctggtttaacactgcctttcaattagagtctgtgtaggggaaacgcagtagttcatcatacgtgcttactaggttttttataattagaatcacattttggtgtttcttatcagaaaagatattcatgggtttgaggataggctaatgtgaaatcaaaaggtggtttgggcttctttgtttttgcctcacaaaaatgcctaatggaacttttaggcttttgtgtttgtacata

SEQ ID NO: 188738 - DNA, 386 bp, Homo sapiens
aggcctatggtgaaaaaggaaatatcttcgcataaaaactagatggaagcattctcctaaacttgtttggaatgtgtgtactcagctaacagagttgcacctgtcttttgatagagcagttttgaaacactctttttgtagaatatgcaaggggatatttggatagctttgaggatttcattggaaacgggaatatcttcatataaaatctggacagaagcattctcagaaacatctctgtgaggattgcattgaagtcacacagttgagcattcccgttcacagagcaagtttgaaacaatgattttgtagtatgtggaactggacatttggagcgctttgtggactattgtgaaaaaggaaatgtcttcccataaaaactaggc

SEQ ID NO: 188739 - DNA, 431 bp, Homo sapiens
ggaaaaaaaagagtttcagtctttgaggcatgcagggttattaaatatctgctctacttcccaggcgctaatgagcaacaagatccgcaaccaagagaaacaaggcctggactaatccagaagagtcgctgaaggacacagcccagagctccaacctctgcccatccatgctaaaggctcatccggctcgaacacttgatgaccaccggatgtcactctcaaaagacctacagctgagggaaagcccagggagtatggctcaaccattgctcatcaccacgggagtccatctgggtaacctggaacaatgacagtggtcagaggttttgatctaattacacatatgtcaggttttgcatatgcaaaagcagaagggggaagaaagaaggtacagcaccaggccccaactgccacttcctcttatgccaggc

SEQ ID NO: 188740 - DNA, 577 bp, Homo sapiens
ccaaatgtaatgaaaaatataaacccacagacctgaagctcaatgtcaagtacaagaaatacaaagaaaactgtaacaaatcacataatcaaattgctcaaaaccaatgatatagatcaaatcctgaaggcagctgggaaaatagtacatgttattttacacaggaacaaagataagaatgataccaaatttcttgccagaaatagtgcaagtgagagacaacagcagtgcaacttgatctttaaagtgctgaaggcaaaaactgcaaacctagaattttatgcccaatgaaaatatattttaagaaagttaaataaacatattttcagacacataaaagctgggagacactttgagaggctgagctgggcagattgcttgagccccagagttcgagaacagcctgggcgacagagcaagactccatctcaaaatataaaataaaataaaataaaaatctctttgttctgggattcagcagagacagagtcttgctagagacataaacaaatatgacagtctctgcgctcgaggagcatatagtctagtgaagccgatcgccataaaaacgcatggc

SEQ ID NO: 188741 - DNA, 723 bp, Homo sapiens
ccaaatgtaatgaaaaatataaacccacagacctgaagctcaatgtcaagtacaagaaatacaaagaaaactgtaacaaatcacataatcaaattgctcaaaaccaatgatatagatcaaatcctgaaggcagctgggaaaatagtacatgttattttacacaggaacaaagataagaatgataccaaatttcttgccagaaatagtgcaagtgagagacaacagcagtgcaacttgatctttaaagtgctgaaggcaaaaactgcaaacctagaattttatgcccaatgaaaatatattttaagaaagttaaataaacatattttcagacacataaaagctgggagacactttgagaggctgagctgggcagattgcttgagccccagagttcgagaacagcctgggcgacatagtgagaccctgtctctaaaaaaaaaaacaaaaattaggccaggagcagtggctcacgcctgtaatcccagcactttgggaggccgaggcaggcggatcacgaggtcaggagatcgagaccatcctggctaacacggtgaaaccccgtctctactaaaaatacaaaaaaattaaccaggcgtggtggcaggcgcctgtagtcccagctgctcgggaggctgaggctggaaaagtggtgagcattgctcaaaaacattgcaaggcaaacaatctacacaggactggggcaaaacctgacagttgagactc

SEQ ID NO: 188742 - DNA, 279 bp, Homo sapiens
taaagcagtgcttctcaatctttaatgattttgccacttacttgtgatctagttaaaatgcagattctgattcagtaagtaggtccaggatggggtctgagattctgcattactaataagcacccagatcatgccaaaagtttctggtgtgcagatcacactttgggtagcaaagatctaaagtacctttctaaggggaccttcacacactgttggtgggaatgtaaattagtatagctgctatggagaacagtaaggaggttcctcgaaaaatcaaaa

SEQ ID NO: 188743 - DNA, 470 bp, Homo sapiens
agcatgggaaatgggaaagaactggtcaagcaacttggaaaaaggggtcagggttggagagtgttgcactctcatctgtgaggcagtgcagcatcaggataaaaacatagggtgtcaaggaaaaaaggggtgacagaatcagatggggagaagttattgctgcagaccaggccttcaagaaagtgagtgccccatgcacaggctccatgtggacactgaggtcacctagggtgatgtcatgaattgcggtagaagacactctggagcaggcaccccagtcttccatgaatgagaggaatgaccaggagaaggcgaacaacagcaaccaggagggctcccgctgggcaggaaggatctccatggaatgagatggggggaaacacacaggaggacacaaagctcaaacccctgatcctgagatacacaagggatgagaaggaggagccacaggagagggcttcaagaacggg

SEQ ID NO: 188744 - DNA, 463 bp, Homo sapiens
gagctaggactacaggtgtgtgccaccacgcctggctaatttttgtatttttggtagaggcggggtttcgccatgtggcctaggctgatctcgaactcctgacctcaagtgatttgcctgcctcagcctcccaaagtgctgggattataggcgtgagccactgctcctggcctcacagagtgttttgaggatagaagcttacacccgatttaagttccttgtctacccagacaactaaatttacaactctttccaaacagtttttcttgtcattatactttccttaaccttagggaactatgaaaacaaattctggttttataagaagtttctttacatgttcctggaaactcaatcctccacgttctttctttgcctggacgtagagtatttcatgagtaccccattggtccggaggtcggatttctggtacccccagccctccagaacgtggctgctaacc

SEQ ID NO: 188745 - DNA, 277 bp, Homo sapiens
cctgaccacggctaactttcctggtcacaactactgaccacttattctagtacctaattaacagaaattctggataaacaagtagaaaaggcatactggagagtcttttgtaaatacaaagagaagggaactagccagagttaaccatatactctgtaatacacagtagcaaaaaaaacaaaaacaaacaaaaaaaaaaaacactacgctttcagaggctcttagtaagtatgatcagataagaacaccgttataaacgcatgaattctacaatgta

SEQ ID NO: 188746 - DNA, 524 bp, Homo sapiens
gagctcggtacccgtgaagcggcttgtgtatgtgttgggggaggggcgcacacactcttacatgtgtctaaaatatttctggagggaggataccttctggaaggtgaactagaaggctagtatggatgggagatttattcttcactccgtttttgtactgcttggatttttaaattttttaaggagtgtgtgtattaaataattactgtttctaaacttttaaaaaccaatgtaaatcctatcctcactactccactgcctcattgaaggtggagaaatgtatcccccatggtggcgccctctgcactgccagccttccaacaggaacggcagtggcattgcctgaccctcctcactttgccaagcgcccccactcacatcagtctttctcatttaagcctcataccacctgtggaatgggtgctgtctcatctgatgtgaatgagcctgaggctcagggcgaatgcctggccaaggtacagccagtgagtgggagagtgagggctcatacacaagccgcttga

SEQ ID NO: 188747 - DNA, 176 bp, Homo sapiens
taaaaaatagtgcaaacaaatgagtgtaggtctttgtgaagtctagaaagaataagaatgtgtcttggcgcctcctgcattttctagggaaagttctggctagtagctagaagaggttaaagaaaatacccgcttggggcaatcatcaggaaaaagaaggttgtatccttacccca

SEQ ID NO: 188748 - DNA, 350 bp, Homo sapiens
tggacattggggttgtttccactttttcatcattatgaatagtgctgctatggacattcagatacaaggttttgtgtggacattctccacctcctgtcaacacttgctattatctgtgttcttattttagccaccctcatgggtatgaggatggcctagctgtcatctgcatgtacagcctcttgttcaccagttgccttacctccaggcactctccttgcccccatctttcccactgtggctgagagggaacttgctttttttcttttgagacaggtctcactctgtcacccaggctgcagctcagtggcatcatgacagctcactttggcttcaacctcctgggctta

SEQ ID NO: 188749 - DNA, 332 bp, Homo sapiens
cagacttaaccttcagatcggagaaacctctgctaattgccagctgctgccatcatgcttgagagtgatttgtatttgggtttgcctagcccgctcctttacacgcttgggatttaaccacctgacaactgatcctgaatcatgagcaagcagctttccatcgctcccaatctcccctccatctaatcagtttgctgcgagctcacagctttcaatgcatgccattggaatgacgcacctgaccgctagctgcttctaacccagctccacctgagttcaaatctctgcaacggaaaactaaacctgatatcacctttgcaagtcaagttgat

SEQ ID NO: 188750 - DNA, 280 bp, Homo sapiens
atttcacagctttctttccttttcattaatatactagtaccacacttttaattaatatagctttatgtagcatatacatattaatatgtgcctagcaaatcctccctaaattttctctctatttttttgtcagaattttctagtctattgttccttgatgatgtttccatatgaatcttagagtcaactagtctaattaaaaagaattctgggtttttttttttatcttaaatttatggattaactagagaaatgtcagttttgtaatagtaagacttcc

SEQ ID NO: 188751 - DNA, 673 bp, Homo sapiens
gcaggcagttgaagggcctcgacttcctgcatgtcaaatcaacatctcagcgtccgctgcagtgaagggcgggcagccaccggtcaggcaaacgcttgacttgggcattcatacagtaaacagacacattatactccaaaaagccagctcttctgggcaactgctgtccctctggggtcctcagaggtggaattctgccttttcactcaagtcctggctgtgatcataaaggcagcttttaaccctttttaaggaaaagaatggtgagtgaagaaagaaaacaaatgactgtgggtggcaaaatgcagccttcattttaagaagtgttgaattagaacacttcactatgctctggccttgaaagctgccagccacatcgcaagctcccttagcctccaggggcctgggctctagcccctccacctaatgcaattcactatggaaaaggtctgtccgcaaggtatctttgatcatgaagccatccagcttttgggatatatgttaatgtgctcataggatgtttctctagaggttaactaaaatcttaccttttacatctcatctctcccactcccgccatcttaccactttctcacggctttcatataaagcaagcttgtccaacctgagacttgcatggcccaggatggctttgaatgtggcccaacacaaa

SEQ ID NO: 188752 - DNA, 335 bp, Homo sapiens
ttttcattctgcatagccaagtggaaagcacaagttggtttctcccaaggcaacaaaaataaaagttgatttctccctatacacttaggtatataaagaaatggctttttaaatctatataccttttaaatattcaatattgattttgatctactgggaagagctgaaacatcattcttgattctggatgcttaatcaattccttgttccaattagatcaagagacacttcccaaacttttctgctggatctttaaggtttcatccctgggaaaggcagtttcctctggctctaaagaagcatgttctgatttgtgggatcagatgggaagctgg

SEQ ID NO: 188753 - DNA, 259 bp, Homo sapiens
tgttcactatacacccaaatgtacaagaagtacacagggaggacacatgcacacagactacagatctagaaatgcctgtatgcaccagtacttggagaaaggggtatggacatacccagagacatctctttcaaagtagagaggtctcctgaggagggattccctggagtgaggagctggccctttaagagagtggttctccctcctagtccttttcagggcacctgagcttctacccacctaccttcccacccaccca

SEQ ID NO: 188754 - DNA, 403 bp, Homo sapiens
ttttactctgagcagctatcataagcacacactttaacactgtaatttcacatatacatgaacatataaatcaaaattattaggatgcaatgaaggttcagaaattacagatagtaaacatagtttctcaggacctagagttgactcaccaaggttgcgatttaaattagaatatattttaacttaaaaaattgtgttttataagcacttacaatttagtagggctaatatttaatcagccaaggcaatttactgttataatgccataacattactacctcattttttatttgtgttaaaaatgttacagttgtatatttttataaaatgttggcattccacacggaagcagagagctgaacttgaaccacacaagacagccaaagaatataattgagaattg

SEQ ID NO: 188755 - DNA, 158 bp, Homo sapiens
aatttaaaaccgaaaagtgcaataaccgaaattttaaactcaatggatggtctccaaagtagaataaagggaacaaaagaaagaattgttgaacttaaaaacataataatagaaattaaacaactgaaccacaatgaaaaaaatgcaaacaaacaaac

SEQ ID NO: 188756 - DNA, 520 bp, Homo sapiens
ggatagtcctatttcaaggagtgacaggccaacaggaccaaatactgttgaaaggtccaagaataggactgatgtggtttctttggattttgttatctggatgtcattgttgaatcggcaagagcagttgatattttatggtggtattgaagccaggttgcagaggattgagtgataagtgggaagtgaacaaaaggagagaaaaggcagaaggctcatgtagtcctacaggttttcagggcttactcacttttgaacattagtggctgatacagatactgacaagaaagtactaagtgaatgtgcactgaattgaccgaaaggtgttttggaaaatacccttctcatggactcttcttatccctttaactcctcatcaaaacttacctgaccagacatctgtgctccagatacttactaggtgactctccagagaacaagaattaattttcttgtgatgctagtatttgagaaagaattagtataattcctcttctaccaaagaactattgcatattat

SEQ ID NO: 188757 - DNA, 301 bp, Homo sapiens
tgtccacaatatccttcttttacagatgagaaaactaaagctcaaagaggttaagtaacatacacaaggccactctaatagaaaacaatggctctgggatctaagctgagttcttactccatggtttatacacttgtctctagtatgcactgccttaaattaaaaaataaaaagtcttagacgagatcaagctcctttaataagtataacatattcattacataaatcatctgtgctaggcactgtgctaagtactagaaacaaaattatgagcaagacagaggaggccttttctcttacg

SEQ ID NO: 188758 - DNA, 221 bp, Homo sapiens
acaggttctggtcagataagtgctgtactttatttgcaaaacaaaacgttcccagctccaaagcttggctgttccacccaaagagtgtcaaataactaaccgcactatatgatcagattttggggttaacagcaagactcctctggcacaacccaatctctcccattctgaagaacctctaccttctgtccatcccttcaatgcccaatgtcctcttctct

SEQ ID NO: 188759 - DNA, 1800 bp, Homo sapiens
caatcacattcaatttgtgtgacaataacagcatagccacctgaaggacagtacaacaagggcacaggtatatgataccttttagaagaaaagcattaacaggtgggtttatttatttctggaaaacaaaaaactccagcaagaatgtagtacatttttggctcttgtccatttggttcttgggattaagctggttctattaccagaactagcatcacaacaccctgacattttgggcagaaatttgagtggctaagaaaacaactatttttaactttatgtgtatagctacaagtggaaaaaagaataaattggcattgttattgctgtctgggctgtccttgatttttggacacaagcttatttttccagagctctcattttagtcagtagtccatcagtacctaatggaaacatctactgtgtagatatgagaatttctaagactttggagtagttgaaagacagcagagaaatttatcctatcataatttctgtattttaagcacatactagatttatcagggctgaaggacaaatggcctggtgttataattcatttataaattcaacagatacttatagatggcccccaaaataccagttaccctgcttggctttggtgattcattgtttagcagagtgtatatagttcctgcccctcctgtggtttgtgatctgtgcttctgggagatttacattgaataaataattagaaatgtgatgagtgttttgaaatgtaaagtgctatgaaagcctataaaaggggcatttaatttaatctggtgggaagtgattttgagcccagtttaaaagatgaaggctgagaaggatttaatatgctcacagtactaagtgtttcactttatgcatttattccccaagttgggagttttctctcaattttaggtctttattacgtttgtattttatacacagttttattacaagcacaggaataaacaggtttatcagggtttttttggttttttttttggaattggggttttgttctgtcacccaggctggagtgtagtggcgtgatcatagctcactgtcaactttgaacacttgggctcaagctatcctccctcagcctcccaggtgggagtacaggtgagtactccatccacctctgaccttggccctgtgctctcattcaaccaattctgttggtactgcctcttactacaagatttgcttacccgggagttagatagcaagcatgggaaatgcctggcacacagaatatatggaattagtgttaggattttagtaacttcacagtcggaaagaggaaaataggaagagctgttcgtatagggtagactataggagagaatgcaaattttgaaagctacatcatcaaggattaaaattttgctgctagctttgtctctataataatgtggtcatctagtcttaatgcttattccttcaaaaagttcattcttttcatttttctccctttgtgcctaatgctcaatctcttgcactagtttcggaagtggtcttcttttatgtctgccctatatgctgttgttaaaactggtattgaaatgcacttttattcatggtactttattgctccaaaatttgtaatggcatcctgcttccccaggaaactatgacactgaatgtagatcatacttggagcccctgggattggcaaattttttttttttaagaagccagatagaaaatattttaggtttccaagccatatgatatcttaactactcaactctgcccttgtgggaaagcagccttagataatacctgtagaaatcagggtggcta

SEQ ID NO: 188760 - DNA, 641 bp, Homo sapiens
aggatctcttatttgatctggcatgtatcctttgccctctctcctgactacaaatctagggagagctccctcagtctttctttgtatttcatttaattggcacattagagaaatactagaccataattcggtacactagtcctcaatttggatttgtccgatatttttattattagattaaggttatgcacttttgacaaaagataacacagtagtaacagtgtgcccttttcagtggatcatctggagtacatgaagttaatgtcttatttctgctgatactaaatatgacgcctttattaaggtagtgtctgccaggtttatccactgcaaagttactgttttcctttctttgtaattaatattttatgagaaaataatttgagactatgcaaatattttatttcatctaatttcagtattaattgaagattcttgcctgcagcaattatgattatggtgtttacctagtaatggtttctatttccatgatactttctctacttactagaatttgactgtaaggaagatctgtccttcttccccatttatttgtactcagttgttattttacatcagtatggatttgtggatatcttattttatggattgttatatattgcaatcattgtttgtgtttg

SEQ ID NO: 188761 - DNA, 508 bp, Homo sapiens
agtataatgctgaaatatttctggatgaaagataggatatctaggatttctttcaatgtaattgagtgggacagaaatctaaaagttggtgttttaaagagaaattggtaagccacagctgtgaaaatggaggcttaggtggtttgcatattggctgccttgaactgtaaattccacctgaagcagaggtaaacgacagtgcttttagccagggggggacggggtgcgggggggcacgttcattgacaatattattgcaaggtatgttggttcttttttttttcatgactggaacaatgaccagcttcacttcgtcaccttctttctcttctatgaaatgccttccctccttaaacctaaatccaatgcatccctgaagacctagctcaattatcccctccccctggaagcctctaaggtcttccaaattttattaatacttctccactgaactcctgcagtgatgcatcttttgcatgttttaagaaattgaggtctagttcacata

SEQ ID NO: 188762 - DNA, 566 bp, Homo sapiens
gataaaatagatacaaaagttgaaaaaaatagatacattagaccttcctcattttagaaaaattagacatgtcaattgggaaaaatacaaaacagtacctaagtggggaaaaaaagacaatagaaacgaagcaggtgagaaaaatctagaaaactgaaaccatcacaagaaatccctgtatataacagactttcaactccatcaatgtgtctttccaattactgtaccaaggaatagcagctttaaatgaccgatctgaagaaaacacggcactgttaagcttatgaggtaaatatctaacatctatttctttaacagaatgaatgaaaagtatgctgactcacattaatggtgaaaattagaagcatacatctgaatatataagaattaataccttattaaaatggataaaatcacttttctatgatctccaaagagtattattctgtttaatgaaattttactaaaattaacgtagtacttcatcgtatctcattctcagtcttcatggccaacataaaaataaagttgaaaggaggtgcctttcagtaaaagggaaagaagct

SEQ ID NO: 188763 - DNA, 216 bp, Homo sapiens
tggttctctttccctccaaggcctgaccatactgtcccaacctgttgctctggtggttttacattccccgggcggcactaggaaggcttcctcgccactcccaactttaaaatgcatccagctgggtcttgactggaatgaaaggttatttttaaaggtcctcttggttaaagggttccaagttttagttgatcttttttagacaccaggtttcat

SEQ ID NO: 188764 - DNA, 129 bp, Homo sapiens
gcatcaatacttgatggtttagcaggaatagtgttcttcacaaagagcaagaatcagtttttaccctcttgatgctgtggctgacgggaagctacggcttgctgctgctgcccagcattgcaagattga

SEQ ID NO: 188765 - DNA, 263 bp, Homo sapiens
tgcgcagcgtgtttactgaagtgcgcatgctcacttgaggcattcttcctttaccagtcaaatgctcccaggtcatatgccagttaaactccaccatgttgcctcttagtgcacatgcttgagcccactcgcccagctcctgagatcttatcgggaagctgctgatcaccagttccaggtgctttctatctattgggattacaggcgtgagccaccgtgcccggccgatggtagtcctttaaagcaagaaaggagcaggtaga

SEQ ID NO: 188766 - DNA, 545 bp, Homo sapiens
gatcagtgcaacttccgactgtggtgcaataaacctatggcttacaagaactcatcagtttatttactatttaaatttctttcacgacatactgcccatagcctgaaggattttggaagaacttggaaattctaaaataacaattggtgttgagccatgctaagagaagttagaaacttctgcagactcaaaccagttggaaagtggaagaggtctcccctccttgagttacgggcccccaggaagaagtgccctgacttcttcccaggtgcaaacaaatctgtgaaaatttagtagttccaacaaaataaataaactggaatcaaatgagaaaaatcacaaataaatctcaaagaaggcaagtgagagggtgaggggaggagtgtctcaagaaatagaaatcaggctacatttaaattttggttcttatttctttcttactgaagatgcagtccccttagactgccagcaactcccaataacacaaaggtccatttcagctcttatccaatatttacggtaaaagaatcatctcaaccaagctc

SEQ ID NO: 188767 - DNA, 224 bp, Homo sapiens
ggtcctacttatggctgtgagccacacacgcccacagaggtcagcctctgatatgtgtgtcttgaactgtgtcctctgagttctgtgtctgggtgcatgctcgcctcttagcgtgggtctccttcccctgtgtagcacttcacaatgttaggcatttgtctgtgatagcagctgttcagtaatttcctacttgcccaaattcctggactcaagcagtcctcgag

SEQ ID NO: 188768 - DNA, 575 bp, Homo sapiens
agattttcctctttttgctgactctgccctggcatattctgagatacaggggtcaagacttcaacatatgaatttgggagtcacagttcaacccagcatactctgtctcaaaaaaataataaaaattttaaaagatatgttaaagcctcaacccctggtacctatgaatgcaaccgttttggaaatagggcctttgcagatataatcaagtgaagtcgcagtcacacctgattggagtgggccctgattcaatacaactcacctccttataagaagacaaaaaaggcctggtgtggtggctcatgcctgtaatcccagcactttgggaggccaaggtgagtggagcacttgaggtcaggagttcgagaccagcctggccaacatggtgaaatcccatctctactaaaaacacaaaaattagccagtcatggtggcgggcacttgtaatcccagctctttgggaggctgaggcaggagaatggcgtgaacccgggaggcggagcatgcagtgagcagagatcatgccactgcactccagcctgggcgacggggcaagactctgtctcaaaaaaaat

SEQ ID NO: 188769 - DNA, 1087 bp, Homo sapiens
ttaacccctaggctatagtaactagagtgccaaatctctgacaagtttgagctgaaaacagggcagtattgctattttttcctccgcacgctagcagagtagacctgtgtgaatttccttttgattagattccaatgaaattctctaggggacttgacgttttcttgcccccaaataatttctccagtcttgtgaggaagcagcaaaagcaataggaaaaggcagatttgcagttaggtggattgttttcttcttagactcttcttggttgcaaaggaacgccataaaagtataaattactcagtacaaaataatcatggagcttaagcacgcgtacaccagtcattgaaagcacagggtcagtgaagctgaacataagctcgtttttgtttacatgattgctaatttcagccatatgtcaggaggcagatatcttaacaacctttgttattgatcactactttgattcatgaattaaagagccaatacacgaaaggaggaaaataagagcgacatccccagaaacaacgtggaattccaggaaaaatctaaacgaggccagccaacttcgtgcaaagggattaaaataggagaagagagtgttatgacaaatagattttcatcagagagcttacaggcaaggttgtcataaaacatggagaacgcacacgcagcctccctttgcccgctccttcctcccgcacaggagctgttccggagagtgtgttctctctcatcttcagagcctgggctcctcctgccgcactccctgagactcttgctttttcctcatagagtgctctatgttgttctttgtattctgttcccctgataggaattgctaccttttattgtgttcttgttgtatgccagtcactgtgacttttacctagattattttccttagtttttatggtaattctatgagttgtctctgatcatcatccttattttacagacggagaaaatactgggccagagaaatgaaaatcttgtttgttgtccttaagttataggtagcatagatctaggagaggtcaatccagctagaaatgattctaaggccatgtttgcctcttattccact

SEQ ID NO: 188770 - DNA, 654 bp, Homo sapiens
aaaaagtcacattccccaaaccagaaatcaaaaggacttcaaactcttcaacagtagtgggcaaagtgccaaaatattggagcaatacctttaaaattcacaggcaacattattttcaatctagaattctatactcaaccaaactacaaattaagtgtctaggtcgcaagacattttcagatgtgcaccgcttcaaaatatttacctcctgtgagtcttctgtaattccttctgtgagtctaatgtactccactgaaatggagtacattaagaaatatgaagatgtgagatcctagaagcagggaatactactcaaaggggacgtgaaaggagtatcaggggaaaggagatgatagctgcacagcatcctggttggagaaaatcaggaagcccgccgtacgtggcccactttaatagtgtcattggcaacacaaaagtatttaattttgtttaattcaaagttatctatttccatttttgttgtacttttggtgtcatatctaagaaaccattgtttaatccaaagtcatgcttatttctgaaccaatcattatgtccaggaagacaggatactcagattggcttgacttgaatcacattctcctccatgggccacaggggccaacaacatttaagccacatggatggggtttt

SEQ ID NO: 188771 - DNA, 665 bp, Homo sapiens
aaaaagtcacattccccaaaccagaaatcaaaaggacttcaaactcttcaacagtagtgggcaaagtgccaaaatattggagcaatacctttaaaattcacaggcaacattattttcaatctagaattctatactcaaccaaactacaaattaagtgtctaggtcgcaagacattttcagatgtgcaccgcttcaaaatatttacctcctgtgagtcttctgtaattccttctgtgagtctaatgtactccactgaaatggagtacattaagaaatatgaagatgtgagatcctagaagcagggaatactactcaaaggggacgtgaaaggagtatcaggggaaaggagatgatagctgcacagcatcctggttggagaaaatcaggaagcccgccgggcgcggtggctcacgtctgtaatcccagcactttgggaggccaaagtgggtggatcacgaggtcaggagatcaagaccatcctagctaacacagtgaaactccatctctactaaaaatacaaaaaattagccaggtgtggtggcacgcgcctgtagtcccagctatttcccgaggctgaggcaggagaattgcttgaacctgggaggcggaggttgcagtgagccaagattgcgccattgcgctccagcctgggtgacagagcaaga

SEQ ID NO: 188772 - DNA, 838 bp, Homo sapiens
ttttgtattattagtagagatggggtttcaccatgttggccaggctggtctggaactcctgacctcagatgatccacccactacggcctcccagaatgctgggattataggcgtgagccaccacgcctagtctgcaagaagtgaactctaattgctttctccagctgggttcagtggctctcacctataatcccaacactctgggaggctgtatacacacacacacacagacacacacacacagacacacacatagtcttcaactctcccatttcattcttttagtagtcttttgataaacatatttttataaacaaaatagtatttgtattattactcttttttgagacagagtctcattctgttgccccgactggggtgaaggagcatgattatagctcacagtagccttgaactcctgggctcgggcggtcctttcaccttagcctccagagtagctgggactataggtatgtcccaccaggcttggctatattttattttttatagagacatggtctccctgtactgcccaggctggtcttgaacccctgagctcaagtgatcctccttcttctgccccctgagtagctgggactgtaggtgcatactatcacacctagctaattttcaattttttgtagagacaggctatttaggaaaagctctgaatccatgcttttccgttctcacaccactgccacaacaatgacagcacagaagacttctgtgaccaaatgtttaggtttttttaaccccacacaccaagcaacggacaccagctggatgtcctccaattcaagtctaaaaccatctacctggaaatagtttatgctgt

SEQ ID NO: 188773 - DNA, 172 bp, Homo sapiens
gtctagaggatcccgtttcattttctacacctcagccttgcaaaattgaagggattatttctttgaagaccaacaggcgatagggggcagtagtgtcccaggatccagtttcccgcttcaggtttcaagaaacaggagcagctgcagtgatgaagttttcccgactatgaca

SEQ ID NO: 188774 - DNA, 695 bp, Homo sapiens
agcagaggagccttctacaggctgatgcagccgttctctgtgcagaggtgagccatcctaggagcagctgtggggtgaaagtgtccttccttaaactcagtgctcctgctcattctctcagtatggctaatagctcatttaaatatactatggtggtttttaatttttgtgactcattccctcccctcctcacctgtgtttttcctgtgtgtcagggacattttagggggaccaaaaggatctctgtctctgctctgtgcttgctctgaggttgaatagagaatgttcagggctgttcttatttgagtcactggagctgttgtgagctctgacggcctgggagccccactactgtcacatgaggacagggcgtggggtggctcaagcatggccgcttggggttgggtcctagtgctgtcatgttggaggtgtctgacctttgcactaagtttccccacttacactaaatggggataatcaaagctttgtgtggggattaagtgagttaatgtaaccagaacacttagaatggtgtgctgcatacagtgataatgcagaactactcactgctgctggagtgcgctgttatattctttattaggtcctcagactttttctatgcctaagccttgagggtctctctcagctgtgtttttctgtttttataattatttggtgcctcaaaaaaattttct

SEQ ID NO: 188775 - DNA, 592 bp, Homo sapiens
cacagcaaggaaggccatgggatgatgaaaggagagactggagccatgcttccataagccaaggagcatcaggagccaccaggagctggaagagatgacgaaggatcttcccgtagtcttttgagtggagaggaacccagaaccctgctgatgccttgatttcagacttctggcctccagaaccacaagagaatacattttgttgtagtaagccgtcaagtttgtcctaattggtcatggtaaccacaggaagcacatacagatggtgacttgtgccttcactgtaagcacctggccacactctaggtctttattcatctttgctacattttcttacaggcccagagctgtgccaaacaccgaacagataccccaggtaggtttgctaagctaggtctctcagagatggtgtcaagggacttataagcttgggctggccccagggctagggatgggaaggacacaggacttgctgaatggaagtgctggagaatggggttcataaatctactcacagtgctagttcctggctgggtgctgtaggaacagggctatctacccacatgctgtaaattcactgacagcaagacag

SEQ ID NO: 188776 - DNA, 257 bp, Homo sapiens
gatcgagccggcccctatatggctgtaggaagaacctgagagtcacagatatgaagtgatttgcttgaggtcaatgactcagtgactgggccaggagtcaaccccagctcatgagattccaagtgggatgttccttctgctgatacacactaacgtgctattttgttttgtattgtgcaaaaataggttctggtcctttaagatgtaacaatggggttcacagttctggcataacttattcccttttacaaatatgg

SEQ ID NO: 188777 - DNA, 260 bp, Homo sapiens
atgcaggggacagccgctctggaaaacagttagacagtttcttatttaacatatgacttagtaatcccgctcctgggtatttacccaagagaaatcatatgcacagatgaatgattatagtaaatgtttatagtggctttattcataatatcaaaaactagaaaatccctaaatggctttcacttggcaagtgaataaacacacttgggcacatccacactggaacactagtcagcagagaaaaggaacaaataccaata

SEQ ID NO: 188778 - DNA, 421 bp, Homo sapiens
tgtgagccatgggtaatttttaatgccatccagtgaaaccatcccctgccttccaaggctacttcatgctttagtatccagtggtggcctccacagacaagattaatgctgggagggcaccagtgccccttgcttgtagtgggaggatggaagatagataggtaggtaggtaggtaggtaggtaggtaggtaggtaggtaggtagataattgacagatgatagataataaatagacgaacgtgaagaaaattaagtgagatatcaccaggtatcaagtcattatttggtagtgggggcacagtgtgactattcatggcccccagacccctcccacccaacttgctgacagttgcctgacgggccacagtcatagagccaaaagatatgaaggcatccaggcctatactctcagtttactgg

SEQ ID NO: 188779 - DNA, 658 bp, Homo sapiens
attcatagtaaacagctgcttcttcctctaagtatctagaaggcaaagagcttattccatgcagtgaagggcaataaacagcaaccaagccctgagtcctctgtaactggaaggagaggaggccttaagaagctttgtttaagttaccacaaaggacagccccctcccctagcagcaatatatcagcacaacatgagtggctttgctcctgtgtctcctagatagggtagctatagcggctactcagcacaaaagaattcttcccctcctcccctccatcatcctcagtgcttcagaattctcctaaagtccagcttctccaatcctgtaactactcagatcaaaaagcataaataccttccaggactttagggcctataacctaactctatagcatgacattctctgcttccaccatcaagctcaattctcatttttctctcatcattcactcaacatacccaaagattctgttcaattggactatttgctgttccctgaatatgtccattagcattacttcaacttcagccctttgcggccctagtttcatttacctggaatatatatacatatcctctctcagcctctcttgaaatcacctcaaggatatctacctcacacatgaacttaagttcagtatttttttttcttttct

SEQ ID NO: 188780 - DNA, 256 bp, Homo sapiens
tgttttttctgttcacttagtcttgaacatgcccacctcataccctcatgtctatattgcttaatatcatacctccttactcagatgtcaccttctcagtgaggccttcccttaccatttaatgtaaaactgcaaacccctctgtttcccccttccctgctttctatttctctagagcatttatcgccttctattatgtttaatattttacttatctgtttgctgtctgtctccccttactagagtatatgctgtc

SEQ ID NO: 188781 - DNA, 300 bp, Homo sapiens
agataaatgaagataagaaccatctttaagactttttcagtggggttttacgtgtacactgttacaattcaactttcccaggcctcattttatttttatatgcctacctgttttaaaactcataggcagttatttttggggaatcctgattactctgtaatagggcccaaacatatagaacatatgcaaaaagaaaataatggtggtttccttatttgactattgctctttttcctccaatggccttttgttgtttacagtatgcaacccaacaaaaggtttttcctttcagcaatcaat

SEQ ID NO: 188782 - DNA, 311 bp, Homo sapiens
caggtgctataggagatgcagagagagccaggagaaggcctggacgcaaggcccggcccagatctccatccaggtggacagtgtcatgtgccatggccacccatgggcacatatcaaattccctaacctggtaacagacagcagtagggacaggactgagaaacactctaggtttaaaagcaaatagcctacactatggcacttccacaaaaagttgaaaatagaatcaccatatgatccagcaattccacttctggggatacacccaaaacaaatggaagctggatcttgaagaggtatttgtgcactcg

SEQ ID NO: 188783 - DNA, 574 bp, Homo sapiens
ctcaggttgggctgtggtgtgagcagctgccttggcctcgcctctccccggggcaggcctgtgcctcagctcccactggccacctccctacttcctcatggaggctcctttgcacatctaatcccatcttggacgacccagtgcagactttaaagtaattgtcttctgtattcagaagagtattgcttcaatagagaccttgaaactagaaaagaatccccttcgggagaccgagacgggtggatcacttgaggtcaggagttcgagaccagcctgggttacatgatgaaactccgtctcctaaaaatacaaaaattagctgggcagggtggcatttgcctgtagtcccagctactcaggaggctgaggtaggagaatcacttgaacccaggaagtagaggttgcagtgagccaagatcgtgccactgcactccagcctgggcgacagagtgagactccatctcaaaaaaaaaaaatacaaaaattagttaggcatggtggtgtgcacctatagtcccagctactcaggaaactgagacagaaaatcatttgaacctgggagacagaggttgca

SEQ ID NO: 188784 - DNA, 189 bp, Homo sapiens
gctcagtgaagtgggtcctataattagagtcagagcagttaagcagtctgcctaaggtcacacagctagtaggtagcagtgtcctggagctgtgggattcccaagtctatgttcttttttttttttttttttttttggaaaaggaatatttggccacaggtgcccaaactgtgaagtccagcaacacaa

SEQ ID NO: 188785 - DNA, 315 bp, Homo sapiens
ggagggaaacagttttgtgggaaatattcatatatattttcttctccctttttccatttttaggccatgttttaaactcattttagtgcatgtatatgaagggctgggcagaaaatgaaaaagcaatacattccttgatgcatttgcatgaaggttgttcaactttgtttgaggtagttgtccgtttgagtcatgggcaaatgaaggactttggtcattttggacacttaagtaatgtttggtgtctgtttcttaggagtgactgggggagggaagattattttagctatttatttgtaatattttaacccttta

SEQ ID NO: 188786 - DNA, 140 bp, Homo sapiens
aaccataaacccttctggttgtttaacagagggaggtcaatctgtttcatgaaaccacatgtggccttccagaaagtcaaagggtctgcaggaactagattttacagacaaagaaaagaaaagaagaaagaaagaacaga

SEQ ID NO: 188787 - DNA, 451 bp, Homo sapiens
ctgtgcttcagcagatctattactgccacccattatcaacccataggtatgcacgtggtgactcattagctccttaagaacaccaaaagtttgcatggctagttctctagtaggtgagagaataaggacccctgttccattcctgggcatgaaatttaacttaacaatgagttcagctgcaggatgagaaaagctggggttttaccactgacggtttttgtagctgcaagaagatccctgccttccagaggtggtctgatacttttatgctgaatttcagtcacgtttgtaaaacccatttcttttattgccttcagagtgttttcattgacaagattacataagaagcaaatgaagtatcctcaaaagctcctgtcagtcccaggggcaggctgggcatctcactgtcatcttcatcatctggcttctcaacattattttctgtttcttt

SEQ ID NO: 188788 - DNA, 228 bp, Homo sapiens
gatcaatccatacacccactaggcattcaaccatgagaccgtcaacatcaaagccaactagaacacgttccccaaagcaaaaaaaaaaaaaaaaaagtaattgtaagttagacttctgcttgtggctatcagaaatgttaccttaatttggccttaatgacccataatcacttttagcatatgccttttaagactgctattattcagcttgatctatgatataatgga

SEQ ID NO: 188789 - DNA, 326 bp, Homo sapiens
ctggttccattatcacccctccctcctcactctagcccgccttccatgtggggcttccagaaggatcctctaagacacaccccaacaactgaaccatccctcttcagtttaaaaatcggggctaggcatggcagctcaggcctggaatcccagcactttcggaggctaaggcaggaggatcgcctgaggccaggagttcaagaccagcctgggcaacacagtgagaccccccctatctctacaaaaaatacaaaaaagttagcctggcatggtggcgcatgcctgtaattccagctactcgggaacctgaggtgggaggatagctt

SEQ ID NO: 188790 - DNA, 220 bp, Homo sapiens
atatttactaaattccttccatgttccaggcacttttccagaaactggggtacagaattgagcaaaattcaaagtcccgtcctcttggaacatccaggatggaggaaacagataaaaaaaggaagagtaaatatatcagggattgtcaaataatataaagaaaaataaagtaagatacgaataaaggtgctagtggaattctaaaagtggtcaggattct

SEQ ID NO: 188791 - DNA, 406 bp, Homo sapiens
ttggggactctagaccatccccacctcctaccccacgtctacatttccctattatcaagggaattattgttatttttacaattggcttgttcaaaacagaatccaaacaaggtccatacattgtatttgattcataatccaagacttctttaataacatggttctgtggtttctggatcatcaggaggaagagcacctagcagcgttttagaaatgcaaattcatgggccctaacccagggctaatgaatgagaaactacgggatgaagccagcaatctgtgttttgacaagccctcccagtgacttttgattcatgccagcgctctgaggaccactgttttaatacacaggttcccccttggttttttctttgtcatttatttgtcaaagaaactgtgtcatttg

SEQ ID NO: 188792 - DNA, 547 bp, Homo sapiens
tacaggaggatcctgacttgagcttgaggggtgcaggggaggcaacaggtgtgtcttcagtcctggactgagaatcagaaagcgtggccttcggtctgccctgatcagctgtgtgacacatcacttcgcttcttaggctttggcattctcaaccacaaagtggtaatggtaactcctgcctgactccacaaccagaaaatgctgtgcaaatgtccagtgagcccagcatgtcatggtccccaccatttcattcataatcattcttagaccagcatttcatggcttgagtgggagctatcagatggcaggttttgggcccagagactctgtagtctctttggccatttgagctggtgagctgcagctaaacctgtctgacttcccatttcagcctctggtcttagcaagttaaagaaacatcatcctaagccaccatctgaatttccctaactaacccagttattttgtatttggctaagtttatgagattggaactaccaggaaactttgttctgcttcactcctggctcaaatgataggattatat

SEQ ID NO: 188793 - DNA, 517 bp, Homo sapiens
aagtaatacatgtgtatgttgcattctgtccccatttgttttagtgtaattatttttctcccaagtcttttaataaaactatccttccaggaataagcaccacattgacatagtgacttgccgcagcttcagcgaccttattagagcagcttagccttagtccatctgatcccaaatcccgctctgccagggtttcaggaggctggagcgaggactgtcccatcccctgctgaggtggctgatcagccagaccggcaggacatctgctcccagcctgtctctcaatggaggaaggtgggccttgatgttgatgtcagccccaaaggctatggagggcctgcaaaccccaccacagacacacaccagccctcccacaactgacggtgtgagctgtcatcaacctcaagtcactctcatgacagccaaggccacctcacgtcactcctgacccagaatttcatcacccccgtccagaggtcacaaactaaactgaaggcccgagggacttgttcacctg

SEQ ID NO: 188794 - DNA, 372 bp, Homo sapiens
cattggtaaaattaatcttagtgtgataagcccaggaagatgcctatttcggacttgaccccctgttcacctgttttcttcaacaatttggcatgcttatttccagttacctaaatctgtctactggatggtaccataaaaatagaatggcctgttgactatgtacccatagttcaaaatgttttaatatttttacatgaaagagtctatcttactttcaaagtaagttacaagattctacttctagtatttggtcaccataaaagtacttaaacattataaccaaagtaaaatgaacttttaaataaacaacaacaaagtgactggcattttttagcctttatttaataagggaagtctaacggaactatt

SEQ ID NO: 188795 - DNA, 457 bp, Homo sapiens
tgtctcccacaaaacagagagcctttctccttggtcagttcagtggaggggggctctgtagtcagaggccactatcctgcccataccgcccttccccaaatagtccggcagggaaaatttttttgacatcacgaagtgtctaaaagaaaaaaagtagttgagtggggagaattacctaatgaggtgggaccctagctatttttccctttgacataattaaaaaggggggaaaaaaaagaaatataggctgggcatggtggctgttgtctgtaatcccagcacttcgggaggccaaggtgggcagattgcttgaggctaggagttcaagaccagcctggccaacatagtgaaatcctgtctctacaaaaaatacaaaaattagccaggtgtggtggcgagcacctatagtcccagacactcgagaggctgaggtgggaagatggcttgggcccaggag

SEQ ID NO: 188796 - DNA, 258 bp, Homo sapiens
gaccggcccaggtcagcttaatagactgtgtacggctgtgtagatcataaattgagaaagcatgatatttgagcaagaaaaatttactgaggtttgttaagatttgagaagagagatggaaaatcttcctgttcagttggagaagaagctgaggaataagtctttgtgcatatgaagagtgttttgtaggctgtgtataggtattttctgtttcttcagaatgtagcaaaaaacagtgtgaacttaagactggtcctg

SEQ ID NO: 188797 - DNA, 295 bp, Homo sapiens
aatgctagttatccataatttatcttttagaaaatctctctagataatttacaagaaatcttatgttattacttaattgttacttaagaaatctaaagtgagctgggcacggtggctcatgcctgtaatcccaccactttgggaggcgaaggtgggtggatcatgaagtcaggagatcaagacgatcctgaccaacatggtgaaaccccatctctactaaaaacacaaaattagccaggcctggtgctgcgcacctgtatcccagctacttgggaggctgaggcaggagaatggc

SEQ ID NO: 188798 - DNA, 521 bp, Homo sapiens
ctagagttcccgcgtaatccgtacaactggagttaagaacattattctaagtgaagtaactaaaaaatgaaaaaaacaaatatgtatgttctcacttataagtgggaactaagctatgagaatgcaatggataagaattatataatggactgtgggtactcagtggcaagggtaggagaagagtgacggataaaagactacatattgggtacagtgcacactgcttgggagatgggtgctcctaaatattagaaatcactacaaaagaacttatccatgtatccaaacatcttctgtaccttaaaaactttggaaataataataataataataaacaaaaaataatcccaaaccccgtaagtttaactttctatgctttggctgtttttggtttattttttattttttagaaagggtctcgctctgtcacccagaatagagtgcagtggcttaatcagggctcattgcagcctcgacctccttggttcaggcaatcctcctccctccgcctcctgaacagc

SEQ ID NO: 188799 - DNA, 335 bp, Homo sapiens
tctaagtaaaattatgttttcaagggatttgccacattagaaacttgggtcaaaaatcatgttttcctagagtttattgcctaggttttattagtggggatttactttctgtggaagggccttctgcacatcgaggtagtttgaccttgctgcttgtgaatacgctgtgttgtgttcagtttctaagtgttctgccacggaaagaagtcatggagttgtagactgaccgagggaaaatgttgacttgtggacatgagtacttgagcttaagctgtcttttctggatttttctctttctgtggattttcagtcatttttctggctctgaagcccac

SEQ ID NO: 188800 - DNA, 243 bp, Homo sapiens
ctttcagacttccctagaatgttaacactcatgctagtccacacatagtcttaaaaagttatagaaaatattcagctggtttctcctcgttcctaataatgtcaacttcttcctttttcactgttctgcccagggaaaaaaagcagcagtgggtctcttctgccctagaaggggatcattttctggattttaatttgtttaagtttgtttaaattcttaaagctttcagaaatttaaatacaa

SEQ ID NO: 188801 - DNA, 352 bp, Homo sapiens
ataaaatatcaatagaacatcatatatactgaaaatgcaccaatacatcttcagatattacacacgatcaaaacattttccatttgtctttttatttaagaaaacaagaaattacttatcaaggacaatatgctccaaatttctacggcacttccaaaattttagggaaaatatcagactcccattaaaaaaaaaaatcaaacaagattctgatttcactttgacttttaaggtttaaagctacttaattgtggctactccccctaaggatctcaaacaggaaataactaaagttaatggtaaatatacacttagcataacactaaggttaaaaattacgtgcattcatttg

SEQ ID NO: 188802 - DNA, 454 bp, Homo sapiens
ccagctgctctggaggataaggtgggaggatcacttgaaccctggaggttgaggctgcagtgagccagtgcactccagtctgggtgacagagcaagaccctgtctcagaaaaaaagtaatttgggtctccttcaacccccttaaaattaaaaatattttttaaaaacttagaacaggttgggcacagtggctcacacccataatgccaatactttgggaggctgaggcaggcaggcagatagcttgagcccaagagttcgagaccagcctgggcaacatggtgaaaccctgtctctacaaatacaaagccgggtgtggtggcacacacgtgtaatcccagttacttgggaagctgaggtaggaagattgcttgagcctgggacagcaaaactacagtgagccgtgattgcaccactgcactccagcctgggcaacagagtgagaccttgtctca

SEQ ID NO: 188803 - DNA, 169 bp, Homo sapiens
ttttcctctcgaaaatattactatgtgttttttccaaaaacgatctttccactaccaaagttcgaaaaagcatttaaaataagctcaaaatttcgaagatactttaggcaatcactgtaattaacatatggtagcaaagcatgcaaatcactcagagctcctttctaac

SEQ ID NO: 188804 - DNA, 256 bp, Homo sapiens
acctgctcatagacccatggctaccgcctcatccaacctgcctgcccctgggcccacgcctgctgcaggaggcggccagctgggactggagggcctgggcttccagggagaaacaaatgtttccaggccccagagctttcacctgagctggccttgtccatctcatcccaccccaccctccatcatctcccaactcctgaggctttccagctctgctcactggtgtagcccccccgcaccctaggtcaccactaat

SEQ ID NO: 188805 - DNA, 822 bp, Homo sapiens
  misc_feature (488)..(488): n is a, c, g, or t
  misc_feature (496)..(496): n is a, c, g, or t
  misc_feature (510)..(510): n is a, c, g, or t
aattgcaaaatgcttggcccaggctggcctgcagagtgatacagaatgtacctcagctgttgatctgtggagcctaggaatcattttactggaaatgttctcaggaatgaaactgaaacatacagtcagatctcaggaatggaaggcaaacagttctgctattatgatcacatatttgccagtaaagcagtggtgaatgccgcaattccagcctatcacctaagagaccttatcaaaagcatgcttcatgatgatccaagcagaagaattcctgctgaaatggcattgtgcagcccattctttagcattccttttgcccctcatattgaagatctggtcatgcttcccactccagtgctaagactgctgaatgtgctggatgatgattatcttgagaatgaagaggaatatgaagatgttgtagaagatgtaaaagaggagtgtcaaaaatatggaccagtggtatctctacttgttccaaaggaaantcctggcngaggacaagtcttngttgagtatgcaaatgctggtgattccaaagctgcgcagaaattactgactggaggatgtttgtgcgaagttgtgtggctacattctaccgctgagtgctacaggggcggttctggtcaacttgcttatcagtacctagatggttcttttctactctcattcttgggtatcccatttgatgcgggatacccttccttacgaggttttacttattactctagggcgctgccagcgggggtgcacttggccggggggcccgctcagggggacactggccctggggggggtcctttgccatttgtcgggcttgcc

SEQ ID NO: 188806 - DNA, 942 bp, Homo sapiens
ctcttagattaagattttattacttttaagatacttctatgaattatagaggacatccaaaagtaaacatccgggacttaaaaacaataaccaatattataagataaattattgctgtaaattatttcatgaaggcacaattaaaaaaaaaataaaataaacagccaaagcctgttttgttgagttttcttcgttgcgcaggatcgggagcttgctgggatctgaactcaggaagccctcacctcaccctgacttggtcattgaggagatgtaattgcaggggtgcttatttgctataggctttgaaagtcacaaaagcccagtagatacatgaattcgaagcagttctccaagggcatctccaacttggcagtcaccgcccgcaccgcgcacacaggtagtggacgcccgcccacctgcccgtctgctgggcgcagggcgctcctggggtggggagggcgctcctgtggggggaaaaggggcgctcctgcctcggagggggaaaggacgcccctgtggaaggaagggggggctcttgaagcggtgtggtgagaggacgcttccgaggaaggaagggggtgctcctgcagcggtggggggagaggacgcccctgcggaaggaaggcggcgctcctgcgggggctggagagacgcccgcgcggtctcccggctcagggaccgctggctcgcgggtccgccctctccccggcgctatggaaaccgcactttctccgcctgccgtccccgatctctttctcctattacctcccaaacgcgatttcaacttcccgacaagctgacaagtgaatggcgcagaggacgccccgtaaagcgcccgcgagcgggtgggacacaggcgccccctccgcgcccctctgtcctccacggaagggcgcgcgccgctctcgatctggagcgcggtgctcgcgaacccgcggccgc

SEQ ID NO: 188807 - DNA, 470 bp, Homo sapiens
aatcagctcgcacccttagcaacttcctgtaccctacaaccttctcctaggcaaccttccttacttactttattcataaaataatctctgttcctcaaacagttctgactaaatccttaatgccaataaagggctacgaaccaattatggctcaaatagtcagcctctgtacccacaggttccacatccacatggattcgaccaaccttgggtcaaaaaatatttgaaagcactgcatctgtacagacttttttggtcattattccctaaataatatagtgtaacaggtatttgcatggcatttacactgtacttggtattaagtaatccagagatgatataaagtacagtcatgtgttgcttaacaacagggatatgttcctagaaatgcgtcgttaggtgatttcttcattgtatgaacatcatatagtgtgcacacacaaacctagatggtacagcctattacacac

SEQ ID NO: 188808 - DNA, 432 bp, Homo sapiens
tcttgcttgccaccatgtaagacatgcctttactcctcctttgctttctgccatgattgtgaggcctccccagccatgtacaactgtgagtccattaaacctgtttcctttataaattacccagtcttgggtatgccatgagaaaagactaatacaggcatgctgcgaataagcaatagagaaggctgactgcaggtgctgaaagagcaggagcttgctgaaaaaggagatcatgcttgttgggccagtcaattaagaagagtctgggaaagtgataatctttggcattggccttagaggaaggtagaattttagtaggcaaagaggcagttgagaagaagtggagaaggaagaggcattccagacaaggggatgctgagttaaatgacagtgctgaaaccatattgggtatatttggagggctgtcaacta

SEQ ID NO: 188809 - DNA, 219 bp, Homo sapiens
cctgggcaagagtgtaagactccgtctcaaaaaaaagaaaagaaaagaaaagaaaattgagtggggttaatgagggaaagcttcctaaaggtgagccttgaaatttaaaggagaggaaggctggggtatattgatgggagctaagctagcaacaagctcagtgctgtgattttggcctcactgagaccactgacaaaacaccgccccccccaccccggt

SEQ ID NO: 188810 - DNA, 151 bp, Homo sapiens
gttgggtctgtgggtagacatgctgtttcagtcctcaggtgggctgacctgaatcctgggtcagttggcaggcaaacctggtttctgggttcacaagggcttggctggtgctttgttccagtgaggatggcctggcactagggcgggcctg

SEQ ID NO: 188811 - DNA, 442 bp, Homo sapiens
tgccaactttaaccataataatgttaagtgacctacaatactgatagtacagctgaagtcctaagttcttaaagcaggaagtcactacacacaggaatgaaaagaatttccttccctttctttgaatatgttaaactagaataaaattttgaaaaaggccgaatttgtctttggtgtccttcgatttccattctgagactttctaaatccccagttctgatagtctaaccctgaagtgactcagtttaatggcttctagcttttgaaagttcttgtccttttttattacttatattctgaatccagttgtgcaaaaaatacaaagctttgtagtttttattttcctccaaagaaacactatggtatccgcaacaaggctctttgtaggagaggtttatcaggaaaagagaaagacccctaaatgcatagatcatttgtaagc

SEQ ID NO: 188812 - DNA, 107 bp, Homo sapiens
atcacagatgacacaatccagcatccctttatgattaaatacatcccacactcgtggatgggtagaatcaatattgtgaaaatgaccatactgggcctggcatggtg

SEQ ID NO: 188813 - DNA, 377 bp, Homo sapiens
aatcactccacacccgactgaacattttctaaccttatcactgtggcagaaactggctactcttcctcctgggtagacagccaggctgtatttccccgctgcccctgcagtgagaggtagccattggagccggcgcaggccaatggactctgcactggagtgacacatgctgcttccaggcctgtccctcaaacctcccacatgtcctctgtctgctcttctcacttccaaggagtgtgaccatcgtggaagccccaggttagcaatggcagattgggaggcatcgatgggaggaacctgggtccctgacttaaagcatcatggatttggactttccgttattgagaaataaacttccattgtgtttaagcctttat

SEQ ID NO: 188814 - DNA, 223 bp, Homo sapiens
tccaagaatgtcacaattcaaatatgtttaaacccaaatacaatataaaaagtacacaaaaccagttaggtattataggaatttacaaatcttttcaaaaatattttctttttttttttggaatttttaagagccagggcctccctcagaaccccggccgggggggaagaaccgggacttggcctcacattccctttgaccggtaccggacctgaattccgaa

SEQ ID NO: 188815 - DNA, 406 bp, Homo sapiens
tgaggaccccagggctggtggtgaatgggactggagaagccgtgacttgctgttgtgttgcgattgataacactttcactggcactaaactgggatagtgttaccacaggaaggaaattccttgccattagccttttgaaaacagattgggaaatggtcgttataagaactaaggtgttagctgttgctgggcatgaactcttgggaggaaggcaatgagaaactaagagtgattcatcatgagttaaagttcagctggaagccagaggacttcttggcagcactgcagattcttatttcttggagccacagggcagaaggaatagagaattgggtcctgggcatcatagaagagtagcagaatcacagcggagcatgaatctcagtttcaatggctgctatgctg

SEQ ID NO: 188816 - DNA, 165 bp, Homo sapiens
taggcatttcaggcctattctcttctctatgctttaaataagctaactcagtggccctcaactggaagtgatatagccccctagatacatctatcaatatctggagacatttttcattgccacaactgggtgaccctgtactaccggcacctagtaagtcgaggc

SEQ ID NO: 188817 - DNA, 198 bp, Homo sapiens
tccaaatcttctacgcacacacacaaacacaaacattgattactactttcaaagaaaagaggtcattctatgtacagctgtcccttagtactccccgtagataccaaaatccgctgatgctcaagttccttatgtcaaatagtgcagaattcgcatataacctatacacatcctcccgtatgctttaagtcatctcca

SEQ ID NO: 188818 - DNA, 133 bp, Homo sapiens
tctgtggagatatatatatatatatatatctctttagagagagacatatatgtaatatagatatgtatctttatatatatctctctctccacagaaatagtaaatatttaaactcaatgtgttttgggggatg

SEQ ID NO: 188819 - DNA, 422 bp, Homo sapiens
aggaacaaatgagacttgtttatcacactgtgaaagtaaataaacaacccaggagaaaagcatatgtatacaggacctttcttttttcaagatgactgctagagtgccaaacctacccaagaaaattacaggaaccccaaggtgcactgttttacactgaacttattcctggcactattttttgctcactcctactttcatttttcctttctccttctcatgtatttattattcctggcattattttttgcccactcctactttcatttttcctttctccctcttatgtatttataattcacattatcttgctctatgtgacataaatgaatatatcaataatacaactaaaaagcaaaaaatcaagcacataagattccattcttaaggacgcatactatatgctcaggtccaatatcatt

SEQ ID NO: 188820 - DNA, 533 bp, Homo sapiens
cgccctcccaccctccagattcccaccagggcgaacccagcaccgcctgtataccagactctgtgccaggcactgaacgtaaataaaaggtttgtgcccttctcctccacattccacacgtagggaaactgagtcacagtgaagtgtggggaatgcttactctgtgccaggcctgtgctgagtacttaatgtgattctcttctttcagccttaccacagccctctgcaggcaggccacagagccagtgcaagacagagcagagcaggactgcaccccatactttgtatccccaggttagcccaggggttcagatctgggttctgacccaccccagcctctgggctccttccccctcagcctgctcactggctcttctagctcggcatagctgggctctctaccaagagtgccttttctgccttctcccccaaatcagcccatacccgcccaggtcggcactgggcatggagcaggcagctcgtggtggggaaagggctgggtaataggatctgcatggcaccatgaatgctga

SEQ ID NO: 188821 - DNA, 451 bp, Homo sapiens
tacagcacaaatgttgcacagaattttccaggtggagggacagaggaagatagaaaaagttggcatcgtgggcaggaacacaatgtagcttccctgggagaagaagggacagttgctaggctcaattctgctcagcctttactgaaccccaccaggctgggcaccatgcttggcaaagggcataaaacaaggaagtcagcagagggggcagcttggtacagttagtgagaacataggctttggaggtaaatattctgtatcaacccattttcatactgctttgaagaaatacccaagactggataatttataaagaaaaagaggtttaatggactcacagttccacatggctggaaaggcctcaaaatcatggagaaaggcaaaggaggagcaaaggcacatcttacatggcagcaggcaagagagagtgtgcaggaaactgccctttata

SEQ ID NO: 188822 - DNA, 562 bp, Homo sapiens
caggcctcctccctttcccacacatcaagctcaaggatttgtccctgcccaagactggcaaattgactttacttacatgccccaagtcagaaaactaaaatacctcttagtctaagtagacactttcactggatgggtagaggcctttcctacagggtctgagaaggccaccacggtcatttcttcccttctgtcagacataattactcagtttgggcttcccacctctacgcagtctgatagtggaccggcctttattagtcaaatcagccaagcagtttttcaggctcttagtattcagtgaaacctttatatcccttacagtcctcagtcttcaggaaaggtagaacggactaatagtcttttaaaaacacacctcaccaagctcagccaccaacttaaaaaggactggacaatacttttacctctttcttttctcagaattcaggcctgtccttggaatgctacgggtacagcccatttgagctcctgtataggcgctcctttttattaagcgccagtctcattccagacaccacaccaacttagactgtgccccaaa

SEQ ID NO: 188823 - DNA, 334 bp, Homo sapiens
tgttcctgagggtacaagagtgaagagggagctggaataatggctgaagctgaagcaaaagctgcaggctgctgggatgttgctggtctctgacctggaggctgtttcaatggccacatgtggtggaggcaggggatcagtatttgggttctcagtttgcaggaaaagggagcaagacccagacacacacctggcagtctcagagcaggactctttcttttctttcctttccttcccttccttcccttctctttttttctttctttccttctttctttttttctttctttctctttctttctttctttctttctttctttctttctttctttct

SEQ ID NO: 188824 - DNA, 282 bp, Homo sapiens
taggattgtagggaataattaaatggttaatacatggaatgtacttagaacgactgtaagcacagatatgcactcaggttacctcttattatcagatgtactataatcttaaatttattcaaaattgctactgactgaaaaatacgtgattttggtgggtgtggggaggaagtagcgaaaaataaaaagtcctagctggaaaagcaaatataactgttcaagggctattaaaatgcaatgatcaagagacaaggaatgagagacacatttacccaggggaag

SEQ ID NO: 188825 - DNA, 629 bp, Homo sapiens
ttggcaagtgaacagacagtgatgcagaccaggatttggaaagggatggtcagtgccctgtgggtcctaattaattaatgttacatccccagggaaaactgctttgagtccctaagttaaggtaagcagcctctggtatacactttcatggcatcttgtacttttttctttatcacagttttaagacattattggtatgattatccacctaggggctgataggggatgaaaggcaccctatctatttggtgcactgtccacagtgcctgaaacagagtggatgctcaaacccatttggtgagtggacggacgcattcaacaaagaggtatgaggagaccttgtgtcgccaggaccttcgtaaatgaatgaatgaaggaaggaaggaaaagaaggaaagaaggaaggaaggaaggaaggaggaaagagagggaaggaaggaactctcctgacttatctggctgctctttttttgtgtcctatcctggctctttctactttgcttgatgtctaattgtatttagagtattttagatgtgaaagttaggagtagaaatggcagattatcacatgtgattctaggtctggagaactgtcttattgcttgattacatgaccattctagagtctg

SEQ ID NO: 188826 - DNA, 285 bp, Homo sapiens
ttaattgtccccaccgtatggacaaagaaacagatacagagaggttaagtaacctgcctggggtcacatagctagtcttttccacttcctataaggccttgcagggcagtagccaggatagggcagtttaactcaagctgcgtccaaacgctgggttggctagcaacaaaaccagaggcaaataaccccatcactacctaccttctacctgaaagggaggagtttagagtatttgatttctctaagcctgttgtctcactggccattttgagtgttgaaatgaga

SEQ ID NO: 188827 - DNA, 242 bp, Homo sapiens
ggagtctttctttgagtgtaacctgcaaggctggaactgccaggccaaaccccattagccactgaagaagggtcataggcccatggagggagggggctcccctcttaggggggatggggaatggagatagatggtgtctttctaggtgtggaaggcctctaggcccaagaaggggtatctatgtggtcactgtttccatggagcaacatgggatgaattaggggtgagagataccgcgtgaa

SEQ ID NO: 188828 - DNA, 533 bp, Homo sapiens
ggttagggccatggtgaaagcaaaagaggatgttaaaagtcatctgtttctacatatatttttaacatagagccaataggatttgtattcacattgggtataggttgtgaaagaaagaggagtcagggataactttagaatctgttggcttgggcaattgaaaggaaggagctactgaggtaagaaagactgagaagcaggtttgggatggggtaaggagaagtttgggtttggacttagtatgtggtgggtatgtcgagtgtgcagttgtgcaaatgagtggatttcatgggcaaagtctggcttgaagataggattcctttttttgggaattatttgtacatgctatttaaaatagtgagactggctgagctcaccaaaggaatgactgtagagaagtcctaggactaagtgagtcttagagccacagtgcttagggcactggggagaagaggaaacaccatcagaaggatatgagaaggagcagcctgtatggtaggaggggagtcagaagagagagttcccttggaagc

SEQ ID NO: 188829 - DNA, 168 bp, Homo sapiens
gccccaatatagagtagtgtgaataaatatcaccgagtataaattgatgctatctctgtcatcaaaacttttcttcagaattattctggtgttcttgaggtataacatggcttttgctttctaaacaccaaatgctccacattccacacatcttatactctgttatct

SEQ ID NO: 188830 - DNA, 498 bp, Homo sapiens
tgcatgtcctcccccaccatcagcaagcctggagagctgggcaggtggtctttacccagcaccttcaaggccgccttctctggccacagggagcagcccggaactggggcagggagcactgttggaagtgggtcaggcttcccaaagggaaggatgcctccaacagggctgtgtgaactggcgactccatggcccttggagtagaaactcactgcatgcacctgggccttgtcagtctggttgttttctgtcaagctcttgaggtggacatttccctccaagggcctgggattgtaccaggaggaagtgaggtttccctgagtctccaggggcctagaggtggaagctgcttccccattgctacaggggccccttttattgtcctcctgcccctgggtctctacctggtctttcacctccgttgcttctttgggctcttctgccctcacctccatcttcgggagcctggctgggatcacctgctcatctaatgaagga

SEQ ID NO: 188831 - DNA, 365 bp, Homo sapiens
tacttagaaagttgttctatttaaaataaaactagtggtatacaatacgagttctgaaaaaaagacagacctaccgttctccagaagatgcttagctgtaaattgaatcctcgtcattgaaggtcaaacattttgagaaatctgtatttcatgaagaaagatgctgtattatgtaagcgtaatagttaactgcagtgaaggctttttggattgttctttgttgctggtttggcatggcactttttggctagtcattgaaatggaaccttagtttaacttctgttacatatgtaatttttaaccttggcatggcagtcatagaatttaattgatatttatgaaatgctttatattcattggtggca

SEQ ID NO: 188832 - DNA, 451 bp, Homo sapiens
  misc_feature (82)..(82): n is a, c, g, or t
  misc_feature (85)..(85): n is a, c, g, or t
  misc_feature (89)..(89): n is a, c, g, or t
  misc_feature (101)..(101): n is a, c, g, or t
  misc_feature (106)..(107): n is a, c, g, or t
  misc_feature (118)..(118): n is a, c, g, or t
tccctaagatagagagatacatttaactgttactgtcccaaagacagttcttctttcaaagacatgtctgcatcagatcaanatnactntgtcctctcacnaaccnnaaactaaaaanataggaaagttattttttaatatttgaaacaccttaattttgttaaattttgttaattctcttttccatttctcttgctgctaccaactggttttctagtgactggtgttttctcccttctgttccttcttcagcttctgtttactcataacattaggccatcaccagttgctactctgacctccatctcattgaccctgttagcttttgcttctgctaaggacctgactcactctctgtttcccaatcccaagagtgaggaactggccggctgcccctgggtcctattcatttcttctcttttcagctggggctgggaagagcttcctaagt

SEQ ID NO: 188833 - DNA, 667 bp, Homo sapiens
cctcatcagacttttcagtgtgaatttcacctctacatttaaaagacttactggaggaattagctgaggcctggccctagtttagtgctatctttcccacaagtagaaggcccaagtttgtattaggcttccattttgaaaaatgccctcatcactttggctaggtaggttccttgcattttaagggacagaaagtcaccaaagccagctcaagaagtgcagggtcacttgagggagtgagtcctagaaactccaggctacagagaggctggaattagaagtccattctggattcagagcagttctggaccacatagtttggccctttgaatatccgtgcatctgtgggtgtcccatcgttaatgtttctcaggtactccctttctgtaattctcttttccatttctcttgctgctaccaactggttttctagtgactggtgttttctcccttctgttccttcttcagcttctgtttactcataacattaggccatcaccagttgctactctgacctccatctcattgaccctgttagcttttgcttctgctaaggacctgactcactctctgtttcccaatcccaagagtgaggaactggccggctgcccctgggtcctattcatttcttctcttttcagctggggctgggaagagcttcctaagt

SEQ ID NO: 188834 - DNA, 816 bp, Homo sapiens
gctgcctgaggctgaagggctagggggttggcccactgtcacttagacattcaagggaaggacaaccccctcacccctaaggctgccaagttctgcaacatcttaatccgatgagcttgggatatgcagatacaaagggccattcttttctaagtgtttactatctaagttcccagagtcgtaatgtgtcagaaaacaaatgccatcataacatgaaaatactcactaagaatctgcccttttgtaaaaataatgctccacttatagattcttccctcacttaaaaagcgtctatcccacctggctcaggtcagtttggatgactgtccgatataacaggacaataccatttcaatgcaaatcaactgcaaagttcatgaagtcaaagaaaacagtgatggagaattttacatgcaaggtctttgaccaaggagatcagatagagcttatcaattaagtgaagaaaatacgacgaggatgatgctcaaataggttcttcaaaagggaataatttgaatatcgagggactgaaagagatccttggggaaatggatgaagcccttaagtattaaacagacgtagactcttaattaggtgctgtaaagtaaaatgtgaagagcgagttactatgtgaacagatcactttgctggtataataaataaatatacccacaccaaaatcaacattttattctttcttcaatctgaaaattagcacataacctatattttgtaatctgtatagctaaaaatagcttgttttgaatgcctcatttgtacaataaaaatcttgatgtctctttaaattaatctgct

SEQ ID NO: 188835 - DNA, 440 bp, Homo sapiens
tgattaatgctagcatggtatagctttctctatctccttttaatctatatttatctttatatttaaagtgagtttcttgctagacagcatataattgagtctaattttttgatccactctgacaatttctgtttcttagttggtgcatttaaaccattgacagtcaaaatgattattgatatagttaatacctaccatatttgttactgttttttatttgttaccgttgttctttgtttttatttttgttttctactctttttcatttctcccctgctccctcactcctaccatcagaaacatgagaggtttttgtgtgtgtgtgtgtgtctctaataactactatgagaaatcagttgaactcttggaggtaaaactcacaaaagagtgggtgggcacacccctatgacttggttcccctggaatttttaacacagtct

SEQ ID NO: 188836 - DNA, 809 bp, Homo sapiens
ttattgttaatagttttaccctctgcattggagagaggagtgctttactccaagaagctttcctcatggttaccgttctctccatcatgccagccttctcaacctttgcagaaattactagagaggatttgaatgtgggacacaaaggtcccatttgcagttagaaaatttgtgtccacaaggacaagaacaaagtatgagctttaaaactccataggaaacttgttaatcaacaaagaagtgttaatgctgcaagtaatctcttttttaaaactttttgaagctacttattttcagccaaataggaatattagagagggactggtagtgagaatatcagctctgtttggatggtggaaggtctcattttattgagatttttaagatacatgcaaaggtgtagaaattgaactgttcaatttatgatttcctggtgcgtgtgtgatgcctgggaggcccaggctacgttcctttagccactgaaggactctgacagctgcctcctgggggtgtgggagccaagaggcgggaagtcaaacttcagatgtgtctattgaatggcaggatgaagagcctggtagcagtgcttgcggaagggctgggaagccgaattctttgagagtaatgaagccacttccgggcaggtagcacagggagctgatgaagcccagtgtttgaatcagacctcttttagctccagtcctggttcagtactctctaggtgtgtgatcttggacaagatgttcaagccccaagcctatgagtctctaactaaggttgtgtagaataaatgagacagtgtacctcag

SEQ ID NO: 188837 - DNA, 182 bp, Homo sapiens
accagataatatatggaaagtacttagtacaaggcccatgctaacaacttcaatgttttaagccaatatcaataagaaagaaaactttgttgaggtgtatatgaattcagttttcattcctgttgttttctttttttagccagctacgaaagacatccaataaatgtcatttttaacctgca

SEQ ID NO: 188838 - DNA, 469 bp, Homo sapiens
tcttgattcccagatatcttaacacatctggagtcatactctattaccttcctcctcaaattctgttcttcctatacattccctatcttaaaggcatcatcatcacccaataaccacactataatctttaactctttactcaattgtcactcaaatctgacaactgtgaagtaaaaattatccccagaatcgatgtccttttacatcacaattcaatactctcacaagtctctagtcaaatctttacatgtcatctttttaaaaaccatagtggatgtcctactcaaacctcttatggtccctaaatgcctatagaataaagttcacactcatgagcatggaattacaaactcttcccaatatggccacaaccttatcagtttcactttccactattctccaagtcgagcaaaatccacttgctagttctcaaatcagactactgatgcccttcctctcagcccctctt

SEQ ID NO: 188839 - DNA, 314 bp, Homo sapiens
accattttcacatgaccatagtattttctctcaacagaatttcaggcaaaagtattattagagagccagctgaaaccattattaagcaagtgtcaatttgaagagcattcagatctggtactgctaaaactataggcaggaaaaggactagtacaggatagagaaggccaaagtggaataaccagtaaatgtaaaccacttcacacccacactgtggggatggggtgtgcaaatgggagaaatgggaaagatgggagaaatgcaaaaaatctgacacagttcctcctcccatctatacattcttacactaggga

SEQ ID NO: 188840 - DNA, 272 bp, Homo sapiens
taacagatatagaatgtacaaataagaagcaaaagggactgttcagtcacacataccataggtcaagatctgttggatctgcttgttcccatgcaggtttctaaagatggcaaatattgccttaagacttattaaagctactatggccatatgggatacaggaacaactaagcatcagtgtgtgaccatgtgaaccaaagatttcatggagtgtccttttttttttttttaatagaaacacaatctggctctgtcacccaggctggagttca

SEQ ID NO: 188841 - DNA, 305 bp, Homo sapiens
gtatttatttcagtcttatgaattgaaatggattatggtaatagttttggacaaagtaatataaaacctaaacttaaaaaaatattgttcaaggctgggcccagtggctcacgcctgtaatcccaacactttggaggctgagaagggcagatcacttgagtccagaagttagagatcagcctgggcaacacagtgaaacgctgactctacaaaaaaatacaaaagctagccaggcatggtggcacatacctgtggtcccagctactcaggagactgatgtgggaggactgcttgagcacaggggt

SEQ ID NO: 188842 - DNA, 448 bp, Homo sapiens
aatatcaaacataatctgcatggtgaagatttttctattcctccctcggcttagtgatcccactctggggaggaggaccaaccttattatctgaaccatctatcctatctctactcagggaagtttctgaatgccctataacttggatcctgccaactatgataatcagtttagcttatttcctatcatgcaatgtgttacgttatatgctagccagtttgctgattatgtcctgtataaagcttgccttttctttctaactagattataagcttcttatgaagaaagatgctgtcattatacttctttatcaaagctttaatgcattctctagtcctaggcatgtggtagtgctcatacattcattaatgattatcttccaaaaacagcgtgtacccagtatgattctaatacaataaagacaccattcgatcatctaatcggatct

SEQ ID NO: 188843 - DNA, 290 bp, Homo sapiens
agtgccaggccttgttctaaacccattacaagaattaaatcactggatgtaaaaacaagcctatgagataagtactattctccccatttcacagatgaggaaatagagacacaaacaggcaaagtctcttgctgggggtcatgagtgagctagaacttgatctccagggttttttgtttttttgttttttgtttttgtttttgagacagagtcttgctctgtggttcagactgaagtgtagtggcacaatctcggctcactacagcctccatctcccgggttccagcgat

SEQ ID NO: 188844 - DNA, 634 bp, Homo sapiens
gtccgcttctgtgggtgagttaggggccctgtggggagcgagcactggacatagagcttggaggccaagtgctcaccctgcccttaactggctttggcctttgccaagtgctaagtggggaatatggtacttgtactgtgaaggtacagaagagtatctttagtatgttaccatttgtgtagagagagggaacgtgtgtgtgtgtgtgtgtgtctacatacatactatgatcatatacataaaacatatctgcaaggattcataaactcaggagggtgttagtgggaaaggggcgggagagcattaggacaaatacctaatgcatgcggggcataaaacctagatgacgggttgataggtgcagcaaaccaccatggcacatgtatacctatgtaacaaacctgcacattcagcacatgtatcccagaacttaaagtaaaataataaataaataaaacacaaaaaactcaggagagaggaacagggtggctgggcgatatttcccttctgtaccttctgagctttggactatgtgaatgcatcatcctttcaaaaagtgaacaagaaattgatttccccattcctgtctgtgcccccacccccagtgaacaaatgggcttggagaatcagatat

SEQ ID NO: 188845 - DNA, 216 bp, Homo sapiens
ccctgcatgaagctccgtcattttccatagtttctgagcaaattaactttggcatctagctgggttgctcatttgctagtcgtgcctgttaggaaaggcttgttaaagctgtgttattggtggcgttttaaaaatgtgttactctctttgtgcgccttttgcctgttaaagtgatgactctatcctcccccgtcctcgtcatattgaaggccatga

SEQ ID NO: 188846 - DNA, 489 bp, Homo sapiens
ggctgagccagaaagacccctactgaagtccagaggcacttttctgaaaggtatttttgtcttgttttgttgaggggaccgggaaagatagtatatattggctgtcacctggagtatttgcccaaagtatatatatgctcaatttgtaatatctatttaatatctaaactatactcatccgtctcctcaaaaacaagaatttggtgagtttatttgggcattttctctttgatcatgaggcccatattatgtctcatattatactccaaaccaaaagtatttgttgaggcaagtaaattcagaggcttcttccaaggagaaaaggcatattgtgagttgctttcctctgagaaggctacagtgcttcactgtgatttatctttctgaatttgcagctttagaaaacatgttgtttttttcttcccatgcactaaacaaaaatattaatcctgtttgtccccaaccacccatcattggatatatgttttc

SEQ ID NO: 188847 - DNA, 225 bp, Homo sapiens
aggcctggattgaagtccatgatgttggacacagaaagactgttgtgccatcacttacatgaccaatctcttattgatggacatttaagttgttttcaaatttctgtttaaggttcttcaacagataaatttggaataattatcattttctttagaaaacaaataagcaaactaaaaacacctgaaggtcaaaatgacaaatctctgacatcatattagtcgagg

SEQ ID NO: 188848 - DNA, 887 bp, Homo sapiens
atacaatcgagctcggtaccgttttgggctgtcgtgctgcaggaggattcttatgattccattcccaacatcctccttgtcgcatgttcggcaatagcgtgaggttgaaggaagtgtcatcacagagatttccgtccggcttatttctcaacaaaaatgtttggctgctatgcaaccagtgttttaatagatgacgggacctttcgtgaaaggccaggtttctattagcaacaacaaaggacaggagctatggggcagatgcaaataaaatcatacctctgcatcctatttgaaattcctcaactcattttcagctatcataaaggcagccaaaagattccaaatggggaaacaatgagacaaaattagaggtgccagacttcaccaataaaaatgcagaacaactagttaaatttaaggtaaactacaattatattgggacatatttattctgaaaatttttcattatttatctgaagttcaaattttactgggtgtcccatattttatctggcaacactagatttaattggcatctcagatcactattttatttcccaaacacaagacacaatgtactttcagttcaattaaccattctttcaccagaagaaactatgcagaccagaaagataaggttcccatactttatgacagtctgcgcatgaggctggattaaggggtatctccccgccactacacactggaacttcagttggccctgcatggccccaaaacacttaatatggactagaggcttactgaatccttgaatgagccctatggggtaggcccaagtattattttctctactttacaggtgaggaaactgaggtttggagaggatgaaatctaactcaggtttgggcctcctaatttaaacaaac

SEQ ID NO: 188849 - DNA, 421 bp, Homo sapiens
tggcatttgcatgcctttttaagcatcatggttcgtttcacctgtgatgtaatatctgtgtctagcaaaaacatgattttttgtttcaaagaaagagtatgtcaagttgaaagtcagcttggcaaacatgaacttaaaaattcacttcagttatggtagagacactctaaagactcatttcaagttttgcagaaggtttttaatattgtggccttaaagttgagggttgaaatcctggagagagactgatatatcactcttatttacctgagggatcgagaggaatttagtaacattacttcgtagttaaatagtacaggaagccaggtccctccgttagattccttttgctttctgttgtttttgttttgaagactttttaaaagaacagttttgggttcacagaaaaactgaggggaag

SEQ ID NO: 188850 - DNA, 341 bp, Homo sapiens
aattggttagaggcatgcattccttcagctggtatctttcttcctctaacatggtgattctcaatttgtgggccacggaccctgagggagccttgaagttgttaaaaaggtttagtaaattcatgcacataccaagcattgtctgtaaacagaataatgtcatggacacacatgcagataaatatacctactaaaattctttgaatgtatgaaatgctattgtggttaatgaaatgcacattcacttaaacaagcattttttcagttcctataggttttttttattcatgtgtatcattcctccatctgtagaagctaaaaatacaataactctcttatag

SEQ ID NO: 188851 - DNA, 260 bp, Homo sapiens
ttatggagaccgtgggatgtgggtgggatctgggattctaagacaggcttcacccacaaggtagagcccaggtccctttgttgtgagacctcaaaccctttcaagacttagtcaagggcctagcttcattccagttggagttagagcagaagaaaatgaaattacatgaatgttcatagcagtaccatttcacagtagccaaaagagaagcaatccatgcagtgatggatggatgcatgaataaagatgatgtgtgtaca

SEQ ID NO: 188852 - DNA, 317 bp, Homo sapiens
ggtctcaaacttctgacctcaagtgatccacccacctcggcctcccaaagtgctgggattataggtgtgagccaccatgtcttgccagactactgaaaatcttgaatgaaaaataattctaatttttgtttattcaccctgcatcttagcaggtatagtgtaaaagttaggagcaaaaactctagagccagactccctaattctgatttcccgctctttgatgtgtccagtgaacttgggcaagttacttaacctccctatacctcagttttgtcatctgttaaggtaaatataggcccaactttgtggagttatta

SEQ ID NO: 188853 - DNA, 596 bp, Homo sapiens
attctggtaggcattcgttttattcttatgagcatggttgtctactgttacacataacatctagaaggtagaatctgtgacttacgaatagtacagggcatggtaggcaggataggaggcgaacctgcttagtccacaagcgtctgtgcagttgactcaaataaatctggcagtcaacacagtgcttttctttcttgcacacatctgatgttcagaaaacaaatctttagatgtggacgagtagttcccaaaggtgttacttctgttgccttcaggttacagcatggatgatccaaaagtaaaaacatttatgaagtcatcttagtgtataaatggaaacatttattttcttcatggataggagtcctaaagtcttttttttccctaaaatatcatttaattctaaagcttctatttacttttcttacaatttaagaaatacaggcagagcattacctctgtaatactgggtgtgctgtgctatgggttagtagtggttgtaatttaagttctctggaggttgtcagctaccttctcagaaaaatctgagtgcttagtgccttatagaactagggcttataggatatatctacttt

SEQ ID NO: 188854 - DNA, 601 bp, Homo sapiens
ctgagtgaaagaagccagacacaagaatatatattgtttaatccaatgtatatgaaatagaacacaagcaaatctaatttatagtgacagaagtcaaaataatggttgcctttgagacagcagtaactgaaagccggcacaaggggacattttgggcctctggaaatggtattttgatctaggtggtggtaatgtgtgcgtgtgtgtataaatatttatacacatatatacacgtttaagcataagtatgtaaacatacatcaagttatacacttaaaatcagtgcactttatgaaggttatgcctcaatagaaaacaggaagaaatcgtttcggccaggatgacaagtgcatagtgggcaagctaccattctcccctccccggcccgcggcagatgtcgctaattaatcaccacactcctttcctttgagctcggcttcagaaccatctcaatccagtgctccagccagctgtgctttgaggcaaaactctcagctttccctcatgtatacacaagtatgttgattaagataattaattaatcatcttaccatcttaattattaattatcatcttcaatttgttaagccacactctgagg

SEQ ID NO: 188855 - DNA, 284 bp, Homo sapiens
tagagggtagaggaatagaacgcaacgtgtcacatcctgcacactgcgacctggccgctgactctgtatcctcgggagaaagttctggttccttagttcagccttcaggtggtcaggccccagcataggcttgtacgccatccctctcccctaacacacacacacacacccctcatgcttcctgctccatctgaactcctgaaatttgccctttgcgtatgtgcttccctctgccaggatcacctgtccctttcacttgctaactacctccttggtgcgtctgg

SEQ ID NO: 188856 - DNA, 329 bp, Homo sapiens
tatttttagtagagatggggtttcatcacgttggtcaagctgatcttgaactcctgatctcaggtaatctgcccccttcggcctcccaaagtgctgggattacacgcatgagccaccatgcccggccgagatattctttactgttactgcttcacagtacttcattacgtggatatactacagttgattcaaacagcttcttgtttagggacatttggctgtttctagtcttttgcagtaacaaacattactgcaaagaacagtattatgcttacatgaatttctgttaagtgtatccttggaatagatctctcgatgtaggactggtg

SEQ ID NO: 188857 - DNA, 481 bp, Homo sapiens
ctcaattggaacggttttctgagttttgtttttagattgttaattgctagtatagagaaatttaaaatattttatatattttatatactgcaaatttctttgaactcgtctttaaattctaaacatatttgattagaattctttggacgttttgtacatacgatcatgtcatttgcaaacagtcagagtttgacttcctttccatattagaaacattatatttatttttctaagccaattgccctgtctacattctccagtacaatgttgcaaactagtgtcaacagtggaaatatttgacttgtttctaatatcagagaaattagtgaacctttcagattacttatgatgatatgtgagcttttcatagatgccctttgaaatgcagaaagttctcttatctgcctaatttgctgcatgtttttataatatggaatctgggaattttcaagtgcttgttgcataccttctgagatgattg

SEQ ID NO: 188858 - DNA, 371 bp, Homo sapiens
ggacacagtttgctacagcacttatgtgaataaaccaaatctcaccctgtatacaattatttatggaagcagtgactagtagtccaccatgaaggtagtgaaaatgctgtgacaaaaattgagtcagtgcatcacatttaacaaaaagaaaattttttctaaaactgtttcagaacttactcaatattggatggtccgagcggaccggtccgctcggacgacaagcagcagtagcctaactatttccaaaagtgactgcgaccatgtgaatatctcccactgaattcactcgaatatgttcccaaagctaatttggcccgtagccactccatgccgcctggccagagaggaagtgggatggtccgagcgga

SEQ ID NO: 188859 - DNA, 333 bp, Homo sapiens
ccacagtgcgcgctccgagaaaaggcagctctgggggacctgacaccgccaccaccgccgccgccacagcagcagcagcagcagctcacggcattcctgcagcagctccaggcgctcaaaccccccagaggcggggaccagaacctgctcccgacgatgagccggtccttgtcggtgccagattcgggccgcctctgggacgtacatacctcagcctcatcacagtcaggtggtgaggccagtctttgggacataccaattaactcttcgactcagggtccaattctagaacaactccagctgcaacataaattccaggagcgcagagaagtg

SEQ ID NO: 188860 - DNA, 270 bp, Homo sapiens
ggatgttccaatagactcggtcaaacaactgaagtcagcatctgctggccttcaacacctcagctgagagtactctcattaactaaccaatcacaacggctttgtgatttaggatttctgcctggccaatgaactacttccgaaaataactttttatgacaatcctctattttaaaaattctctcctgcagcctgccttatagggcactcttcagggctgccctgatccggtgtaccccagctgccatttttgcttcccaaataagtgcc

SEQ ID NO: 188861 - DNA, 474 bp, Homo sapiens
cttgaaggcaacaacatttaaattccaccactttgcttcagcaagccgtgacgcttaaaaacaagggtgtcagaaaaattctggatgaaaagatcagttcatgaaagtaaggaaggaatagtgttgtgcagctatagaaataacaagagctgaatgacactcaaagtttatgtgtggcattttcaaaatgcagtaaaattcattttttaaaataagcacagatttacatatgttaaacacaatttgaatacaaattcagaatgcaggaagcagtcaatatgggaacttgagtgtgggtacattacaaagaagaaaggtaagaactggtaagagacactttagccatagcaggccagaaggctgcacaggtgtgaaaccctcctggtgagagggtgagcagtgagctccaccaccacttctcaaaccacgtgactctgggtgagtcactttctcagtcttagtttcctcaccata

SEQ ID NO: 188862 - DNA, 629 bp, Homo sapiens
tttttaatggggttgtttcttgtttgttgaatgtttaagttccctatagattctgaatgttagaactttgtgagatgcgtagtttgcaaatattttctcccattctgtaggttgtctccttattctgttgattgttttgctgtgcagaagctctttaattagttctcacttgtcaacttttgcttttgttgcaattgcttttgaggacttagtcataaattccttgccaaggccgatgtccaggatatttcctaggttaaaacactttagacaggtattttaatatagatagtaccttctttttttaacaggcaaaagacactttttatgaagatactattgataaatcattgattttcaaatgatcttcatgtaagtacaagcatcaggtagcttaaagcctacctagagaaatatttttctttattcagccatagagaagtaccttcttttaagaaatagaaagttaaatctggctagtgactgtgactgccctctagttccttcacgttttaggtatttacatggagtctgatacattcgctctcaatcttctcatctgtgagcccacccctatctagctgctctttgtattagacacaatagtcccagctttcaggtcagacaaa

SEQ ID NO: 188863 - DNA, 824 bp, Homo sapiens
agcacgtaggtaatttttaattttctgccagctactttaatagcaaaaagaaattaatttttttgctattaaaattaaggtggaatttttttgtttgtttttttgagatagagtctcactctgttgcccaggctggagtgcaatggtgccatctcagctcactgcaacctctgccttctgggatcaagcaattctcttgtctcagcctcccaagtagctgggattacaggcacccgccaccatgcctggctaatttttgaccatattggtcaggctggccttgagctcctcaggtgatccgcccgcctcggcctcccaaagtgctgggattgtaaccatgagtcaccgtgcctggctagaattgattttaaatatgcatcttgtttagcccaatatatccaaagtattatttcaacaagtaatcaattttctttttttttttttttttgagacgaagtctcactctgtagcccaggctggagtgcagtggcgcgatctcggctcgctgcaagctccgcctcccgggcttacgccattctcctgcctcagcctcccgagtagctgggactacaggcgcccgccgccacgcccggagaattttttgtatttttagtagagacggagtttcaccgtgttagccaggatggtcttgatctcctgacctcatgatccacctgcctcagcctcccaaagtgctgggattacaggcgtgagccaccgcgcccggccagtatttttaaatcattgagagttttacatttttttcatactaagcatttgaagtctcgtgtgtattttatatgatcagcacatctcgcttggac

SEQ ID NO: 188864 - DNA, 406 bp, Homo sapiens
ctgtgcagcaacatttgagtgttgtgctaaaattctgttcctcagcagccttttacctgaaaggttttggcatccagtgatctttgcctggtcagttatctcattaatgggttaaaatgttggaacctctcatggcacatgctgagcagccagtagtcttcaggacaatggattctctaggtaaacttgtcaccacactgttccaagtgaggctggaagacagtttgtcaacaccatatttcaggctggaggtggaaagaagctgttgaggaaactccctttgcaagccctactcccagctcccagctggtgagacaatttacatggaaaaaccatgaatacaacacaagatctgaagtgtctccaccctctaggcacctagggaaagcttggatttgctttggta

SEQ ID NO: 188865 - DNA, 155 bp, Homo sapiens
attgaagggagcagttaggaggctcctgcagccggccagggtgcaaagaggacagaggccattacctgggaagagacccctgaagcaaaaagggtttatgctagtcccctgacagttgctaggcctgcccttccctgcagatgtcacatgcaggg

SEQ ID NO: 188866 - DNA, 366 bp, Homo sapiens
atttctcggccgccccatctgggaagtgaggagcacctttctctggctgccaatcatctgggaggtgagaagcgcctcttcacggatgacacaccatctgggaagtgaggagcgcctctgcctggctgccccatctgggaagtgaggagcacctcttcctggtctccccgtctgggaggtgaggagcgccgctgcccggccaccccatctaggaggtgaggagcgcctctgcccagccaccccatgtgggaggcgaggagcgcctctgcctggccgcccagtctgggaggtgaggagcgcctttgcccagctgcccatcatctgggaggtgaggagcgcctctgccagcccgccccatctgggagg

SEQ ID NO: 188867 - DNA, 370 bp, Homo sapiens
caacaggacagaagagatctgatcatgtcttattaatttttccatttcctgccgtgcctaggacagtgcttggcacaaaataagcattccataaatagttgtggaatttttgagctaaattaaatattcacagtggaaaaacaggaatgaaatagtccatgaaaaggcagaaagtaatctgtagcatcacagtgccaatgatttataagatttgatgcctccttttcattaggcaaataatatatgtccatggtagaaaaatgagaaaatatagataagcaaagaagaaaatgttgaaattgccaatgattccgttgttaacaccttagtttctttctttctacttctctttaatgataggcaaactctt

SEQ ID NO: 188868 - DNA, 661 bp, Homo sapiens
catgtactcttcagagtagtcacactggaaggatatttatccaaacattattgccactgcttaaaatatttttgaaacttcccttaaaaatacgtttctaatttgaaccattccaggaaagcaatcttattaatttatggtcaccctttaattttgaaccaaattggtgttatccaatttgggggcctatattattcaccatacaggacaatgaagtccttttattgttttccaaaatccagaaccaagatacctaccaaagatttgccatcactgagtttgtaacaaaataatctgtccctgaacacaggaggtattttccaagtgttttgagtggtagcattgaagtagagagcactgaaatataaaaatcattctcttggcatgagagcccttgggatttatctttgattcagacattcttcgatggcctcacggtcagtggatcgtctgtgacatggtgtctcatgtattaacgtagcattattgttgttatttataatgaggataataagactagtaattggttacaataaatcctattattcagaaaccttggctgtcacttgcattttgttagagctttactcggtaattcagtgatggtttcacaaatggccatgttggcaaacattacctttggactaggtgtggatggact

SEQ ID NO: 188869 - DNA, 368 bp, Homo sapiens
aaacaaacaaaattagcttggtgtggtggtgggcacctgtaatcccagctactcgggaggctgaggcaggaaaatcgcctgaacctgggaggtggaggttacagtgagccgagatcatgccactgcactccagcctgggcaacaaagctagtctccatctcaaaaagtaaaataaaataaaatgtttatttccaagttagtcttagcatttgtttcaaacgctttaccatcttggtagttctctttggtacccagattgaatgcagttatgtaaatggagtctggttgtcattctagacattttttgtcttctgacagtctatggaaatttctttggcagtcttaattactctaccagctaaaactac

SEQ ID NO: 188870 - DNA, 239 bp, Homo sapiens
cactgaaatgaaattgttggatcatatggtatttctgtttaatttttggaggaaccaccataccattttccaaaccactgcagcattatttacaatagccaaaaggaggaagaaatccaagtgttcatgaacagatgaacaaaagtgatatatccataaaatggagtattattcagtcttaaaggggaagaaaattctgacgtgatacaacatgatatatcttgagctctgccaggggg

SEQ ID NO: 188871 - DNA, 470 bp, Homo sapiens
agccattaaaagtgcaaggaaaaagaggtacatggttccataagagaatgcagtctggcaattcagcctgagaggtgagggcaggcatcccaatggatgttatagccaggctgaaatctgaagtactagccagaatttaccacagagaggggaagagacgagggccattccaggtaaaggcatggcatgtgttacgctgagaggccagtgagatggcacagcatcttagggactagcagaaggcgggcatgatcacagcacagagggtgaggaaggagcttgggcaagcaggtgctggagaaggggtgagaggctggttgctgtccccgacctcatctcccggtcactttattattaatattgaaaaccattggttttcaccatctgaccataaccagagaaaagccccttgctgtccctcagtatgcttctcagaggaggtaaagaggatgttgatttcacaagcatta

SEQ ID NO: 188872 - DNA, 352 bp, Homo sapiens
aaattgctaaagctgaacaatatttaattatgacaatatttatgctcactaatgatttggatggctacagagagacaaaagattcaatgctataacatcagatagaagcaataagagtagttagaaaggtgtggggagaaggtacaaagaagaaagccaaaacgggtgtgcagataaaagtctttttcctaattaattgacagtgtaatatttttgttaactgcttacagtttatagataaaatggagctgctaataaaatcattttgttgacaggatcacatttgccaagatacaatatactaataaaagctaaaaatatatggtttgcattgccataattatctacctat

SEQ ID NO: 188873 - DNA, 520 bp, Homo sapiens
tgctagttaattatatcactgtattaaattacaatcaacttccaagaaacacctaatttttacatagattaagaaataagatttttgaaataaaacctaatagtttggatgctattaccagataattcctagagcttactaacacattttctggaatcaaaataattgttaaaagtagagcacaggaaaaagtgaaaataatcttagaaggattgattgctattacaggtccaaaatgtaacttacagaaaaactaaatctgccattgtgcttttagaagtcttgaatgaacaatgacatttaaacaattttaaaaagatcttttcttataattttcttaggaaaaaatcagaaagcagagaaagcaaaacaaaattattttatggaatttcaagtccattcacaaaaatatatagtaaacagaaaacatatacagggtaaagtcaatcaaaaacatcagatcttgtattataaaatcatcacaataacattcagtcacatcatggatgagatctctgac

SEQ ID NO: 188874 - DNA, 311 bp, Homo sapiens
tctctatccctgtatacgtcttcacaatactgaaacaccttcctggttgctgaagagttgtgtatctgaccctgtgaaccgagaattgctgttacccccttttgattgaataagacttagaaagactggtcatttgacagagcttgcacaggaattatttatctgtttttaaatcactctgtgtgtggcactttatacaagaaatcacacgtagcttcccatattcagcaaatacatatgaggtgcctgttatgtgccaggcactcttcgggcagctttggctacagcaataggtaaagcaaagaacctgc

SEQ ID NO: 188875 - DNA, 380 bp, Homo sapiens
aaaagattataaaaaggggagatgtagtaatggacaggatccagcttgtgcagcaattatggttggtctaggttgggggcattctgggtagccatgtgaaatactgattatagctggaccttctcatctttgctctgtgataccacctgaattatttgaataaaaatcaaatctttcctccttaagaatccttgatggctttctgttgcatgtggagtaaagttcaaacatcttagcacgaagaattcgtcagttaaaggctggcccctacttttccttatcttctactacctccttctccatcccctcatcatgtctaagatgtgtgaagctttcttccaccttgcctacctagccaacccttacttgtattttaagac

SEQ ID NO: 188876 - DNA, 665 bp, Homo sapiens
accaggcagggggaggccacctccggtttcaagtgcaattggctgaacttcacgattttcctctctccactatttacaaaaatgttcactgagatggacacgaaatcaggctcttgtcatagcttcaaaaaccaagagaaaaagggtcaagcagttgtaggaatctagggggataccgccatccacagactacagtttagataaagctgcattgacaaggtaaagtctttgtcccaaacagaggagcacaagtccctggagccagatgggaagggcctcactccctccatttccacccttgccagctctgcaccaaccagaaaacctggaggccaccccttcgctggacagggcttgttagcctctgtcccagggagaacctcttcttctgtatccaggcagaacggtaccctgagggccagcacagcaggaagaaagacaaggacatgtgtactgccctgcattccaggctggaggagtcctcttaaataagagcccagaagtgtcctggggcagcagctggaggctgatatatttcagaggctgaaattaggggaaaggagaactgtactgtgctttagattctttaaaacataacttcccttcttcatagccagagaccaggaagggagggcagagaagactccatttggggagaccaaatg

SEQ ID NO: 188877 - DNA, 434 bp, Homo sapiens
ttcgcggtatataaactccaaccccgtctctactaaaaatacaaaaattagccgggcgtggtggcgagggtctgtaatcccagctactcgggaggctgaggcaggagaatcactagaacctgggaggcggagattgcagtgagctgagattgcaccactgcactccagcctggaggacagggcaaaactccgtctaaaaaaaaaaggacaggggaacacatagcatcacagatttgtagagtttgattatctagtgtaagtctttccttcaataaaggagttaagtgagcctcgtgaggttagccagttgagtcaagtagctaatcacgcagcatgtctggtgatataggttgttggccttacctctattggagcatggaacccagcctttgatcatgtcaagcttctattaataccttatggaaagagtgtaa

SEQ ID NO: 188878 - DNA, 353 bp, Homo sapiens
gtacttctgaccaaggactatacttttctaatgcttagctttcacatctatatcatgaagagacgtagtagattccactttaaaaagttgttgagcataggcttgacacaagaattaaacactataatagtggcaaggaattcaagtgcaatgtcagcctagagcagacttacccagtacttggtgtactggcctcctggtacagctccttggtcaacagccatttaggtaacagccatttaggtagcagccatttaggtcacagccatttaggtaacagccatttaggtaacagccatttaggtaacagccatttaggtcacacccatttaggtaacagccatttaggtaac

SEQ ID NO: 188879 - DNA, 270 bp, Homo sapiens
ggtaatgtgtctatgacagagtggcctcagacattcaggacacattaaagagtttaccaacttgttagaatcctgaagccacagaaaacggtttgcaaagaacgtctacgtctccttcttattatgtctcttgtttatgtctattataaagataatggcgccgggcgtggtggctcacgcctgtaatctcagctactcaggaggctgagcacaataattgcttgaacccaagaggcagacattgcagtgagccaagatcgcaccattgca

SEQ ID NO: 188880 - DNA, 640 bp, Homo sapiens
agttgaagtaaaaatacagggaggcttaactcttccttgaaacttgcgctcagcattatactcagatgattgtaggggccttattttatcctgggacatgttcatcctgggttatgtagattcattcttggagatgttagtttattctgcaggccagtttcactagaattaaagctctgtttcagagtgtagccttcatgtgcccccacaccatcattgagtgatggagagcccagcagatactgaggtgactaaaccagccacccccatgcccactgcttgcacaaaaggaaggtgctttgatatgactgatttttcttagggttgttttcttttttgttgtttttttctaagtctttctcattatttgtgaaaaaatcttggccctcaatagcttcaaaacgttaacatgctgggaagaaccactcgtgaaccaacactccttctccatgatactgttgtcattcccattttgccagtcatgtgggaaggaatccatgtcccggagacatgtgttgcagcagttctgacatgtttttgaatcagcgatggtgtcacgatgcagcttttgagaatgtcaagtttcagttgcattgggaagttcttgtttgggagatatcctatagtgtttcaaggttaa

SEQ ID NO: 188881 - DNA, 205 bp, Homo sapiens
tcacctcctgtgtccaaccacccccaggcttcgagtcctttcagcgaaggctccagacactgtggagaaaagacgaagaccccacagtaccatccaaattcctgacaatctgtcagcagaataaactggctgtgcctcatgtctgtcagtctggtgtggtttgttactagaacaactgaaatcagagatgtcaatgtgaactcat

SEQ ID NO: 188882 - DNA, 607 bp, Homo sapiens
cttcctgccatctcctgtcaccggatccttgagatttccttccaccagctgtggccatcccaaaaaactcagaacttccagatactacagccattctgaggggctgagaacagggaggctccccaggaagagctggtctggcatcctgtttagttcctattgcccctcctctgcaaatcccaaggagatgctaagtctcttttgaagcttccctcaaggaaggcagcaggttttgtaacacacataaccagtgtgtccatcagtgcccaagtctgagtgccttagcagcacagtggaggacaccatccctgctctcaaaaagttcatggtttcttttttttttttttgggtggggatgggttataatatttaatgggggagcccatctccggggggggtagaagcttcctcaagagctgggtttccaagtttaaggggttatcacttctgagtagtttcactttggccctcgtgcaaggatctgggggtgtgggtcagtctcgggaccaattgggggtagtgtttaagctaatagttccagggggtgagccagggttccgtggccccgtgtttggtgcaggggctcagagacatattctcgtgcctc

SEQ ID NO: 188883 - DNA, 329 bp, Homo sapiens
tagctggaattacagatatgtaccaccatgcccggctaattttttgtatttttagtaaagatgaggttttgacatgttggccaggctgatcttgaactcctgacctcaagtgatctgcctgctttggcctcccagaatgctgggattacaggcgtgagccgctgcacccagccggccgaagttccaggtttttaaaaagctcaccaggtcgtttggatgcaaagtaggagtggggatgaggaagaattttgcagctttaaatatggagggaaagaaaggcctccttgggaaaatgacattgagctctcgtaccattataccttcagagc

SEQ ID NO: 188884 - DNA, 519 bp, Homo sapiens
caagaatggaaactgtggcatatcgagcatttttccattgctgtctttcacactgggctatctaagtttatacaattccccagactagctgcatattaagcttgctgtgtacagctttattatggtgtggtggtggaagaagcattaatattccagctccgcatctgacagggcatttacatgcgcccatctgagcggcacctgagagctcctccaaggtgcagtaactgtgcgcctattgtaaaggcaaatgaagctcacctattccctgctgggatcagaagtgacctcaccaccccccatgcctcaaatccttcccttgccaacctaactcaatgccattgcagaatgacgaatgagctcagaaatagaccccaagttactaaccctgctaagaacagcaaaagcctttgctgaaatgttttaaaaatgcatagggagtgcagctggccagtaaaaagcagggagacaaattccaatgaacccaatatggaataagttacattttaaaactgatta

SEQ ID NO: 188885 - DNA, 620 bp, Homo sapiens
gacagtcctctcctgaactagccactctcacaaaatcactttttaaagattcaaagtgatacaaattcctaaacatttcttaaatcatcaagatgaacattcagatgatgagggtaaagctgtgccttttgagttccaaatgtaataaaataaagattttgcttttctgggcctaattgattttgtaaatattaattatctctacctcctcaaactggctcctttccctgtatcccctacaagtggggtacccattcaccccagtttgcccaggacagacttgcttttcacctattcttgcatggttatgaacagtgccctctgtcattctcaaaagtgccccagtttgaaggatgaattacacactgtctatgtgtggtcttctccatgccccatgcctcacaagtcacttcctggaagccagtcatgactctcctccccctggtcctcacagccaaccaacctccccatctgctcagcatgacctcccaatgtctctccatctgtgcgtctgtccagcacccatagatcacgcccaggaaactgctgtgctcttaacagtcccactcccacctcacccttccaatctgccttacgctctgatccacaaggctcttccc

SEQ ID NO: 188886 - DNA, 826 bp, Homo sapiens
catggtgcagcctacactgaggtgtctaaagtcaatccttaaacagaaccagtgagaactctagccatctggatgaccccagtctaacacacacaatcatcttctgcataactggtttccaggaagcccagggtcccaaaagataacaggcatgtttgccaaaaataagagggagcatcctacactatttggtgaaggaaggaaatcagaagacaagtatgcattaaatgaaaactccccaaaagctggttttaccacaagctgtgtggatcatttataattagattagctgagcaaataagatactgtaacttctcatgatttctcccagccagccctctgggagggataatgctgatacagaattgaaaatgttgatcccaaagaaactttaacaatctcaaaccatacattgcttttcatgccaatctgcacgcccaagtaatcctccagtggaatgggatacttaacaaaggaaagcagggactgctggcacagttatcacagtaaactacagcaaagccaaccagccatgttctcgatgccaccacagtaacccaaagggaaaggttgtcacagtggatctgtgggccatttgtggtcagtcttgagtgggagacaatgaagcacagggcctggtgaggctggaacacataactacagcactggacactgctcaaatacataactacagcgctggacaccactccttgctgtaatgtgacaacaattgctaaagcaaaccttgtgctcacagcaaagaggttttgccaaacacttagcaacaaagaaataaataagaagcaaatgctactatatctggtaa

SEQ ID NO: 188887 - DNA, 336 bp, Homo sapiens
aaatacctaaatttaggtattttaccaatttaggtatacctaaaattggacatttttaatgtgaggagtgtttagttcaatggggacatttctcagagagatttactactttttaatggtgcctctgagagtccttcagtagctgtcctccatcggagaacatctcagaattactttttttctgtccacttgcccataattttcatttactttactggatttgctcacatttattacccccattcatatttccttccattctcgatacactggaagaaaaatttatttatatatatatatgtgtatagcatatatacacatgtgcatatgttggaa

SEQ ID NO: 188888 - DNA, 315 bp, Homo sapiens
tccgtcctacatagtgtttcttactcatcactggcaatagccacctgaagggtctccttgctggtcccaggaaacagctaaaacttgtccatgtgaaggtggaggttgcagtgagctgagattgcgccactgtactccagcctgggtgacagagtgagactccgtctcgaaaaaaaaaaaaaaaaaggcttgtccttggggaaaaaacataaaaccccattcctgaggggccctcaaggtccccgtgatttgtgtaaacccagaaacgggggattgatccttgtaaccccgagcagggtgactgatgaattgacc

SEQ ID NO: 188889 - DNA, 654 bp, Homo sapiens
attaaatgttaaatcagataccttgttaaaatattatttaataaaagccagacgtggtggctcatgcctgtaatcctagcactttaggaggctatggtgggcagatcacctgaggttgggagttcgagaccagcctggccaacacggtgaaaacccgtctctactaaaaatacaaaaattagccaggcatggtggtgggcacctgtaatcccagctgttcgggaggctgaggcaggagaatcccttaaaccccagaagcagaggttgcagttagccaagatcatgccattgcaatccaccctaggtgataagaatgaaactccgtctcaaaaaaaaaaaaaaaaaagaaaagaaaaaaattacttaatatgtatttacctgattacttttcttcaaaagaaggattaaccttaaagatacaagggtatgttattttgttaaatgccagttataaatgtcttttgaatttctgggataagaaaacagtagaaataataataaagttctttaatgtttgaaaactgaaaatgtgtttctttgaactgtgggatattcccttcacagcaattttacaaagtatatgtactgtttttaaaaataaaacaactgatatggaccacgtttaactaaaatgagtcataggaaattagattt

SEQ ID NO: 188890 - DNA, 405 bp, Homo sapiens
cttgaacctgggaggcagagtttgcagtgagctgagatgaccaccactgcactccagcctgggcaacagagcaagactccatctcaaaaaaaaaaaagaaaagaaaaaaattacttaatatgtatttacctgattacttttcttcaaaagaaggattaaccttaaagatacaagggtatgttattttgttaaatgccagttataaatgtcttttgaatttctgggataagaaaacagtagaaataataataaagttctttaatgtttgaaaactgaaaatgtgtttctttgaactgtgggatattcccttcacagcaattttacaaagtatatgtactgtttttaaaaataaaacaactgatatggaccacgtttaactaaaatgagtcataggaaattagattt

SEQ ID NO: 188891 - DNA, 702 bp, Homo sapiens
gagacatgcatggcctgtttgatgtggagatctctctgaccgtccaagagaacgccgggagcatatcctgttccatgcggcatgctcatctgagccgagaggtggaatccagggtacagataggagtgtaagcgagagagagaagcatgggccggtgccttattcatggttccagcagggacaggatcagagatgctcccacatccagctgcttctcttcttctagtcctagcctccaggggcccaggcccaaaaaaggaaaatccaggcggaactggactggagaagaaagcacggacaggcagaattgagagacgcccggaaacacgcaggtaccaacgcctgagagggtgacagtgggacagaatctcaggtggacatgagagggggaactgaacagggacagatacgggaacacagagtgatgctgagacccatcctgcctgcagatggagaaactggatgcttgatcgcccccaagggttcagtgcccccagacacacttctttcccttggtctagaaggggagaagacaggggctgggtaaacgggagacgggggggtctttggcacagtttcaggcaattgagggcactagtgactggtcaggggtctgagctgaggggaaggaagtaaagtcaggcagaaaattctgagtgggaggaagttagatagtggggtccctccagctcttatgaatca

SEQ ID NO: 188892 - DNA, 815 bp, Homo sapiens
gagacatgcatggcctgtttgatgtggagatctctctgaccgtccaagagaacgccgggagcatatcctgttccatgcggcatgctcatctgagccgagaggtggaatccagggtacagataggagatacctttttcgagcctatatcgtggcacctggctaccaaagtactgggaatactctgctgtggcctattttttggcattgttggactgaagattttcttctccaaattccagtgtaagcgagagagagaagcatgggccggtgccttattcatggttccagcagggacaggatcagagatgctcccacatccagctgcttctcttcttctagtcctagcctccaggggcccaggcccaaaaaaggaaaatccaggcggaactggactggagaagaaagcacggacaggcagaattgagagacgcccggaaacacgcaggtaccaacgcctgagagggtgacagtgggacagaatctcaggtggacatgagagggggaactgaacagggacagatacgggaacacagagtgatgctgagacccatcctgcctgcagatggagaaactggatgcttgatcgcccccaagggttcagtgcccccagacacacttctttcccttggtctagaaggggagaagacaggggctgggtaaacgggagacgggggggtctttggcacagtttcaggcaattgagggcactagtgactggtcaggggtctgagctgaggggaaggaagtaaagtcaggcagaaaattctgagtgggaggaagttagatagtggggtccctccagctcttatgaatca

SEQ ID NO: 188893 - DNA, 312 bp, Homo sapiens
aatattttaagagtgagcagatgaaaccattacttcaaataaagctttttgaattatgtttaattttatttatctctggggacaaggaccaatgaagaagggactgcaattagcattagcctctcctgcatgagaggaaaaggtgacgcccaaagaaaggtcaaagaaagaaaactagagatcaaattggaaagaagagcgcagtaaaacacacgaatcaaattaacaacctccactgtattttctctgtaaaactagcatgccattgtggtgattaccattttagtgaaatgaatgaaaacagtcatttcc

SEQ ID NO: 188894 - DNA, 593 bp, Homo sapiens
atggtgctatcgtttccagaggatcccctgtggaggtacgatgaaatgatgagatgagatgacatgaaataatgaaatgaaattgaaatgagataagatacgagatgagatgaaatgatgagatgaaatgatgaaatgatgagataagatgaaaagggttgagatgatgagatgaaatgagatgaaaagatgaaatgatgagatgaaatgaaatgatgagatgaaatgaggtgaaatgaaattagatgaaatgtaatgagatgaaatgaaatgacataaatgaaatgaaataatgaaatgagatgaaataaaataatgaaatgatgaaataatgaaatgaaaatgaaatggaaatgatgagatgagaagaaatgatgagatgaaatgatgaaatgatgagatgagataaaatgagatgaaatgatgagatgagatgaaatatgagatgaaatgacataatgaatgaaatgatgaaatggaataatgaaatggaaatgatgagctgagatgcaatgagttgaaatgagatgaaatgatgaaatgatgagatgaaatgatgagatgagatgtgatgaaatgacatgaaatgatga

SEQ ID NO: 188895 - DNA, 270 bp, Homo sapiens
tctgtggcacagctggctcctccctcacattcccagagcacccagggcattgttcttttgaagcacttaacctggtgccttcgaaggttctttaccagagttttcaaccttggtacccctggcatttggggctggacagttctttgtggaaggacggccatgtaccttgtcggatgtttggccacaaccctgacttcagataccagtggcacaaaaatgtctgcaaacgttgccagatatccctcaggggaatgaggtgggggaaattac

SEQ ID NO: 188896 - DNA, 196 bp, Homo sapiens
tactctaactgtccacccatacagagtactcactcactactctatctgtccacccatccatctactcactcactactctaactgtccacccatccatctactcactcactactctaactgttcacccatccatcttctcactcactactctgtccacacatccatcttctcactcactactctgtccacccatcca

SEQ ID NO: 188897 - DNA, 293 bp, Homo sapiens
ataatgggcatcctctgatgtgtacttttctctcaacagtaaacaccttatatgatgtttttcagtatctcctgagtataaggtgctgggctcttctctctttctgaacagttctggttctttagtcctagtgcagagacagcctttgtgattaaaagacaaaaaaatgtactagtaataataagattttccaaggcagtcacccagtcctctcttctggtttgtttttctgtctttccctcacctcctcactcctgccttgggaccagttgtgcttttgctcaattcattca

SEQ ID NO: 188898 - DNA, 364 bp, Homo sapiens
tataacactgccaaggagcggattatctcatcttcatcctgtaattccagtgtttgtcacgtggttgttgaataaatgaataaagaatgagaaaaccagaagctctgatacataatcataatgataattatttcaatgcacaactacgggtggtgctgaactagaattctatattttctgaaactggctcctctaggatctactaatgatttaaatctaaaagatgaagttagtaaagcatcagaaaaaaaagtgggtattcctacaagtcaggacattctacgtgactacaatataatctcacagaaatttaacattaatacattctaagatttaattcttagattcttggtaaatttattac

SEQ ID NO: 188899 - DNA, 228 bp, Homo sapiens
aaacaaaaaacaacatctgaggcgtatctttttacaagagattctagggagtgatgatttgaccaacacaatggggatccacaacaacatgaaaagtccctcaacactagcaagtggtgctgatgttggctggccaggctcaaaagaataactcaaaggctaacagagagtagccctgccacagcctacattctcaacgtatctgtcaaaatcttgggtttatatgtg

SEQ ID NO: 188900 - DNA, 504 bp, Homo sapiens
actctataggatctcgttcccctgcggaactgaggaaggaaggggtcggggcagaggagcccaggaggccgcgtgataccagtaaaggccctgaggctggaggccaatattgagagaagtcccctgaggctgggatggggcagccaggtatggagaggggcagccacagctctgggtgaggctgaagggttgacatgggaccagccaaggaacttgggaggctacaaaagagattcaagcaggggaggagcgtgtcagatgggagtttctctttgtttctttttctgtattgatgagacatgcagtatcccctgcagtcaggaagatggtgccttgtgttggggggctacaaggcccccaaaactatgcttatgtcctaaaagggctggcgtgtcaggctgaggagctctgtattaggccattcttacattactataaatacctgaggctcagtaacttataaagaaaagaggtttaatgggttcacagttccacaggctgtat

SEQ ID NO: 188901 - DNA, 455 bp, Homo sapiens
gtgagttttctcttggaattccatcttgcccccatgccaatcctaaagtgtatttctgtgttgcatgttgcttgctgtgcagacactatcccctagtaaggaagaggaaggcagagccagccttcatcccataagtcagcattgactttcaaaagtaagattttttagtcaaagcaggtacagcagtctgaaatccatagtgcttttgatttgccaaggccaatcattggaaggagataatttctttttaagttatccaaaagtttgcttacaatgtaagaatagcttctcgatcctccttatcctcccaggcaagcccatggaattttcggaaaagggagagtcatcagacgggagaggactgggtgctggtgagcatcctggaaagtgcccagcacaacttatgcctggctgagcgcctgtgtgtgtgtgcctgtatgtgtgtgtgcatgttg

SEQ ID NO: 188902 - DNA, 557 bp, Homo sapiens
tacctagtcatatgatcttgcaagtgccggagtaagatctgcaggaaacgtgggaacacagcacacataaaagggactcgggactgagctgacagctggaattgtactacgcaactgtacaatgtgctacaccactcacaccctcgacttccccgccactccaatcctattctagctatgttagtttggtgcaaaagtaactgcggttttaacagaagactagaatctatgagacaatgttattctattccatgctgttcaaatatgggaacttttattatcaaagggaatgtcttgttaccagagatgttcagtttagagctgtctctcaagtggacacactggttttcaaatattttaggagttgcaatatggaagaggacagacttgttctaaaacacgacctacagctcaaaacaaaggattccttaatgagaaacatttctggcttaatataatccttatatttgagactatgcaaagatcagccgtccccaaccttttcgacaccagggaccagtctcgtggaaaacagtttttccaaagatggggtggag

SEQ ID NO: 188903 - DNA, 358 bp, Homo sapiens
tagatatcgctagatagcctgttgctcaggctggtctgaactcctggactcaaacgatcctccctccttggtctcccaacagaggctggatttgtgccacctgcatctattctactcccatccactccagtgtctgggtcccctgctgatgacaattagccagggtttgaccacgccctccatgtaggtcccctccccaggccctggtccccctcagcatctgcatctgaaatagataaggagtggctagttcctgagatgatataaaggtctctgttgcacctgatcttcagataacactttgaaatgagtccagggtctcactctcttcttttttttttttttttttttttttttt

SEQ ID NO: 188904 - DNA, 490 bp, Homo sapiens
ttgatcccaaactgatgcacactgaacagtgcggagaggtagaaattactgaaatttgcctttttctactctcttccttgatattattcaaaggaatatgcctgtagattatttttctttgttaaagcttcactgaatttaagacccaaagcattggctaaaaggaatgtaataaagaagaattaaccaatattttcataacatattcaattccattagccacttctggaagctctattacttacatttaaaaagtgaccaatttatcactgtgtaagaaagggcaatattactaaaaatctacagtctaaatgtaatttcagaggaggaaaagtccagacacctaaaaatataattactgtctctcacttcctcaaacttcagataagaaatgtaatttttctagctgaccttcaaaaacaagaaagaaagaaatgatcatttctgggtctttggtttttttttgttttttttttttttttttttttgg

SEQ ID NO: 188905 - DNA, 111 bp, Homo sapiens
gcagacctagaccagttaaccacacaactacctgaccctccacactgcatgtcccccagatctgtagacatagctggcactgtttcctggtcaccagtggatgttaagggt

SEQ ID NO: 188906 - DNA, 502 bp, Homo sapiens
ttagcctcatcctattcctataagtgacaggcactgtaactattgaaagtactgattacaagtagtgtttgattattctgtcaacaaagtaatacttagtataaaaaaaaagtgctgggattacaagcgtgagccaccgccccctgccggatttatcttacccatgtgtctctgacaggatatattgtcaaattcccaaactgtatttttaggggggttgcaaattttgcttccaaatgatcttctaagagcaggatattctctgcctggagtgatgagggtaccatttctaaaagaggtacattgtagttcaaactcctgcaggtaaggagccgtgacttactaactttcaactttgacacattcgcaggtaagagcagagctacgcactacagcaaaatccaggctgtccgtcagcagctgatgtgcccggtaccttttgtcttggccatcctgttgttcattaatctgatgtatactcactgtgtttgcgtttattttc

SEQ ID NO: 188907 - DNA, 856 bp, Homo sapiens
ctcgggaggctgaggcaggagaatcacttgatcccaggaggcagaggttgcagtgagccgagatcacgccactgcactccagcctgggtgacagagtgagactgtctcaaaaaagcaaacaaacaaacaaaaagcataataaacaatagcaaatcctgtaagcccttcaaagtctatcttgaatctgtccccccctttctgtctctgttgccaccacccttgtccaggtcaccaccatctctttcctggattattgcaatagtttcctcaatgttcttttttccagctcctattcttgcctcttttccatctgctctccacccagagtgaccttttaaaaagcttattcagttgaatcatgagacattgggaaaagatactaaaaacttccagagaaagaaaacaaaagagagagagagaaaaaaaaaaaacaacaaatgaaacaaacaaaaagctaggttaattataaaagaaatttaaaagaacatggagtggtatcagacttcataggaaaaactctagtaaccagaagacagtagaaaaatgctttccaatttctaagggaaaaaatgattttcaacttagatttccatacacagccaaactatgattaattaagtgacagcatagaataaaagacatgaggcaaaacacaaaataaaaccatcaccaccacaacaaaaacctcacctcccacacaccctttcttaggagacgaccatgataacaaatctgtacaaaacatttgctatttccaggcactgttctaagcatttgacatacagtagctcgttcagtccttacagccatcctgtgaagttggtattgtcatgaagaagttgaggcacagagaggt

SEQ ID NO: 188908 - DNA, 159 bp, Homo sapiens
agccagaccagtgatcatacatgagtgaagtgagccaggcaaattgtacaaactggagaacacaagccctatctaatggggcatccactgttcagcaacagctgattattgccaagtggttatataggcccagaatttcccactcctacgtttttcaag

SEQ ID NO: 188909 - DNA, 945 bp, Homo sapiens
aaggcgcgcccggcgtagggaggtcagagctcatgttagctatgaacacaggtcacaggggcgtacggcgatgggaaacactgagatgctcaatatattgattatttaatagtgtttagcaaaatggtctttttttattccttaaatcaactgaaactcacttcacgtctctttccttgtagagcatcatgcttatttctggctcactcacatctttgtctcgggagttctctgccgagccattgccccctacagcagagagcacagctggctgcactagtgctgaaggagccagccccagagcagggcatttccaggggctcttgtcccagagcggcaggcgttgtgtgcagagaacgcccctcccacgcagcacagagaacgcggggtgggtgtgtggctccgggcctgtggggcttaggctgcctgaaccaccgccgactggcaccatgactcggcattcctggaagtgccttaccaagttgttgttgttgttttgttgttttttaagagacgggcttgctctatcatccaggctcgagtgcaatggcacagtcacagctcactgcagccttgaactcgtgggctcaagccatcctcctgtgtcagcctccccagtacctgggactgtgggcatgagcactgcgcctggcagctgtatcagtgttgactccacattttaatagttgcttcttgaaattaaaatgctttgattcagccttcaagccatcaggaaagtttgcccctctgagtcacacctggtggtctccagggttcctgcccctccctcctgagccagctcctcagagcggatagaggcaggacccccacccaggtcttgagacccccctgccccgcactcccccggagacgggctacccctgcagatgcagatagtcaaagctcaggtttcttccaaagcttttaaaaagatattgtaccttg

SEQ ID NO: 188910 - DNA, 772 bp, Homo sapiens
cacgccgctccgccggttcaaactcaaaatgggcatacagtcatcttaaaataggttcagctatctctagcaattataaactctttccatgaataaactttttctaagcacctaaaatcacatgaatatatctgcctgacaaaaatttgggaagtccagcatctctgatttaaaaagaagaaactatttgtaattttagtctcttgttcttaatgcaggatctgaccattggttagtaatgcaacagctgcgattagcaatgaaggaaaactattttcagagtcttctcatgacctagccacattagcaatctaaaaataaaaaaggaaaagtttttaaaagcttaaccttttataaagtgactaaacttcatcaagccatcacaaacagatttctaggactttttttgagaagaagaaaataggatcattagtttaatgacagtaacatttgtgcgggtatacaaacaacatatatgtcagaacaatttaaaaattatatactgaatatgctttatggctttttatagtattttgttgaatctatatttgtttgtggggagtttggttttaggttctatgtgtgagtgtgagtgtgtttgtgtgttctcgattttaaaactatttcttgagttctttagaccataagaacataatgtataatagtaaagacttatttcaatttatttgaacttttttcaaaagtaacatagattggccaggtgcagtggctcacacctgtagtcccacactttgggaggcagaggcgggtg

SEQ ID NO: 188911 - DNA, 397 bp, Homo sapiens
ctcaagtctgactacttctcccccaacattctgcctccaccagagtccaggatgttgtcatctctcaactggttacacccccaatctccttgttagtttccctgcttctaccctgactgacaattaaatctccacctggccgtcaaagggtacttttcaaacatgaatttggccacgacattgccctgcttaaaacaaacagctacccgttaataacctggagtcaatgccaaacttcttagtggcccataaggtcccacaccatgtggctctgattggtctctccaacttctccttcccctaccctggctcactaagcttcaggcactctggtgtgcttcctgctctgcaattcctcattggttcccttgtgagtatgttgaggaaggagtgaaac

SEQ ID NO: 188912 - DNA, 385 bp, Homo sapiens
cttactcgatatctaagtttgggtttagtccttccctctaggaatctcttcacaatcttattgtagaatgttatcatattgtgtttaattgcctgttgccgtttcctagactgaaaacaccttagatatgaagtctctggtatctaattctgcaatttgtgttcttctcattcttgatgacttagtttctctaaagcaaatttacatttccactactaccaggaatcctaaggcaccaccaacccaagatcacttttaggacattttatgcttgaggtttcacaaactacacagcatagtttcaaattccaaacctccttgaggtatggcctatagttacaaattctcaggtacattttttttctctaccctgagagccaatgcc

SEQ ID NO: 188913 - DNA, 100 bp, Homo sapiens
ggaaaggtgtaccctggagggatttcttatggcatcttttactggcttcagaaacacaggtcatggccagacgcagtggctcacacctgtaatcctagca

SEQ ID NO: 188914 - DNA, 487 bp, Homo sapiens
cttgtaattccagcactttgggaggcccaggagggaggattgcttgaggccaggagttcgaggttgcaataatctatggtcatgccattgcactccagcctggactaccaagccagaccctgtctcttaaaaaatttaaaaatgaaaaagataatgaacatatcagttacctccaagagtttcctcatgcctttttgtaatgccttcttcctgccccccacctcctcaggagactactgatctgcttttgtcactataaattagtttgcattttctagaattatctggtatttctgttgtatctttcttttaatattgggtatacaaaattgagtaactcagactctagtttatggcatattgtgattgttgacctgttcaaggccctcatttgttttctccatttagcctgtacagttctattctttttctattctttattctttacataggcacccactcttgtatttaacaggtagccttctgg

SEQ ID NO: 188915 - DNA, 721 bp, Homo sapiens
gctatgggaggaaggtctagtggactggaaccattgtatctgtcgattagtggaggcaatcatatttgtgatccttgagctaatggtctagtaagactataaacttgttcataattaaagctggcaagagggttcttaccccaggtaatgagacaagagtgaaccacaggaggaagccagcacagagaccgtatgtaatgagtcccttcatgggaaagggatggaaaacagtcctcaggctagcagcagagggagtgctgtctgttgtgggtcttgacctgcttaagaggtctgacttgaggtgaggctgaaagacagccccgctgggggcttcaagataacgatggacggatagggttctctcaccgctgaatatctcctaaggcattagtaaaacactatttaaatatttcctctgtaactcagttgtgctattaaagctctgtttctcaaagtaggtctgtagatgttcttgagagagtgagtgtttcatgagaattttcaaattttctgctttcgttttgaagataatcttaaagaaataaaatcaaaatgttctactacattatttttagtgctgaaggctgagtttggtgccaaatgaagaacaaataacatcacggcatgctatggaaatgtcgattttgcattaagtttgaatagagaaagatgtgggaaaattgatcaattttgtggcccaaaggtagtacagacatcatta

SEQ ID NO: 188916 - DNA, 628 bp, Homo sapiens
caaaacaccttcctccccatgcctctctactactcactcccaacacatactagagaacttccccatctgcctaattcaaacaccaagatcattccttttcctctctctcctattcttcatatagttatatgagtaagattgcatcaataagatatcatttcctgagagcctctcccaaagccttgtttgtacacatgactctgccacaaggccacagttaatctggcccaagctgggctaagactacggaactgaacccaagacaggtcagtctcagtctagactgttcatctaaaaacgacacataaatggaaagatgatgatcttacgaagaaagtaatcagacaaaaggaaagctaagaacaatatatagcccccaaaagagtgaagcagactaccagctacttggcccttgctgtcattccaatacctgctaccatctaccattcctttatgactccaggttataccccttgcccttgggttttaaagacagccgtgtgtccttaaaataattttcactcctctatcaaatataggtttctgttacttgcaacctaaagagtgctaagtaaaacaccacattttggtcagctgggaaatgccttcaaacacaatggtgttcttc

SEQ ID NO: 188917 - DNA, 215 bp, Homo sapiens
cctataaatgagcactgcaataaatacagatactccatcttacacgaatattctttatctggtgtacaaagttgactggcaaaacaaaaactgtcatcatataaaaacattcattagtaattatccacctacaaaaattaatcccctgactcatccctcccaaatgaataattaacatcagctcctaacagactctcacagataatccaacaaca

SEQ ID NO: 188918 - DNA, 505 bp, Homo sapiens
agtcacccttgtggccaggtgtggccacgtgacagtggaatgtaagtggaagtgatgtatgcacttgggttcattggtttaaaaaaaaatatgaccgccctccatttccactctttgtcttatctgtgaatgggaacatggctgtgtctgcagcccgactttgtgcagcaaaggacaaggccctaggggaaggtggagaaacaagatggaacaacttggacccaacaacttggatccctatgtggccatgtggagtcatctcacccacctgggccactcaccccgaagactgttgtgtgagggtgaaataaacttctgtatcactagcccctgcatttcagaaattctttgttatggcagttttgcctttatcctaacacagacagcaaagtatcttctgtggccccatgactaatttcgttgtttaaactcattataaaaactatataaataaaatattaaaaatcaaataaaatagcaagataacactgtgtaactatccagt

SEQ ID NO: 188919 - DNA, 337 bp, Homo sapiens
ttctggaactagagttgatggttgtgtaaaatatttaagtactcattttctctgcattctggaactagagttgatggtttgtgtaaaatatttaagtactcagaagggtcaagaaagagctggctttctgaataatgtaggagttacttccatgaaggtgcatttcagttaacaaatgcacatcatgccctttctcttcctccagcttcagcaaagcaaaacttcctcaaatctctttcttggctccagtccaacagcatctttaactggtaatgtattagtatgttaagctaagggcactttctgtctctgttctctaacattgttccaagatggc

SEQ ID NO: 188920 - DNA, 290 bp, Homo sapiens
tagctgggattacaggcatgcaccaccatacccagctaatttttgtatttttagtagagatgggctttcaccatgttggccaggctggtctcgaactccggtgatccaccagcctcagggtcccaaagtgctgagattataggcgtgagccaccacgcctggccaaagatatctttaatacatatggaaagtaattatttactatgatggaggtaaggaatgtaatggtggttcaaagaagggaagagcacattcagttctggggatctgggagggacatgtgatgcagc

SEQ ID NO: 188921 - DNA, 650 bp, Homo sapiens
caggagaatcccttgagcctgaggagtttgagactgtagtgtgtgatgatggtgcctgtgaatagccactgcactccagcctaggcaacacagaaagaccctgtctcttaaaaaaaaaaaaaaagtattttttcttttttaggaataatgatagtactttgtttgtttgttttttaatgtctttatcttttggagatacatacagaaatatttatggaggaaatgacttggtctctgatatttgttgcaaaataatgagggatgaggaatgggtaagagtataaatgaaacaagattggccattgttgctaatttttgataacaagatgctgattctttttgtttgtttaacctgagagcatagattcaagtcctgcatatatattccgaagttgataatcgttgaagttgggtgatgggtacctagagatttgtaataccattctatatttttgtacacgttagaaaatttctataatgaaaaacctttataaaaagaaagaaaaagaaggggcaaaggaacattgaattggtagttcaaatagaaagcctgggctcatgcctgtaatcacaacactttgagaggccaaggcaggaagatcacttgagcccaggagtttgagatcagcctaggcaacatagtgagaccc

SEQ ID NO: 188922 - DNA, 692 bp, Homo sapiens
ttgtagaaggatcagacaccagagagggttggactggatgaccttcagttcccctcctgggtgaccacagctcttcaaagcccctcactgctgcccgcttctgcaggattcagggttgaatgtcagaagtctgctggaatgctgtcgattgaggcacggtgacctggccaagcctttcctggtggctgctctggtatctggaatgagctatgggtgagggccgtcctctgagtgaccgtgcccccctcacagctgaggttcccctcggcctggatcagcgtgggttctgagaaagcctgcttgccctgactggaggcacctggaggtggttttcaaagtgtcactgtcaccgtgacccagacatgcttgagccccaggctgggaaagctttttttctttgctttaaaaaagcagaaacagtgaagcaagcataaatttgcctttgaaataagaggctgaatgtctgccaaatgcaaatggattgaaacggccggtggtctgaccttgggatgttccattggtagtttcagaggggctctgagcccccaggccggctgtaacagtggacatgctggcgctggccagtttgatccccttgaaagcccccgatattcacctccaagagagaaggcctggcaggtcctccagcatgcggatgaggcgctgcctgtgaggcacggctctgtggagag

SEQ ID NO: 188923 - DNA, 330 bp, Homo sapiens
ccagcttggaatcagttcggacctgtgtctgctgcacagctgaatccctgggaaactcttttagtgtagcatggcagaaagaacaatggctatgcccacacaaatacctgctgatggagatacatagagaccgggtttcaccacgctggccagactggtcttgaactcctgacctctggtgatctgcccacctcaacctcccaaagtgctgcgattacaggcgtgagccactgtacctggccatcaaaaagaaaataatattcgttgtttaactacgattggacattttggttttgaatgtttgcccaatcagttggtgagcagatctat

SEQ ID NO: 188924 - DNA, 556 bp, Homo sapiens
gtacctgttggccatttgtgtgtcttcttttgagaactgtctattcagatcttttgtccatttttaaatcggattttttttctatttgtttgagctccttgtatattctggtcactaactccttgttagatgggtagtttgcaaatattttctcctattctgtgggttgtctctttagtctgctgattgtttcctttactgtgccgcttcttagcttgatgtaagctcacttgtctactttcgctttggttgcctgtgccgttgaggtcttacacaaaaaatttgcccagatcactgtcctgaagaagaaactgtctccagtttcttctaacagtttcacattagagttaagtcttttttttttttctttaagacagaatctcgccctgttgcccaggctggagtccaatggtgcgatctcggctcactgcaaccacagcctgtgggttcacgccattctcctgcctcagcctcccgagtagctgggactacaggtgtacgccatcatgcctggataattttttgtattttcagtagagatgggttttcaccatgc

SEQ ID NO: 188925 - DNA, 492 bp, Homo sapiens
aagaaacagactcatgagctgaagcaaagttttttttctttttcaagaatcaagtagaaaactaggttgttttatattcagacctatgtttttattaccaccgtcgaacagaaacaaaaccaaagtctgaaaaccctccaaagtaaacaaatcacaccattatttggtttgacttgagtttctgatacagctatcacctttattcagtgaagataaatagtcaaactgcagaaggaagccatgttgaatcgtaaagaacttagaagagagaaactgaaagcccaggttgcatttccaaatctcatgtattattttttgtttgttgtgtttttttttgttttgttttgtttttgagacagctggaattacaggtgtgcaccaccatgcccggctaatttttgtatttgtagtagagatgggatttcaccatgttggccaggctggtctcaaactcctaacctcaagtgatctgccagccttggcctcccaaaa

SEQ ID NO: 188926 - DNA, 382 bp, Homo sapiens
tcagtcggtaccttcctctcctcccacttctcttggcccagctcaagccccacacctaccagatcttaccagactgaaacagtctcatctgcctaattctacagtaccatactgcctgccttgaacccacatttaaactattattaccttttcaacttatcataagatgaagggctgcaaatcaaacctcttttcatctcagcactggtaacaatgcatttagggagtcctttccctaaagcagtatcatcttgcataaatatacccaagtagaagcaaatattttagaacttttatagatttttcttaggagattttccttaggaaaagagatcatacaagcctgggcaacatggtgaaaccctgtctctacaaaaaaaaa

SEQ ID NO: 188927 - DNA, 356 bp, Homo sapiens
acacacaccaacaaccacaacaacaatcacaaccaccaccaccaaaaaaaaaaaggaaagtgagtatgaccagacactgttgtttgttaagccaagtgccattcccacattgcccattcccctccttcctttctcatagaaccttaattctgttcagtattttgagaccctgtactttacaggcgaagattctctcagccccagggagttacatattcactagtctaggtatgtacttctcagacactaagtacaatcaggtcagctgaaaaaccttgtttaaatgccaactacagttgagcaggtgccaggatatctaactgccaaagaggcaaaggtctacagatagtctatgt

SEQ ID NO: 188928 - DNA, 834 bp, Homo sapiens
cctaaaaaggggaatcacgatgcttatctcatgcagttattgtgaggttacaagagttactgcttatgaagggccctgtccagcatctggcacgtggcaggtcctccgtgaatgacagcgccttcctgggcagcctggcgagcgcacacgcgtgtgcacacacacacactcctgtgtttaatatagccctgtctgttgtgagccacttgaggagaggtgtccctagaagaaacttttttcccagaaaatgaggcctggctggtgctcatcctgagttcctggaaggcagtgttttcttgtaaccatctgagattcctggggctgggtatagtgcctgatgctctcaatatatgcgtgttgaatcaaaccagaagaagcaggctgaggcactgagtgaaaacctatgtggatgtcctgctgccttttccttgtggagggtagatcattcccaactctgcctgaaactttgatgccttattggaggaagagaaaggtaactcccttgttgagccatagagctcttagtttttctttcttaaaaaaaaaatcactcttctttcaaacaccattaaattagtccagttatgtacactgggcttgtattgcatggtttatataaaagctaagttctttctttaagattggagccctccgtgtgagtgatttcaggataaaaggccttagaggattagacacattattcgtttgtaaaactgattgctcaagtgatacagccctagggctgcccccttattgtagcttcttgaacactgtcaaactgtcagacttgggttggtggttattttatctcgcaaacaaccaaaaccagattta

SEQ ID NO: 188929 - DNA, 274 bp, Homo sapiens
tagcccctgatctggtcttttttcctctatcaataatgtcattacaatcttctgtattcctcaggccaaagccagaaaccctaaacccctgcccttctggagactctttcatggtgccctctgagattcccttaataaactcccttaatatcctcaactatttccctgaacatttcctttcattaatttaaacttggctgttccctgggaaggaaaaaacacctacctgacaacaatcacatcacaagggggcttattctcatgtattccacat

SEQ ID NO: 188930 - DNA, 404 bp, Homo sapiens
acctccacagtgattttccacttccaggctgaaggcaaggagcaaatgaacccaagctggctcctacctcttcctcctgccctcctcccatttttttcccccaaatcctcaaatcaccttccatgtgtccagagcatgcaatccaccctccaacctcctctcctctatctgtaggaaatgcagcttcttgggtttttattttttggaaatgaataatctggaagcattggaagcagagacatgagctgggctgtatctcagatatgatgaaaggctgggttgctaggcccttgggctggctgggcactgtgttgccaagccagggggctgaggagcatgagggtggtgtcatgctcactcattcattcaacaaatatttatccagcacctacaacatgccaacc

SEQ ID NO: 188931 - DNA, 384 bp, Homo sapiens
tcccacccttacacacaactccttttcatttcagtaaagcttcctgtcagaacacattcatcaatgtaatttgccaacaaagtttaagagattaaatccccctccccacaagaatgtaaaaataaaaaaacaaaataaaacctacaatcaaaaatcaacagctatgctgaaattgtagttaggtcatcaggtaatgcttcaaaggaagtaaaggacatcataagattcctgaatacagttaacaccactttgaacctgagattaattttcgtttgatttttaacagaggatacagaaggtagatgcatcaggaggaggggcaggtgcctttaatcattacctctagaattatcacttttaacctcaaagcagtttttatttaat

SEQ ID NO: 188932 - DNA, 539 bp, Homo sapiens
taacacttgaaaattagcatggtgtattttacttgcttttcttttcaatataactttttaaaaaagtacacaagtactaaatatcagaattctttgtcagaaaatacagaaaagggaagggaataaaaataaacaataccctaattgcaccacccagaaaatcatagtttaaatttagtatatagccttccagatttatgaatgtgttggattatgtataaatataaataagaaatagaaatatttttaaattgggtcataaggtacatactgtttggaaagtgctttttcttgtaaatataaattgtatgtacggttatagctgctatagcttttcgtaaatatagttaactctggttgctagtttcagttatgtttgtatggtatgctcctgtcttttaaaaaatgtgtgacatattacttcacagtaacatgtaagtaattcattttactttgtgaataaatattattctgatgcagaccactgtatatttgatgtgtaccacaaagaataaatatttaccatagcagaattagct

SEQ ID NO: 188933 - DNA, 102 bp, Homo sapiens
tgctgtaccaggaagagtaagatatatattaatagatgccactccagagggctggctgaaaacaaccaagaactactgtgatgggtagatgctgtccttatg

SEQ ID NO: 188934 - DNA, 147 bp, Homo sapiens
ccccaggtaccttttacaaaaaattaaaatatgctacggcttgagagatttaccaagacggatgaaatctttgtatcttgttttaagaggatccacagctggttcccgagactccttctggggtaccttgttacgtgggtgactgta

SEQ ID NO: 188935 - DNA, 403 bp, Homo sapiens
acacacacacacacacacgcacatgcacacacacacacacacacacacacacatacatcttcctggctttgtcttttctgatctctccctcaacttgctccagccacacaggcctcctagttgtcttgccctgccccacagactttgtcctgacaatcctgtctgcctgtaatgcatttacctagcttccctcaggtctctgctcaaaaatcacctcaacagagaggactttcctgaccacatcttgtaaaattgcatacctccctctcccaggctccttacctttcccaggctccttaaccaccccccatctttgtttttctccacagaacttattatcacctgataaaatatgtatattaatttgttgtctattgtctactttaaggatgacagggatttt

SEQ ID NO: 188936 - DNA, 456 bp, Homo sapiens
cctgtgagtactacttaacccatgcataaagaatttttttcaaaccatattaagtaaaaatctaatctgtggctgggtgtggtagttcgcgcctgtaatcccagcactttgggagaccaagtttggaggattgcttgagtccaggagttcgagaccagcctggacgacatgacaaaaccccatctttgcaaaaaaaaaaaaaaaaaagaaaagaaaagaaaagaaaaagccaggcttggtgacacatccctgtggtcccagctactcaagaggctgaggtgggaggatgtcttgagcctgggaagtcaaggctgcagtgagccgtgaacatgccagtgcgctccagcctgggcaacaaaaccaagaccctgtctcaaaaaaaagtctctggtatgagcaagtatattttcaaagaaattttcattaacagtccttttctctttttggcaaaaaagt

SEQ ID NO: 188937 - DNA, 219 bp, Homo sapiens
gctcagatcaagtagttatccagactaatggtcaggaatttatggtctataattatggtaatcacgccaatttgccttagtaattaagtactctaatttctgtcaacctaggatcttcacattctcactgaaattaagggtgccctcaagaggcattcctaattcatttgttttctactttttctttcttttttttttcttttttctttttttttcttt

SEQ ID NO: 188938 - DNA, 403 bp, Homo sapiens
cagtgagctgagatcgatcactgtactccagcctgggcacagagcaagactctgtctcaaaaaaaaagaaaaatcctagaaggcagcagtgtcttaccctttaacatagaatcctgttttggggtaaatgatagaataactctgacatttgaaagattgaaaggtaggggaaggcatagagtctcaactatcttttcttgtctcaaaatcaacaaaggcaggtgagcctctcattttcttatctactacctcttcaaagaaaagtcttcatatttataagatcctatctcaataaaacacatagaaaaatatttaaggggataacatggccaccattcattttatttatttatttaatttgtcacccaccagcaaagtacagtgatcgaccagggtaccgagc

SEQ ID NO: 188939 - DNA, 439 bp, Homo sapiens
gcaactgctcgatgctgccattgtagcactaatgtgaccatagacagtagataattagttggccagacctgaccccaggatgcggcttgctgggccccactccaggcctggctgcccacagtgtgagtttgctgttgcaactttggaggccacagaaggttgtctggtctgggaggaatctaaggctgtatccaatgtggtagccactggccacatgtcgctattttcagtttaaattaatttaaagtaaataaaatttaaaattcagttcccttggtcacattagtcacacttcaagtacttactacccacatgtggctaatggctgccctgttagacaacacagagaacattccacgtctatggaaagttctcttgaacagcactgatttagaatgtcccatagtctgcgtccctctctgctgtcatccctgggcag

SEQ ID NO: 188940 - DNA, 248 bp, Homo sapiens
ttcaatttcttcaccacaaccaccatcatcgtcatggagaggctaatagactttatgaggggctaactcctcagaggaggaagaaattacagaggtggcatttgagctgagcctttaaaaataagagaagatttgcattagagattggtattttctgttcttgggagggtattccagatacaggaaaacttgagcaaagacaacaggcatgtttgaaaaacagtaggctttgcttccatgaggccaaa

SEQ ID NO: 188941 - DNA, 943 bp, Homo sapiens
atgaggttcctttatggcaggtgagctgagtgtcccatggggagaaaaggggttttgctgggtaaggcaagagtataaggaaccgtggatatgtggaaagaatgctaagatggagaggacagagctggtgggcaggcctgccctccttatcccatccccaaagcgggtgaagggatggccacacagcagagcctggcttatccaaaggcacccaacgctgtgttaagactctcaacctggctcaactgtgccattgcctcaccttcatggctgggacattgctgcctcgatgaggcctcaccaatgggcttaggcaaggcccaggcattgttaagatagctcacccggaagtgctaaatctggccagttcctgagggtgcttttttgttctagtaaagccccacgtttgggaatcaccattttgttggaaatctctctctcttctttttgcagttatgtcatgtgatagtcatcttgtatagttagggaccatctagcattcacctcatcacctcgaagaggggcaatgggtcatggccagaggtgcagactcctgtgggtttttataacaacatatcaatccaatataggacttgaccttgggggccactgtgcctgtgaatggagcccttggaagagaatcagaaagattgataagaacttctcctgtctcaaggctggctgggagagaacacagtctgatttgctccatttggctctaagtgaagcttcctccaagaagtggcttgaaatatgttttatgcatgataaatgacaagggcttatatagttcccgcagaggttattgtgtcatctgagtttgcagatgaaattccaggaggtagttgtcactgcattatcatggcttttgtccaagaactccacagccccagcagctctctatgttcatagcaccttgatgagaaggtagcacataggaatg

SEQ ID NO: 188942 - DNA, 472 bp, Homo sapiens
tggctaatagtgatcagttgatgaatacacctcatgtttcacgcatataaaattttacaccatgtctagtccataggcattagtgtaggagtcagaatacaacctgaattctgttcgcagctttgtgccttgtcgataaagcagtggacatctctccacagggagatatgtttcctcccgtgatatagaggatgttgattcacttgtctcctctctatttcgaaaagatgctctgaagattagtgagacaatggctgtaaagctctttgcactgtttacaacataaatcatacacagacatactggcatgagaaacgctatcatcatctcttttatacatgagaacaaccataaggaaaacaaacctcagagacagtcctgtattataaaaatgttgggtagagatgccaaaagttgtagggtaggaaacagcaacaacaacaacaagacggaatccaaagaatatttgcat

SEQ ID NO: 188943 - DNA, 730 bp, Homo sapiens
ctcccgagtagctgggactataggtgcccgccactgcgcctggctattttttttgtttttagtagagccggggtttcaccgtgttagccaggatcgtctcgatctcctgagctcgtgatctgcccgcctcggcctcccgaagtgctgagattacaggtgtgagccaccatgcctggctctatttttatttttttgagacagagtcatgctctgtcacccaggctggagtgcagtggtgaaatcttggctcactgaaacctccacctttcgggttcaggtgattatcccacctcagcgtcctgagtagctgggattacaggtcccaacactacgcccggctaattgttgaatctttagtagaggcggggtttcaccatgttgtccaggctggtcttgaactcctgacctcaagtgatctgcttgccttggcctcccaaagtgctgggattataagcatgagccacagcgctcagcctaaactgcacactttaaagtagttaagatggcacattccatgttgtgggtattttaccacaatgttaaaaaaaaaaaaggaaggccaggcacagtggctcacacctgtaaccccagcagtttgggaggccgaggcaggcagatcacctgaggtcaagagttgagaccagcctgaccaacatggagaaacccgtctctattaaaaacacaaaattagccgggcatggtggcacacgcctgtaatctcagctactcg

SEQ ID NO: 188944 - DNA, 230 bp, Homo sapiens
tttctggtagagcccacaacaggccaatcctctatcttcactttaccctctgttccttacctttctaaagtttttatccttctgtttaatgttaaggttatatctcacattgtgctatggttgttggcaagtattcacccatttactgcccatgacaagcaccatcgcaggaactagggattaaaggttaatatggctgggtgcagtggcttacatctgtaaacccagca

SEQ ID NO: 188945 - DNA, 936 bp, Homo sapiens
ctctctgggctgcattttgcagcccagagaggctgaaagcctggctgagcttcaagtcaagaacagcctgggtgtatccaagggagctcctgaaagagatgatgtcatcctggaagcactaagcctggaaagggacagtcaccatctgtgttcctggctggaaggctgcacagtgtgcatgcgtgtgtgtgtgtatgtggcaggcacctgtaaagcttatcttatctccccatcaatctcaccagcagcacctagactcctaccaaggaccactccccaccaacaggcgggtggcagaggcaacaggtcagaacgcgctgggccgctccagtgacaagattgacattggccacccagctcttatgatcacttctctgcagaaagggatcattttgtgatttacgggctgagtaaagcaaggccgagttgaaatctcatctgagagatttctctcatcctgggcagcttgggccagatatagggagattgctgtggctcctctgtattttcctagcacccattacttacttttggaacagtggtgctttcatttcactttgtaccaccactaaaaatttcatcacccagagattactttagggcaataaagaatcacctaagaaggaggttaagggattgctgctggtccctcaaacaactgtatgaaacagacttcttccccttaactcctaaggaataaaggcatcagccataccaagggaatcaagagatttcatttaaagggataaagaaagaaatgtgggaagccagagccccttgaagggaaaaactgtctgaggaaggccacctcagggcaacataaaagccctggcaggtatgagaagagaggaagggagtaggacaagcttttccaggcagaccccagagattcccctttgatacacagccgcttcagcagcacggaatttgactgca

SEQ ID NO: 188946 - DNA, 974 bp, Homo sapiens
ctctctgggctgcattttgcagcccagagaggctgaaagcctggctgagcttcaagtcaagaacagcctgggtgtatccaagggagctcctgaaagagatgatgtcatcctggaagcactaagcctggaaagggacagtcaccatctgtgttcctggctggaaggctgcacagtgtgcatgcggttgtgtgtgtgtgtgtgtgtgcgtgcatgtgtgtgtgtgtgtgtgtgtatgtggcaggcacctgtaaagcttatcttatctccccatcaatctcaccagcagcacctagactcctaccaaggaccactccccaccaacaggcgggtggcagaggcaacaggtcagaacgcgctgggccgctccagtgacaagattgacattggccacccagctcttatgatcacttctctgcagaaagggatcattttgtgatttacgggctgagtaaagcaaggccgagttgaaatctcatctgagagatttctctcatcctgggcagcttgggccagatatagggagattgctgtggctcctctgtattttcctagcacccattacttacttttggaacagtggtgctttcatttcactttgtaccaccactaaaaatttcatcacccagagattactttagggcaataaagaatcacctaagaaggaggttaagggattgctgctggtccctcaaacaactgtatgaaacagacttcttccccttaactcctaaggaataaaggcatcagccataccaagggaatcaagagatttcatttaaagggataaagaaagaaatgtgggaagccagagccccttgaagggaaaaactgtctgaggaaggccacctcagggcaacataaaagccctggcaggtatgagaagagaggaagggagtaggacaagcttttccaggcagaccccagagattcccctttgatacacagccgcttcagcagcacggaatttgactgca

SEQ ID NO: 188947 - DNA, 352 bp, Homo sapiens
gtatttaatcctgacaacaactatatagatagttactgttagtacactctctttacagatgagaaaatggaggcaaaaatggtaaagtaacttttcccaggtcaatggttagtaattatcagagctgggattcaaacccatgcagtttgctccagtatccaagttccattacttctacgctagacaaattggggaataaagacatgcccatcttatccaatagcatctgatggcatagtacatactacaatacggtttctcaggaaatggagcccctggggtcttatgaaataattttcttggcactcaaagaacattaaatagcatcgcctcatatgatggcaagtgcatt

SEQ ID NO: 188948 - DNA, 253 bp, Homo sapiens
caattgtcactgcgtaggagcataaaatgtgtgatattaacatatcactactgtgttcctctgtattctgggatttccttgccgattctcctgttatctgggctaatatgtgagcttggcatttcctatttaagctctgtaatgcccaccttaaggaagatatattcattgttaatgtttgttgaagctattgagtgggtatggctggcatcaaaaactagttggttccttttaacctggcttatcttaaata

SEQ ID NO: 188949 - DNA, 204 bp, Homo sapiens
ttgttaactactcaggaatcaggccggagcgggctattaaactactggtggcttgaagtcagccctggtgggagtagctactccatgagaactgctgcacactatggatcaaggcatttcttccgagagctgattttttcccagcacgctgcccactgcttggtggtctgtatcgattcccgcggcgcatggcggcggagctga

SEQ ID NO: 188950 - DNA, 254 bp, Homo sapiens
tcgtcacaggatcttgatcggtacatggctgtggaggtggggatgctgatggtggggaggctgtgcatgtgtggggacaggaggtagatagtaactctgtaccttctgctcagttttgctgtgaatttagaacttctccaaaaaataaagtttattaataaaaaaaaataagatgactttatctccaacaatatctactagctacctttagctcagtaatctcatgttgagtgcatcaaccaagttaccgatca

SEQ ID NO: 188951 - DNA, 212 bp, Homo sapiens
catgttctgcacagcacatcatgcagaaggataggcttttgtggtgttcacctggaacagagtaggtataataaacagagacagtgtgctttacttggcttaaaatgttgatcatgtattaccacagatttctgggttggctaaaaactgtctgatctagaggggctcatctgcaccagtctgtctctcatccccctcctgagactgggagg

SEQ ID NO: 188952 - DNA, 435 bp, Homo sapiens
cacgctgcctgcctaagaatcccagtttatgtaaaggaatttgttgtgtgtatttccactaaaatcaactgaatgtcttatcaaatcaaaagggaaaaggtatcttcaaacacacacagacgcatatccacagaagatttgcgacagaggcagagcgtatttagttttcattggaaaggctaaaatgtataattgtgtaaacataatttggaagaaatttcacctcagctgtcctcattaaataatttacattccaacactcatggacccattgacttcagaacatatcaagaaactcgacaatgaggtgaagtgtaagcatgcccatccaatttttaatttagtaagttagagactccatcttccccaatgatctggctggccctgaagtactcagtaatgaggtctcctagttagtcagctgctctctgaagt

SEQ ID NO: 188953 - DNA, 265 bp, Homo sapiens
agagaagatatcatcctttcatgctccccagccccactccaccaaactgctctcacaagtcagcaacatctccttactggcaaacctacgagatactcttcagctctcaaactactggatgtgattacagaggactattggtagctataatttatctttccaaccctttatctctttctcttcttttgataacagaatccctatttcctgtggggaatctattccatgtagctgaccctctcctaaccctacccctataacaagt

SEQ ID NO: 188954 - DNA, 458 bp, Homo sapiens
attatataaaggtcttgcactttactttggaaagaagtgaatgagagatcacaaggagcttattaatgagtcttttacaggaaaaacaaaaaaactaaaaacctttgttatctggtctttcagatttcttgaggttaaaaagttagattggaaaaaggactgtactactgggtgtggtggctcatgcctataatcccagcaatttgggaggccagggcgggaggactgcttgagcccaggagatcgacaccatcctgcctaacacacggtgaaatctcatctctactaaaaatacaaaaaattagccaggcatggtagcatgcgcctataatccccagctactcaggaggctgaggcaggagaattgcttgaacccgggagtcagaggttgcagtgagccaagatcgtgccattgcattccagcctgggcaacaagagtgaaactccatctcaaaaaa

SEQ ID NO: 188955 - DNA, 212 bp, Homo sapiens
cgagcaactccactactacaagaaaatatatcgtctttctggatttaagaaagcttccttcctaccctcccaacttcctttggaattctgcaaacattatttgaacttattttctccaaaagtctccctgagatcctgctcattaccctctcattccctcatccacacaagtgaaaaccatgacagagaagaacatgacttggtcaaaggcc

SEQ ID NO: 188956 - DNA, 539 bp, Homo sapiens
aacctcttgcccattatgacacctcatatataccactaagcaagaaaaggtgggctgacaattctggccaaggagaattctctgaagcagcaacaacaataagtgttacctggactcttacttaaaacgtatagacagtacttcctcatgcttggtgacctgtgatcctttggtaataaatagttgaagagagtaaacaaaatctagagagattatacaagacataaagaatgcctgggcacttcccccaccccccaccccgccatttccaggtttcaataaattctgctgacagccctgcatcctactagagcctactatggacaacagaggcatgctgatgtgtgtcacaagaaggggtggctaagtatcagaaggtacagtcacttttgctgttactactggtcacagcaggcctttgtgccatgaacacagtgctgtcccttagagccagcccatggagcttatgtggcaccatcaaaggtgacctcacacgctgcttgtgaggctgggaaaagggcacagggaggaagacagca

SEQ ID NO: 188957 - DNA, 103 bp, Homo sapiens
gcctgcaaggcagcagtaggcctagccctactagtctcaatctctaacacatatggcctagactacgtacataacctaagcctactccaatgctaaaactaat

SEQ ID NO: 188958 - DNA, 251 bp, Homo sapiens
aagtaagttgctagaaacacaattttgaaggagaaatgaacaaaatagcaaacaaataaattcattaaaggttatagcaaaaagcccaaagcctgtctagaccagaaccttataagccattgttttatagaagattttggagtaactgagctggttgtagatgctataatagaagggaaaaattccagtttgcctcttcataagcagagattttgcccagatctcttttttttcctctttataattgggtt

SEQ ID NO: 188959 - DNA, 460 bp, Homo sapiens
aagtatagacactccaaaatggtcaaagcaattgcgttctaaactaagttttaaacctcaaagcaacaggttgctatacaaactcattctgttgctgccacacagttctcctggacaactgacagttcaaggcccccaaggacgcctgggcatgagcagaagtggaggagctcagagcccagcccccaagaggctcaggttaaagcccagcatgagctctggaggcctcagcctgatggcagtctgtgtctcgctcacagcttccagctacaactgctcggcaaacatttccagctgaaataataaatgctggctgtgaatggaggtcctcgtgaccctttgactccagctcagtttgtcatgtggtgaggccacctcacctgaaacacagcccatgctcctgtgagctcagtctggcccaccctggggctgtgcaccccacagggaatccctcgaggaa

SEQ ID NO: 188960 - DNA, 251 bp, Homo sapiens
tgccaatgggtatggagtttcagtttggtgtgatgaaattgtgctaaaattgattgtatcgatgggtgaacaactttgtgaatatactaaaaatgattgaattgtaggcttttgttggctgaattgcacggcatgtaaattatatcaataaagctattaaagagaatcagtattacttgccataaatagaatggaaactaaaaatgacttttttttttttttttgagatggggtcttgctctgtccccagg

SEQ ID NO: 188961 - DNA, 268 bp, Homo sapiens
tgccaatgggtatggagtttcagtttggtgtgatgaaattgtgctaaaattgattgtatcgatgggtgaacaactttgtgaatatactaaaaatgattgaattgtaggcttttgttggctgaattgcacggcatgtaaattatatcaataaagctattaaagagaatcagtattacttgccataaatagaatggaaactaaaaatgactttttttttttccattctatttatggcaagtaatactgattctcttaaataccttattgg

SEQ ID NO: 188962 - DNA, 159 bp, Homo sapiens
tacacacacacagattattgatttgatttggaaagaatgataggagaaggtgaatgtctgaggccaaccatttgcaattctaaatctgtggcccccttcttgttcagagctgttagctgctctgaccatcttctcctctttagttagggtgctaccagg

SEQ ID NO: 188963 - DNA, 386 bp, Homo sapiens
agtcacataaatacacatacagaattaagaagctagagggaataaaagggaatgttttaaaaacagggagagaattagcttctctttacaattatgagtaaatttatctttattcctttcttatttcaacttttccataactaagcatgcattcattttatattcagaataaacatttaaaaacctaactcagatttaaaaaaaattctttaaacattcaacttgaatctttttttttgcctcttaatttgctttgaaacattacacacgagttccaaactcacttaatcactagcgcatgtactaactcacaccattttttaaaactgtgcagaaacttaatgacaagatttgacatatatgattcttcccccttatccctaaga

SEQ ID NO: 188964 - DNA, 460 bp, Homo sapiens
ttaaaacaatgagctaccatttttcactatcaaatcaataaagatgattatagttattacgattcacaatattggcaaagatgcagtgaaataaacatttaaacactattggtcagaaatataaattggtattttctttcaggaatttaatttggcaataatatgaagtcttttaaaaataccatgtgaccaaacaatttcatttctaggtatgtgtcctgagaaaaaagtatagttggatgaaaatttatataaaaaagataaccattgcagcattatatgtaatagtaaaaaatttgaattaacctaaatgtccaacaatagtagaatggttaaataatttatattagatccaccttagatttttttagtcattaaaaatactgttttagaagaatatttagtggcattgaatattactatatagtgctaagcaaaaaaataaagatttagtacacag

SEQ ID NO: 188965 - DNA, 199 bp, Homo sapiens
aacaaataaaaagtttcagcaaaaaaatagaagacatatagaagaaccaaatggaaatgtcagaattgatgtgtacactaactgaagttaaaaacttattggatgggctcaacagcagaatgaagcaaacagggaaaagaatcagtgaatctgaggatagaaaaacataaagtgcccaatctgaaaaacaaagtagaca

SEQ ID NO: 188966 - DNA, 460 bp, Homo sapiens
gctagtgatccagtaagattagggtgttctgggaaggaatgagtcaacagacatgatttgagcgctgccccatgccaggctcaatgctaggtaccctcacattcaagatctgtaatctaagcctttcaaaaaatcttggcaggtagatatgttcatgtcaagcacctctcatcacagtcgagttccaaggaaaaattccagcgttttctgcattgggtgctgtgtcatctgaaatcggcacattccatggaggaaggagtcctgctttgttgcatgtatcctagggtttaatgttggtaaatgagtcactctagcatttgtagaaggctccctgagactcctgcagcagtcgaccaagcccaaggacataattgaatctggagagtcctggggccttgttttgaaaaagacttgaaatacacataggaagaaaggcataaaaataaatgttcacttgtca

SEQ ID NO: 188967 - DNA, 304 bp, Homo sapiens
gctagtgatccagtaagattagggtgttctgggaaggaatgagtcaacagacatgatttgagcgctgccccatgccaggctcaatgctaggtaccctcacattcaagatctgtaatctaagcctttcaaaaaatcttggcaggtagatattataatatccccactacagacagaaggatcccggaattcagaaaagcggagtttagtatcccacagctaaaagtaacaaagttaggccttagatctagtttactctcttcaaatcctagcctaccccccatcccctgaaaaaattaagcccacc

SEQ ID NO: 188968 - DNA, 428 bp, Homo sapiens
gtagaacacacacagagtaaccagacacctggcaacaggcattcctctgagccccagcaggagggctggagccctgagacagaggtgtgctagctacacaccaccaccgcaggccatacaagccgggtcctcagcacaggctggagggctgtggttaaggaggctggaggcacgacctcctgcacagccttcccttctgaggacagcctcatgggaatccccccctttaggacccaaatgaaagagaggatatgcaaaggctaaaccgatacagggaagctctcttggaaggattaaagaggggaacccggcaggccacaaacgttaactaggtttctgaggtcattcagagaaaagaagaaagtccagcacaattctaggagagactgtgtgaggcctatggtatgtatactccctttcgtcccccg

SEQ ID NO: 188969 - DNA, 390 bp, Homo sapiens
taacaaaaagccgagaacagtattttcagtgacaataccaagactcaaaaagatttcgacaagctgattcaaccagctgaaatcaaaagaaaaagtctaacagaaacaagtgtcaatttccacattcaacttcaaacaatcaattgtgcaaatagagaacagggtgcctagcttctctggagtgttttaatacagtgaatcctcctgagatataaacaactgtgttcaagtctacactaaacagtgccagacagctactctttttcacttcctgcatttctttctgtcttctgtcagctgtcacttcttaggttatcagtttgttttgtcccacttccaagtcactgcttctaatctactgtcagctctaggaaaaccagataactgagc

SEQ ID NO: 188970 - DNA, 450 bp, Homo sapiens
gggcaccctaaataaagactgtatttcccagcctgtcatgtgaccatggatttatttctggccaatagaatgtaagcaacttctcagtcatgtctttaagaggagactgttcatcccttcccttttctggctttccattggctggtaggggacccctgggctgtggggatgcgaggaataccccatgaatggcacagtgaaaaactaagaacctgcagccctcttggcctgtagaatagaaccttactaccagctgggactttaaccaatagagaaatcagcttccctctggtctaagtcactgatatctagttccaattcaaccaaacctaataatctcactaatgctccccagtgtccagccatgctccctgttcttcctaacatccaccttcaggccttcaagctgctacaattgaaataatttttcttctcgtcttcagtgaaatg

SEQ ID NO: 188971 - DNA, 509 bp, Homo sapiens
tgcaggggctgtggggcaggagtttcatcagaaggtggttgtggtcactgcagacactaaaataacctaagaaaatgcataatgatcctttaaagggaccagagagaattaggatagcctttattgtggagatggtccttgaggtttcttaaactgcagataattatttttccgtttcatttttcttttactaataactaagtagttaggatgtgtattacttgttggagtcagttgaaaaatattatttactgaagtagacgccagctgaagattattttctctttagattataggctaccaaagaagactcagtaagctttgagttattagtcaattggtaaatggttcttgataacttaatgattttaccaatcttttggagataactttaaaccaaaaactttttttacctaatgtaaatattactcaatgctcccagctttcccccttgtttcattattaaagtttgtgaactgtttctttttgttttgctttttgtcttttaa

SEQ ID NO: 188972 - DNA, 189 bp, Homo sapiens
taaacgaagacgatccctgcaaattgactcctccgtgctatagcgctgcaaaatgctgagattacaggcatgagccaccatgcctggctataaacaattttaattcaaggatcaattatatttatatgcattatgcaatgtacagtatagtttagttggaccttaagttttcaatataaccttatctaa

SEQ ID NO: 188973 - DNA, 552 bp, Homo sapiens
tccactagtgtaggccatggtgaaagtttgactccacaaagatgtgacactcttcttgagataacagtcaaggagagagagactttcctacctacaagctttcaggatgaaggagaagtgggtgctggtagttaccgcccatgacttcacaaggctagagaattaagtctccgcctttcacaggagtgattatttcacactctattgataacggacttaatatccccgcatacatgagactagtaggactgtgttttcaatacaaaaagggagcagactttagttctggtagtttctggtgctggagcacaatggaccaaattctcatattaacccaagacaccatctctgcttttaccattcaacacacttggagtctatgttgtcatttgtcataaaatcaacaatagattttaaagcatttcttctaattgacgagctagaaaaaaaacgtccccatgggcttgtctattcagctcatgcctgacaaagcaaaggattagctgagttcagagtatcagtgggctcatcagtctctagtgaacagaacca

SEQ ID NO: 188974 - DNA, 476 bp, Homo sapiens
gctgaggttaaaaagataaactagaaggtacgaattattaccatatcactgagtctggacacaaatataattattaaattgtatactcttgaataaataaatgaagtctgcaatttgtccctgctaaataggagaatgtaaagcaggaaaaataacgcaccataattaagttgtttttaaaagaaaaataaaggctgggtgtggtgactcacacctgtaatcccagcactttgggagaccgaggcaggcggatcacttgaggccaggagttcgagaccagcctggccaacatggtaaaacacccctctctactaaaaacacacaaaaattagttgggtatggtggtgcaccacagtggtgcgcctgtcatctcagctactcggatggctgaggcatgagaatcacttgaacccaggaggcaaaggttgcagtgagccgagatcatgccactgcactccagcctgcgtgacaggaaa

SEQ ID NO: 188975 - DNA, 634 bp, Homo sapiens
taagcagatccagaaactgcctgaccctttactgtaccttcccactccaaaagtggggaggggaactcctgtgcgggagtgctcagctctcaagggaagacagtcattaacctgtctaaactctatgttaatagaaccttctcgataattgctttcattaagtgtggttaatgtgaacagtacaagttatagcaagatttgcagaagaacaaagtaaatatttaagactttatttcaggatgcagttgggtcgaggcaaggagaagattagtagaagctgtatctgatggtatctgaggttgaaacacagtgaacctcttggcagaagtgccagtcatttctcatcagtggttcacagaatcctaactctggggaggcagatgggtgtctcctggagatggttgtgtgttcaggttttctcctttcgcttctggcctctgtcagacatgaatgacatggtgatgaagataaactgccttccctgtactgcccaggaatgcaatgaggattaagaaggtggcttttagcctgtgtctatgccacatggggaggatggttgctccctgagggcagaaggcattattagcaactgagttggcaggagtgtgtgccatgcgggctgggtgtacggagc

SEQ ID NO: 188976 - DNA, 1468 bp, Homo sapiens
agtatgtgtgacctttatttcaatatctatagttagcttgtatacaaagcatgtagcactccattctaaatactgaaaactagtagctgcatttttggtatcatgattatgaagatatttactgcagaattaagtaataatgagaatgggtttataaagaaggcaatatgtgtgtccataacctctacactcacaggtgagtttcttatattcccagtcatttctcaaaatggcgccacattttcattttcataagtaggtagattatggttttcttgtatggtttagggtttgtatcttgttgaaagggggaaaaatgacagtcttcatgttactgtgatcatctgtgtaacttaattactatttgttgaatggagtctcctttcagagctattcttgtgactcttttctaaatttagggtcatttgctttgtcgaccaattatatacacctttggttttctttcattgtttttctgagtcatgtctgttttttcttggattctgtcacgtcacaggtggtttttctgtttgctagagtacattctcaagtattttttttaccccagaaagtatgtggaggcagtacattttctgaaattctgcatgtttgaaactgactttattttgctcttacgtatttcattgattgattgtctagatgtaaaattctgtgcttaggctatttttcctttgattgtttttagcatccagaatccagtattattgaggagaagtctgatttagatcaaaactattttgttcctctgaaaggttttaggatttatattattaattctttaaactagtttgtttttctgtttgtttgttttaaagacgaagtcttaactctgtcacctgggctggagtgccatggttcaatcatggcccacatgatttaaaccttaactcctgggcttaagcgcagtcctgctcacttcagcctccagagtagactataggggcatgccaccatgcccggctaactttattttatttgatttttgattttttttgtgtgtgtgtgtgtgtagatggggtctcattgtgttgcccaggctggtctcaaacttctggcctgaagtgctcctccaccctgggccttccaaagtgttggagttacaggtgtgaaccactgtgcttggccctaaactaatatttatctaattccttttctctatgctaacactattttaggtattagaataccatgatgagcattgtttcaatgtcctagttctcaaggattatattttagtggaggagatagactataaacagatataaaagtggtaaaaagactgtgaataaataaattgagataaaaagagaatgattaatgtggggaatgtgtatcttaaagtggtcagtgatagtccctcagcagaagagttatttgagagacctgatggaagagagcaagctctaagaaaatttcaaggggagatttttaggcagaagaaccagat

SEQ ID NO: 188977 - DNA, 320 bp, Homo sapiens
ccttcccatctgagctcctacctacaggactttacttactgggcctataactcagaaggaaccaacctacccctgattcttggcaatttgtttttgcataatgctgtttctgttcagagacagaaaaatgcacggaggggttgtggatgtcgtagtggaggtggtggtgctatcggagaacagaaggcaagctgccaggagaaagggattggtatctacaactaagagggatgactcccattgtcaggttaatatgaaccctagatatctgtgttaagggcgagcaatgggggatataacaggtctttttactcttttct

SEQ ID NO: 188978 - DNA, 464 bp, Homo sapiens
gaggacatgatgcgaagtgagataagccactcacaaaaggataaatatggtatgatcccacttggatgaggtcccttcagtaatcagattattacagacagaaagtaaaatggaggacaccagaggatgacaggcaagagccaccatgccttgcaaaaattacaaattttatgtgacagatatttttttgagacagggtctcactccagtgcccaggatggcgtacagtggcacaatcatggcttagtgatagagtgagaccctgtctcaaaaaaaaaaaaaaaattctgttcaagctcatttttcagtaaggtggtaatgagcagcaataagaccaaagcttagatctatataaaaaattaaactttgtcattaaaaattggacagatgtgattaatcttatattgggccatttaagtatgagcacctctgttttttccctaagatgactttgtggtgtgtgt

SEQ ID NO: 188979 - DNA, 120 bp, Homo sapiens
aggactcctgattcttcacaatcatgtgccgggctagcagcttatgtgatgcagcgtttgctctgagagtttcctgtagtttggaattttagttataagtttgccatagttctgagtctc

SEQ ID NO: 188980 - DNA, 974 bp, Homo sapiens
agtaatgagcttggggaggagtgttcatgccgcacagtgaagtcggctgagcatgacacacatctatcagcagagatgggctggagcgcggagccgagccaatgacaataaacagtgtttgccaaagcaattcagagaggtcggcgaaagatgaagcagaagcctgtggaaagtccgtccttcccaaaacagacccgcgccatttcgcaggcacggagtctgcgaaaacaaaacggggtctttgcccttcgtggcatcatctcaattccagttgtccgcgtgcctctcacacacgtttggccgtttttatgtatcatttggaccgctgcatacttagtaatttccttcaaatcacttcatttggtgtcaaatcagcacttcacaccggcctcttgattttcgccctgtgatccatacatccgtcaatgccagtgggtcaaggctacgcaccatggaggggacttcagctcctctgtcctccctcacatatgtcccagcagcttcaccctcaggacacatccaggtctgaccacttcccatcatccgcctgtcaccatcttggtccaagccaccactgcctctgcctggaccttgctggaacctcgtccctggtcctcctgcctccaccttcagcccatcttccacagcagccagaaggatcccattaaatcacaaatttgatcaagccccccactctgtgcaaagcccttcagtggctccacatccacctcaactaaaatccaaagtccttgccatgccctacaaagtcctataactgtctcctgtcctgctccgtgactgcatctgcccccactttccccccagcctcctgtcctggggtctccctctatcctaccagcaccccaaccccaaagctcatacctgccccagggcctttgcccttgctgttacctgaaagaaatcaccttcctcagatacctgcatgggctgcttcctcacctttcccagctatt

SEQ ID NO: 188981 - DNA, 464 bp, Homo sapiens
agtctgtttgtcactcctaagatctctgttttaatgttaatgctggtcagttgtgcctgaattccaaagggaggagggtataatgaggcatgtttgacacttccttcccatcatggcctgaactagtttttcaggtttactatggaatcccctggctgacaggagggatctattccgttggttagggggcttagaattttatttttggtttacagatatattgtagaattttcaatgtgggtgatgtggaaaaatgtttgtaatatatggttaattgaaaaaagcagataataaaattccatgtattgtgtgatcctattaaaatacattaccacacacacacatacacacacacacacacacacacacacacacacacacatgaaaagttatctgactctgtgctaaatgaaacagctatggtagttttaatttttccctggattagcctgggcgtggtggct

SEQ ID NO: 188982 - DNA, 257 bp, Homo sapiens
cctcttcattcaagtccacggtcatgcaaaatgttgctttacagcctcttttgcattctttcactctttttatttcctgtcacaaccattccaattcaagatttcagggtttcttcttagacaagtgcagatgtctgctaactagtattcttaactcctggttggtcttcccagagtcttgccagattcatttttgtaaaaagaaaaactctcacaatgtctctcccctgctcagaaatacacaatggctccccatc

SEQ ID NO: 188983 - DNA, 616 bp, Homo sapiens
atgagaattgcctgaacccaggaggcagaggttgcagtgatctgagatcacgccactgcactccagcctgggtgacaaagcaaggccctgtctcaaaaaaatgaaacaaaacaaaacaaaaaagaggatgttaaatgacttttcaggtcatgtccacctaggatattctactattctatggcttgaaactggagaaggatcttaattaattaattgattgatttatacaaggctcaatatggtattgattccacgtggagccctgtgccatgtgatggacagttaatgaacaagctcgacctaggcctttcctgaattgagcttgtatctattgcagtgctacttgtctagggtcagttcccattcagtgctttcatctggaacatagagggcatgttaattccacttgtaggatgttcagatctggtagtgttgaccaagacattgtatgacagaatcaggttaaaaaacaaaattaaaaaaaaaaaattctagagtttggaaagatgggccaaggctcacaagataaatacataaggtataactcagtacacacagaaggaaagtcttcaactcaggtttaaaaggcacaggataagaaacatagaatggtagc

SEQ ID NO: 188984 - DNA, 472 bp, Homo sapiens
aaggagcaagagtgagcagcatggtgataaagttttataattaaacaaaaatgaagactaggttcgaccacagaatgccggtgctattgttatttgaaaaccatgctctccagggctgaaatcttcaaggtagttgaggcttctagggtgatatgagatgatcaaggacacgttgggagagttctagctttgccactctctgtgtggccttgccccatctatttaacctctgtctgtaaaatgaggggtgggataggtgagctctgagatccctttgcctgaaccagtctttagatgtaaccacttctttcctaggttggagacggattcttacaagtcccgcgtcacggagcctatactcgaggccgtgcttggtaattctttcccacctgttgccccatcagtgtccagctacctctctgaaggaaccacagctttcccagggggcaggggccctctgggaggcctcatg

SEQ ID NO: 188985 - DNA, 429 bp, Homo sapiens
gcccggcgtactagaggatcccgtcaatttctacacgtcataacgatattttgtgagcctaaatacctgtacttacactatttttatactttgcgatggctttcacagaaggcaaatatattcctaaattattagaggtagttttaccaagcaagtttaaatccattgtattcagtactttgactagagttcatttaaagtgtgatttggagttacccatgaccttctaccccattaccttgattaacctagtgttagattaatgctagaggtgaggaatgggtgaaggagaggacttgtgaacataattagatcttcattttggaaggtgaataattttggcttagaacacttctgactgcagcatgaagaatagtttgtgagtagataaaggcacagaagccatttaaaagcccatagtaatgtaat

SEQ ID NO: 188986 - DNA, 276 bp, Homo sapiens
agttcacagagaaccaagtcatttaagtgaagtattaagaaaaagaagttgttccagaaactatacatctggccacctgggtcctttgcatcacttgattgtatctaatattttaaaaaaatgaaccaggcacagtggcatacatctgtaatcccagcactttggaggccaaggcagagaatggctcgaacctgggagacggagcttgcagcgagccgagatgccgagatggtgccactacactccagcctgggagacagggtgagactccgtctc

SEQ ID NO: 188987 - DNA, 555 bp, Homo sapiens
gttttgccatgttggccaggctagttttgaactcctgacctcaagtgatctgcctcagcctcccaaagtgctgagattacaggcatgagccactgtgcctggcctatgattgttgataaatacattctcaagattctctcagactttctgaatcaaaatctccagccatgtctctgtgactggcccccagtaaaaaccctggacaccaaggcatggaaacagtaattcgtttgatctggactgtgtggcccgaaccctgtatgtaatatactgtcccactgacttccctcatggttacaacgtggctgccagcaacattaggggcaacatactcccttgcgtaccatattatctttctgaaaccaaaaacatggtaagttcttttttttttttttgaaacggagtctcactctgtcacccaggctggagtgagtgtgatcttggctcacggcaacctttgcctcctgggttcaagcaattctcctgccctagcctcccgagtagcagagactacaggcacccaccgggtgtgtgccaccatgccgggctaaattt

SEQ ID NO: 188988 - DNA, 119 bp, Homo sapiens
cctttaggtagccagtcaacaccatctgcctttgcaaataaggccagaattactcttgatcttaaattttacaagccaagtttttagacagtggataagttcttccacgtcttctcaaa

SEQ ID NO: 188989 - DNA, 551 bp, Homo sapiens
tacactttgtaattacatatgttctagcaggctttgatttttaatttgtttagctttatatggtcatatctgtacgttaggtttgcattagctaacttttaaacatttttgctcgctcttgtactgttgggcacaagcagtgcctccaggcaaattgatgcctaaactagagagaacagcaggcattctctccttactcttccacttcccctttacttccatttcctgatcctcatgtctgaagtcacaccacctttagccatttgaaggggctgcttcttccattttacgctttctttcacttgtatgccataaagtgcagtgcctgctagctccagtgtgctctgtatgaggtttgcaccagtgtgttaggaagaaaggaggcactgaaattaaaaaaaaaccatattttgggggtttccaagtcactaaacaattgaaccacaataatagaggaaactgacttaaacagtattaaactggtattgcttcaaacattatcaaaggatttctgaggtgaatgcctactttataaaaatgtattttttcgg

SEQ ID NO: 188990 - DNA, 159 bp, Homo sapiens
tagaatcgagctcggtaccagattccctttccatccagaaaaaaaaagccaggtatggtggtgcatgctacctggaggttgaggctacagtgatccgagaccacgccaatgcacttcacttcagcctgggcaaagggagtgagaccctgtctccaaaaa

SEQ ID NO: 188991 - DNA, 160 bp, Homo sapiens
attttaagtatcctgaccattcctatccattctcctgtctgatcatcctttacctggcctcctacttggatgtgctcaaccaacctctggttgtgttttgtgctgattaacttcgagtagtctcccaggcttcctagagttgtttctctttttttttttt

SEQ ID NO: 188992 - DNA, 340 bp, Homo sapiens
tgtttcaatacacgcaagtataattttagcccccatcgtcactcaacagctagtttgggccaggccgcattacagacctgtagagtcctaggcctgcagcagtgtgtaataaaacaggaagaatgcctgcatcccagaggacacaaacagtcgacagatagagtctggtagtgtgtgtgtgttgactattggtgtggaacaaattactacggagctcagtggcttaaaacagtgaacatttcgtagttcacagctcctgtgagcacaggagcagcagagcaggatagtcccggctcaatctggcaaggctggagccacagaaagacccaactggggcagg

SEQ ID NO: 188993 - DNA, 365 bp, Homo sapiens
aatcaaataactcatctttatctttattacttgtccatccgacggtcagcatatatagaatgtgatgttctgacttgtgaaacccatgctgtatttttttagtggattttatataaaccttttagcatatcaataaatgaagttactttttcccctattattttaaaagttgagtattttatcccagttagtaaatatttattgtacctttcctatgagcatcccctaccactgtgttaaaccctgcaaaggacatagtttagcaaggtactcgccacccctaaagatcctgcactgaaatgggggatgcactgaaagtggggatgtgggaccagatgtgtggagtgggaagtgcaagcatactt

SEQ ID NO: 188994 - DNA, 345 bp, Homo sapiens
tgctgtgcagggtggggagggatacaaggctcaacgtgacccttttccctatctgaccccatgacctgctgctctcccctctctcactccactcaggccacaccagccacctcggggccttggcacctgttgttccctctccctcaaccactttcccccagatagccacagggctcacttcctcacctccctcaagtcttactcaaaagccacctctacagtggggctgtccttggccaccctctataaaatagcacagcaaggccgggtgcagtggctcacgcctgtaatcccagcactctgggaggccgagacgggtggatcacgaggtcaggagatcaagac

SEQ ID NO: 188995 - DNA, 493 bp, Homo sapiens
cagagtccgtgtcctgaaccacaagaggccatcatacaccatcagatttggtgctagcatttctggtggtgcctggtggtgatggatccatcacaggggtcctccaggtactggtgctggcccagaacagagctgacactcctcaggcactaccacattccaggcactgtgcttggggtcagtccctctcttttttttcccccccaattataacagtatctacaaagtaggtgctgttatttttcccctttcacaggtgagatagactcaaagaagtgaacttgcccaaggaacagaactaatgagtggggaaaatggaactggaaaccatgtctgtttactccaaaacctgtgtttcttgccctctttctctgatgccagccccctacacttcaaggcctgtgttgtccagacccacactcgggcctgccagtgtgtgcctggcagggatgctccatggccacaccatatccatcctacacatcccccctca

SEQ ID NO: 188996 - DNA, 320 bp, Homo sapiens
caacatgctgtcactgaactgaaggaagttttgggaggagacgtacactaccataccattatataatatttccactgtacagataacaatagaagtaaattatctctgaccatacatgacagtacaatgtagtaaaacaatcaggaagtgattattttggaggattccttacctttgtttttaatataatttatttattgtaagcagataatgtagttttttgaaacaattgctgtgtttaaccaccaggttgcaaaattcctgaaaacgcaacaatctgtgttaagccagttccagctctccactgggtgtatgcctcg

SEQ ID NO: 188997 - DNA, 254 bp, Homo sapiens
ctttagccgaattaaattttagggactttaattgagcaatggacgattcttgagttgggcagccccccagaatcacagcagattcagagagactccaggggtgcctcgtggtcagaacaaattggtagacaataagtgacataaagaaatcagaagtgaggtacagaaatactggttgaagtatggctgctgggattggccaagactcagcgattgtaacaggcacatactcctaagttaggttttcaatcttg

SEQ ID NO: 188998 - DNA, 587 bp, Homo sapiens
tgacctcaactgatctgcccccctcggcttctcaaagtgctgggattacaggcatgagccaccacactcggccactaggtgcataatcttaaatatcaaaaaaaccatatatattaatttgctcaccacaaggctatttataatcatggagaattagaagcaatttaaatgttcagaagtagaagagcagatgattaacatttgtatgtcaactcaataaaatattttgcaatgattcaaaattatagttatgaagattatataataaaatagaaaatatttgacaagttatattttaagtgcttttcatatattctcaattttaatcctcccaataatccataggtagatattattattcccattctaatcatgaggacaattaggcataggagattaaacaactaggtcacacgtaagtggtggagctgggattccactgtaccgcccttcaatataaaaataggttatgaagcaatatctacagtgcatgcatatgtatgtatgatatattcattcctaggaagaaaggctaaaaggatatatagctaaaagtgattgtgtgattgcattatggtggtggcagt

SEQ ID NO: 188999 - DNA, 542 bp, Homo sapiens
tttacatgttatcaataaaagtagcattttaacaattatcctttccacattatttgataaatgctattggttttgtctgttatttttataaatatataatttgctttaattacttaaatgttccttgagccttagaacttaaatcctgatgagggttttactttttaaaatactgaagtttattatttatgcatgttttacagaaaaatgagtggcttttaaaagatcaaaattaaaggcttaaacatggaatctctaggacatataaaatatgagtagaactgtgtatttataagatgttaatgtaagacttcaggccttgtaatatcttaaaggaaccacttcactgtaagggagcagtttgtctttctacctttccaattgtattgagattttgcccagtatgtctttttacttaaacaccttggtgaaagctatccagcatcctgttttaaatctcctttgttgcacttaccataattactttcagatctgtttccattctcagaaactgaaactgtaagctcatgtgagtggggaat

SEQ ID NO: 189000 - DNA, 232 bp, Homo sapiens
cctcccgtctctttttctcccccttgtagtttgtttgttgaagaaactggagtgttgatcccatactgtttcccagtctgaattttgacagttatatcctcataaggtggtttaacatgtcctgctgccttctgtattttatagtaaattggtgaatgaacagttgttttcaactgttggcaatgtatggaaacatttttggttgttacactaggtggggcggtgcttctgg

SEQ ID NO: 189001 - DNA, 472 bp, Homo sapiens
ttccatcagccccagcgatgggctccggggaatatcaattttccttttgcttccccggtcacatgggtttcacctcaaccatccccttttgctcttccatcactgctaacactctgaaacacctagagtggtttctgttttcctaactgggcactgattgataatgtctcttcataactagtactgccattcagtgtcacatgtctgtgtctgattttgtgacctcctaagtgacagaattcggttattaatggggtagtttttacatggagaccttgaaatccaatgatatactgctggaacctgtggatatagttttgagtctgtgagctcttaaatgggagggaatgttgttgtagtcctttggcttctgatggttgtgtgaatgaaacagtcattcgctgagtatcttctgctcatattgcttcacttgtcatgtctggcatttctcctttgtggttgactttcatcg

SEQ ID NO: 189002 - DNA, 246 bp, Homo sapiens
tgagacctaaagggagaaggaaggatgtatggaaaatggagcctttaagggcagatggttttcaccaacctttgagggtcggttaggtgactcattactcatttgacaatttaaaaatggataaaaatatggaaaatcttttttaatgccgtaactatttaaatgcattcttctaaactaagggcctacaaataaagaaagccttcacatgggcaaacttcagggcactaccctcctccaaaaata

SEQ ID NO: 189003 - DNA, 431 bp, Homo sapiens
agtgtttgcaagccaatttcctccacttcgtcagctttatcgtctgtgtgagttttgtatcctgaccactgaggtcaatgtatgccactgagaaacctcacccagatcttaggaagaaattcctattttcataaagacatgatttttagtttacattcttctcatcggtcctatgtctgcttcagctctgtattagtaaagcagaaagttatgttcataaatccttttaagaaagcagctactaataaattaagagatttattattgtgcaggatctggattttatgaaaaaattttaaaaaacaaaacaagagatgtactaatttgcccaaatattccctggtacctgagttagttaaatcagaaatactttattcctataatctgccaataggaaagaaaagaaatttttgtgatggaatcactgcatt

SEQ ID NO: 189004 - DNA, 131 bp, Homo sapiens
tccatcccatcgttccaccatgcttttgttctccatctcccctgagactattaataccttgatagctttattccctgcaggaaaaaaaatatggagcagagcctcatgcaacccatggggaacatataatg

SEQ ID NO: 189005 - DNA, 547 bp, Homo sapiens
gatatgattaagtaattaattgttaaaaaaagatattctgggcactttcacccacaagtgtgtttaaaaatacaaatttcatcacaaattattttgagtgttcaagatcacaagcaaagaaaaagctacaaggcctgatgacctaaaaatgtgacatcattactttaggtcaaaagagatctaaattaagtataaagcatattttaatccttctcaaatttcttctttgtgcatgaatataaattatggtaaatttgtataagtaaataccataactgttcttaactaataaagtttaagggttaaaacaaagaattcccaagaaatgtgaataatggcaatcatgtagcagtagtacatcctttcacatggtattttgggaacattcttttattcaataagcctagacattacagtatgcttcaaaaatagtccaagctggtgaaccaatccaagttttgacttcaagcagactgtcagagcagcactaaggcagaaagtgacaacactgtccagttcgaaatgaaagctgtcatttgcctgccaa

SEQ ID NO: 189006 - DNA, 475 bp, Homo sapiens
atcatgcctcctcccagtcaaaaagagccaagcattttgagctggtaaaggagaagggagaggtgaaacaatgaagtaagtgaaacaaagtaatagatgcaacttctctgaacccagagggggcacttgaattgtccctcaatacattttctcagtgcctactatgagcagaattccctgcttgacttggatgatagtattctgaagaatctactgagaggagagacgctgaggccaatggagagttggtgaaatgagacagatgtttatcctggaaagcaaaaagagatggagagagagagagaaataaacagatctgttcagagtcagccaaggcttaaacaaacaaacaaacaaaaacccttgctggtaaaagtttgagagattcctggcctcacagattatcagcctgcctttgtcaatggaacagtacctctgtctcctctgtgtgaagccaaattcattcattcccaga

SEQ ID NO: 189007 - DNA, 437 bp, Homo sapiens
tttcaaatgagcagcaggatgtaaagcaaatgagaaatttaagctgtgctcccagaaggcaattattattaaatatatgtaccacagcattatcatcatcatacacatgaaatcaattatcaccctaagcaaccacaatttcagttaccttattttccttaggaagtctaccatcacttaccagatttttacctaaatgaattattattcatgtcaaagaacaatagtttattataccaacatttgtagctatcatagctttacttagtttatatttttatgtctgactgatttactctacaccacttaaaatattgccaacaaccaacaacataaaaacaaaatgccaggtgaagaatacaaacaaaatagcctttctatctccacttaggatattatcaatcttttctttcccccttgcacgaatatttttagca

SEQ ID NO: 189008 - DNA, 604 bp, Homo sapiens
atgcacctatgtagctttcttctctactccctgccttcccttcccttcaggccccagcttaagaccttggtataccatagcttgcacttttatgctactttgagcaaatatgaatcttcttttacctgtgtcttatttccccaaccagatcaactaggctatccttctctgaatgcctaagattaagcttggactccatacacaagtgttatctataatacaatctatcctatcagaaaaatgagggtactatacagataatctttggactccttgaaggtagttctgaaaaacttcatatctacccttcatattgtggaagagtaatttaatataaacaagaaagaatgtgtacaatattaaaaaatttctgaaatttaaggctagatttttctctagcctatctctcttttctaaattactgggataatcacaaaaattactctcctctcaagaatgtttgactactaaagaacagggaaaggaagagattaaaatataaatgtgaaaatgcacatatcaaaatgctggctgtggtttttaatctaggtggtatagcaatgggtaatttatatttttatctttgcatctttgtatattttcc

SEQ ID NO: 189009 - DNA, 827 bp, Homo sapiens
cattaaacgtttccagtcgatgtagctaacaatagattcataagatcatttaaaacttaaaaaaaaaaaaaatcaaccagacacagtggctcacgcctgtaatcccagcactttgggaggccaaggcaggtggatcacatgaggtcaggagttcgagaccagcctggccaacatggtgaaaccccgtctctaccaaaaatataaagaattagctgggtatggtggcatgcacctataatcccagctacttgggaggctaaggcaggacaatcgcttgaacccagggggctgaggttgcactgagccaaaatcatgccactgcacttccagcctgggtgacagagtgagattccatttcaaaaaaaaaaaaaaaattggtcatgacccagcaatttcacccttaggtatgtcctcaatgcaaatgcacagatacatgctcaccatgtagtaaaaggataataaataatagtagcacagttcctaatagttcttttattgattgtactgtttgattgtactcagttttggaactgagaaccattgagatgtccatcaacaatacaaacaataaaaaagttgtggtcatcacaaaatggaatactatacagcaatgagaatggcagatcctaacaacacacacatttatgaatgaatctcacaaacataatattcaatgaaagccacaagacaatacatttcatacaatgccacttatataaagtacaaaagcagacagaactaatatatgctgttaaagttaggctagtgattatcctttagcaggataaggtaatgacctgaaggacgcatgaagaaggtgactgggg

SEQ ID NO: 189010 - DNA, 553 bp, Homo sapiens
ccgaataggaacagctccggtctacagctcccagcgtgagcgacgcagaagacgggtgatttctgcatttccatctgagatgataaaacatcagttgaagaagttcattcgggtaaagagatggataatatttggatatacatgaactcttggaccatcatcaatagcttgttctatattaaggcataaggacagatgctgataccatctcctttacaagactcgaaatttctacctttgaaccatgcaggtcataactgttactgtcagtggtccagccatatctacgtgcgatgtgtgaaccaggatgacgtatgttcaggcaatatatccactgttgaagacgaaacacgtcgctgctgctcgcttgatgtggctgcacacaccaacagctgtttgactactctaggacttgaagctgctattccctcatgatcctgacacctggaatttgcacctcacaggaccccagccttgctgctctgcccattgacctctgccaccctccataccgggtgtgagttaccaccagaagaagtctgtggcagcagca

SEQ ID NO: 189011 - DNA, 398 bp, Homo sapiens
ccctctaatcctctacaggagagacacgtggactgccaaaactgacgccgcatacaggactggggaacgcagagtgcagcgacctcatccctgacctgcgctcactgacctgaatagggctgactcttgagaaactgtgacgagactgtcagtcacctgtctgccccccaaagccagcagtggtgtgctttcaatcccagcttctgaatctgtaatttagtgagaccttacattcgtgtggcacttcagagttcagaaaacatgcttataacctaaacttactcctccaaccacccaacagaagggacgctggggctctgcctgcccagtgctcaaggtccctcggtggggacgccacacctgtttctcccactttctcgaaggtgggtgcacctgct

SEQ ID NO: 189012 - DNA, 220 bp, Homo sapiens
gattaccaattcaaaggattatagtttaaatccaattagattatgcatgtgaaagtgctttgtaaaatataaaatactatattaatataaagtatgaatggatgaataattaacaaataatccaatcaattatacattttataaatttcattttggaaacttggcttcaatgtgccacggaggaaattctgttcttgtaccataagcctgtggtttcttc

SEQ ID NO: 189013 - DNA, 1019 bp, Homo sapiens
cactgaagtttttcaaaccacattagttatctttctcctccctttctccttttaagcagctcctgaaacacactcctgcagaaagcctccgccctactaggattacatccatttcgcgtcttcttaactataatgggatatttttggaggactgggctaagtaccctaatttttttttttgtttcagaaaacacacagcatttaacagttttctgcttgcagtgagtgcttaatataggcttatttgatgaatggttgaaattaattatctctaaaagagaacaaatgtggagcctcaggtcaaagtccttgggtctcaggatttcagacactaactgccactaaaggattactagagtgttctcctatctgaacccatagtggattgatataatagaagtataataacctctttgatatgtacagagcattacggtttccaaagcacttccacatttatcatcttatttgagcctcacaacaaacctttgagttactcaggcagctactactacagagaaaccttaggcctggaaaaatataagcagctgacccaaggctgccaggccaggcatcggacacaatactggtaccagtcaaccgttttttgagcacaagcattgtgccaggtacacaaagtacattattttcttcagtcctcagaagacccttgattcagttcctactgccactttaaaaactatgctgaggccaggcttggtggctcacatctgtaatcccagccgaggtgggtggatcacctgaggtcaggagttcaagaccagctgggccaacatggcaaaaccccgtctctactaaaaatacaaaaaaattagttgagtgtggtggcaggcacctgtaatcccagctacttgggaggctgaggcaggagaattgcttgaacccgggaagcggagtttgcagtgagctgagatcacactactgcacttcagcctgggtgacagagtgagactctgtctcaataaatgaataaataaataaaacaaacaaataaataa

SEQ ID NO: 189014 - DNA, 305 bp, Homo sapiens
tcctgctccttcttcaaagccacccctccccaagatgctgcctctgaagctccaacagtccatctccctgacagttgtgtcctctccttctctcgtatgtggtagtatcactgtcttccccctaaagcagtgggcaccttgagggcagaaccttgccgcgggcatctctggcccctggggtccgagcactgagcgggaatcctgatgataagtgttgcatgagctgggcacagtggctcacgcctgtaatcccagcaggaggatcacttgagaccaggagttcgagaccagcctgagcaacatag

SEQ ID NO: 189015 - DNA, 481 bp, Homo sapiens
ctaatttaataccctcaagttgtatatataccaggaaataaactcataatctccatcctaatcagtttgtaatataaaaggaagaacaaaattcccaaactttaaccctatggccttttcagtgtttattgatgagtatattgcaaacacctgggtagccagagcacctctgcttcactcctctgcttagaagcagcttctgccacacatccaggattatgtaatacatatctgtcacggtccacaggaccagcggactttaaaaaataatggtgacataaaaactcacagtggtagctataccacggaaccctaggtgagaaggcacctccacccgcacacaggtgtatggacgcaaggatgaacgttccggccgcacgcgtcccacacacggacgtgcacacgggcgcctccgaataggctcgcggttcccgaagccggctccgcggacgcctgctctggctccgtgggaaaggcgcct

SEQ ID NO: 189016 - DNA, 434 bp, Homo sapiens
tcaaattcatagacatagagtaggatggtggtggccaggggctgagggaggagggagtagagagttgtttactggctataaatgggtacagaccttcagtctggggaagatgaaaaagttctggagatggatagtggtgatggttgcccaacaccatcaatgtagttaatgtcatgcatcgatcgtatgcttaaaaatggctgaagtggtaaattttacattatgtatagttcatcataatttaaaaagaaaaagtaaaaacaaagcccagcctactttgaccccttccaaatgcaggtttggacaatgcacgctcacaaacgccgactctgtttctctgctctgagaaggaaatggtgccaggttccctgcctagccaactccacctaaaagaagacatggacaacacagggagccgatccctacatgagcat

SEQ ID NO: 189017 - DNA, 736 bp, Homo sapiens
gtattaagacctgaaactgtaaacctactagaggaaaagcttcatgacactggtctaggtaacaattttttggatatgaccccgaaaacaaaggttaacaacagacaaatgagatggcatcaaactaaaaagcttctgcataacaaaggaaaaaattccaaagagacaaccctcagaatgggagaaaacatctgtaaatcatccatctgataaagagttaatatccaaaatatgtaaggaacacaagaaactcaacagcaagaaaacaaataacccaactgaaaaatgggtaaggcacttgtactgacttcaaaacttaccgaaaagctatagtaattaaaacaatatgatactgggtcaaggacagacatgtacactgatgaaacagaaacggaaccaggaaataagcccatacatataagatcaaacaatcttcaagatagtcttttcaacaaatggtggtggaaaatctcaatatctatattcaaaagaaagaagctggaccaattccttacactatatgaaaatattaattcaaaatggatcaaaaacctaaacttaagagtaaaaactgggctgggtgcggtggctcacacctgtaatcccagcactttggagaggccgaggcaggtggatcatgaggtcaggagattgagaccatcctggctaacacggtgaaaccccgtctgcactccagcctgggcgacaaagcaagactccatctcaaaaaaaaaaa

SEQ ID NO: 189018 - DNA, 400 bp, Homo sapiens
ccggagcatcatgcttttaaggtggccatggaccggatggccaaggggccaccacactgccattcctgaactagataatctgagagagttgatggagcacctgtgaattctgggaattctgcacatctagaattcccagattctaatgttctagagtctgacattccaagatcaagggggcacaaaaaaaagtcaggcaagcagagaatggtctctgcctacgggggctggcagcaacaggaacacatttgcaaaggcaacctgacgggtaagtcgtatttccaaggcaaaaaggagatggcattccagacggaaagaccactataacgaaaggcccaaagcaagtgagtaggtgactgtcctaaaatcaggactggattccattggggggggtaccgag

SEQ ID NO: 189019 - DNA, 277 bp, Homo sapiens
agttgtcctgcagtgacgatcagatcatggttctctatggcaggttggaagtttgtccttaaactatgatatgggcgcagggggcggtgggggaaccagacccctctcacaaaggggctgggttcctcctgaccaccttgtcaaagataaataagaggggccccacagttaagctgaacagttggagcaaattaccagagtgtcagcccacgttatccaaagcccagggttatgcttcccaaaataattactgagtaggttttatgtaggaccccgg

SEQ ID NO: 189020 - DNA, 576 bp, Homo sapiens
gaaacaggttaaactcatagaaacaggataaacatcaggaattctgcagagagttatgccatatttaaactatagaaagccaaagacagtgagataatcttgaaagaagacagaaaaaaaaaatacacactttatcaatcgaggaataaggataagaatttcattagacttcacatcagaaaccatgtaaaaagaaaaaactatttaaagcattgaaatataaacaaaacactaagctagaaatctatgtctagcaaaattatccttcaaaatcagaagaatcaagacatcttcacacaaagaaaaattaaggacaaaagttaccagcagacatgttccataagaaaaattaaaataattctttggagaaattgaaaatgatataggtcagaattctaatctacctaaaatgaaagggcataagagaaggaataaaggtaaaataaaatattttattttccttatttttggtttaaataaaggctaacattttctttaagttaataataataataatgtactggatgtgacagtcatgttataaggaactaaagagaggacttgggaatactctta

SEQ ID NO: 189021 - DNA, 374 bp, Homo sapiens
tgacttttaagtataacaatgtaaatgaaaaaagcaattgataattttcatctctaattcctgtgattctaccatcctactgaaaaggccaagagattaaaaactagctgaatcactgcataataaaagcatccggcaacagtgggtgtaagtaccattttaaaagaaggaatgtgagtgggagagcagtgtaatttcactgaagatgaagtagtcttcagagctgcacctgtcaacagaatctgttttaaaatgtgcttgcagacagagtttatatggtttagccagtaccaagagaggtgttattaacagtggataatggaaaataatctctgaaaagtatttgctcttctacttgatatgcattttgtgca

SEQ ID NO: 189022 - DNA, 316 bp, Homo sapiens
taagtttgattactgtggaccctttttgcatgtgaagtggtttgactttggccttgttatctaccagtaagcactaccccagttatgagggtgctgcccggcagcactcatcctccaaactccaaagaaatggatttggggacaagagtatgttaaagctaaccgtgatctcagtgctgaaacataaggcgatcggacctttgaattctgtgatgttgagggaatacagcaaaaccacgaactatactatacatgtacaacacacctgtacatatgcacatacacactggcatacaacgtacgtgcacacacaaca

SEQ ID NO: 189023 - DNA, 305 bp, Homo sapiens
aggccagcttctaaaggtttggaggatctcttgacggagttttagctagaactgatatgatttacactgaaaagctcttgacagtcctgtggtttagagaagagtagagaagaggtttattggtggtagtaaggtgttgatgcaattccaagtcagagaagttgattgcctaaccgggtcagtgctgttaaaaggcggcatgatggaaattcaggaagtcaagtcaggagtatcttaacttgccccaaagagatggagaccatagaattgtgggcttagtgactggttcaggcagcctttaacat

SEQ ID NO: 189024 - DNA, 802 bp, Homo sapiens
ttcctttatcaccacaagttagttgagggctcttgggttgcacgcaacagacaaagttagtgactggttaacttggagaggattttattatgagctacacagcgtagctcatagaattgcagggaaaactataaagaactaagtcttggacaaaagtaatatcttggcatgggcctgtagccccagctactaaggaggctgaggtgcaaggattgcttgagccccggagtctgagcctggcttgggcaacagagagagataaagagaccctgactctaaacaataagtaaatacataaaagaggacccaggccctccttaggaactggatggcaggagcccctggacaacctcttactgatttggtgctggatgaggcagccgcagctagccagtgttctttgtgttgatctcctctgccttcatattccagggggagagggtctgacaggccagactggcccccaccctcttggccactggtgggctgggcatgtttttgggtagttctacctagccagattaaagtgggggtggggtggggagtccagccagcctgggcaacagggcaagactccatctctacaaaaaaattttaaaattaggctggcacggtggctcacgcctgtaatcccagcactttgcgggggtcaaggcaggtggatcacttgaggtcaggagtttgagaccagcctggccaacatggtgaaaccctgtctctactaaaaatacaaaaaattagccaggtgttgtggtgcacacctgaaatccccgctacttgggaggctgaggcccgagaatca

SEQ ID NO: 189025 - DNA, 195 bp, Homo sapiens
aaatggaaaggtaaaatcagtgccgtatctgactgtaggtgagtaaaattataataaccaggtgacaatctattaatttacgattaggaattaaactgtgaagttgactgttctgactagcacgttggctgtctacagataacaaactaaggagccagattatggcatcgtagtggacttaagaagtgttgcttt

SEQ ID NO: 189026 - DNA, 490 bp, Homo sapiens
ggcttagagaattgcaaacccgtattgtgaagtcctaccaaacctttcctgaagctcgcaagagctgaccctggactctgcgttagcatgaggcagtaaatccactctatcgcctaatactttaagattaattttcttgacttgcaaccacaagcatcctggctgatacaaccaatgaaatggaagaggaatagggagagagaaaggatacaatctgaatctctaagttctgcttccgttcattgctgtcagttctatgatgtttctttgaatacttgaacacaaccaagttgggtctgaatggatgtatcttagtttcacttccccattctctggaattagagtggggataattacattttttaatattcttttttttttttttttacctttagacaatgttttctctctggattgaatgatacatagtttctttgaagaatacattatgacattttatttctcttccaccataatggaatcatatgga

SEQ ID NO: 189027 - DNA, 1413 bp, Homo sapiens
aaaacttacaaattactgctggacttttccatttactatttttggactgtagtggatatgggtagatgaaacctcggatacgtgggagctaccgtgggtgtattaggctctctgatgttggatgaacagggacctgggttaatcttgccctactctctctaattcaggtaccagccagacgagaatttcagcaagaacgagaagccgaaggaggaagtagttgagatgaattctgtacccaaagcagaatccccagcatgtgttcctgaagcgtccagcactccggcgagtctgtggagccctgtcagcaccatccccaccccgagatggggccgcatcgtctatggatgtgcctttctgcttgttgtcctgctgtccatgctatgcctggtattggcccattggcccaaacgcctgttctctggagagctgatctacatcgcagcggctgtgttgctgctggtgctcattgtgggattcactttcaccgtctggagacagccccagagcaacactcctctttacttcaaggtccccctgttgcctgttctcctctggtcagcatctctgcacatgtttacctgatgatgcagatgaccactgagacctgggcccaatgtggagtctggatgttgattggatttgctatgtattttggatatgggatcccacacagcttggagaacaatcaacagccaccagcgtcaagctcccaaactcctcatgaaaacatccctagtcccttgctgaattagtttaaccacggaaaagggatggtccagtccactggaggtgtcctctggatgacagggaaagtgtgaagctctgtggagcatgaaggtgggatacacttaaagccccttgtgcattgccagtgagcaaacactttttaaaaaactttatttgttgtttgtttgtttgttgttgtttgtttgttatagaggtgaggacttgctctgttgcccaggcggaacttgaactcctgggctcaagtgatcctcctgcctcagtcttccaagcagctgggactacaggtaccccatcatacccagcttaacaaaatatctttatttgatttgattttttttctttttgagacagagtctcgctctattgcccagtctggagtgcagtggcatgatcttggctcactgcaacctccgcctcccgggttcaagtgattcccctgtgtgagcctccagagtagctggaattacaggcacatgacactgtgcccagctaatttttctttattagtagagaccaggtttcaccatgttggccaggctggtcttgaactcctgacctcaagtgatccacctgcctcggcctcccaaagtgctgagattacaggcctgagccaccgtgcccagccaaaataactttaaaaacttacatttttaaaaattgaca

SEQ ID NO: 189028 - DNA, 409 bp, Homo sapiens
gatattctcgattccccaaagacagaactgattgcctgtactctttctgtcataataccttctatttacacaaataagcacttttcatattatttgtaattgactgtcaaaaattgtgccctgctcaccattgtggtggtcgagtgccaagcacattgcctggcatgtaaaagtgctctgtaaatatttgccaaataaataaatgaatgaaagttggagcttaaggagaaagaacaatcatagagagggatatgtgagcaagcagagagcaatagagatgcaacataatcaccacagataatttctcctaaagggtgtttgtgttagaagttaatctggcagataaccatgaggaaaccttgtataaacttgcccatatatggcaatataataagtggcaatcaagctt

SEQ ID NO: 189029 - DNA, 582 bp, Homo sapiens
ctcaaagacagactccaatctcgtttaagaacctttaagagtataaagacaagggaaaaatgtcactctcaaattagtacagcggtttacagttaaaaacaaaaagaatgttcaatgctcctgaattgtctacacaaaaactaaggattaaggacatacactctaaatgctattatacagtatataattaaaatcaatggttcaacaacttgcagaatgttatacagctagtaaaatgatcattaggaatccaaggaatcaacatgggagaatgtttaattcattaagtgaaataagcaaaatagaaacttaattattttatcattctaactatataaaacatacatatgagacatgaactagttagaaaggaatataaccaatggggcacagcagctcatgcctgtgatcccagcactttgggagactgaggcaggcacatcacctgaggtcaggagttcgagaccagcctggccaacatggcgaaaccccgtctctactgaaaatacaaaaattagctaagcatggtggcaggtgcctgtaattctagctacttgagaggccgaggcacagattgcagtc

SEQ ID NO: 189030 - DNA, 298 bp, Homo sapiens
tggaagagatgtacaaggtgaggtatgggaggagggtgtatagaacttccatagcctttcaagacacaccgcattccagtgcttctgtgtgttcagcaacctcaagctctccaagcctcaccgtttaaggtgatttatggaagttccattacatacgcatgactgactaaatcatggtcattggtgcttgagcttaatctccagtccctctctcctcactggaagtcaaaggtggagctgaaagtcccaaccttctaattatagcttggtctttctggttgctagcccccattctgaa

SEQ ID NO: 189031 - DNA, 352 bp, Homo sapiens
agaatacttacaacaaattagcgaaatagaaagacatacgaataaataaataggcagataggtatgaacagacagatgtacagaaaaagttcctagaaggaagtattctaaaatgccaaatggtttattaacaagggtaggattatcagagattcaatagcttgtcaaaaatcacagctattaagtgaaagaggtgggattcaaaaccagacccttgctctatgctatactccggatgactatttttttttttatttattatggaaatcttaaacatacataagagagactagcataaggaacctccaagttcccatcacccagcttcaacattctgtgtcttgttttagct

SEQ ID NO: 189032 - DNA, 346 bp, Homo sapiens
catattctcaaccctttcttttgagtgtcctttaccttttctgtcaaaaacttgctctttcctgatttccctgtttttcctgccaagcctcaggagaagcttttcccacatgctgcttatctttgggccttagtgccgagacgtggggggtggtgcttccttcttacttcctatttctttcaaaccattctccctccctccctcctgcctaaaacaccagctttggatctcacatcaccagagccactcactactcctgagctatttctctgtgattttatctcctaccttattgtctctttctttccagtatcactgcttcctttagttcttggcaatcaagctt

SEQ ID NO: 189033 - DNA, 1128 bp, Homo sapiens
cagcatgagaaggatgaagctaaatgccttaatcctctcatctttccaaaaccacctgctcagcagcaggcagttatctttcctccctgttgctcaaccaaaagaacaggtcaccccatgattttaaaggtggtttttttcatagattctaaggggatttaatggtcagaaaaactgggaatgaataatttacaagcagctgagatttttcccttgctctaccaatcttagttggttttcctgaaatcacaaaccaagccctccaaaattacatgtatacaaacatacatacataagagcgtgtatttatacagttgattttcattacttgtagattccacatttgtgactgcctacttgctaagattcatttgtaatccttaatacttgaggcacttctttcgcagttattagcagacatgtgcagagcggtgaaagttgagttgcccggtatgcacattcccagctgaggctgaacaaggcaatactctgccttcttgtttcagctctcagactgtaaataagtatactcgaagtatatttagtgccacgtttttcacatttttgtgcattttgtgggtgattttgctgcttaaaatggctcccaagcatagtgctgcagtgctgtctagagtccctaagtgcaagaaggttgcaaactgcctgaccagagaaaatgttcattagagaagcttcattcaggcatagggatagagctattggccatgaattcaatattaaggaatcaacaatatatattaaatacggtgtatttacacagaaacacacgaaacaagcttatgtgttgataggttgctgaaaatgatgtgaccagaggctcacagaaacctagccatgtatttcccctaggagcagtggtccagcattcgctaattcattgcttgaggtgactttatggaacacagctaccctgtatgagtgactatataaatgtatgtatatgtgcatatctccacttgtaaattaatatcccttggcaaagaaatgggtaatgcctcacgtgagcattgcatctgtctgcgactgaagtcatgaagctaagtgctcagtgcaacaaggtaatatgctaggcctagttgataggtgttgataccctcttttctttcc

SEQ ID NO: 189034 - DNA, 662 bp, Homo sapiens
agcttttagtgtgctcagcaaccctcccttccctgcccacttctcagttgattcactgtttcttaccagctcatgccagtccattaaagaggagagataggcaacagaaaaaaattaaaagatgaacaggacttctggatgatgattaactggattactggataagcaggcagtctggtgagccagtttgtgtaggtgtctgtttgtggagccctgctcattgatagttacttctggtattatcactgaatttctgctgtgaaagttgtcattatgttaaccttgaggctttaggaatataaacaatgcttcctaaattctagagatcacatttaagaaagattcatatatatagctaaactttttaaaaaggaatactgtggccgggcacggtggctcaagcctgtaatcccagcactttgggaggccgaggtgggtggatcacgaggtcaggagattgagaccagcctggccaacatgatgaaaccctgcctctactaaaaataaaaaaattagccaggtgtggtggcatacacctgtaatcctagttacttgggaggctgaggcaggagaattgcttgaacctgggaggcggaggttgcagtgagccgagatcccaccattgcactccagcctgggtgacagagcaagactcagtctca

SEQ ID NO: 189035 - DNA, 318 bp, Homo sapiens
tggagattttgtaagaaattgagacaagttggaaaacacaaacattgtgagggtttgtagaacgggtgggtgcttgctgaaagtttatattcattccatatttagttgtctttattctgttcaaacattttcttgtttacttgttgaagcaggttcagaaatagttattctgtagtgtctcagttttattaaaatgcagttaatattggaaaatatggttagaattaggtgactgccaaacatggctttcgtcagtgttagcctgtgtaatgacactgtttttctccttcgtgtgactatttataataaaaatgtgac

SEQ ID NO: 189036 - DNA, 285 bp, Homo sapiens
ttcaagctcccaacaagattaaattgttacaaaagtttagttttaaaaaagatttctcttctttcattatttataagtcaaagctatttgggaatgtgtgttaaacaacgactgaaccaaaattggttgtaataaaaatggctaccatagtaaaggaatatgaacataaaatatcaaactatttgagaacttctggtcaagattttttttgttcccagattcaagttctgaatcctttggtatggttcacagttgatagccaccttggaaccttcttgtggggag

SEQ ID NO: 189037 - DNA, 346 bp, Homo sapiens
gagctcggtacccaatcagtttacacaaaaagaatgaagaattttcagcaaaacagaatttaaatacttcaggatgcctggaatctaaaagaaaatgtcaagtagttcagcagcaggtgggaacagaaaggggctcattaccttcctcatgaaactcacccataaccactgcactgatggtcatctctccacggtaggaagagaggagcaggctaaatgcaatctacaggcccccctccagtccccgcttttactgttctgcatgcaccatatactttcctccatcactctgacttgttgagtttattgggatcagtcttgtgtaaactgattggtaccgagctcg

SEQ ID NO: 189038 - DNA, 498 bp, Homo sapiens
gagctcggtacccaatcagtttacacaaaaagaatgaagaattttcagcaaaacagaatttaaatacttcaggatgcctggaatctaaaagaaaatgtcaagtagttcagcagcaggtgggaacagaaaggggctcattaccttcctcatgaaactcacccataaccactgcactgatggtcatctctccacggtaggaagagaggagcaggctaaatgcaatctacaggcccccctccagtccccgcttttactgttctgcatgcaccatatactttcctccatcactctgacttgttgagtttattgggatcagtcttgtgtttaagtgccttgtaaataaatacaaaacatttcaccagttcactcaaatgttttactgcctgacctcctgcttggaggttacacatggagctgatgaaaagaatgtcataagcattcttttctacccacctggactaaattgttatttaccccaggccagtgtctctttaaaga

SEQ ID NO: 189039 - DNA, 431 bp, Homo sapiens
cttcagcacatctggcatgcagaggagtatgggcgcagactggcggcccgcctgaagattgcatttatcattaccttcctcatgaaactcacccataaccactgcactgatggtcatctctccacggtaggaagagaggagcaggctaaatgcaatctacaggcccccctccagtccccgcttttactgttctgcatgcaccatatactttcctccatcactctgacttgttgagtttattgggatcagtcttgtgtttaagtgccttgtaaataaatacaaaacatttcaccagttcactcaaatgttttactgcctgacctcctgcttggaggttacacatggagctgatgaaaagaatgtcataagcattcttttctacccacctggactaaattgttatttaccccaggccagtgtctctttaaaga

SEQ ID NO: 189040 - DNA, 524 bp, Homo sapiens
ctcaatcaaaacaggaattgagctgtttaggggctgtactctgttacctgtgtcttcgggtttctggatggtatatttattgcaggctcctctctactggtactttgtttctggagcaccttgaggctgcgggagactcagtctgccattccagcccagcctgcagcttcttgcactgaccagcactcaacagatgtcccatggggaaaactcactgtccactggggcacatcaaaaccttcactggtttctctttcccctagaatagtcctctgtctgggccgagcccttccttcactgttctcaagctgagcaaatggcccagcgaggtaacagccagcaattttagctcacccaagaggagctcttttctctcgcaattttagtttgtttagtcctccttccttccacaggtctctggtgttttaaaaaagataagagtatttagaattttctagttgtagcagtagtagtccaagcatatgattttattttacattattgagagttagaattattaggtg

SEQ ID NO: 189041 - DNA, 326 bp, Homo sapiens
tcaaaaaaaagtgagatggctttcgcctcaaaatgtaacagattacagactgtaagaagactgtatcttatcttcaaacacaataacatatcttcctcataaggttattctgaagatgaaatttgatactgtgtataaagcacttcccacaatgtctggcaataaagatggctcagcaactgaaagccatcattatgcgccaaaaacactaagttgtgaggaattgatgatagctcctaccatccccaacgccccccatgcacatacatacaaaatgagatattcttctaaaaagaatgccaatcaaattttagtgtacacaggag

SEQ ID NO: 189042 - DNA, 496 bp, Homo sapiens
gtgtcctgtggctctgggatcagagtgatgctgtagagagagattcttaaaggtggagagagatgttctgacaatcctgtgatggatacctcttcctgcaaacgtcaatagtcatgctgaggttggtgtgaaaacgaagaatccccagtcaaggaactggaggtgatagaaccatgaggctggcaagccagtggccagtgagccagcatgttagactgggaagaagttttgacatcacccagcttgacagccttgtttatgtgcagcccgtgatgttctcatgctcccatccgtcatagataagatgaccttgtgttatgcaaaattcccagtgcactccacataaccccatccctgtctttcctacttaggaaggcaatgtgaatttaagcgactggaattaatcttattgtagaaacaaccttgactttttttctgtttcatgcgaaatagcacatcactcatgagtttcagatcaatgatcagtgacaggtta

SEQ ID NO: 189043 - DNA, 331 bp, Homo sapiens
tccatctctacaacaacaacaacaacaacaacaacaacaacaaaagtagcagggcatggaggtgtgtgcctgtaaccctagctactcatcaggccgaagtgggaggatcacttgagcccaggaggtcgaggctgtagtaagccatgattgcaccactgcacaccagcctgggtctcagaacaaaaaaaaagagagaaaatgcaattatcgtccccagataagaaggattacctttgtcacaactgcgaagtaattgctttgttacagaaacagcacacagagccataaagcaggttaaaaaacacttctgtgacttcctaaatcctctctt

SEQ ID NO: 189044 - DNA, 363 bp, Homo sapiens
cttcagctgatgccctggggagctctggagctgggatggccattcagcaattgagaagactgggcctttttaccctgtatcggccaggcgctggatgcagtcttcccctagcaagtaggtgtgaccttgggtaaggtcatttccttccacaggagcagtgcctggagaggcactcagctgtgatcctttagcggctaactctcctagcagctggagaatctggtgctgccgtcccataggaagacctggcagtaatcaccttactcatctttctgcttccctagtggctgcatatcagattcacctggggaatctcaaacaaacgtcccaccccaggcacttctgatttggtagtgggagtgc

SEQ ID NO: 189045 - DNA, 256 bp, Homo sapiens
caacaaaaccgtatagagtcaccaaagactcagagaattagaacttcagaggttaaggctctgaaacatggattttatataaacttccaaggcagttctggttcatttaagttctgagaacccccgaggtagccaccagtcattaaggcttcactgagcagcattcgaaccccagcctccaggcccccctcctgcctccatatctaacagtgggtccagtgttttcacccctcaggctccgtatgcctccctgaag

SEQ ID NO: 189046 - DNA, 370 bp, Homo sapiens
tgaatttggcatggtatatgggcctttttggaaagaccttaaaaccccatctgttctatttattttaaagatcccgctgcagtttttaaaagagtaggcatttattctgaggcaaatgtgggacaccatatgagaactcaaggctgatagctgtggggctagtgacactgatgttataacaatgacggatgcttaccaccactactgtcatcactaccaccactaacaccaccaccaccttagcatgcttaaaattaaaaaggaaaagaagagaaaaaaatcaataaggaaaaacaaatgggagaaagagaaaaaaaccctcttagatgtgataagacatgacccaaaataaaatcaaacctaaaactct

SEQ ID NO: 189047 - DNA, 422 bp, Homo sapiens
atgccggagcaggaacactgcaagctgcgaaagccccaggcagaaatggtatttggtaacgggggctgcctctccttcactctcagggagtcagctcatcctagcccaagttgcttccttttcctcccttgaatttcctgttgccaggggtttgtctcgactggactctgttaattcaggggctaagtaggcaatgctcggtttaggtcttcattccatctgttctacaaaaaccaggtttttccaaatccagtacttcataactctgttataatcaagtagccaaatgctcctcttctactgttcactcctatatactagtatgtatcacaatcaaaatccccttctcttcacgggcaaagtgttactgcaagattgtcctgtcgttttgctacacacagcctcaaggcccatcagccagt

SEQ ID NO: 189048 - DNA, 368 bp, Homo sapiens
tactttttgcagtatttacaggttcccccgtgccgcccagcttctcatcatgtgcatcattctttctattactaacacgtccgatcgggcgccgtcagctcagtttgacggtcaggagtttgaggccggccttgtgcccagcattgtcaaccccgtctctactgaacatacgacaattggccaggccttgtggctcatgcctgtaatcccagcactttgggaggctgaggcgggcagatcacgaggtcaggagatcgagaccatcttggccaatatggtgaaactctgtctctataaaaatacaaaaattagctgagcgtggtgacgcatgcctgtaatcccagctactcgggaggctgaggcaggag

SEQ ID NO: 189049 - DNA, 599 bp, Homo sapiens
tagtctcttattcacctgtattatcaataagctctaaataacacaaaatattagagcacataaaggaatggctttatttattcattcattcattttttgagacagagtctcactgtcacccaggctggaatgtagtggtgcgatctcagctcactgcaacctctgcctccagggggaatgcagtggtgcgatagctcactgcaacctccacctcccaggttcaagcggttctcctgcctcagcctcctgagtagctgggactataggtgcgtgcccaccacgcccagctaatttttgtatttttagtagagacggggttttaccatattggccaggctgggctcgaactcctgatgtcatgatccacccgccttggcctcctgaagtgctgggattacagatgtgagccaccgcacctggcctgtctattccttttcaattgaaatattaaaatacttggtaaagttaatgtgagaaaccaaggcttttgattttaagtagctaggaacatgttcatagtaaatgaaaaacatctatatcataatctgtgaaacagaatcttacattctgaaaagttacataattaattttcaacgaaa

SEQ ID NO: 189050 - DNA, 692 bp, Homo sapiens
ccctgtggagtcagctggaacagtttgctgctcatttctgaatgcaaactgtgtctctaaagttcttgactatggtcaacttcaaagaaaggcaagtcctaaataccccatacaaaaagaaatcggccttctaaccccaagcatggtcattgtaagtaccttttggcatcagataacttatgtgtctgattgcattatgttctgagctgatgtatttctactagcagtgaataaaaactgaagatggctaagtgtatgcatcacaaaatattaagagaaattttcaagttatcatgtcctttattttccgtggataatgacacatgaaattaatcaagtagcctaaggaatcacaaatgcagaaagttgtggagctaagaaacaggtcttctttctttgtcctccttaacatcataaaagttcttatttcaacaagcaatgtacctgaagttagcagtttgtttcatctataatttgcgctgtataacaatgagaatgatattctcgttattcttggtataacaggctgttcctatccttgcccccattaacaataaaaacccatgcagttttcagccattatcatttttctcctgataaaccatctgtgacatggagaccttgaagccgggagttctggccacaatgctcaatagactatgcatacagctttttcagaggtaatcactgta

SEQ ID NO: 189051 - DNA, 394 bp, Homo sapiens
tccttgaaataaaaaggcagtcatgtaattaatagttatgtactacttgacagcataattactcattaccaatatgcaggaacaaaatgacttctaattttatcttcagagtctttaaaggtaaaaaagtacttgaaaggaagtaaactagaaagagaagatggcttttgtgagtgcttgagattcttcttgacttggaattaaaaaaaactaaaggttaaattacagatgatgttatgctgcatttactgaagcaggtgaatcatgaaaaccacttgtatatctcaataaaaataaattaaacatatatatatatgtagaaggcagtctaacacaggtttctcctactgttgtgttagctaaagatttttcttttaactgtctggggaaatgt

SEQ ID NO: 189052 - DNA, 396 bp, Homo sapiens
agaaaatgacaaggaattaaagaaaatggttcaatgagcttcttcagtctccctcaatccttcagcaaagttctcctgcaacacagaaatggccccagtgcttcattcacaatgttctacttcctgctccatttcctggtggtctttgtggcagttatgctggttggattaggtgacagtcatcatttctctgagagggaaggaaaaggtgggccaggacaaacatttgttgaagtcctactaggtgccatctactctgtacaggatttccaatttaccccacagaacagttctgtgaggaaggcattgtgagttccttttacagatgaccaagaacaggctgacagaggctaagaaaggattccagtgtcatacatcaagtaagggacaggaatg

SEQ ID NO: 189053 - DNA, 273 bp, Homo sapiens
atgtccaaaggatacattttgaaactgcgagagagttgaactccatgtgctcacggaggtagtgatggctgtggtagtgggcggccagtatccttctgtgcttaggcctgtgtagtggaatgtagagctgctactagcctgggatcaagtcacacctcttagtctgtctctgctgtaggataccccagatctatttgggattaattggatctattctttactgtttagtgcagtatccttgttatatcctgaaactgttctcataatttcaga

SEQ ID NO: 189054 - DNA, 187 bp, Homo sapiens
ttaaaattcaacaacaggacatgtgctttgttgcaagggtagatttaggttagtcatgatgaccttcctcagtctactacaggcaagttctttaaactctgagtttctttatgaaatgaggatgatgatagtgcttacttatacagttgctctaggattaagtgaaatactacaagtaaagcatttg

SEQ ID NO: 189055 - DNA, 323 bp, Homo sapiens
cgcaggcctccctcacggatcctcaacggtgggtatgtccagaggatgaggtgccagaaggggctgtgatcagctctatcttgcaagggacgaagtacttgaatgggcttttgagggatgtgcaggagttgactgggtgggtgagagataaagggcgatccaggtagcaggaacagcacaggcagggcccaggaggcatgagagtgtggcgagcatgggaaagtgtaagcagctgggcagtctcttgggagagcagcggggaggttcttgcaggttggggctggatgccgggtggttgggtcacttgagggaaacattgaggg

SEQ ID NO: 189056 - DNA, 713 bp, Homo sapiens
gaatcgagctcgtaccatatggttggacgaatttagattaaaaaagaaatagatgcttagaatatgttaaataaaaaacatgtttcaagtacttttttagcatatgcaaaatttctggaaggttttgcagaatacttttggctacctctgcggtagttggagggaaagagggtttcattttccttttgtgccctcatgtactgttggaattttttgttgtttctcatcagtaaatactaattttatatttttaaaactgactttaaaaaaacccaagttctcgatcggttcagaataaaaaattaaattaaaaaaataaaataccatgctttgggtgggctttttgttttttactttaggtataatgacctaggataactatgcctttacttaaatatagctaatattcaagttttctgaagaaaaacttgctgctttgagatgttggaattgctacaacctctatccctttctttctccccttcttaacttgcccctgggaacagtctttctactttagtagcattaacatttgtagcctccccaagttccatgcctcaaaccctactccctcttatattaccctcaaagtgaccggagcatttatcccagaagatggtaacaaccatgagtcaactgctactgctcttcctctctctcttttgatcctaatgtacttttgcacactcttgtcaaccagttccagcaaatcc

SEQ ID NO: 189057 - DNA, 360 bp, Homo sapiens
attggaaaaaaagaaaaaaccaaacccagagaatgttccttgaacattcctgaagtgggggggcaggcgatgtcacttgcagtgacagctggcctctctagctcacccccacatctgtgccaaccagagaagctgggccctttgtagcacaagcctcaggagcagagaatggagggacattctcaactgagaggagagggactaggaggctagatgggaaatgaggtgactctacagaaaatcgaatatgggatggtataaaaggatgagaaagatggcagggggtccacgatcgctcttgtatttagacctgggggatgcactgatagataccacctggagagagaaagaggatttctg

SEQ ID NO: 189058 - DNA, 449 bp, Homo sapiens
acctccacgtgttcagcaatccagaagttctctaaaccctgtcttcgggattttatggaggcttcattacataggcatgattgattaccattggtgatcaactcaacctctgggccctctcccctccctggaggttggagtgaggtggggctgtaagttccagtgctctaatcacatggttggtttccccggcaaccagcccccatcctaaggctctccaggagcccaccatgagtcatctcattagaacaaaagatgctcctatcacccaggaaattataaggaatttaggagctctgcgtcaggaactcggggttcagagaccaaattttagaacaaatgatgctcctagcatctctatctacaagggctttaggagcttcaactcaggaaccaggggcagagaccaaatatgtttttttttgtttgtttttttttttgttttgaga

SEQ ID NO: 189059 - DNA, 439 bp, Homo sapiens
caagatcgctaaggtaaactggtgaaactccagactactcaagacaaaaggcaagaaataacaaggagctcaccttagtcagtagtagtaggaatacagaggaggggacagatatgggagatgctacagtagcttaaagcaatagtattttatgcttggcaaaatgaggggaaatacaagtaaactgttgtaaggttcttacaccatatgtgatgtggtataatattgttggaaagtagactgattgattaaagatttacattacaagccctagatcaaccacaaacaaaacaaaacaaaacacgaagaggtaaaactaatgctgcgggtcgtattgtgttccccaaaacaatatctcgaagcctttactccaggtctacgtgaatgtgacgttatttggaaataaggtctttgcaaatgtaatgaagtaacatgaggc

SEQ ID NO: 189060 - DNA, 700 bp, Homo sapiens
tttgtgttttgattttagtagagatggggtttcaccacattgcccagggtggcctgtctcgaactcctggactctagttatcctcccatctcggcctcccaaagttctgggattacatggcatgaaccactgctcccagcctgaaccattttagaatatgtggttgatctgatgccccaaacacctccaaattattaatgtgtatttcctacgaacaaggacattctcttgtataaccacaatacagtcatcaaaatcaggaaatgaatattgatatatgatgatctcatgccgagatcccattccagtttttccagctatcccagtagtgtcctttgtatttaagatttgggtctcatgcagaatcatttgctgcgttgagctgttatatacatttagtctccttcagcctggaacagttcgtccatctttctttgacttccatcaccttgacactttaagatattaccaatcagcgattctgtagaatgttctcacttttggtgtatgtgatgtgtcctcatgattagattcagttttgaacatttttggcaggaatgtcacaaaagtgaggctgagtccttctctttgtgtctatcaggtggcccacaatctctagttgtaccattgccggtgatggttatttcaccatttgattaagatggtgtttgcttccctctactgtaaagctactccttgt

SEQ ID NO: 189061 - DNA, 397 bp, Homo sapiens
ctggctgtgcttttggcctgtgatggatttgactcttcaaggcttctgacaaagcttggttggttagaggaaaaatgtagtgaaaacctacaggcaacaccatggcttgccctaaccctctcgtcttcctgttctagcttttcccatatatcaggttgcagacatgctgaattcccaccctcctggagccaagctgccaatttctcattcctgtaaccagtggttttgtgtagataaaaggcccagaaggaagatggtcgctgagcagggagccttcggagttagaccttctttagccagggccagtggacactcatctcatgaatcaatactcatgtaacagtccaggggataccgagactacgaaattcgataatcattggatcatagctgattt

SEQ ID NO: 189062 - DNA, 276 bp, Homo sapiens
tcgacgtggcttcacatgaggagggtctgagctagagccacagagcggcatggagaagaggaaaatgtttgcagtacagatagacctatttagaagaaaagatattgctagtgggcagatctcaactctggatgagatgcattaggaataatggcgatgttagactcaaacacagtaagtgacacaaactcctctttctcttttttctgtcattgaatggccccttcctccacccagttgtccagtccttatgttttggtaattctgagtttgtcc

SEQ ID NO: 189063 - DNA, 140 bp, Homo sapiens
gcgctcttaaagaagctacagctcttccccattccctatctgaaagcaaggaaccactgctttggtcaggaaacaggcatacaacatcagatgtgattataaatggccacaatctaaaagaaaccaaaaaataaaaataa

SEQ ID NO: 189064 - DNA, 1715 bp, Homo sapiens
tctggaactactgggctcaaatgatctgcccaccttggcctctcaaagtgctgagagtacaggcatgagccaccacacccggcctagagatttcatttcaatgaactcatgagccacgttcctttctctctccgctcggtagtgtcgggcaggcagcaggagagtgtacaagaagctaggtgtgggcagttctgcaagaggccccagctgctctatggagctccagggaatggttctggtttgtttgttgtgctggaagctttgcggttgacacctccctctgcacttttacagcacgtatcagtgtgttagtcctaggcacttggcttgacataacttgctaggatggaggtagggacgagcctgtctgaagcgggggattttccttggcccagtggtgctcactttccaggacttactctggggcctggaagcagactttcctaggatggtgttctaccagtgcagggtggagattgcagagtgcggtctcgtaaggattcagttgcatgtccaggttatccaacctcatgtccatgttatcacaatcctatggggggcagggagtatcctcatttcatagatgaggaaacaggcagaggttaattgcccaagctctctgagccgggacaaacactcaggccgactccagcattcactgtactgaccccaatatcaaatccttttcatccccaccaagtttgcctgcactttgaattggcaatgcacacatgtcaaaactcaactggatcggccactttgagactccggtttctccctttcatgattttggggagaggagctcagatcagacggcaagagaaaagaaagatggggttgggagcatgtccctctgaggacccaagagagagctggccatggcaggctccagtgctctcagaggacgggtgctgcatcaacgtggactcaggacatggccagcccttcactggacagatgagcagaaaagcacagcctggacatcacagtgggaccccatctctacaaaaaaagtaaaaaagccagtgggcatggtggcacatgcctgtagtcccagctacttgggaggctgaggtgggaggatcacttgagctgggaggttgagtcttcagtgaactgtgatcaggcccctgcactccagcctgggagacacagcgagaccccatctcaaacaaacaaataaaacaaaaatatgacaaaaaagcagctcccccagggttccccagacacaggatcaggctccgtgatcctgactttgggtccagtgttcttcccctccaccgcgtctctaccctgcctgtcactgagcacaaggactccaatgttcagccaagggccacccagtggcagaagagaatgaggaacttcctctgggtgcaaaatttaatggggtgcccccaaaattcagaaaccaggggaaataatattcgaatgcaatatttttaaaagtccaaatcaaggcacaaaatctatgatgaccaaaatatgaaacttttaactaatggcaggatgagtagctgtgtggtgacaagccgtatgtatcagggcccagggcaacagggaaaatcagtcggcccaagcctgtcttcctttatggtcgtgttattttcttcaccagggactgcctgtattcattttgatattgtatttgttacctttcctgtggtgctgataattttgatattttaagtgttatgttaaaatataatttatcc

SEQ ID NO: 189065 - DNA, 1555 bp, Homo sapiens
actttctgtgcaattattctgtatagctaaaactgctctaaaataaagtctgttaaaagataaattaggccaggtgtggtgactcacacctgtaatcccagcactttggaagtcgaggcgggtggatcacctgaggtcaggagttcaagaccagcctggccaacatgttgacataacttgctaggatggaggtagggacgagcctgtctgaagcgggggattttccttggcccagtggtgctcactttccaggacttactctggggcctggaagcagactttcctaggatggtgttctaccagtgcagggtggagattgcagagtgcggtctcgtaaggattcagttgcatgtccaggttatccaacctcatgtccatgttatcacaatcctatggggggcagggagtatcctcatttcatagatgaggaaacaggcagaggttaattgcccaagctctctgagccgggacaaacactcaggccgactccagcattcactgtactgaccccaatatcaaatccttttcatccccaccaagtttgcctgcactttgaattggcaatgcacacatgtcaaaactcaactggatcggccactttgagactccggtttctccctttcatgattttggggagaggagctcagatcagacggcaagagaaaagaaagatggggttgggagcatgtccctctgaggacccaagagagagctggccatggcaggctccagtgctctcagaggacgggtgctgcatcaacgtggactcaggacatggccagcccttcactggacagatgagcagaaaagcacagcctggacatcacagtgggaccccatctctacaaaaaaagtaaaaaagccagtgggcatggtggcacatgcctgtagtcccagctacttgggaggctgaggtgggaggatcacttgagctgggaggttgagtcttcagtgaactgtgatcaggcccctgcactccagcctgggagacacagcgagaccccatctcaaacaaacaaataaaacaaaaatatgacaaaaaagcagctcccccagggttccccagacacaggatcaggctccgtgatcctgactttgggtccagtgttcttcccctccaccgcgtctctaccctgcctgtcactgagcacaaggactccaatgttcagccaagggccacccagtggcagaagagaatgaggaacttcctctgggtgcaaaatttaatggggtgcccccaaaattcagaaaccaggggaaataatattcgaatgcaatatttttaaaagtccaaatcaaggcacaaaatctatgatgaccaaaatatgaaacttttaactaatggcaggatgagtagctgtgtggtgacaagccgtatgtatcagggcccagggcaacagggaaaatcagtcggcccaagcctgtcttcctttatggtcgtgttattttcttcaccagggactgcctgtattcattttgatattgtatttgttacctttcctgtggtgctgataattttgatattttaagtgttatgttaaaatataatttatcc

SEQ ID NO: 189066 - DNA, 1048 bp, Homo sapiens
tctggaactactgggctcaaatgatctgcccaccttggcctctcaaagtgctgagagtacaggcatgagccaccacacccggcctagagatttcatttcaatgaactcatgagccacgttcctttctctctccgctcggtagtgtcgggcaggcagcaggagagtgtacaagaagctaggtgtgggcagttctgcaagaggccccagctgctctatggagctccagggaatggttctggtttgtttgttgtgctggaagctttgcggttgacacctccctctgcacttttacagcacgtatcagtgtgttagtcctaggcacttggcttgacataacttgctaggatggaggtagggacgagcctgtctgaagcgggggattttccttggcccagtggtgctcactttccaggacttactctggggcctggaagcagactttcctaggatggtgttctaccagtgcagggtggagattgcagagtgcggtctcgtaaggattcagttgcatgtccaggttatccaacctcatgtccatgttatcacaatcctatggggggcagggagtatcctcatttcatagatgaggaaacaggcagaggttaattgcccaagctctctgagccgggacaaacactcaggccgactccagcattcactgtactgaccccaatatcaaatccttttcatccccaccaagtttgcctgcactttgaattggcaatgcacacatgtcaaaactcaactggatcggccactttgagactccggtttctccctttcatgattttggggagaggagctcagatcagacggcaagagaaaagaaagatggggttgggagcatgtccctctgaggacccaagagagagctggccatggcaggctccagtgctctcagaggacgggtgctgcatcaacgtggactcaggacatggccagcccttcactggacagatgagcagaaaagcacagcctggacatcacagtgggaccccatctactcggcatcaagtaaactcccgtgcgctgataccatgctccgtat

SEQ ID NO: 189067 - DNA, 605 bp, Homo sapiens
cagtggggagcagggaagagggccgcttgggctgcttagggtgtgctttggaggaagagctgtgggatgtgctgatgggttggaagttggggctagagaagatgagaatcatagggcccgcctagatgttagaccggagcatctgggggaacggctgttaacagagaaggggagacgggaggaaggtcaaggaagagggagctgtgttctgactgcattgcgcctgttagggtccccgctggggctcaggcggacacctgggctgggggttcatggctgctgacagtgcgcagggtacagctggaatcaaagccaagggccttggctgggcgtggtggcttacgcttgtaatcccagcagtttgggaggccaaggcgggtggatcacaaggtcaggagttcgagaccagcctggccaagatggtgaaaccccgtctctactaaaaatacaaaaattagccgggtgtggtgacaggtgcctgtaatcccagctacttaggaggctgaggcaggaggatcgcttgaacccgggaggtggaggttgcagtgagctgagatcgtgccactgcactccagcctaggcaacaagagcgagactccatctca

SEQ ID NO: 189068 - DNA, 517 bp, Homo sapiens
actttcattgacaggctgatgccttaatcctaccagaggcagccactgctcccaagaaaccactgttgcaccggatcatggaacccaagtctcattcttggatcatagcctcttgtatgtctttaaacaataagcaatttcttctcaaatactgtgcactttccccaaacagatatacatttctcctgacctagcactttctgggaagaattcaacaaccatttagtagacactgactatgttgatgttattgtcccaaaagttttgcatctatatattgtcattaatgctcacactaaccatacaaagtgaatactattatctcctcacatttccgacaaggcatagcatggagagtttaaataatttgctgaatgtctcatggccaaaatcctattgaagtattttctgggatcttctctccaaaaggtagcctactggtgatttcatattgcctctggtggcagagagtcagttacttccaagaggcctttactttgggctgcttcagcatcag

SEQ ID NO: 189069 - DNA, 601 bp, Homo sapiens
tttgagagcgggaaatccaggctgcagtgagctgtgatggcgccactgccttctagcctgggcgacagcgcgagaccctgtctcaagaaggaaaacaaaaaaaacaaacataaacatacacacaaaaaaccacaaagtgtgttcatccttttgctaatgccacactgtcttgtctactagaaattggtaagttgtgtgaatccttcaactttgttcttttccaaattgttttggctattctggttcctttaactttcatataaatctttgaattagcttgtagatatcagcaaaatgtcctgccaagattttgtatctaaacttataaatcagtttgaggagaattagcatcataacaatattgaatagttttatctgtgaacatagtgtaatgcactatttaggtcttgatatttttatgggtgttttgtatttttcagtataaagaccatgtgcatcatcttgtgtttagatttataccaaagcatttttgcaggtgttggaattattactgtttaaaaatttctatttctagttttttatttctagcatatagaaatataaatgagttttgtaggttgaccttgtgtttgctgcctta

SEQ ID NO: 189070 - DNA, 172 bp, Homo sapiens
aacttccaacacgcatattgaatcctccacgtcctctatggccaccacctgcttcctgcttctgccaggattgaccttggagagacatgggatgatcgcagcatttctaaggaagggggattgggtgggactggaaggaaccaggaggaggtcaggggactccaggttgtga

SEQ ID NO: 189071 - DNA, 238 bp, Homo sapiens
ccttcatcctaagtgtggtgggaagacactgagaggtctctcaaccccagcacactttttattgatgtgctgggagtcccttctcctggtggacagcattagggtctgttcttgtcccttccccaaactgcacctctgctcttgaccaccaaggctgagaacacacagagagcacagagggccgacacccagcaggagcccccagtcacagccttgtctcatcctccccacacccctt

SEQ ID NO: 189072 - DNA, 649 bp, Homo sapiens
caggaaaagagaaggcaggagggatcgtgccagaggtcttctaggggacagacctggaagtgggatagattatttttgtttatcttccgttggctagacccagtcatgtcggtctactttaactgtgaaaggaagatagaaagtctgtctgagtgctcaagaggaaaagaaaactgagttcaagggagcacgcctaactttacgaacgtcctccttttgacttttttcctctacctaagacattgtgaaaatatttctgttaccgatttagaaagtttagtgatgttctttgacctgcccggaaatacccttgagtactggcagctggagttgggtgaagcaggctgtccatgttccgttcatggatgaagacactctgataacagctcactggtgcgaagggtttacctacactggaagtgagatcagagggagaatggcaatccccatctatggcaggtgtcaatttattgtctctcagcttcaaattcatccttccctgctctgctttgtgatactggaagtggaccctgtaaacatttcttcttagccagctgggtgaatgtaaacgtcatcagtagagggtgccagagtggtgtagtgccaggaacatccctgctgagttctggacttggctagttattatcat

SEQ ID NO: 189073 - DNA, 416 bp, Homo sapiens
cagggagtgacacaatcctgtgtggctcctgtgtggaggggccaggaggagaggagaacagatgagataaagtgttttgaaggtagatcctacaatattttggagataaagagattggatggaggacatgggaaaaaggatgacaggatgatggctcatcaggtttgtggatggcagtgccgttttactgagatgggcaaaactgggagaagaccagcctttaaaagtggaggggacaaagaaatcaaggagtaattaaaatccaggtatttgccatcctatcatttcttgaatgttctattttcaattaaaacttaaccaaactattcacttttacaagatacacgttagattcaagaacaataacgtgatcttttttgcctttcaggattaaagaatcgggttagtctacctgg

SEQ ID NO: 189074 - DNA, 164 bp, Homo sapiens
gaatagagtaatatctaattctacatttatgcaagaataactttactaagttttggatctttaaacaattaaaatatttactaatcccaagttgcaaacagtggttcaagtagaaaacaattttgtttggctggtttatttaatatttccacttcaagttcatt

SEQ ID NO: 189075 - DNA, 300 bp, Homo sapiens
tttcacagctctgggctcaccattagatctacttgacttccaccttcactgactttgtatctgcacttgggactctccaaaggctccaggccacaggtcctcagggctccctaggaacctgaccaaggcctctcccaaaaaggaggggagggacaggttggcttggcatcagttccatccttgttcccacttccccatcaagaaggccaagccccagctgactgggtgcagtggggtgtaaggttatccactccacaagatctaggccctgcttgatgtgttcattcattcactcgtgtg

SEQ ID NO: 189076 - DNA, 342 bp, Homo sapiens
gtgtgtaaactcattgaggaactttattaaaatgttcgtataaaatcctgcttaaactgcttgcactagaaatgagtgctggtagctgctattaaatccaccactgtggagaagaccaacaatcttgggtgttagattttaacaatagctgatggcctgagagaacctgacttgtttctttcagtgatataattgtattcagctgagctttaatgttgtcttctgaattatcctaaagtaaattatttctagacttactagtacatttaggtttaacctacaacagtattgttctcattactaacacagttaaattaggaggctgcctaataattagttttt

SEQ ID NO: 189077 - DNA, 686 bp, Homo sapiens
gccagtagctctgactcctgtcccaggttatgctgagtcccagcagggaaccaccacagctctgaatcagcctgttagccgctgtccattgctcttcatctgctctttatctgaaaatcttcagaagctttccttcaaatgagatgaccacagcagtcttctctgcaggttgcaggaaatgagaggtttggggaaatctgtactctttcaaagggtagataaatagtgataacttttacctgaatgctcacatgtgccccacactgtgagaagagctttgcatttaatccttacccatctctcagaaggagacagcgttgtcccatttcacagatgaggtgccagagaaagggcaggaaaggagctgaagctcttgaggatctcaggaaggatcagagtggacatcagggctgtggcaagtctggacctccttctgggagaggatctgaaaatgggaggcaggctggctggctgcttgaggcttgacagctctgcccaggggaaactgaagccagaaaggatagtagcaagtcccagcctcccagcagatcaaagcctattaaggagttagagggtccaagatgaacagatgctgtgacttgaatgctggggcctggactaagcatcaagtgacaagacctgtgggcctgtctctcctgctgcaggggccctgctggtcttgttca

SEQ ID NO: 189078 - DNA, 329 bp, Homo sapiens
tcatttacatcaaggagcaaccatgaatgtgccagtcgttcagcttttattatgaatgtacattgaatgcacgttcaaaacctaggttcctagcccttgattctttttttgtaaaaggcatgtaggacacctgtacacgttctgaggctccagggaggaaaaaaaatccaaagctatgtacttaacgtttagccaacaggagacttttatttcttttattatgaggccagtggagggaaattggtcattttaaaatataaatagcaacataaatttactatatatgaaaagatatataatcaaagacagaaattaatattccaagaaca

SEQ ID NO: 189079 - DNA, 506 bp, Homo sapiens
acagtttaacaattagggcccaccagtcaaacggcctgagaaaatacaatagcattagacatgatactagcggagaaaggtgtagtttgtgtcatgattggaacccagtgttgtactttcatccctaataatactgctcccgatggaaccataacaaaggcccaaggacttactgctttatccaatgagctagctagaaattctggaataaatgaccccttcacgattttaatggaaaaatagttccgcaaatggaaaggacttacgtcctcaatctcctgccatcagaataggtttgctcattcttgtaggatgctgtatcataccctgtatctgaggattaatacaaaagcttattttaacagctctcacccaccaaaatcttcctcaatcctccctcgcatcattcagttaagcttctaatttcagaggaccaagaggaacaaaatcaagacacgctaaaacaagtctgaagagaaataattataaaaatcaaaagggggaaa

SEQ ID NO: 189080 - DNA, 279 bp, Homo sapiens
aaggaaggaagaggaggtcttagggagtcagcattttgctggtttctgtcatgctctggacaggaagttaatttgtgccaagtataataataggtaatcctctccatcatgaaggggattggggaaatacccctgtacaccacatcaagtacatgctacgtcatgtaacagcaaaaacaagagaaagactatcattggtagagtgtttactgcatgtccatcattttccacacattatatctttccttccttctaccttccttccctccctccctctct

SEQ ID NO: 189081 - DNA, 490 bp, Homo sapiens
gatcttcccaaattttcacaacaaactttctgtacaattattaataacccaatttttacagagatggatttaagttacctggtccaaggtcaagctaaataatcaatgagcaccaagaatccacaccctgttctgtctgacatctaagtaaatcctctttccaatatatcattcttcttggaaatctggaatggattatattcaaaggagataggtatacactaaattgtgtctcccacctcaaccccaaagcatatgttgaagtcctaactcctaatgtgactctacttggagttagggtcttcaaagtggtaatgaaggttaaatgagattataagggtgggaccctaattcaatatggctgatatccttacaaaaaaacaaagagatggtagaatgttgtgtacacagagggtacagcttgaaggtagccatctgcaagccaaggaagacaagaccttgggagaagccaacccagcggacacattga

SEQ ID NO: 189082 - DNA, 825 bp, Homo sapiens
tgagggctgcatcaagatcttgtcattccacatcggggtttcctttgaggatgtggctgtacccctctcccaggaggagtgggactgtctgatccctgctcagaggggcctctacaaggatgtgatgatggggacctatgggaacctactctcattagtaggtgaatggttaagcaaactgtggtacatccataccatgggatacgactcaacaatcaaaaggaactgcccagacttcaccacgatgcaatatatgcatgtaagaaatctgcacttataccccctaaatatataaaacatttttaaaagaaaaaaaggaagaagatacatgcaacaacttggatggatttcaagggaattatgctgaatgaaaaaaagtcaacctcataagattacattctatatgattccattcatatgacattcttgaaatgacaaaattacaaagatggaagacagaacagtggtagccacaggttggggtgaggggataagaaagggatgtggctgtggctgtaaaagcgcagacaagggatccatgtgatagaactgttctgtctcttgtgatggtggtcacatgaatctacacatgataatactgcatataattgtctaaaatgacattttcttcaagagttatctacagtttaaagctcacttttatgaagtgtcacatccatcaccattttaagagacataaaatcatgaaaagatatcaccagaagctacgtaaacatttcagctaagggtaaagagaaagttaagagtgttttcacaaggaaattgaaagaaggcaatccgaatgaagtcaacttggtcacacaa

SEQ ID NO: 189083 - DNA, 166 bp, Homo sapiens
cattccgaccctgtaagcaccatatggtagaggacagtctttctctatgcaggctttgtgagaggacggggagtgcgagactgagggcactgccatgagaaactggaagccctgtcttgccctcttggaagggagggagtgactctgggaagtgggacagaagaaa

SEQ ID NO: 189084 - DNA, 382 bp, Homo sapiens
aagaagacacctcaggttctatcctgcttaaatgggcgagtaggaaaacagactccttgcacaagttctccctaatggtgtactcttcagcggcagtcataggcttttctgtcagttaatacacatatagaaatcatctcagctcactacctcctagcaatgtgaacctgagcaagttacctaagctttctaagcctcagtttcctcatctgtaaaacaaggataatagttgtaaggactaatctggagtagagtcagcaaattttccataaagcgctacaaagtaaatattttaggcttgtggtcagtctctgccactactgtagcaggaaggcagccatagacaatatggacatgatggctgtttcattaaaattttatt

SEQ ID NO: 189085 - DNA, 305 bp, Homo sapiens
attcgaatcctcccaacaacctaggaggacagtaccattaccagctccaccttacagatacggaaactaagacatgcaaggctaagtggcttgcccaaagtaaaacagggagcccaagatggatcaagaacttgcactcagcagtctggctcagagcccacactgcattcctcagccctttgcaatctcaaagggcaatggctttacagtgtggccacgagcagtagcaacaggtatcctcaggaaatttcagtctgcaaaagggatggtcactcttcatagattttttttggtaagggggtgca

SEQ ID NO: 189086 - DNA, 317 bp, Homo sapiens
aaaccctgctcttcaaagaacgattcgaatttgttgaagctccgcccctccgaagccacgccccctccgtaatccacgtctgactgtccagaaagcctccccgcccagaagtctgaagttcgcgtccttaggggaccacgcccccttaggagctttatctttgtgggacctgggtcatcagctgaaaagccttgtcgtcaatccctgaaactccacctgcttatattttcctgtcctttctctttttgggccttgggatcagttttccgagcactctcgtgctcccccaggtgggaagtcaaagttcccatctctgg

SEQ ID NO: 189087 - DNA, 434 bp, Homo sapiens
tcggcccggctggctcctcgccttgagaaatggatttccagcgatggaagcctccttccagccacacggaccacgggaaggttcagatgctcagcctaaggggaccgctgaggccccaaagagtatcctttccttctaaaacttacatggtaggaaactcctacagaggaagaaagccagtccctgcgggactcagaacctcgtaagcaacggcaggaggcacaaacctaggtggtgcgtttcttgcacaattttaccaagagggagtctgctggctccgttcctgccacaccgcctgaccagccctggaccactggacaggaagagacccctcctgaaaaccagggaaagtcatatctgagcaatctgtcacccctcataaagacatgctgccattcacaaatgaaatgccttttaagcatttgagcatattc

SEQ ID NO: 189088 - DNA, 427 bp, Homo sapiens
cattgcggtccgccgcatacagagcagactccgtctcaaaaataataatataataactagcactaacatgatgctacaatttttactggttaccaagttaaaatttctgagaaaggcttttaataaagttttccagacaagttataggtgaggtaacaaagagtccagaagtcccctgggtcagtttgatacctctttcctctggacttcaatttgcttatctgcaaaacaggaaatttgatcccttccaagtgtcaccagagtttttaaagataaaaatggaattcagatgcgaacttaatacagtgagcactagagggcagtagctggttaataagtacagcaattaagacaaatgcaggaaatgacagaaaaggcttttcttctccttcctcctcacctcttccttcctcctcacctccttccc

SEQ ID NO: 189089 - DNA, 521 bp, Homo sapiens
ttaattacttgtagagacaaggtctcactatgttgcccaggcaggtctcgaactcgtaggctcaagcaatcctcccttgttgtgctgggattacaggtgtgagccactacacctggccaaactcatgctttttaagacatatgtcttagctttatcctctgagaaagcctagaagcaatgacacccctgtggcaaagaacacacctgacacctaaattgtggtttctcaacaccattccccattaaaacaaacaaacaaacaaaaaatagggttttgaagaaatggctgattccaggggtctggagaaacaaaaacataaagtgagcttgaaacatcttactgtgacagaaagtaagataaggtcaaaaagttgatggagatgtagcaagagaatgcagaacccatcgcagacagttctactggccaaattagggacaatatgaacatcaaaacgatcaattacagaaatggattttagcatattgatttgaaaaagactccatgagtctgtactgtcact

SEQ ID NO: 189090 - DNA, 393 bp, Homo sapiens
agccttcgggaattctttctgttgctatactggggaaggcttcatgagggcagtaatatttgggctggaccttgaggaatgaagaattgacagagtagtagggcagggcagtatagatagaaggaatgacactaatgacagcatggaattgtgaaaaggtgttagctttggcaataattcctaatgatctagacttcactgtttccagcttctttctaggtagtctagttttgatgaaggaacatttattccctgagaccggaagcatgccttttactaatcttaagttggaagttaatcaaaataactagacacctaacctgctacttccccaatgctctaaatagacaacacttaatacatgtttttcacatcctcttgaattacacaatt

SEQ ID NO: 189091 - DNA, 212 bp, Homo sapiens
tataaaacaacattgggttctcccctctgccccttttaggtaccaaaggcctcaaaacagaaacaacactatctaaacagggctctagaaagacccatctggatggcatgagagattaaaggcagaggacaagtaaggacgaggaaaggatctgacttgagatgtcatcaatgtgaaaataataacaataatgagataacacttacagacta

SEQ ID NO: 189092 - DNA, 392 bp, Homo sapiens
tgcaggggtacaggcgtgagccaccgcgcccagcctagtattgaatgagataagaaatctgaaatgctttacctatggtagctgtccatcaaagttactttcatagaagctggcatcctcagttgcttttgtacactcaggaatcttttcaaagtttaagggtgataaattttatccaaagtaattactcgtaaaataattggatcccaacaattacacccctgtgcatctgtagaagtgcagacatagaagatgtgggacttactctccaagcacacaaaatctacttatagatttaggattctttcttttgaagtaccagaataccatattaaaagtgagataatgtttaagatgagaaggccaggagcaaggcaattatagacttgata

SEQ ID NO: 189093 - DNA, 320 bp, Homo sapiens
ccctcctacatcttttatctcacagtatgcactccatacacaatgaaatctgctattcctctgggctctccagcttccctgtcacagagctatcccactttctccctgggctcatcttaccacattactgtctgagtttagccagacattgttgaatttggagataaagttgaaatacatgaaagagtctaaccgagagtctggcaaatagtgtcagttaccctttccccaaatacccaaaacgttttggttttcagaaaggttgggaagtttcttctggggcctatttccttctttgttttgtcttaagtcttctagtc

SEQ ID NO: 189094 - DNA, 504 bp, Homo sapiens
gttctgatttggtttggtgggggagtagaaggatatggttttgacattgtcactcatgcatggtgttagctggggctcaatatttgttgacttaatgaacaggaaataggaaaagccactgaggaataaaagcataagtttttcaagaaagaggagatttagaaatattcagcagtatccccaactctccaatatccctatataaatctccattacataaagtcaatgagagtcttcatcacccccagctttgactgggttataaaatccaatttagacttggtcctcttcacatagcttaaatgtcagctttggagcagcagctagtggcagcaaattaattattagtgattttgatacctgagacctcatcttatctgccttaagttcataaaataccttggaattttagtttctgaaggagcaaatttgattatcaacaactaaaagacttctttagagggctcagagagaaaactgtgcttcaacttcagacaatccaac

SEQ ID NO: 189095 - DNA, 178 bp, Homo sapiens
gcagtggttagcacagacccccaacgaaagcattataatagcattcccacatgtgccaacgctacgcaaaggtatacacatgaaataacagtgccatcacacacacacacacacacacacacacacacacacacaggtgtgtgttgtgtggtgagtcgaagagagaaagaaagttggg

SEQ ID NO: 189096 - DNA, 245 bp, Homo sapiens
tatttccagactctgctattgcaggagaaaaagggaaaggggatttatgggtatctcataaattacataacatggaattctaaatactgataattgatttttgtaaatattaaatattttgtgagtcaaccaaagcaattgtctgacctgtgctctagatgattcctacatgggctttttgcaggtttgcttgtttgtttatttatagaccattattacagattgaaataattggtagcttttgg

SEQ ID NO: 189097 - DNA, 481 bp, Homo sapiens
ctcgagttatgggactgctgtgggtagaggtggctttttaaaaaattttctgccttagtctttatccctctctctgtcaaccccacacccactttaaaataacaaaagcctcatgtgttgcagcttttcatagtagggaccgaggctgcagggcactgccgcacctagtcatttggaggtcgttgcagccttctgcgccttgaagaagaaggggccagggtgatgatccctggatctcattcacgaggttcttgaccacttcctgggagattgcgactcttggtgtcctttggctagtagttgtcttgctggaaggcttaactgtggaagtgggaagcatagctgaccttagcacgtaaaatcctcgctctacactgggacaggattttgttttgctattgagaattcttaaatgaaatagataatttttttgtctcagatagataaaataataacgatagttgccattaactgagtctta

SEQ ID NO: 189098 - DNA, 520 bp, Homo sapiens
agacatggcccctgcccttatggggctcaccatccagtgtaccttatggtgaaatgctgtgcccctaaaagacattgaatgacagctccaattgagtgatcttactgggggacctattattttcaagatatgtactatttacttaggttacagtatcattctatcatcaaatttcatgggtaatttttatgtacaaaagctgatagattctgagatgagatccagcctgaagccagtcaggatgaaatgataaccctgaacatgtgatgatgaaaatcaagtgaaatgaacactatggatagttcgatattttctcacccacacactaaatgtcaagggatgttttaaagaatgctgttctctgtgcagctagagtaggtttttaatatctgcccatgcttaacaaaaactgtcaatattgcaaccttaatgatagagtgaaatggaagatcgcatgtagcaatgcattattataatcactaacacatcaggtgaggtatacaaattaacaatctcacag

SEQ ID NO: 189099 - DNA, 480 bp, Homo sapiens
  misc_feature (397)..(397): n is a, c, g, or t
tccaactgccttcagactccgggactttccacagccttggtgaagaaaaggcacatgggtcagtgggcgcagctccacagggtccacgctccaggagacactgcagggcgggtggccctgggctggtgtggaggggcctggccctccttgactctccctggcctcaggtctcctgggctcctgaggacagactccagggccccacacccagctgacttttgtcctgtcctgcccccaggtaagcttcccaccagctccttgatagcccagctagacaaagaccccacagcctccagcatcagccttcttgactctaagaagccctaattagcacctgccaccatcctcccagggaactgacactctgatacatgggaggatggtggcaggtgctaantagggcttcttagagtctgaaggcagttggagggcagtctggagagtctgaagggagtctggagagtctgaaggcagtctgga

SEQ ID NO: 189100 - DNA, 293 bp, Homo sapiens
tgtgtcgaaagatctggaagaggaggtacaaccgacaaaggagactgagaagaggctagagtttggaagaaaactaacaggatgtggtatgctggaagccaagttaaagaaaggtggggataagtgaactgtgtcatatattaaggactagcccttttagtcatttggaggtcattactgaccttgaacagttttaaagtactgattgaggcaaaagcctgattggagtgctttatagagagaatgggggagaaaagtcagacagtgtgtgtaaatgaggagctttgctatga

SEQ ID NO: 189101 - DNA, 263 bp, Homo sapiens
actcctccttcctcttgcttttatggcaggtttttcatttctaactcatagcatacatatctatatacatatacacccatacacgtatatcactaaatttattacagacaccaaaaaagggggtaaatcttgtctttctacgtatttagacatacatacaaaaaactcgtggccgggcatggtggctcatacctggaatctcagcactttcggaggccaaagcgggcagaacacttgaggtcaggagttcgagaccagcttgg

SEQ ID NO: 189102 - DNA, 630 bp, Homo sapiens
ttccaccttcctaaccaacagccaatcaagcagctaatatttagtaagtgcttactatgtgcaagacatcatgccacactagacaccagaggggttacaaaggttacaatctaattaaggagattaaatgctgacacaggaagacattaggaaataacacagtatgcttggttcctgatgagtgctcagaaaaggcttcccagagcagggagggatggcgctgagtctttgttttttaagacagtctcattctgtcgctccatctcaaataacaaacaaacatagtagagacaaggtcttgctatcttgcctagactggcctcaaactcctgggcttaagtgatcctcccacctaggcctcccaaagtgctgggattacaggtgtgagccactgtgaccagcagcctaggtactttttattaattatcttcaactcttacaaccgctatataaggtagataccattgtctccattttacaagtgaaaaaaaggaatgtcagagagaatgattaacttggcaacggccacctaggtagtgagtggtggggccagtggaccacccaggacaggtctggctgtctgactaggatctgtactcctaaaatctcaaagccttcatatgtccccat

SEQ ID NO: 189103 - DNA, 332 bp, Homo sapiens
gttggggagcacagaccaacagcaacaatctgtcaacagtgagcgggctcaaacagctgaaaaacataggcatgccatctttgcccactatatgtacatgggtgaaggagaaactggggaagacaagcagcctccagcttctatgtctactaaagaggaataaaaacatcaccatgcaccaaaaacctccattaggttgtttcactgggagaagggccacttacgacgttcacagggtattggtgaggtttctgggggtaacaagctcaagaggcttaaccagctcattttcctggtccttggcctttactatcctcttataatatagctca

SEQ ID NO: 189104 - DNA, 290 bp, Homo sapiens
tttcaccatcttggtaggctggtcttgaactcctgatcttgtgatccacccgcgttggcctcccaaagttaaatttattttatgttctttattggattgttctagtaactgaactttatagggtctaatgctgttgttagtttgctgatttttgttcatggtacattgcttcaattttgtcaaaaatttgagttcctcttcagtgagactttatcaatggacatatgtctctagagagagtttgtgattacttcttctagatatctttgggggtattctgaccaaagctt

SEQ ID NO: 189105 - DNA, 347 bp, Homo sapiens
ctgcgagtccaggggcttgaggaataactctgcgtcctatggaatgtttccattctcatcacacttacaatctgcatgcttgtgtatgttcttatggttgtaatttaatacaggaacttctgagaaatggtgttcaattcaatatcattaagtgactgcttgaatgtttatttgttatcatgctagccttgccaaaattccacatcttggcagaagacacatatgtcctatttagtgaaatagaatctgacctctaaaaagtgacacagtaaaaacaaacaaacaaaaaataaaacaaaaacacatccgctttgcaaaaagcttctttgcctagcagaccttttttg

SEQ ID NO: 189106 - DNA, 440 bp, Homo sapiens
tgaggcgatctagaggatccctccaactagtccaaaggaggggagaagacaggatcaaataatcgcacacttgcaggaaggtgagatgcacagtttggaggcagcataggggaagggcttttaacctggtccagaagcagctgatgaagtaagcactaaccggaactatcaccaagagtctctaaggcagaggataacaggccatgtgcaaaagtgcggtggggaggaggggatggaaagtacttgggacttaaaggaaaccagtgggcctaaagcagacacagtaaaaggcatgccaatgccaatgcctaggggacatgcagggcccatatcatgaggggctctggaggccgtggtaagaaattttgacttttatactgatagcaatgagaagatatcagagggttcaacaggaagcaataaagttagatgtggctttg

SEQ ID NO: 189107 - DNA, 567 bp, Homo sapiens
tgaggcgatctagaggatccctccaactagtccaaaggaggggagaagacaggatcaaataatcgcacacttgcaggaaggtgagatgcacagtttggaggcagcataggggaagggcttttaacctggtccagaagcagctgatgaagtaagcactaaccggaactatcaccaagagtctctaaggcagaggataacaggccatgtgcaaaagtgcggtggggaggaggggatggaaagtacttgggacttaaaggaaaccagtgggcctaaagcagacacagtaaaaggcatgccaatgccaatgcctaggggacatgcagggcccatatcatgaggggctctggaggccgtggtaagaaattttgacttttatactgatagcaatgagaagatatcagagggttcaacaggaagcaataaagttagatgtggctttgaaaaaaaacaaaaaaaaaaaccattctgccttctgggttaagaacagacatacggcagaaagagaacagggtggatgtgtataggctagacccaggaaatacaggaagtcactttagattagggtgg

SEQ ID NO: 189108 - DNA, 585 bp, Homo sapiens
gaagctgccgtactgttactccatagcagctgcactattttacatcccttccagtagtgcacaaaggttccagtggtgcacaaaggttccagttttccacagctcaccaacacttgttattttttttatttttttattttttatttttttaaatagtagccattctaatggatatgaatggtaactcattatggttttgatttgcatttctctgatgattagtgatgttgagcatcttttcatatgcttgttgtctatttatgtatcatctttgggaagaaatactttgttcatttttaattggattttttgattttttgctgtgaattgtagaagttctttatgtaattctgaatattaaccccatagcagatacatgacttgcaaaattgtgtttctttagagttgatttctttaactttattttgattctttaattgggccatctatccagaccaggctggtctcggactcctgagctcaggcaatcaacccgtatcagccttccaaagtgctgggattacaggcgtgagccaccctgcctggccgctgtggatttttaaataaacgtcctttatcatgtta

SEQ ID NO: 189109 - DNA, 406 bp, Homo sapiens
ccaccattcagctctaggctcggcctacacggtgcctcctcgggaagccctccttgccatcctccttcctggtccccgggtcaggccctgggttccgcacattaatatgctctcctcgctctctctctgtttcctgtttggtatgtatcacagctgcagttgggactctgaagttatctgttgaatgcccaagtctcttgcgtcccctccaggctgtcagttccacgacggccgggatttgcttaacgatgttcctgtgtccagcagcccagatctggagtctggtaggcaccgtagagatttgctgagtaacaaattaactacttttttttgcattttttgtagaggtggggtttcaccatgttagccaggatggtcttgatctcctgacctcgtgatctgcccg

SEQ ID NO: 189110 - DNA, 348 bp, Homo sapiens
ttgtatttaggcctatgatctatcttaaactactcttttgctatcatgtaagggtttctcaaaaggattttcaattaattgattagatagctgtgggtcttttcttggatttgttctattctgttgatttatttgtatcttcttatgtcaatgccacactgtcttaattattgtagctttataagattggtattgttactttaaattttgatagaattaatcagtgcagccgtgtgggcctggagtgtttttgtgggaaaaagcagaaggttttaaattagtgtaattacttttacaggtttaattactttagctgatatataagcattcaggttcttcactttttcc

SEQ ID NO: 189111 - DNA, 345 bp, Homo sapiens
cagtcacttggggtagaatgagtctggctagctgcccggcttctacatctgattttggctttgatgtcatttacaggttgccatgtactcagaaatgagaaaaatgactttaaaagtcccctcttcgtaaaaattatcctgaaaaaaaaaaaaaaagcagctactgaagttgataacagatgtgaagaagtctaagcaataaaaggttcttggctggaaaatatacatttcagataaaaaatgaggtgtctgggattgatgatatgaaaaagttccctatatgctctctacagatataaagcaaaagtgactcatgaaactgagttaatgctcccatcagtgaac

SEQ ID NO: 189112 - DNA, 382 bp, Homo sapiens
gggaggtaaccctcgctatcctgctgtgagaatataacatggtatagccaccgttggaaaacagcttgtcagtttcttcaaagctcagtgtagcagggcgcgatggctcacgcctgtaatctcagcactttgagaggcctcccttgatcatgaggtcaagagattgagaccatcctgggcaacatagcaaataagtacaatggtctccggttccccagtagtggtaaagttccccagcccaggaacgtttcattatcccctccgtctccactcctagtcacttcatctctgaggcctgcgagtggggatgggtgacagaaacggttccaagttgtatatatcattattccaaaccatcaagagccagggagggaagagaaaa

SEQ ID NO: 189113 - DNA, 354 bp, Homo sapiens
ttttcttctcccttatgctactttctggttaatttcttcaaactttttttctagttcatttttctagttcacctatttctaatctaatttatttagtttttatttcaacagttctaatatttccttaggtcttggctttccaaatctgcctggtcaattttgcatttagttgtgattacatgttttctttcttaaaatatttcatacctagtaattttatattctatatcagataattctaatatctaaagtccttagggttctaaatctattgtttttcacttgtttcttttcttcttttttttttttcttgagatggagtctcactctgtcgcccaggctggagtacagggg

SEQ ID NO: 189114 - DNA, 156 bp, Homo sapiens
acaattaagtaaaattgttctcctgctctcctggagctcagctctacttgggaagataatatattcacagaaatagctgtgatacaggcaatacattctcagggtcatgggagtggtagaggatgaggaccagtgagcagtggctatctctccttt

SEQ ID NO: 189115 - DNA, 426 bp, Homo sapiens
aggctatcagaggaagaggtctggctggattaacttttacccaaaggagaattaccaagagctgaagaagttcttcgattccctgcagcacagctgtgatattgatatagagtactaggaaactaaagaaacgtcttacttgactgcagttgtcacattatcatgcattacagtgcagcagcctgaatcaaagagatatgcaaaattcaccaaggacagcagcaatgcattttttccccctgtatttgtggaaagacatcaggaaaaggaaggcaagtatgaatgcaaaaacatctgctccctaaactcatttaaaaaatatcactgcaaaaaataaatgtgaatcatctatagtgtagagcagatggaagtgcaatatgtttaacttaaggcagaaaggggatgcaactgaagaaccagaggata

SEQ ID NO: 189116 - DNA, 406 bp, Homo sapiens
agctggagtgcagtggcacaatcatagctcactgaagcctcagactcttggcctcaagtgatcctcctgctttgaccacccaacataggattacaggcatgagccaccacatctggcctgtgagtttaatttggaacacaattcccatgtctatcttcaaggcctagaataatggacattgtgaatgtacccatagtttacctcaagtgctgggacagatttgaagtaggtgaagtttatcttcattgaaccttgtctctcttggaagaagttttgtcacatagaagttctgcctctggcttgggaaggcacgtggggccacacagaagaggactgtcctgggacatttgtattttggagagtggtttctgaatccacttttatctttctgtacttctctctgcta

SEQ ID NO: 189117 - DNA, 364 bp, Homo sapiens
gcttcccatggtgtgtatgataaaatccaaatgcctgccatggccttcgccctgcgtgagcagctgacccctttggcttccctttctgtcccctgccctgtgctcactggcctctctggtcctctgtcagggtcctttctgcttttgcattttctgttccctttaccttgaatacctctcccctacctatggtcacatgtgaattacgagttccttctcttagctcagctgccacctcaaaggccttccctggcctcaggtgatccccccaacttggcctcccaaagtgctgatatgatcaggcgtgagccaccgcacctggcttaagtcagattctttactgcttcctgcttctgcccccccg

SEQ ID NO: 189118 - DNA, 262 bp, Homo sapiens
ccacatcatcatatcttgcctggatttttacaataggctactttctgctcttctcattctttaggttttattcaactggtagcaagtaaatgttcaaatctgaagtgggtaatgtcatttttctgctcgacttctcactattttttttttcctcatctcactcaggataaaagccaaaatcattgcaaagataggcaagtccctacttacctttctgactttgtgttcatttactctgtctcttcattgctctgtctggcca

SEQ ID NO: 189119 - DNA, 446 bp, Homo sapiens
tcctaccccacgtcacccccttcaggaatacccagatgtcttcttcacctccttcaggtctcaacaactccctgaggtctattcaaatgtgttcttcagctccttcaggtctttacccaaatgccagcttcacctccttcaggtccatgcaaatgtcatctcagtgaggccctctctgagcctgcttctcctccaaccctttctagtcccttttactgccttattttctttattgtttattgtctgtctcccccacttgaatgttggttctctgagggcagagaattgtctctggcttatgcatagctaaatccccaaccccagaaaagcacctgacaatgataatcatgcagtaagcactcgctggatactttctaataaatccttctctaaattagctctaatgtgtcaacagaggacaaaagtactagtccctgggaccagtg

SEQ ID NO: 189120 - DNA, 252 bp, Homo sapiens
tgttttactttgaacatacgttcaaaaaccccacctttgtgaattatgggggatcccaagacagtataaatataaacctgtttcagtttaaataaaacttatatatcttctatgaatattcaaatgacaataaaatgaacagttagtcacacaatatatataagctaatactaaattatggaaaagaggcatgttaatccacaattatataaacatacacagatcaaaatcactacattgaccaagaatcca

SEQ ID NO: 189121 - DNA, 603 bp, Homo sapiens
tgctcgtaccctctaatattctggtctttaaagagtactgcagatgatgtcatgttttgttttgttttgttttgttttggctctgggtcctcaatattaacatccaagtctgggcacggtggctcatgcctgtaatcccagcactttggcctacttcctatgccatcaagttcactgccaatataatgctctctaacttctttgcagggctaaacacagcagagtggggaaacaagttccttcctccttcccttggcctcccgcagaggcagatagaggaccaggaaagaaagctctgggaaacagtgtgaaggaggcattcacatttcaaaagacaattctagttcctagctcaaggcaaattatggagattagctgtatttttttttcaaaatgtattacttacaggagaaccttaaaaaaatcaaatatcctattaaagccaatgcctttgcttggagacattttcaaggaaactttaaaatgcagatcagtttatgtatgaagttttttttttttgtttttttttttttttttttttggaaaagggatcccccccttttgccccggtgggacaactcatctttgtaaacccataattaa

SEQ ID NO: 189122 - DNA, 694 bp, Homo sapiens
tttatactgtgaacccgattatattaaaaaactcccaaagagcaagtcaatcacttttctccttgggcctctttgatgccatttagaaaggtatcttgtcagtggagtactggtacctgtacctccctgtgatctatatggtctggggcaaggtgcaaatcaaatgccccctgccttctgtttgtagaagaagaaaagcaaaagacaggaaaatatattcatatttactaacctgggactttctgattggagactgattatcacttgctgttcaagtttagatgggtcaacaaaaaaatgtatctccatcctcaggaacgtcattccagttgagtttgattttatttattcatgtgcttgtaactaaaagtttcctctggaaggaataaagttataggaaattaaacaaaattattaacagtttctctgtcttcttaatgccacaattaaatattgctcccactaattataatagtagttatccttcattgaataattagtatatgttaactattgtgctaagtgctttacatgtttcatctctttttcatttttaaaacaatttgcaaggaaagaagtatttattccctattttgctgtaaaggaaactgagactccacaaatgacagatctttacctaatttcattacaatgtccttcatttaatactctgcttacctgacacgcaactctg

SEQ ID NO: 189123 - DNA, 319 bp, Homo sapiens
acactgggtaccctttaggttgatcctagaatgatcaattcttatcttccttttaaaaattattctctcttttcaaactgttctccataatattttattaccatttctataataaaaaaaagttttattttattacttaaagcaaaaacatcagcattacactgtaccttttctggctatataaagttcttgtttacgtttttatgctaactttttgtctttacatatgaaaaggacacaaagcttaagtagtgatatggctgggtgcagtggctcatgcctgtaatgccagcactttgggaggccaaggcgggcagat

SEQ ID NO: 189124 - DNA, 695 bp, Homo sapiens
ttgggtaaagaatacttaacatgcaatactctggcttcctgacttcctctcctccattgatttatcttagccattcaactctgtggcatatcctgtgcagatgcttttaaactctcagggcatctgcattaactggggagctttgaaaaactatagatgcctaggactcactcccagagattctgatttctttatcagtttctgacattttactctccacctaccacctcctatttttctggcttacttctagtacccaagagtcttaattctttcatctcactgggactttctcatttgccaccttttctgttacatcgtaccctcatatcctcatttccttttccaactagctgagttcccaaagcctgtcattacacttgctcttctgagtctactttcaaccctcttgacttctctccctgagttgttcttgcttggccaaaccttgatgaaaaccaactccatctgttttatacctgtatacttgtaggtgaatatggctcgagcaaacagctatgttgactttcaattcttggctagtacttaatgactttaagttcatggtttagtgctgcccagctgtcttgttaactctagttctttcacgttcccattgcttagatgattatatctttcccttgcattcacattgtcagtatttccattccatcttctctctcagctgatgacct

SEQ ID NO: 189125 - DNA, 361 bp, Homo sapiens
aagaggcagctcatctgaggacagaggaggaaagagggcactcctcatcacagacaaaggaaagagagcaccaacttggcttcccccatgcatcactgcaaagtaaagttttaaacacaacacagacatcaggtagctacagacccgcccgagggtaaatagggtcaaccccagccacgatgcccagtgagcacgtaaaatgtgctgcgtctgaatggagatgtgctaagtgtaaaacacacaccaactccaaagacggtccctccaaaaatgtaaaataccttattgatgattgttgttattaatgttgaaataatactttggatctggcaggttaaaaaatgtattgttgaaactaatt

SEQ ID NO: 189126 - DNA, 603 bp, Homo sapiens
tgcaagaatggccacaatcaaagaccaccacagtgcctcaccctgaattccttccactccatgcttgacaactgcctgttctacaggagcaatcagggcatctgacaaggggtcccttgatttttcctctccacctcaaaatgtctccatatctacactatccccttatctgctcctccttacatagaaaggtcacctgtacgctcctctccatgtctcttctttttccttgacctgtctcaactcacttcccccaacacctgcaccattagttatctccccctccagctgacccactcctcaatctgcaaacaggccaatgcattcctcaataaccttcccgtgaccagggtgagatacaatctgtgtcttcacatcaaactttctgaaaggatattctcatgggtcaccttcaacagctcaccgccctgtgactccatgtccatctgtttggcttccgacctgctcctcacctagaagtgttcctccagtctctgaacaaccttcttctgtgactctactaccttctgtcgtcttagcatccttcagtgcactgggcatcgagcctgttcaagggggcatcctctcagagtcgcagctgcc

SEQ ID NO: 189127 - DNA, 864 bp, Homo sapiens
  misc_feature (854)..(854): n is a, c, g, or t
tgcaagaatggccacaatcaaagaccaccacagtgcctcaccctgaattccttccactccatgcttgacaactgcctgttctacaggagcaatcagggcatctgacaaggggtcccttgatttttcctctccacctcaaaatgtctccatatctacactatccccttatctgctcctccttacatagaaaggtcacctgtacgctcctctccatgtctcttctttttccttgacctgtctcaactcacttcccccaacacctgcaccattagttatctccccctccagctgacccactcctcaatctgcaaacaggccaatgcattcctcaataaccttcccgtgaccagggtgagatacaatctgtgtcttcacatcaaactttctgaaaggatattctcatgggtcaccttcaacagctcaccgccctgtgactccatgtccatctgtttggcttccgacctgctcctcacctagaacctttctctccgcactcactaacaaccacactgatgagctcttactccccagcccagctgcacctcatgcaccaataggctgactctacatgccttcaattctctctcccctggtcctctgtgacaaaaccctttcctggtacccctcctactactccatcgctttcctttgcatatacccaataaaataaggaattatctaaaagttctgaccatcactctctttctagctgtttctccttgggcaaattaatctgtctctgagctggcttcctcctgtcagcgttaaacaggttcacaggtatcctagcattttaggacagagtttgacacattagtccagtggtcagttaagctagtagctgactgtcaccnatcttctttc

SEQ ID NO: 189128 - DNA, 327 bp, Homo sapiens
ctgcacagttcccactttttgttcaggcataagatgtctttgagaagagaaaacccatgtgagtaaatattgagttgtaatctgtattcggatttctggattttttttggtcacagtggttctgccatctagccactgaaccctcccaacctttccccgtcctcagccctcatctgtcacgttcagttaccacttcttgccagctttaccttctagatagttcttgacttcatcctctcctctccatttgtattgccactgccctaggtgagatcgtcacttctctctcctcagttgcttgtctcttccttcatcagtgatgtattc

SEQ ID NO: 189129 - DNA, 1153 bp, Homo sapiens
agatagcgagtgatcagcatgtatagggtattaagcataagaaggactttggattttatcctgtgtgagatgggaaaccattggagtgccagagtaattttttcttaaagctagtctgcttgtcatttcttttcttaaaaatgcctcagttccctgttgcctttggaataatgttcacgtactttactttggcacacaaggtccttcacagtcaggcctctgcctgtttatttagcatcatctgcttctttcccacatgtacccttcactttagccaagtgggatcacatgcagctccctggatgggtcatgatgctttgtgtcttcgcgtctttctgtaccgtttgccctgtgagaagccctccccctcagctcacatggtcactggctctgttttagagggtcctctttgtgctcttgctctctcatcatttccacccggagccactttgcacttaagctgcttaggcttgaaacgtgctgtgttcttttaccagccttgattttactcttgccacacccttgccggttgaaagtatgcctatccagctcagacactgccatcttctgcctccttgggaccctcagaaacactttgtagctctcttctacctaataataattatttggaattaaaatgtttctttgccttcacaaaaaatccttgggctaacttatttcagttttctttgtagctcctagaacagggtcttacagacatttcatattcagtaggtattcatggtgtgtaggattcatagtataattagaaaactattggctttcaaacaactaagggccaaaagcagcaaaaatgaatgcacaattaaaatgagttcctattaacaaaacaaatttactgtaattatgatagctaggtaatccttgttctcttatatatttatatatacttactagtggcaccaaatattagtatacccagtttgagatgcagtttgttgaaatatatttggacacagccaggcgtgatggctcacatctgtaatcccagcactttgggaggctgaggtggcaggatcgcttgagcccaggagttcaagaacagcctgggcaacatagtgcgaccttgtctctacaaaaaaaaaaaaaaattaaaaaattagctgggtgtggttgtgcatgtctctaatcc

SEQ ID NO: 189130 - DNA, 834 bp, Homo sapiens
ataacagtcctccttaccattgcaaggcaaaaataatttctccactaaattcaccacaggataaatagattgcagttttaaatttaaatacctgtgatagtcattagatctcatcgtagatatgcctgttcccctctccctctaggctcacgatagaaatgcacttccccacctactctgagcttacctgtgtggccatgtgacttactttggccaacagagtgtgagcagaggtatcatttctggaagaatgttttaagtgccagtgcatgatttaccagtatcttttccctgacctggtgattatgaaaacacatgctaacatggggtttccgttaggctgggtctcaaagggatcataagctgagctcctgtagacatgaagcatgagggagaaatgaacttctgcctatgggctaagattatattcactgagagttggggctttgtttttcttatgttactgcagcaaaacctactcagtctaccatgaaagatacaataaaaaaattcatgtcacatctaatactttattttcacctcagttaatactactccaaaaaacaggcaaggtacagattagagtccgcagttcgtcaaagagaaagctgagactcagtgtcagcagacctggtaagaatacaaaccagaggttgaatccagttccagcattctttccttataagttgtttgtaatagatacaaagtgaatataagcatggacctaatagtaaggagaggatttagattttaaaagggtttactgcagcataatcttggtatggtcactactagggacattaataaattggatttgaaaaattgtcattacat

SEQ ID NO: 189131 - DNA, 569 bp, Homo sapiens
caaaacaaggaaatttgtgtttttataattataaaaaagtgttcctgtctgtctaggcttgtacctaaatgggagactataaactctattgtccagtattttactgaaaactatgtatgacactctgcagtccattgtgacattcctacagccaagaaaaataactgaaaacactgaacgtgtcagggattcatgataaggattcatttctggagcaaagactggtcttgtgaagaaaggacctgtccccttctcatgcatgggattctacccccatcccacacaccagaagcactgccaggacatctctgcactatgctgtgaggtgggtggtttagggtaccattgttatatgacttttatcattttagttctgtacatcctatcttgggaagtaaatttttggttatttcttttcattttaccttttcttcttgtttaactttaaaatggaaaaagaagcaaatgttcacaataaactttactgtttaatctgaaaaaaaaaagaaaaacattgcagaatgatagccacagttttaaaaataagcacattataaagataataaaat

SEQ ID NO: 189132 - DNA, 342 bp, Homo sapiens
cttgaggacacaggtgaacagatagatactctatcctactggcctagacataagtacacagagataaatacaaatacctgctcccagcacactacacagacacactgcaaaaatctacatagattgccattcagatggttactacataggtcccaagtagcttttgaatctgtccccttctcacgtccttcccctaccaacccacctcaggagcctgtggctgccctgtgaggcctcatccctctcctgcttgacccttccaggcctctctccacacaatagccagagtaaccattagagacacctgaatgttcctggcctgcttcggctgaaattccccca

SEQ ID NO: 189133 - DNA, 252 bp, Homo sapiens
  misc_feature (1)..(1): n is a, c, g, or t
ntctagcggatcctgtcgatcactgtactttttctcttttttgatactcagttttctaaacaatcaaaagacctaaaaagacgacatgagaccaacagaatctttttttttccagcttattcaaaaggtgagcaaaagtcttttgttatcctcattaatattatatgaacatcttgttcaaaagagaaaaataaattttacctttgcatcagtatattgtcagtacagtgatcgaccaacgggtacgcgagc

SEQ ID NO: 189134 - DNA, 191 bp, Homo sapiens
atgtaccttcctctgccaatcaatggggaaaaaaaataaaatggatctttcactataccttaataacttttaattgatacatagtatttagatgttatttctcaaaggatatgttccttggattcctttacatctctaacaaactacaatgttatacaaaacctaaaatgcaggtaacattagaagttaat

SEQ ID NO: 189135 - DNA, 282 bp, Homo sapiens
cccgctccttaggtgtccccttggcctctgggcccaccctctacaagactacaccaccactcccagctccccagcgcgtcggatatccacgcacaccagtcacagcaccggctgcaccacactgtcgggtatgcttagcctctcctgcccagcctgtgagcccttcacagcagggacccaggcttttcatctttctcctccctctgaagctgccaccatacctcctgggggatgacttccacacccaccaggctggccttaggataccaaagccacccataa

SEQ ID NO: 189136 - DNA, 495 bp, Homo sapiens
cagaagatcactgaggaaagagcttctgtccaagagcagaggaggatacgaggctcctgccctgtggattgtacaggtgtttagtgcaccatctcacaggctcaacaggactgatccagggccattttattaatgttaaaacttaggggagctaaatgagtcttaatatcagaaatatggtaaccaagaaaaagtgggaggccaggcaccgtggctcccacctgtaatctcagtactttgggaggctgaggtaggagggttgcttgagcctaggagttctaaaccagccttggcagcacagcgagacctctgtctctacaagaaaaaaaaaaattagtcagatgtggtggtgcatggctgtagtctcaaggggctaaggcaggaggatcgccttagcacaggagtttgaggctgcagtgagctatgatcatgccactgcatggcactgcagtggcactccagcttgggcaagaatgaagcactgtctctaagcca

SEQ ID NO: 189137 - DNA, 285 bp, Homo sapiens
actctagagtatcccctgtacgggagtgggagaatgatagcaagatcaattggttacaggtcctggtgggggtcaaagaactgttgaagccaggactggagggagtgcattgggaagaccagcagggatggcatagaggggaagaaaggacacacccagagagttgtggttctgtagcaagggcctgggacctgagtgtccctcatcacagggcagaagccactcctggaactgggctattgtgcaaatcatccaaaatcctgacaggctttgacttttgtctcc

SEQ ID NO: 189138 - DNA, 653 bp, Homo sapiens
tgaatgtcacttaccctagagtgagtgaaatagagatgccaggaagatataccaggtttatccagtttctttgcatttttctggcatactgtatactcttgagcgcatatgtatcctactttgtgaaatctgggggtaaagcaggacccttcaaacccttaaaaaatgtataccccaagaaaaacatttttaaagcatgaacgcttcctcaagtaaatacatatttatacattatataaatgtctggctattaaaccatgtatgcatatgttaactctaagtaaagcttattatatgttttttagcccataaatatggagatgttttaaaatttcttccagtgccccagtggatgatcttacacctcccgtgcttctgggatacacacacctaattttgcagaccactggtccagaatgtaaattgaagagtttaatgtctaagatatttgttcttttgtttgtagcttatcttttactccccacatttcaaatatccgtttgcaaaataatttttgagttaaaattttcaattaaaaaactgtatccttgaggtagaaaagataaagatagaagatatatgtgaattaggttgtatctctccttaagagggaatactgttttttatctaaggagaactaacaaccctccctt

SEQ ID NO: 189139 - DNA, 230 bp, Homo sapiens
tccaggttagcaacgtcaggaagccattatcatctccaggtctaaaggggctagggaagggttattagaacccagaaagatgtgtaactatagatggctggcagagagggccattattgaatacaagttgtgaactactcacagaacagctttggcaacactaaatccagcaagagggaactagcttttagggagatcctttctgatgtccctcccactgggcaaagcta

SEQ ID NO: 189140 - DNA, 188 bp, Homo sapiens
atctcacctagctatacctggggaatctgcctgatagttccattggggatcctctcgaggaactgctctaataccttcctggaggtctggctcatgaagccggtggttatcagcatgagattgggctagagaaaaaactcattctcgttcacctggggagagggtagaagtcaggatgacatttaagt

SEQ ID NO: 189141 - DNA, 142 bp, Homo sapiens
gataagacacctcgggagactaagaaagaagacaatggggaggcagaaacatggaatctattcagacagctaactctccaacctcctaattaaccttatcctcatccaccacccccactcaccaccatcaccactgaagaca

SEQ ID NO: 189142 - DNA, 368 bp, Homo sapiens
tttcaccgaatacgtatcagagcatatctgttacctagtaagaacaatttcccaagaagacattacaatcctaaacatgcctacacctaagaacagcacatcaagctccacgggccaaaactgatagaactgaaaacaggcaaatccactattatagctgaagacttaaacatctcctacatcagtaatgagtagattaaaatggcagaaaatcattaaggacatatatgacctgagtcacattatcaatcatttttaactcattgacattatagaatactccatctaacaatggcagaatacatatttgtctcaagctcacatggaacactgatgaagatagaccacattctgggcaataaagcata

SEQ ID NO: 189143 - DNA, 226 bp, Homo sapiens
ccccgaccccatcccctggcaatcacttatcggctttctgtctctgtggttttgcgtattcagtacattttatgtaaatgggatcatgtgatacttggctttttctgctgggcttttattaagcatgttttcaagatttcatccatgtagatgaatcagtactgcatgccttttcatggctgcataatcacgtgtttggatggaccatgttttgtttatccatgta

SEQ ID NO: 189144 - DNA, 402 bp, Homo sapiens
tctgacactctgacgcaccactgccaatgctgtacgtactgcatttgccccttgagcaggtggatgtttacgtgtgttatataacttcctggctccttcactgaacatgcctagtccaaacaattttttcccagtgagtcacatcctgggatccagtgtataaatccaatatcatgtcttgtgcataattctccctaagaccctaggagatgcttaaattaatatttgagatcttcctctttttaaaaactgtataggcaattataaatttccctctaagtactgctttagctgcaacctgtactttttttttttccttgcgataggatcttgctctgttgcccagactggagtgcagtggtgcagtcacaaatcactgcagccttgacctcccgagctcaa

SEQ ID NO: 189145 - DNA, 725 bp, Homo sapiens
atttgagctctgttctaagtagaacgtctccccttctttatggactagttttggtgtaaagtgctcctaaatgaatgtttttaatggtgttttgtatcttggcctgaatgtaggtaatgggcttttattgcagaattactttaagactttctgtagatgtcaaaaccagccaaacaagtgaaaagttttgattaaccagttgtttaaattttactcaacaactagtttgaccagtttggaatggacatgggtagtgagtgaaaggacctatttctgtcgtataggaaggacatctgaaccagtgagttgtccccccggattgggatggaggggtgtgcatgttgtgtgtattgtgactgtgtgtgctccagagctctagggttttgtcatatcaccctgacacacatggtgcttatgttgactgttgaggatgttgaatatggagggataccgtttatcctaaataaatcccccttgttaagttctggggtgatgaaaattaattggccttgtaaaccgtgaaaaccttgggtctcaagccccttagataccttgtttgtctactgagaagtatatatcaggtcttgaatgtccaccctgacattttaccatatggattctaggttttttttttttcaacataaagtgtatggaattttaaagcttcacttaatgaaatttgctttgttgaagttctgttttgctttcgaatctgctaacttgca

SEQ ID NO: 189146 - DNA, 452 bp, Homo sapiens
tcctcacgcatgctttcttacttgagattgcagcgaacttctaaggtgggaatattatccccactttatgacatggggtgtgagctgagagccagaggttccaacagccagcagctggttggtgtctgtttgatgatccgccaccactgtttgaggggggaaaatagggaggaaatcaaaatccagctgtggatggagatggcgtgctgtcctccatgcatcctgctccaggtccattgtctcccaaagggcatgtctgctgttccagagaaaagtcattcagtgatacttgtgaaaacatatgaataaaggaagactttatccaggaccatcacaataggtatggggaccacagcaacgggcttgcagtggtggggggagattgggctcaactcccaatacagcacgggcaagtgggaatttgtagtctaggaacagggtagggggtcagt

SEQ ID NO: 189147 - DNA, 494 bp, Homo sapiens
gatccctcctgcgggtcctggttctctccacacgattattcataccgagtgcgtcaccttctgctatggtgtgatcgtgtgacacctgggcactgcgactgcttcctctgatgcgcctgttctctattgttaccccctcacctattcaatctgtttagctcttcggtcatgaatatcctgaagtcaggtccagtcccctcgtctatagtcttccccagtcttacctgtcttcgtgttttgaccttttctgccttgtcgttatatctgttgtctctgtgactgggcaccctctcgcgaggaagaccttctgaaggtatagtgatcctcaaagtttgtacttgtggcaccttgactcctggagatttttgtctcagtctgatttaatcagtgatttttcattctgtatttaatgacttctggtttttcttgagtgagctaattaaaaaaaaagttaaatggttgagtttctttcatattacttgcttttaaaaaga

SEQ ID NO: 189148 - DNA, 462 bp, Homo sapiens
caggaaggttcattaactcgtgcaaactagaaagtggtaaagccaagatgcaagcctgggcagtctgtttcaagaaccttgctctcaatatgcacaaagccacttgtctgagccagaaagaaagttaatggagatgctagcaagtagctttggtcagttgtgaaaagagttgtggttaactttttcaaattaccatgggatgacattgaagatccattagatgacactagaagactttcatgagattctagttgagggatgatgatggctcagatcagaccacaccatggatggggacattcaggatgcgttttgtaagtgtaaccaaaatcacttcttgatggatttgatttgggaggtgagaaaatagagaaacatagaatgaaatataagattttgggcttgagcagtgggtgaatagagatattatagagaagatgaagaatattcaagaaaagatag

SEQ ID NO: 189149 - DNA, 274 bp, Homo sapiens
ggcctgtgacaccatcaggcatgtgtgactaccaaagctcctgtcagctgttttattttatctcctttccattctcagtttgaatgcagtaagcttgaggtgagcctgagatatttttggaatttaaccaaaggaaggggctgtcaaacaaagctagttcagagtcccaggatttgtatcttttggagtgactgtgccctcagaaacttccagagacttttagaactcattcaggctttggctttggcagttgtaagaagcaccacaatttttt

SEQ ID NO: 189150 - DNA, 568 bp, Homo sapiens
tcgactctttaggatcccctgatcttccgtccctgcagaaataaaactaagtagggggaagtaataaaaacaacactgagttctcatcagaagtgctggaagccagaatacagtggagtggtgcatgcaggctgctgaaagagctgtttcttctgcaggagatccttcagaatggaagagaaaagcagatacttagccaacctagagaatcgttcagcaaatacgtgtcacaagaaatagtaagaatgtctcaaggatgaaaataaatgatagcaaaatgaagcccaaatttttaagaagaaatgaagaatactgaaaagagtaaatacaagaaaacgttttagaatctgtcaatatgtagacatgtaaatatttttagtttgttttaaaagtattaactgtttaaaaatatgaacagctgaggtgttcgtagcatgtgtaggaataacagatgagacaacaggaagttgggccccggaaatgcactgctgcaagaatcttcattttcatagcacataacactgtgtgaagatagaatgcaataaatcattcaaaaaatacacagagg

SEQ ID NO: 189151 - DNA, 360 bp, Homo sapiens
agcctgggcaacaagagtgaaactctgtctcaaaaaaaataataacaaaaaaaaccccaaaaaactgggactatctctgcaagtgtgagatatacatggtcaccagagacatgcatgattacagctggaggaatggttaagagcaaaaaccagagggaggccaagcatgtgtctcctgcctgtaatcccatgactttggaaggctgaggcgggagaatcacttgagcccaggagtttgagacagtctggacaacattgtgagactccatttctacaattggaaaaaaaaaaaaaaaggctgggagtggtggctcatgcctgtaatcccaacactttgggaggctgaggcaggcagatcac

SEQ ID NO: 189152 - DNA, 467 bp, Homo sapiens
taaatcacagtaaccagatggggcgtgctaacagatctttttacccagttttcttgacaaaccaagagtatctctccccaaccagattttctcctgtgttgcgttcagcctcttatttcttggttagggaagtaggcttcacatatttcagctaaacactctgcattttcagtttctctgtacaattcatgagttttcactgccctgggccccatgtttctcatcaattcaagtctacactcatggtaagcaccctagttcttgttttttctaacacttaaataatgaataggacttcatctcctagagctattctccttactctattacaacagttattagtgagttttaattagacaaaactgccattccttttgctacctcactatactgtcaagcacctattaagaatattacagtagtaagtattagcaccttttaaatttacattaacaataacagagaaa

SEQ ID NO: 189153 - DNA, 478 bp, Homo sapiens
cactgagaaatgttgttcacattaatgagtagatagaatgaattttattccacgccattcaaattctctgaactccttttgagttatatgatagaatgtaacagtgaaccatcaaaaaaatttaacaatcagtcaacatctacataaagtcctctaaattttgttgaaagcaagtaattgtacttgtggaaagaactgactgtgcctgagtcattcgtgttctcaatccagtatctcatagtgtccctttatgatatcaaacattttgtaccatggtaatattgcatacaagtgagaagtatgctgttctgtaaaatgggaggttgactataacggagaattacagaaaaaataatgtgtacttctatcacaggttacattctcagatcagctgaaggaaagagtgtatatggaatttaaagatatcgaaatggattcctttaaaaccatccatgtctatgaatatcatgtaaagcct

SEQ ID NO: 189154 - DNA, 855 bp, Homo sapiens
tgtggctcttaagggttcatgaaatgactgaatatgaggatacatgtcctgtagaaagcaaatgcgcctcatatactgccaaaaatagtgttagtttcattaatgtgaattttccagcattcagtagttgtaatgttagaaacaattgctggtcaagttcaacttgttgctattgtttttaatttgcacaggagtagtatcagaaattagtgtcactgcttgtatctagctgaattttaaacaacagaacattagttttttatgttggtgccaccaactgtaaatgacataagttagttattacaaaacacagtaattagactgttgcaaccatctaaaaccttaggcttccagtctgtgctgttagtgttaagatgtaaagtgcaatcctaagctaacattatctgtgcaagcaccatagaaacatttgcatatctgcatagatcttacaactgtactctttacctccttgtgataaagctttgtctacctgcaaacacagtcaaaggctacagctgcaaaccaaagccaactctaaccatggccaagagctcaaggacagaagcagccacatgctttggtcagccttctgtaacttcaattagtacaaaggaaccttttccatgaactacctgctgttttctgatgacctctgggatcttttcatttagccctaaacaaagaaacaaatatgacaaaaccacaactaaaaaatgttaattcagtcacagagtaatcttctgaggccaaaagtccatctaaatgcaatgaagatttgctttcattaaagacagaggtgaggacaaaatccgcagtggaagttatgatatgctagaaagcaacaaatgtggatca

SEQ ID NO: 189155 - DNA, 469 bp, Homo sapiens
cggccgcgtcgacaagctccagcccagaaagcacctgctccaccctaactcattccgatcacctgctccaccctcattccgaccacctgctccaccctaactcattccgaccacctgctccaccctaactcattccgaccacctgctccaccctaactcattccgatcacctgctccaccctaactcattccgattacctgctccaccctaactcattccgaccacctgctccaccctaactcattccgaccacctgctccaccctcattccgaccacctgctccaccctaactcattccgatcacctgctccaccctaactcattccgatcacctgctccaccctcattccgaccacctgctccaccctaactcattccgaccacctgctccaccctaactcattccgatcacctgctccaccctcattccgaccacctgctccaccctaactcattccgaccaaatc

SEQ ID NO: 189156 - DNA, 435 bp, Homo sapiens
cggccgcgtcgacaagctccagcccagaaagcacctgctccaccctaactcattccgatcacctgctccaccctcattccgaccacctgctccaccctaactcattccgaccacctgctccaccctaactcattccgaccacctgctccaccctaactcattccgatcacctgctccaccctaactcattccgattacctgctacctgctctgccctgattcccgccaaagcactcatcctgtcattctctttaaattagccaatcggaattagtttagcctgtgcggtcttaaccctacccaataggggaacaacgcagcagcaggggccacgtgcgtcagggtaagaaccccttcccctcccttgtccaagtgtacgctcaccattattccatctgtaagggcgcacccttctatatagaagtaccttgcctt

SEQ ID NO: 189157 - DNA, 605 bp, Homo sapiens
aagcgtgggggtggggatggtgacttcagagctgctgtcgtcaaggcagaggctgaaggtagccccagctgcctgtttctagaccagagctccacagtggcaccaagcaaagccttcccctgctgcaggtccctgggccctgcagggttaggatgagtcctctccctggtccctgggcaggtggcaggaggatgtacagagaggaaggcgctgtggggcctgggttgcctagcacttggtgtgttttccccagtgggcagcatggagcagggaggagcccagggaggtggggaagtgctggcctgtgtttgaaaaaggagcacgcagaggtctgagcacccactgcctgtgggcacttacattcatttcacaaatgaggaaaatgaagtaacttgccccagagagcacatttagtgagtgttggggctaggatttgaacacagatctgattccaaagcaggcctctttgctgtccctttccttgctgcgactgatacagaggaggggagagagagctgtgtggcaactgatttcctaaggctgtggaggtgactttcccatgggcatctccaagcatcagcagttgtggagccaggaaaatggga

SEQ ID NO: 189158 - DNA, 438 bp, Homo sapiens
gaggatccccgtacagagtgaatgttgagggaatccttcttcctgtccatattaatttttttccacatgaaacatattattgttcccttcagactatttacaactgtagaaacatagagttttctaaaaaattactctgttctagtccttttatttctcaagatcaggaagttaccagtgctctcctaacaaaaagtatagaaaataaagtaaaacaccacaaaacttaacacagtgttagcatttctaagcctttactaccttatcattctcaaatacatcacatctgatgattccttaaaagattagtaaagattaccagatttcaaggcaaccagaattttgaaacatagcaacagttcaacctctatgaatgtagggtggttattttttcttctcaagtatcactaccaaccaaggttaataaatagcaaccat

SEQ ID NO: 189159 - DNA, 598 bp, Homo sapiens
taatcacactagtgtaggctatactcgctgggtaaaaacaaaacagaagttttatgtttctttagttactgcctttaaaaagttgtcagatcttcccttcccatcttttaatggcatctttggcattaggccataattttcctgtcacttggaatgtaacaaagtttggtttaagcttccatttattatgcagtttcacccttatcccctcccatcacccacctgacccctctccctgaggagggaacacagttaccctttctcccctttttgggttgctttttcctcttggttgccactgcttctctaaaactaactggctgccagtgtcctctgaggccagtgtccaaaggccagctcttcagtagtgacccttgtgggactctctgaagagatataggccagctctgcttcctttcacctagggaggtgagcaagtgactcacctccacttgggaggagtggggtgatggcaagatggcttgatgtgggccaccttccaggtgaccccttcaccacaccaagacacgggggtaggtgtgcgtggatgctgaacggctgctccttctctgcactctgccgtgcctacactagtgga

SEQ ID NO: 189160 - DNA, 531 bp, Homo sapiens
acattttatgaaaatcagaaataaacttttcagaagcagtattatctacttggaatctgttcaaattttggtagtgatgagacttacatactaatgtaggtgagaaatcactctgacatactctatgctaatgtaattaacagagaacctgaatttcagagaataatataaccgaaggaaaaagttcaccaatcgaaggattgaaaatatctttgaatgatataagtaaatttgagttcatacagcaaaatatgctgtttccatgccttactggttatttaccatttccactcaaaaatcaggctgttgcttagaatcacaagtactacccctgatgcttgtaaagggtgatgttgcctgattagttaaaagcatattattgcattactgtagtagaattctcttttgtcttgcatagtagaaaggcttgaatagactcacatgaaactttatgcccagacttaaatagaactgaaaggcttctgtcacagcagacccaaacattcattcattcattgaaaaatgtttatt

SEQ ID NO: 189161 - DNA, 566 bp, Homo sapiens
actttttttgattcatcttttcttactcatctcccgttctggaattctccatatgcatatattagtatgcttgatgggtatcacaatggtccctgagactgtttatttttattcttttgcttttctctctgttcattagattaaattatgccaactgatctatcattaagcctgctgattctttcctctttattcttccatttaaaacataatgttgagctcctctagtgaattttaattttaattaattttcaacttcaaaatttctatttgctttttctttcaaataactttcatctcttcaatgatagtctctatttaataaaatactgtcattccatcttttgattcttagaacatggttttctttagttgtctgaatatccttaaatatcctcattgtattatttgtcttctaagtccaagataaaagaatgattctattgcctgattttgtttttgttgtcattgttttttttgttaatttcaacttttattatatattaaatggtatacatcatgtagatttgttacttgagtaaattgtatgatgctgtggcttgagg

SEQ ID NO: 189162 - DNA, 658 bp, Homo sapiens
ggccataaacgtgccaacctaaagaatttagttaagggtacaacctacaagtcaaaaattactattccaaacgacctcccaaaaaacttggagaaccacagccatttataaaactacaagcttaaaaagaaggggaaggggagggggagattgatttcaaagatataaagcagtttaatacagtggaaaagagcacagcttttgcagccagagaaaattaggtcttgcctaccttatcagctctgtaaccttggacaaatcagtctcattaagtttcctcattactaaaatgtaaacaaatagtctatgcagcaaatcatactactgacaactaaatgggataacatatataaagtgctcactggctggcacaaagtcaatatatatatatgtaaacagttactatattattaatagtaaaaggaaaaagaaggaatgggtcttcatggaatccagttatgtaaagtcatgaagattttattttcttgaactaacaagattcttaggacaacccttagtgtaatacaaagtttctaaaactcagccacatataaaataaaaacattcattcatttaaccgtaattattaaaacttctttccctttttttgagacaggtattgctctgtcacccagtctggagtgtcgtggtgtggtct

SEQ ID NO: 189163 - DNA, 393 bp, Homo sapiens
cacggtggagcatgccagtgatccgatgcaggggattaaaaagaaagagagagttcagggactctggtgatcaagctgcagagtttcctgctgtggaggtggctgctgtgagaagggagcaggactgagaacaatgcagagatggcttttaagagcagccagtgaggctaaagtatcttttctttagaatgtgatcttttcctaatgacactgtcaactcatggtggatccagaattcaagtctcattataagttaaaactagtgctagcacactgaggacattcaatagatacttaatgaaattatatcaatatgtgttagattatcaaaaaccatgaaatgtctgagattttattctattgacaaactaacaagttagcctgccgcggttt

SEQ ID NO: 189164 - DNA, 150 bp, Homo sapiens
ggagcttgaggctgcagtgagctgcgattgtgccattgtactccagcctgcgcaacagagtgagactctgtctcaaaaataaataaataaataaacaaaaacaagggacagtgggttagagcatggtgacttagaggacagcagaagagg

SEQ ID NO: 189165 - DNA, 660 bp, Homo sapiens
gtcaggccatgaaataagatttgacttttataacacaacacttagtggaaattcattttactagaattctgaacttaataattaaactttttgagtgcttataacatgtcaggcagtatgcaaagtactttgtatatctctctctcattcctggtaaccctgtaaagtaaatattattgacactttaaggatggagctgatgctgacagaaataacttgcctaaggtcccacaggaaatgatggagttgggttttaaatctgcatttgtcctactctaaagcctgcttttaatgacaacactattttgtggaagaaaatcattaattaaatcacaagttaacttggattagcgttcttggatttttagatcagaagattttccttgtcacttgttcttagaaaacaagtttctttttttagattcaataacttaagaaatgtcattccatccaattcattctctgaattaaaagaatataattttttttttcgctccatagtctattactatttttaacattcttacacaggttgtcatattggaggcataagtaggatgattttctcccaggttaggtagatgggcagggtaaggtaggtggtgtggcatctcagatcatccctagtactcagaactgcacgttattaaggatctgtga

SEQ ID NO: 189166 - DNA, 337 bp, Homo sapiens
agtgctaggattacaggtgtgagccacgcgcctggctgtgatgtgttttttaaccctacagtgtacatcctttggtgtccctctttagtgggacagctttgggaataagcatagtcactatggaatgattggttttagcagggctgtctttcagtgtctttttctaatttctctgttaatctgtcagcctctgttatctcacctaatcattagtttgcactaatttcagactgattactctattggttttgaccatgtccaggggcataaattgcctaactatgtgatccaaatttgggcccttttatagagatagtatttgagaccaacctttgag

SEQ ID NO: 189167 - DNA, 350 bp, Homo sapiens
ttataaatagaagattctaaagagaagtttttaataaataagcatttaaaagaaactagggttacttgttatgtttaaaatatatgctgttctcacacaaaatgaaactgctgaaatccaaatttagaagcaaagaatagacttaaattgttaaacatagaaaatataaatatatactttgaagaacaggattaggcatgagccactgtgcccagccacaaataatttatctaagaagtgtttccaaactcattacatttgcaggaatcttcttcaatatacattccctgatgttgcacaaagttgggcaaccgctttagggtttccttctaatcatacttgcgggcagc

SEQ ID NO: 189168 - DNA, 206 bp, Homo sapiens
gaccagtcaacatgtgtttgcccttgagatagctttccctagtgtctctggggagctaggaaacaacaggttagggtctttgtaattcttgcctctgccagggccttggccagagatctgggaggacaacagactcttcccctatgtgctgctagaaaactggttgtaatactgttttcttttctttctttcttaatttttttaag

SEQ ID NO: 189169 - DNA, 703 bp, Homo sapiens
tgtttacctacccacacagcaaatatttaggactgattactctgtatttctatttttatttccctgtggtaaactggtccaaataattggaaaagtttcacatctgcagagacttctcctgaaagttgagaaaatttctactaaattgaaccaatcaaactacatctgttttgaggctcacagtataaactggtaaataagaaaaataattgactattaattttaaaaagcttgacaacagtcttaaaaatttcaacaaaattatgactaccacaactgactaaacgatctacactgtagagactgtctacactcttctgtcactaatggaatcttatataatatagccagtgctctcagccctacaaactatgaacagctcagtagataaatctcaataagcctccacatcaaacagactggaagaaatcaaaagaccgctgagctaagccagaccaggctgatattttggtttattggttaactgttatgcttggaaaggtctaaagcttaattgcaaggcttgaggtgtaagtaaaaaatgcctgacttaagtaaaaatactgatcatagcatctgtcactagttaaaatatgtggagatctttatccaggatattttttgttgtttatattttaaataaatgaaaatagccagtcacacggtgactaaacatgatcatttttcattttttgagaatgct

SEQ ID NO: 189170 - DNA, 816 bp, Homo sapiens
caggctgttggttctatttttctcaagtacagtttgttattttgctctgctttgctgctcatatgcgaggacctttcttggccagcctcttgagatcttctgttctggtgatagatgcttgattcaggtttggagagcagcttagtgtcctcagataattctgggaaagcaactgaagagtgatctggttctacaagctggtgactggacccacaatacccagaagaggtctgcattttgcccctggcaccgcagagtgaaagggaggccagagttctctgcagactccacctgttctccttactgccctttgtagtgaatggacattgactcaagtttgtctatctacactctttggggagccccttaaaacccggatttgacttggaaatgaagcttttggttatggcttctgatcatgctatatgtggtagaagcttagtgtctgtatttttaaaattcagactggcttttaatactgggtaactaagtcatagatgaggggaagttgatggagtgatggaaatagacaattgccattttgcagcccatcaatgaattgatggatctgggcatgagacatcgacacttggtaatatcctccagagacaataagctgttgtttgcccctgacagtagaatactttacctccaaggaagtagtcttataaaaacaaatacagctgatctgttcaagtaacaatttacagtaactacagaggacacgaaaacatggtaaaacaatgttgttagggataccattggcctattccagactgaccaaaggtctgctttctttaacaaataaattacaag

SEQ ID NO: 189171 - DNA, 328 bp, Homo sapiens
ttggagccggcagggccctgtgagttctttgcatcaaatcccccgtttcgcagatggggagcctgagtctgctctgtggatggccccgtgctaggtgttggggatacagaaacatggcaggaagacagtgccctcgtgtgcctgtggcatagaggggcgcccccttacacctcacctcgttagaaccaagctcgacggaagccctggtgagcttttaaaactgaaagttaggctgggcgccgtggctcatgcctgtaatcccagcactttgggaggctgaggcaggcagatcgcttgagcccatgagttcgagaccagcctgggcaac

SEQ ID NO: 189172 - DNA, 219 bp, Homo sapiens
agaggagcgtagaggcccaaggaggcaatagactaatttagcaactctcttcccttcaggggacatcaagagaatgtctcctggtaaagagcatctactgtcttgagttatcttgaggaagtggctgcaaaaacagctaaatgacaagaacaagaacatggaagcaagccatcctgacccacccgcaccaccgcgctccaggaagctggctctaccctc

SEQ ID NO: 189173 - DNA, 547 bp, Homo sapiens
ctactttaattacttcctcaacattacttaggagactgcaatgctcccacaaaacctgcttccgaacccccctccccaggacagcctctgatggcatccgagtccgtaacagcacatgaccttgtccatctttttcctggaggacgggaaacagtatctcatttgcatttcactaacgactagtgattcgagcatcttttcacgtgcttattggccatttatatactgtatcttctttggagaaatatctattcaggtcctgtagtgatttttcattggattgtttgtcttcttactgttgaattgtcagagttcttaaatattctgcatactagtcccatttcaaacgcacaatttacaaatgttttctcccattctccgggttggcttttcatttttttgatactgtcctttgaagcacaaaagtttgtttttttgttttgttttacttttgatgaagtccaatttgtctgtttctctcttttgctcatgcttttgatgtgatctctaagaatccattgccaaatccaaggtcacgaagatttac

SEQ ID NO: 189174 - DNA, 254 bp, Homo sapiens
catgaccctgtcctcagggaactggccttctctttagaagacacccctgtaggaaagaccatggcagacgattgagtggagctgggctgggagagggcagtagagtaggttggtggagaaccgtcagcccaggggctgcccattcccttcctagcatcagggtctcacagttacagtgaaagacctcgacagggaggggccttctcagatgtgtcgtaccctgttgttactggtgcctcctggctggcctctgt

SEQ ID NO: 189175 - DNA, 592 bp, Homo sapiens
atataaatccagcaggtggcactagatagtcttggaagagtgtaaatttctgacttgaaggcagtatttgcctaatgaccttttcttttcatgtaaacatttttatattttattgttgatgcctttagcaatggataggctctgttaagatagctggtccatttgcatataacgtctcacctaattagttttttagatgggctcttaacgagcttgttagatctcttcaagtttactctgtcttgaatcctgtagcccattcttctcacattcacacttacaaaaatgtagtaagaaagagctctggattccccgacataacttctgtcctctgcctaaacattgcattttaattgcctctaccccctataaaaaattagaggtagtaatggaaatgtaagctcctcagctcagcttcctttcctgatgtgccagggctgccctggaggagggcgactccaaccaaagagacaggtaagtggttctgacagggtgccgggctagctctgcctccactgaggagcagcaagaggcaggcgctctggattggcagccagaaggttcaatttttgtggtctgtgtgatgtcactt

SEQ ID NO: 189176 - DNA, 378 bp, Homo sapiens
gctgtgagacttcctagcttccagaactgtgagaaataagtatttgtagtttataagccacccatttctggtattttgttatagcagcctaaatggactaagacactaggatccagagtataatgatggaataattaagtgcatagcatagtgcttaggatatagcattctatcagacagctattgaggtatataacaaacaaccccaaaattcactggcatgacagcaataagcttttattctcatacttataggtctagagctgcctagggtgaaaacatcaagttgcaggtttgtagggaagctgaggaggctctgacagcctttttttttgttgttgttttttttttttttttttttttgagacggagtctcgc

SEQ ID NO: 189177 - DNA, 374 bp, Homo sapiens
gttcgagaccagcctggccaatatggtgaaaccccgtctctactaaaaatacaaaaacaaaaaaaaaaattagccgagcatggtggtgcaggcctgtaatcccagctacttgggaggctgaggcaggagaattgcttgaacccagaaggcagaggttgcagtgagctgagatcgcgccactgcactccagcctgggcgacagagcgagactccgtttcaaacaatcaaacaacaagaaaaaacagagttagcatggctgtgtttcaatgaaactttattgtaaaaactggcagtggcacagatttgcccacctgtcctaaataccagcggagtcaggctagaaagaaagactgaatttactgtttttttttttt

SEQ ID NO: 189178 - DNA, 417 bp, Homo sapiens
ttttattcattcatacttttaaaaaaactatttcgtatttaaattttactctgacaataatggtatataaaaaatatcggggctctttttaaaggaacaacaaccaaaaccctcataggaaaagacagggtccatcttgttagcatacgtgttggttaagagtgctgcctctggaaccaggctgtgttcagctggaactctgtacctattttctcatctgtaaaatgggaataataatagtgaccatctcaattacagtgaatattaaaagagttaatatatgtaaagcagagcagtgcctggcaattgacaagtgagaactgtggctactattattaccgttattaacataccttcatgagctgggccctcttggtgtgcagtatttactttgtaagtctgagacacctgggagag

SEQ ID NO: 189179 - DNA, 473 bp, Homo sapiens
ggtagtggctgctgagggttactgctcagatcttgctcttcggggctgatgttctcattctgccaactgccaggaatgctgcctgctgatagcttgtagttgaatccccagacaagggaactgcctcacccaagtttctgcctctcattcctcagggacagcccatatccagtgcctggtcaatgaggaaacacaaaaatccaatccccttgctcagttcaggatatctctgaagagccatcccagcttcagagatccctatcgtgttggacgaggcctgctgcaactgaatcccagtttaagttccctcacttcccaataaaattcctgcaagcaaatctccactgtacagtctgtttcccagagaactcaacctaagatagcttaggtctggactgggccaaggaagcaaacgctaaaaagggatttcgggccgggtgtggtgtttcatgcctgtaatcccggcactttgg

SEQ ID NO: 189180 - DNA, 425 bp, Homo sapiens
agctgactgcacctcctttgtgtcttccccactccatcccctgcctgctgccactgccttagttcacagcctcatcatttcctccttgagttgctgcaacaatctccagctggcctctctgccacccagtttttgcctctctccaacctgtcctcctgactcttgccagagaaatttttctaggaaaacctacccaagcacggaatgcccctgtataaatgctccatgggttgctgagcacccccagagaaactgtcgtgactgatccacgctctcacttcctcggccttgcatcgtgctgtcccctgccctcccaggcttccctcagtgcgagcatctcctcacctcctgacctttgcacaagccactccttctgaggagcactctctgtttcccctgcttctctcctccttgcctaactccta

SEQ ID NO: 189181 - DNA, 101 bp, Homo sapiens
ctcatttctccaccaatatttagtattttctgattttctaatttttatcaatctggtatatataaagtggtatttaattgtggttttattttcatttttct

SEQ ID NO: 189182 - DNA, 385 bp, Homo sapiens
agtgtctgcagcagacctcagcaggggaggaagcaccctaaggcagagcagatcctgatgaggcacaaaagccacactcatggcttgggcatcattcttgggtctgtgggcagcctttggagagttctgggtaaggtagtgaccgagtcaagtttgagtgttttaagaaagacccctctgggggctgtggggagaatggttttgagaagggctaccctggggctccaagaccagtggaatgacgtgaagtccaggaattctgaagcatgaagccaagggcgtgagctaaagccaggatgatatacagtactgggttcagagggaattgccccccagtggccttccctgaccacccttaccctattgctgtcacatttctctatgt

SEQ ID NO: 189183 - DNA, 336 bp, Homo sapiens
caactgcaaaccgagaagacttttagtcattatggcaataagtagtatagggggaatatctccttcagcactgaaaactaagcaagagtcaggcaaaagaaaaaagctttggagaactttctacaaaactgggattgaagaaaaggatggtttgtgatttacatccacaagagtggccacgaaaaggaaataaatagaagatgtaacaaaaggtcaccgtcgcagacttaagtcagaggagtaaaagctggagctaagataggctgtgcagtacccagggcatattcatatcttcctagtgtctacagtaagaacactaattacaataaagaaatg

SEQ ID NO: 189184 - DNA, 685 bp, Homo sapiens
ggctccacattcagtgacagcacgtcagcagctggaagccagcatcagtgggggtgtttacaccatgggaatgggcccactccacagactagcgctgtaccaagagagccagtttggtttctgggggtcgtggggttaggtcctcatgcttctctcggacccaccccctagaaatgtccccacccaacccccactgtagcctggatggacggggatgagctctgcggggctcccgcctgagccatcttgtcttcagctgcgtttgggctctgagctccagccatgctggctccatgacccaggatgggattcatgcactaacgtgaagagagcaatctcctgaacagaggaaggagtgggccctggaggagccgtggccctgggtggtggcaccaggcagctgcaggaccaggggcagcggtgaggcacgaagcctcagactgggtgtggttcccactcgttcttgccggagaaacctgccttttcaagcataattcaatcaaaaggccttttgtggagcccaaactagaaggctttgggttccagcactgtgcctcagtttcctcatctggagcataaggatgggaccgtcactgggtgtagatgtggggtcccgggaggcgtgcaagggccatgtttgggcaggtgcctggaatggaggaggccttggtaagtaagcattcat

SEQ ID NO: 189185 - DNA, 309 bp, Homo sapiens
atttccagtacatatgttcatattatctatgaatagcaacagttttcaatccttacaatccctatatcttttatttctttttcttgtttgtgtaactgttctcatgaggccctccagtataaagttagatagaactactgattgtggcatccttgtattgtacctggcctcaaaggaaaagctttctaatatgtcattattaggtatggtgttcactgaaggtttttatggttattctttattcttcataagaattatcttttcatgtaaggaagtttgctaggggaaggaagcttgctagggtgctaa

SEQ ID NO: 189186 - DNA, 319 bp, Homo sapiens
aaaaagagggaacaaccaaggtaagccaggagaaagatggtaaagacaaaaaagcaaagacagttgatctctagacagggctgagttgaggacaaggaacttgaaatcagatatatcatgaaattccactgtctaagccaacatactgtgctatttaatttcagattcaagtgttgttatatttacctactttcatattttagcaaagttaagcaaatcatttacctatgttttcttcctacacctttagcagaataaacaaaatgactggcatatcttaagggaccagatggctggtaatactaaacaaccactcaaa

SEQ ID NO: 189187 - DNA, 279 bp, Homo sapiens
agatgcaatttctgaggccgagtgacctacatagagaatacatatttaaagacaaaaatatgagtagagtttcctcagttgcctgaaaagaccaaagagaggaatttttaaaaaatcatttctgaatttttccgtagtctcttccaagtctgggatttgggtttaatagcttaatacaaacacagaaattctaggtggttagtcaggagacccccaggttctagtggggtcacagggaggaatatatagtaacctctctgagcctcagttttctcattt

SEQ ID NO: 189188 - DNA, 130 bp, Homo sapiens
actgaggaatggccatcagggaaggccttggaaagagatgggtgctcactgtgtttcaaaagatgagtggattctggatctctaagttgatcattgtccacatatggacagcacattggatcaggagcgg

SEQ ID NO: 189189 - DNA, 121 bp, Homo sapiens
ggatgataatggcattgtagtaacagaaaatgaactctgaaaaattagtgtgtaaaatgatgcctgagtcttgctttaaactagtctagcaaaaataagcgaaggaaggaaggctggaagg

SEQ ID NO: 189190 - DNA, 463 bp, Homo sapiens
tactactgccaagttcataatcccttacccacaattccaacatccaaaaagctctaaaaagtaaaaagttttctcataacacacttggaagcaaaaccccaaccaaagggaggctatttatagtatttaccctacttagggaaggtattttcttttctgaaaaaacactatctttgattagagaacaccacctcagatcctgataggggcgttaatgtaaactttccaaaatccaaaataattctaaattctaagacacatctggccccaacggtttcagaaaaggaaatgtgaatctctaactcattccacagataaaggacagtgggcttaaattactagttgttgattacatctctattaagtggtatttactctctgaaaaataaggcaacttattaaaaaaaattggaagcaactttaaagtctgacattaataaggaattgcttaagtaatttatag

SEQ ID NO: 189191 - DNA, 415 bp, Homo sapiens
gcagcatgttaaatgaaagctgccagtccaggacaagtcagaaggttgtgcccctatgactaatgaggtgtgacccttatgactttcaaaagagtgtcttagtaacatcagtgccaagatttggttctgaaatacagttcccacctctaacatctgggcctttttgtaactcatgctacctttgagtgggaccaaggtggtcagctttgatttagcctctcctgttctgccccatcagccctggactccggccacttctcagaaccagcctctgccacacacaccaagctttggctcattccccataatcctccaggatcagccctggcactccccctcccactctggttttcacttttttgttcctgtttaagagctgagagttcctgtttttgtttttctcctctgtctctgc

SEQ ID NO: 189192 - DNA, 606 bp, Homo sapiens
gattgaaagtctgaatattttaaatgatgggggcagagagaggaaatgagtgcttaggaatccatttagttttatttttttattttcaaaattaagtaaaataggccagtgagtcaattttagtttggaagggaggggttatcttggcacaagttttaaatgagtatcttagtcatgtagttgtgatgtgtatttttaggactacccaattacttaactcttgttttctacccttctaaaggtggaaacctcagttttatgcttgaaattaggtcaactttgtaggaaatgggattgatacaggaatgtttaatattcactactgtatatagtcactgagtacctaggaaaagcacgtttttagaatattatgtaagtgcggtacccctaccaactgttaggcttcatcttttgtggtcagcctaccctatacttttcagatggaggtatttaaaattactaagaaaacatgcaacttattagtaacaaagtggaaaagatattgctgtgtttatgatgaagcatattctctgttgtcaaatataaatttttatgcatactggaaaaattagttgtacaaaattgaatgtatgtgatacctttctt

SEQ ID NO: 189193 - DNA, 336 bp, Homo sapiens
gcctctctgggtcttcgtgttcttattggaaaagtgaggggagtgcatgtcattttgggtgaagtggtttgacttatgtcaccatcaaccaaataacgcgatgggaggaaggtccaggatatagtggagatggaacgtcttctgaaaaatccccttggtgctgggatattgaatgtgctgcttacttgaaatgtcttggtaatttaaaatgatattatttgcattatcttgaattgagacctttagattagtaaacagtcactttatttgaggctttgttcctgatatctaaaacacatacaattaaatgctaccatttaaaagggacagtttaga

SEQ ID NO: 189194 - DNA, 148 bp, Homo sapiens
aagttcaatagccacacattaattaatgtgtggcttatttgaaacttttcacatgagcccttcactgtgaacccctaaactgcaagcattttggataagggggactcaacctgtcccacattttgtttacccatacagccatttagta

SEQ ID NO: 189195 - DNA, 150 bp, Homo sapiens
cccccgaaagtacctgttatttactatgttaacaggttttatttgtattactgtaaaatgtcagcaagcttatattcataggaatcttctatcttctatgaatttatcaagctattattgcctaggacttatattacttttgctggcaag

SEQ ID NO: 189196 - DNA, 345 bp, Homo sapiens
ctacatgaagggcacacatctgaagactacagcttgatttttccatgtgtgcatccacctaaccaccactaaccacccacctaaccaccactaaccacctgcctaaccaccactaaccacccgccaaacaaccactaaccacccacctaccactaaccatccacctaaccaccactaaccacccacctaaccaccactaaccacccacctaaccaacactaaccaccactaatcacccacttaaccacttaaccaccactaactgcccacctaactacctgaccgtccacctaaccaccactaaccacccacctaaccaccctgccacccacctggtcacctaac

SEQ ID NO: 189197 - DNA, 369 bp, Homo sapiens
tggccctccctgtttatgggtttcatacctgtaggttctgcatctctggcttccacatctgcagatacaaccaactgcagattgaaaatatttgggaaaggccgggcgcggtggctcacgcctgtaatcccagcactttgggaggccgaggcgggtggatcacgaggtcaggagatcgagaccatcctggctaacatggtgaaaccccgtctctactaaaaaaatacaaaaaattagccaggcgtggtggtgggtgcttgtagtcccaactacctgggaggctgaggcccgagaatggcatgaacccgggaggcggagcttgcagtaagccgagatcatgccactgtgccccagcctgggcgacagagc

SEQ ID NO: 189198 - DNA, 386 bp, Homo sapiens
tcatttcagaactgacataaaagaaggtaagtatgggtctgtgtacaaacgagtaaagaccaattgcaaaatacttcaatttgacacaaactaggttgaaagtgaaccccaaaggaaataccaaacattgaaaatgacaaagttcaacttgttttgaaacaggcaataagtgaagaactgtggaaccctaacaaagaaatatatttaaaaagtgactcaccatgcaatgaatttgcaatatataaatatggcgcgcaattgagcactctttgcaatatatgaagttcagttcagacagctattctaggagagtatctcactgcagtcccagggaggcacaggtaaccaccagaggcagaacacatttgggtgagctggcaactcct

SEQ ID NO: 189199 - DNA, 132 bp, Homo sapiens
cacgggctttatcagaagggttctcagtctgactttggttgatttagcaacagcagtgtactgaggataaatctggtgtttggtaaagtcctcctgtgtggttggcatgctggatgaagggcaggggatgtg

SEQ ID NO: 189200 - DNA, 303 bp, Homo sapiens
aaccacttatgaggagaaagtgggttctctgctgtatgccttacacaaaaataaattgtatttgtaataacaatataagtgtaaaatataaaactgttagaacaaaatgagggaaaatatttgtataatattaggagaagaaaagctcttttttttttttttttttttggaaaaaagtttttttttttgtgccccggttgggaggcaagggccggaatttggtttaattgaacctttggcttcgggattaaagcaattttttttttttaaccctccggagtggtgggaattccggccttcccc

SEQ ID NO: 189201 - DNA, 461 bp, Homo sapiens
ttgataatctatggataatagcctgcactttgcaagctcactgggaggcgtggttacagcagaggtgttatgcctatcacaatgtgtgacaggtaggaagcactcagtgaataggagctggcatcgtggtctcagagcaacacagcctaaaacatcattcacatacacaagatttcttaacacaaagatggattgtagattggtaacttcagagaactcaaattgtgaataaatgccaagactcccaacttcctgggtggagcagcgtggcacaagcccaggaatcaagctgcccattccctgcagtgtggtctggggctactcacccaccttctttgccttgtccttgtcactggccaaggccattatgatcctattatactctagggttcctgggaggtgaggaatggagacattagagtccatattttgtgcacagaagagggactgatacatagtaa

SEQ ID NO: 189202 - DNA, 239 bp, Homo sapiens
ccccagcagatcccctttacatcctcaggagcagaaggcctcagcacggctgcacggtgtgcattcactctgtggatacctgtgtgctccacaacagcagtttccctggacttctgtggccaacgtgtgagcccacgttcggcctcccctgtggattggggtgtgagcccacgttcggcctcccctgtggattggggtgtgagcccacgtccctctctgtgccctgttgtgtggctgtg

SEQ ID NO: 189203 - DNA, 495 bp, Homo sapiens
aaatgacttcatcaactaattgtcccctcacatttcagacccatcttactctctcacaaattgatccatattcttcctgatcttttttctcctgtcaaaagctaaccatttcatttgtattttaaattttctcaaaaccttgcattaatatattgcctagatatgccacacttgcttcttagagaacttgcttgctcttagtcatgaaaaaggaacccctacctgctattcctgcagccctattagcacctaatagaaaatcctgcacctagagacatcaaaaaacctgatgttctaaagattccacaagcaactttagagctgtgtatgaataacacaactcctcaagaaaaacaaaacattaaaccactgttttccataatgttttcaaagtactcattagtattctaattgacttggcacacacaaataaaaaacacacacacatacaaaaggcaccaaaggtttttcattctttaaaccagcatcaagaag

SEQ ID NO: 189204 - DNA, 504 bp, Homo sapiens
tgctgggattacaggcatgagccactgaacccagccagtttcagaatttctaatccctgggagaaacatttactaagtagattatagcatttatatatagctctttttgtctttagacttgccgtactcagtccaaggtactggtaacttagattagttcttttcttccccacttcctttagtgggtcatgtccagttaagtcaggtttatttgctagtgtttgatgccattttggattctcccacatgttgattgtttgtgtgtatgtatgtttggagtgaggatgtgtgaaacattactatggttctgggagtcagagctgtacagaacggtttacaaaatgtcactccctcatcacccctacagtgcccttctcactctcttttttccaccgtcttcccactcacactctagtttctagtttatccttgctgtatttcttcacaaatgagcagatacagtacatgtatatattcttttgtctcccttttttgtttgtctgt

SEQ ID NO: 189205 - DNA, 350 bp, Homo sapiens
tgctgccaactcacagcaggggcaccctgtgggggtccaggaagtggccagaaagccaagaccctctgataagcctgatattttgtggggagaggagagaagaggactgatctatactgaaaacacaaaaatgagttgaattgatatttttaaggcagttcctctgtggaatcaggatttcaatgtgagggacacacttaactctagggtccagatagaaactactgaatttagtgtttctttctttttttttttttttttttcagagaatggtcacatattctcaaaagcccaattatagaacaagctgaaagtcaagggagaggtcatctccagaaaagttttcccct

SEQ ID NO: 189206 - DNA, 282 bp, Homo sapiens
agccgggacttccctttgcccttctccggctgggccgtgggggaagcgcgggggtcaccagatgaccgctcggggcctgggagggaccctgctgagtcagcgccgtttctcatctgctgcagagaatcccgcggtcagggcggagagaatggcggctccttccgcattcggccgccccgtcgggaacgcatgctcctcatcggcaaggctcctcattagctgtccacgtggacaccacaagcccagggctctcgtcccctcccttcctgaagcaccatgctc

SEQ ID NO: 189207 - DNA, 530 bp, Homo sapiens
ggaaaagattacttctataattcatcaaggaaaatactaacttgctcccccagagagctgggggaaaacacattaatataaatataattgaggagtggaaacaaagtctaggaggagttaaagcataagtatcagcctggatgtgaattctaatataggaattagaattcctatattaaaaattgtattagaaacctttactttcttgtgatttctgttagttcagtaagtaacctttcttggaaggtctactaattcctttcaaaaaagatatttattttatatcttactataatatactaagcactgttattgctagggtgttttgaaggggcaggagatggtatttaaaactgagttgcagttctaggcagttaaataaaatccactgaccagaaaaaaatatgtaaaatgataaggcaggataagtattcactgccaaaaagtcaacaaagaaaatagtaaggatttatgttcagcaatccctgagattaaaatttaaaataaataaatagggatagtacgatttg

SEQ ID NO: 189208 - DNA, 293 bp, Homo sapiens
ctgattctagaggatcccaagcttgattgcaattgaaaaaataaaaagaaaaaaagaaaaatgagatggtgtggtaaagatggaagagtgatcagtggtgatataaaggagtgatctactctggctaaagagggactcaggaagactttacagaggagtattcaaaacgggccttgaagggtgaatagacaaggtacatggcacatatgaaacagcttgatgcatttgggaaaccacaatttgtttagaataattacaccagaaatatgggcaaatgacagaagaaactagag

SEQ ID NO: 189209 - DNA, 295 bp, Homo sapiens
ctgtgtctttacattaaaacatatttatttggaagagaagcagtggggacaatttattacagcacacacacacacccctcacctgttcatagattacttcctatcctgcagtacatttactttctgtctatatttctaaatggtgtcatttttttctgaaaattagtgaatttccaaaatattggttttcattctgtatgtgcagcataaatatttacaaatcatttttcttttttgccagccttacttaaaatgcaggtttattgcctagtgttctcaatgtatttattaatgg

SEQ ID NO: 189210 - DNA, 586 bp, Homo sapiens
cgacaggccatgtggtatcagctcgttctgccacactcccgaagttgctgctgggcacatgcttggtgccagtccctgtgctatgagtatagctatgagcaagactggcaggctcctgcacctgagggtgctcttagtccagtagaggagacatagaagcaagaacgatacttgtagattatagttggggctaggaggaaaataagcaggatagatgcttgtgaattactggcggggcaggggctccactttagagggcctgagtgcggtgccaggacacctggtacaagaggaagtctttgagaggctgatgtttaagctgaggaataggggaggggctggagtgagtgtcccacccagaggaaagagcaagtacaaggtcgtgtggaggaaagggggcctgccaaggaggtggctgagtgtagtgagcaggacagtcccaggtgaggtgagctcttagagccgtgggaggagcagagctgaaggcaggagctcagtctgagggcaaggggcttcttccttgggggcctgtgggcacaccccctttgcccagtactgttcttgccaaatcaccccttgttcaaag

SEQ ID NO: 189211 - DNA, 253 bp, Homo sapiens
tttgtattttgaaaacaattctggctactgtatagagacaagagtaaagtgggtaaggaatgatggatgcaggaattctgaacatgaagccttcatccaggtgagagattatggtggcttggcctcgggaagtgatggtggagatgaaggtaattgggaagatttgagaagcctttagtgcagaatagacaaacagaacctgatgaaatgaggggactgtcgggtgtcaagaatgtagagtacactggaatgg

SEQ ID NO: 189212 - DNA, 307 bp, Homo sapiens
cagtcaccagtcattgtcacattaatccaaggagagaagtcaccaatattcaacttacagatttgctgaacacttgcaaagatttgcatgaggttctactggggatacagcaatgaaaacaatcacctatagaaaccaaaagccagtgggggaaagaatgtattgcagaagtaattaagacaagcacgattactattttgtatagagggatagagtggaagttgctagatggagattaattttaccagagtgatttgtatgcattgaagtatgagtcaaagctctagtaggataatcaggaaacaaa

SEQ ID NO: 189213 - DNA, 382 bp, Homo sapiens
agaggatggccactgaggggttgtctgggtcatgggaagaatccttcatgaataagattaatattctcatggaaatgaattctcactcttgtgggactggattagttcctgagagagtgagttgttgtaaagcaagcttcttcctagtgtttgccttcttttcactcattccctagcctttcagcttctccaccatgttgtcaggcagcacatggcccccaccaagagctgagcagatgctgatgccacattcttatactctcaagccaccacagtcgtgagccaaataagcttcttttctttataaattacctggactcaggtattctgttatggcgacacaaaacagactaagataggaaagaaagaactagtcagctaa

SEQ ID NO: 189214 - DNA, 489 bp, Homo sapiens
gctaaaactgaggagagactcctcctaacccattctatgaggccagcatcaacctgataccaaaacctggcagagacacaacaacaacaacaacaacaacaaaaacaacaaaatttcaggccaatatccctgatgaacactgatgcaaaaatcctcaacaaaatactagcaaacccaaaccagtaccacaaccatgtaggctaggctttattcctgggatgcaagtttggttcaacatatgaaaatcaataaatgtgattcactgcataaacagaactagaaacaaaagccaacaacacacactggggtctacttgatggtggaggttgtgaggatggtgaggattgaaaaacttcctatcaggtgctatgcttattacttggatgatgaaacaatctataggccaaacccctgagatatgcaatttactcatataacaaacctgtacatgtaaccctggacctaaaataataaaaaaaaatctttaaa

SEQ ID NO: 189215 - DNA, 159 bp, Homo sapiens
tcacctagtgcccctcagcatttacgagaaagagtttatttcaacaacacccaagttagggtaaaactccctacctggtgtctccgtattagcatggcaactcatcacaggggcaaaatcctgctattcctaagcatactaatttaagaaacttttgtt

SEQ ID NO: 189216 - DNA, 269 bp, Homo sapiens
gcctctggcccactgagaaagtggctaatgttgtaacatgactgtctgggctgctgtagattgggtgatctgtagctcacagctctggaggctgggaagtccgaggtcaaggtgcctgcagatctggtgccccaggacctgttgctcacagacggcaacatctcactgggcctcacgtggcggaggagcaggagggctccttcaggccttccaacaaggacaccaaccccggtcctgagagcgaggcctcccaaaggccacacctttta

SEQ ID NO: 189217 - DNA, 340 bp, Homo sapiens
tgatacgaaccgagctgtaacctcctgggataggatgtcctggggacagcaaagccactgccaccctacagagcagttaacctagaacaaaggccctatggccttgtgcccaggctcaaccccttaagacatcctttcccaggaggagcctttgggcttcctggagcacccaaaatgcttctttgaggtttctgatacttagagtagggggagatgtttggatggctgaattataacccttcaagtgttaagacacaagctgctattggatggagagagtctccggagtattctctctggtgttttaactttattaagttattcatacaccacagaattc

SEQ ID NO: 189218 - DNA, 290 bp, Homo sapiens
tctagaggatctcgatgcatgtggcagaggacagtccagacagcagcctgccagaaggcatttctcccattatataccgttgtaaagagaaactgtaaagtctcctcctgaccatatatttttaagtactggcaaagcttttaaaattggcacacaagtacagactgtgctcatttctgtttagtatctgaaaaccaggatagaaaaagctccatgagcagaggagcccatgtaacctttattatggctcaggccttgcaaaaagggctatagagtgttgagtgacaaag

SEQ ID NO: 189219 - DNA, 196 bp, Homo sapiens
agcctgaatgcggagggctccccatgctgtctttctagccagctcctctgtgttgagctgtagccctgactatgcaactgccgactcatcgtttcctcatggcattgccacagccgtctccagctccatggggctgagacctgaagtcatcccttttccatctgtctgctctgcctgtcttcccatctctattcct

SEQ ID NO: 189220 - DNA, 120 bp, Homo sapiens
tggggattgatggagcaactgggtagaaggggaggtttgatttttatggtgtatgagaaagtacaaagtgtctacgagtaaccgttcactgctattcatggggctgggtataagcaagca

SEQ ID NO: 189221 - DNA, 266 bp, Homo sapiens
atcacttgaacttgggaggcggaggttgcagtgagctgagatcgcgccactgcactccagcctgggtgacaaagtgagactccatctcaaaaaaaatatttagcactcagggaaatggatttctttgtaaagccctgaagccagctgatcccactgagcttcacactactgctattctgggttgctaaacaaagtgccattccttttctaataatttagccctctctccaactctgctcgtactcttcttggatttttttttccta

SEQ ID NO: 189222 - DNA, 449 bp, Homo sapiens
taaatgtgtcttaagaataattatatatcctaacaagtgaccacatccttcgatgtgtggatctgatcctccttcactagaaggctggggataaggcagaggcaacactagcacaagtatgcattccctgatcccatcatgaaacactgaagcatgccaccacgagctgaggctctattttaagtacctgagatagttaataaaacagaacatcctgccttgaaggagtttctgttcacatggttgcatcaacacagaccatgacatttgcaaaggaacatctcttgggtcatcgggaaggcagctggtcctgtagctcatatgccttcaagttagtttaaaactatttcaatctattccaatttgtctagttgtttcatgatctaacaagaattattagaaccttcagcaatgcctggcttggaattccaactgtcctctttaagaac

SEQ ID NO: 189223 - DNA, 547 bp, Homo sapiens
tgaagaatgaccttcatataatggccacacagccacttgggccaccggagctcaccgtgagacacactcaccatctcgtcttcatgtctggtgctccctttagttttctggcaagaagctagggagaaggtgacttgagctcctcgtgtgttttgatcactcaacaaagaagacaaaagggcgtttcataacctgacagtgggagagcacattaaaaaggagctgagctgacctttgcactgtctatgaagaatgagtttcctaaactcatcatagcaacaagatataacgggggttattaagccactaaaactttttctgaattcatatgcactttttcccaaatagaatgctgacgacaaataattttatcaatcattaaagaagatcccttcagaacctctccagggaaatacttgtagcttagttctggttagcacgtaatgccacaagaatctggcatcatttagaccagccatttattcagatatcaagagcaagagactgtaactgattccctgacctctgactaaaaacaaatataaac

SEQ ID NO: 189224 - DNA, 794 bp, Homo sapiens
actacagctgtaggtcaacactgcagaggcatgtcctccacaaattcttatgttgaagtcctaatgcccaattcctcaaaatgtatccttacttggtcactgcagatgtagtaagttaagatgaggttatatggagtagagtgagcagctaattcaatataactgtgtccttataaaaaggggaaacttggacaaaggcttacaacacagggagaattccacatgccatgtgaaggcagggatctacaagccaaggaacatcaaagactgccagcaaaccaaaaaaaaaaaaagccaggggagaggcatgatacagatttctctctcaccacccttagaaggaaccaaccctgcggacaccttcatcccagacttccagcctctagaattcagagataagaaatcactgggtttaagccactcggtctgtggtactttgttataaagccctggcaaactaataaacttacttacctatagttgtcttaagaatgtaaatatctcgaaggggagactatctttacaacgttatatcttttgtatctttacagagcaggtactcagtaaatatctgtgggaccaatctgtcctactatatgttatgtcatttttctatttcagtaaatgacaactccattcttcctgttgcttgggcccaaaacctggagtcatcccgaatgccttcccttttcccaaaatcctcatccaatctgtcagtacatcagctctacccttaaaatatatccagaatctgaccattttcacagtatccttagctatcaccttgtccaagc

SEQ ID NO: 189225 - DNA, 498 bp, Homo sapiens
cactcctattcctccacctctagctccaatcagcagtagttccacgaaggtgggctaaaccaagaaaaccggcagctttgctgtcaaatatgactaacttgatttggagcagagcatgcataaaacccccatgcatctgggtgttatcaaaaacaattagggaagccatactggttggagcaaacaacagaccagaagaacaggcagaaatctaaccaggctatatagggagtgagaaagctataatgggccttgaaaagctcccacacatccctagtatttggaaggttgcacatgcatgcagtgctgtatgcacactgaagagagactggaaatggctccagttatttacatgtctctggatgaaaatgaggctttttgtaggagacatgagaatgacagaaagtaaaaaccaggacaaacttctatggttagtctgtttgcatcattatagagaaatacctggggctaggtaacttgtaaagaaaagagatttat

SEQ ID NO: 189226 - DNA, 127 bp, Homo sapiens
tgctgagattattgagtgtgagccactagactggaaataccactaagaaaaaaaccttaacatatagagaaggaaagaagaagggaatcaaaatggtacaccaccaaaaaaacaactaaatttttaa

SEQ ID NO: 189227 - DNA, 183 bp, Homo sapiens
tctgtgtttcctgaacttctcaaacccttggaatttcctgagtgacgacgggaatgttatgctaatcaggtaactaatgatgggcctctggatagcttcaggataggcgctgtctctggaaggaccaactatgtggttgggactctgaaccaacctggcctctggagagggaaaggagttgga

SEQ ID NO: 189228 - DNA, 570 bp, Homo sapiens
gtgagccaaaatcgcgccactgcatttcagcctgggtgacataatgcaactccgtctccaaaaaaaaaaaaaaaaaaaaaagttaaatttttacaagagatttttttaaacatagaaatgaagtaactgaagcttatatcaagttggttgtataaccacagagtgagaaattattttgagtaacttttggtttttttggagatagggcctggagtgcagtggtgcaatctcagctcactgcaacctccacctcctgggcttatgccgtcctcctacctcagcctcccgagtagctggaactacaggcacatgccatcgcagctagctaatttttgtgttttttgtagagacagggtttcaccatgttacccaggctggtcttgaactcctgagctcagacaatccacccgtctcagcttctgaaaagtgctgggattacaggaatgagccagtgagcctggccatttgagtaactttatagtgatttgattgttcaacctaatcggatagactttgcatcagttacttcttgtcacaataatgctgcttagtaaaccatcccgaaaggta

SEQ ID NO: 189229 - DNA, 458 bp, Homo sapiens
aaagggggagacttaaaatattaccattttccacttgcttctgtagttttaaaaagctatatgaatggttacagataatgataccatttaaatgaggttttatatgttttgttgttcttgagaggagaaaagaaactagtaatttaagctaaccagaaaatatagggaagggaaaaataaacaagataacacaaggaaaactagttatatcagctatggccatgtaattaggtcaaacatcttttaaataggtgtgaatgagtcagaaagcagaatccaggttttggtcatctgccagagacccatgtaaagtctaataacataaaaaataaaaatgggggccagacttggcagctcatgcctgtaattccagcactttgggaacctgaggtgggaggattgcttgagccccgaaaattgagcctatggtgagctatgatcatgctactgtacttctg

SEQ ID NO: 189230 - DNA, 444 bp, Homo sapiens
agctcggtaccccaataaatagttggtcattgatgttgtgtgagtgattttgacagatgggatagtaggtcactttgtgtctaattcggcaccatttttcagagcataaagataaaatatctgagtaagcatattatatttttagaaatcagccaggtgaacaagaacataaatgctcaagggaattgagggaaagatacagatgccaaaacattatttcagcaaagacactaaatggaaggggaaggaaatttttccatagcacagaagattctttaatgctataagtcaccttagaaacaagcaacttacatatcaatctaggaatttcactgctctctagaggtggtaatgagaaaaagagggaagagaagagagggagggaactaaggtggttataagaagggagatgaggatctacaatcaatgaccaacaatttattg

SEQ ID NO: 189231 - DNA, 710 bp, Homo sapiens
ggatcacaggaggggcaggcacgccttctcttcctaatgcctggaagagagggaaacctggggagtggggagctggtcacagaaacatgagagagttggaactggcatttctggactactggcttgaaaaggttctaactgaaaacagagaggagggagaacatgccttgataaactcacaaatctggagacacgaaagtagctatgtgtaaggtgaacagctcatttttcgcatacagccactgggaaagggcagagaacacagaatctggagaggaacatagagcaggggccacaaacacgggaatctgagatttgacagtggatgaaaaggtggctgcagagttgtccctgagctcaggggagatggaggtggcaacagacgggctgcctacttcccaagactcagacctgtcagtactggccagtgggtgaacatgaccaagaacaggccaaggacagtgatgcaagtaggcctagcacagaggtccttggtgagaaaaggacttccctgggccgagaactacatcaaatctcaggagaggtcagtgggatgataaggacaggaatcattaagtcctagatccagaggcttaggagcatgtacaagattcacatgtgcaggccttgtatgctttatggaactcatgatgacactcatacaaaactgtgtccatttcacaaagctcatgcccacacactgctgggca

SEQ ID NO: 189232 - DNA, 326 bp, Homo sapiens
tactctgagcctgtattggtgaacgcgaactcaggggagatggaggtggcaacagacgggctgcctacttcccaagactcagacctgtcagtactggccagtgggtgaacatgaccaagaacaggccaaggacagtgatgcaagtaggcctagcacagaggtccttggtgagaaaaggacttccctgggccgagaactacatcaaatctcaggagaggtcagtgggatgataaggacaggaatcattaagtcctagatccagaggcttaggagcatgtacaagattcacatgtgcaggccgggcgtgatggctcacacctgtaatc

SEQ ID NO: 189233 - DNA, 643 bp, Homo sapiens
gtcaagaatagtcacggcaatcttaaaaacgaacaaagctggagtcctacaccaaagcctataataactacatcaaataccaagtcctgtagcaatgattgagagtaatccacacagagtggtactgctacagtaacggacaaaacagaccaaaagaaaagaacaggccgggtgcggtggcttgcgcctgtaatcccagcactttgggaggccaaggcaggtggattgcttgaggccaggagttcaagaccagcctggccaacgtggtgaaagaaaaaaataaagacagacaatagcaattattggtaaagatataccataagtgaaactctcacataatgctgttaggaatataaaccgggacaatcacttcagaaaactgaaagtgtctaacaaagctgaaaatacacaactagatgactcagaaattctacttctaggtatccacttaacagaaatggatattcgtgttcaaaaaaagtataattgtaagaagcataatttgtgatagccaaaacatgaaaacaacctaggtgtccattaacagtaggagacatataaattgaggtatattcttaaaatggaatgctagtcggtcatggaaaagaactacaactatatacacatgaataaatctctcaaa

SEQ ID NO: 189234 - DNA, 220 bp, Homo sapiens
gtggaaacaagaggtgcattgcaacatagcataaaaccagctcccagaagaggaagcaattgtattttaacgagaaaggaatgagtttttgtcgggaaaccagcccatttcgggaaaccagcccatttcgcaaaaatctcagtaaaatcttggtacagtcattgctttctcaacagcaaaaagttaatcaggttctgtgtctccccccacccaccaccac

SEQ ID NO: 189235 - DNA, 315 bp, Homo sapiens
ggcacctggttcgatgccatcaatcctagatatttgcagcgggaactaccggggaccacagcagacggcagtgaataaagacaaatgaaattaaagaccctcttgggtgtgctgactgcctaccgcagggagacttcattaacagggggcaagggatacaagactgaagaaaacacaaaatagaacttattttcaaaccacagcagtttcaacagttacccaagcggtgtaccgaaaccacacacaggactgactttagcaaaaacaatatgaaccaaatggtttaccacagtatgtgctgttaaaaaaaaaaaa

SEQ ID NO: 189236 - DNA, 683 bp, Homo sapiens
acaagtcaatcagccatcacgaagtgctgctgtcagcaaggtctccatggcgtgtgggaggacacaaaggagaggcatctaaattaagctggagtcaagaatgaccataatgaggctcctgggaccaaccataggttaaagaaaaaccatctggtgctgagaatccaaaggcagcgggaaatcctcaacaggaactggagaggttggagaaataatagagcagaagccacctggaagcaggggcccaaacaacagggcaggttgttagctgcattgcacatagaagggtagaagaggaagaatgattttacttcttgacaaagaagaagaaggaaagacgtctgcagggtaagcatgtctgggagtccctgccacctgctgccattcatttaatcatccctgggagccggactgcaggccctgtgccaggctgtcagcagcagaaactggcaaggagagagctcactcagcagctattagataccagggcctgcccaccagttacagtgtgaactggggactggaggaacaggaagcaatggctgatctcagcagtcagcaggaggaaaagtaaggcagaactgaaatgtatgatgtgtttactttgttatcagcactgtgtcatgctaagtacctttgaaatgtctcttcttctcattcctcgaaatagtcctactaagtag

SEQ ID NO: 189237 - DNA, 126 bp, Homo sapiens
gggagggacagaataaaagagtggagatggatacatggtagaatgtgaagcaggccgagtttgagtgtgggtgctacgagggagaaggatgactagagatgactgggattacatgggcgttataca

SEQ ID NO: 189238 - DNA, 249 bp, Homo sapiens
aattgctcagggtcacctaaggcaaatctgtatctagagattaagaggaacatatcctagggttggactgagctgtggtaaatcacaggattatataactctgtactgtgttctgactttcgtaacttggctgggagaagggaagagtgagcaagccccctgccctcccctaaagcaggcgctttgcctaaagccatgcaggactgcagaaggcagctgcagatacagttgttgtgtaacacgaggtag

SEQ ID NO: 189239 - DNA, 478 bp, Homo sapiens
attaaatttttgatgaacatcagggtcttcaatgaagaggatgatgataattgctatcattgattgagcacttaccatgagctagaccctgatctaagatctttgtggctgttaaatcttcacaatagctccatgaggtagatcctacgattatccacatcgtacagataagtgaatcaaggtacgtggaggatagcattctgtctactttcctacaaaccattaagtgcaaaaatgggatttgatctcagccagtcaccgtgctgatgacatctttcaacctgctgggctagcaggatattgagaattccaggagaaacgaggtaagtagtatattgtaagaggagaaccttggagggcacaaggagaaaacagcttcattcttttccccaccatgtgcttgaacctgctccttggaactagttcccctctgccctctgggtgtgtctagggcaggtcccctgatgcttctagtcac

SEQ ID NO: 189240 - DNA, 114 bp, Homo sapiens
gaaaatcatataataaagtataaactgaggtacatgaagaattgttaagagctttaaaactttgatctaaccagagaagcaaaggaggctgaggcctcctacttatggtcactg

SEQ ID NO: 189241 - DNA, 908 bp, Homo sapiens
ggtggtacggcccggagtaacgagtgcttgaactctgttttcctccctcccgcttacgggctgctctgttcccaacagtctttcataggatttttgctaatggtgagagctccctctgccccacttggggctctgtttgtgctccctctgctcccttggcggctgcccagtgcatgcagtcgtgggagcaaaccctcttcccctatcttccctgcctaattatgcctgcttagcttctgccctgccagccctccgcctgcttgccccttcataacctgcttgtttcctgtggattctgcctggctggccacttacctcctggattcatgttctccctcatcatcaggctagttcccagatcatactgtgctcccagattctctgtgacttgtagtcattgtttatgatctgagtgagtccaaattgggcctggtcctggttcctcgttcagctctgtggcagacagtgttgaggaataagggggtagaacaggagtctaaaatgttttggtggattaaaagtggaacagattcaagggtattagctcaattctgagctgttttgagtttcactcagcaaaggtgggtaagaaggaggctacctcctgagctgtatgttaatacttcttatccttatttatccaagttcctgaggtctccaattgtcccagattaggaagggctgcctgtgtttttatgttatttgcagggtggatgaaaaaactaaaaccaaatattttcatgtgagcagggattagaggtacctgggatttagggaaggtgaacgcagtacaagtgaaaatttttccttaaacttcattgcttctagaccagcctgaagcccctgtgtatctgttaatttagtctggtgcttttgttgctcctgatttagggacattagatgagaag

SEQ ID NO: 189242 - DNA, 1155 bp, Homo sapiens
agggggtaggatatataatcttacacctttttgaagggaaaattggggttaatacagagatactgataagaggctgggaaagggcaagagataggtttgaggtttgatttgagtcctggggccagaccctgccagaggaggttccaggctgttcctgctgtgagtgctttcgtttgctgtgtattgtatgcagtgtacaacatttctgtgtgctgtgtctgtgtggtatttgtgtgtccatttgtctggggcttggctgctccatcgctcacaacttttctctgttttcctccctcccgcttacgggctgctctgttcccaacagtctttcataggatttttgctaatggtgagagctccctctgccccacttggggctctgtttgtgctccctctgctcccttggcggctgcccagtgcatgcagtcgtgggagcaaaccctcttcccctatcttccctgcctaattatgcctgcttagcttctgccctgccagccctccgcctgcttgccccttcataacctgcttgtttcctgtggattctgcctggctggccacttacctcctggattcatgttctccctcatcatcaggctagttcccagatcatactgtgctcccagattctctgtgacttgtagtcattgtttatgatctgagtgagtccaaattgggcctggtcctggttcctcgttcagctctgtggcagacagtgttgaggaataagggggtagaacaggagtctaaaatgttttggtggattaaaagtggaacagattcaagggtattagctcaattctgagctgttttgagtttcactcagcaaaggtgggtaagaaggaggctacctcctgagctgtatgttaatacttcttatccttatttatccaagttcctgaggtctccaattgtcccagattaggaagggctgcctgtgtttttatgttatttgcagggtggatgaaaaaactaaaaccaaatattttcatgtgagcagggattagaggtacctgggatttagggaaggtgaacgcagtacaagtgaaaatttttccttaaacttcattgcttctagaccagcctgaagcccctgtgtatctgttaatttagtctggtgcttttgttgctcctgatttagggacattagatgagaag

SEQ ID NO: 189243 - DNA, 246 bp, Homo sapiens
tcaggacacccggtgtggattaaggaggtctatcgcaggggtctacacatcaggacacccggtgtggattaaggaggtctatcgcaggggtctacacatcaggacacccggtgtgaattaagtaggtctccacaggagtctacatgtcagaatacccggtgtgaattaagcaggtctccacaggggtctacacatcaggacacccggtgtgaattaagtaggtctccacaggagtctacatgtcag

SEQ ID NO: 189244 - DNA, 397 bp, Homo sapiens
ttgtgatatattagaactgtattgaatgatgagacttcccaaaagtttaaaacaaaaaaaggaggcagaagagaacgaggatataaatgaggacactctcgctgaggacacatcagctgttagcagtctgtctctgtgtaccgagctcaagaactgtgactttggttggaagttagaccttttctatccagcttcagacatggtaaccttcacataagctgctggatttgttctaccagaaatttagtctgttgtgtgactccagccactttgcaactcaagattattacttgttcaggtttctttcattaaatagctaaccatttaacaactattatcttcttagggtcgactgatggttacccatacagtatatacatcatccatatcctttcct

SEQ ID NO: 189245 - DNA, 501 bp, Homo sapiens
aactggaagtctcatccattgctcatggggatgaaagatgatgccacattggcgagcagtttggcaaagcttcagatgctgagcatgtacttatcatatgagccagcactcccactcccaggttcttacccaagagcactgagaacaacatgtgtgtgcacacatagcaggtgtttttctttgctagagcttccacaagcaggaaccatggatggggtgttgcaacaagaaatgtattttctcacatatctgcaggctggaagtcccagagcacggtgtctgcagggttggtttctcccaaggcctctctccttgccttgtagatggccacctgttctctgtgtcctctcacagtcttccctctgtctgtgtctttgttataatctccccttcataaaaggacaccagtcactctggattagggctcactctaatagcctcatctaacatccattacctctttcaagaccctgtctccacatatagtcacattctgaggta

SEQ ID NO: 189246 - DNA, 319 bp, Homo sapiens
gaatataagaggaagaaaattaatctgatcccagtgagaaagccctgagcacagatgtaaaagaagaaagcagcaaaattgtattgataatcctatttcctgaaatagatctctcatatgaaatgtaaggagattttagaaaacagctattacctattctgagggagattagacagggacagtgcagggggaactgggtgcttcatcatatcagattgtccctggaagcggaaataaataggcttacaggaaattggattattaagcagaagatcaacaagagaaacctatgtggcaagtgagggaaattaatggagag

SEQ ID NO: 189247 - DNA, 361 bp, Homo sapiens
tactcatggtactttgttcatatgtttgtgtgctggacatggtatttgaaaaattgtttatagaaataattagaggctttgggtgtgatgtctttttccaggtgactgacggcactagccaacgaggatcattttaatacaagttgaagcccaggcgcgctggctaaggcctgtaatcccagagcactttgggagactgaggcaggcagatcagctgaggtcaggagttcgagaccagcctggccaacatggtgaaaccccctccttactaaaaatacagaaattagccgggcgtgatggcgggtgcttgtaatcccagctacttgggaggctgaggcaggagagtcgtatgaacccggga

SEQ ID NO: 189248 - DNA, 393 bp, Homo sapiens
actctaaaatgtttgcgttaatggtaagggaggaacagctggacaaatggccttacggggcaacaggcagttggtctgcaaggctctcgtgctttatcactggcaagaatcaaggcaagagcacagaactgcaggttacactcagaaaaggatggcgttaactcgtaaagaacacacgaataaaatgtttctgcagttttgggtttcataaaaccctaaatccggccgggcacggtggctcacacctgtaatctcaacactttgggaagccgaggcaggcggatcacctgagctcgggagagcatcctggccaacacagtaaaaaccccatctctactaaaagtagaaaaattagccgggcatggtggcgggcacctgtaatcccagctactc

SEQ ID NO: 189249 - DNA, 130 bp, Homo sapiens
gagttaacaaaaccgcttctctttctgtacgagaatttgctccttggttaacgctggctctcatcccttggaaacctgataaggaaagatgtcatcagtattactaggcaacattgcttatagtaaaaat

SEQ ID NO: 189250 - DNA, 280 bp, Homo sapiens
cagcaaatgtgaaaaagcaagaacacccagttctgagtctcagcctggtcccaggcagcggattacaagcacttaaactgctcagcgctgttgtcacacagtcttactaagtgtcgtgggtgtttgacgtaccaagggacacacagaatcacaccaacacatcccactactctctagccatggtaaatgtgttgcctaaaagcattgcaggtttcaccctttttattaaacaccattattccaggggcttgattattagtacattggtgttggatgtcaa

SEQ ID NO: 189251 - DNA, 386 bp, Homo sapiens
catgccctctcctccaccatcagatgataatttcaccaaaatccttctttcatcattctaataacattaaaacttcagggtgccaaaatggccccccaatttagaagtgacaggagtgcacacacttctcatagttaactcagttcaaatttacctaatgctagaaaattagaagccccttatttcagatacactcaacctagcaacaggaaaaataccttaacaagtgaaagttgtcatttctctgaacatatactcctactttcagaagccctagcacttgtatttctacacttgcctaaatcaacattcttcataatcctagataaaaacacgtatctctatgtaactttctgggatatgctgaatcacactaagtagaaacc

SEQ ID NO: 189252 - DNA, 196 bp, Homo sapiens
aaatcagtgcttcaggaacacaatttcacctgttttctgagctaaaggaaactaagacttcccgttcagagcagagttgaatttcagctccattcctggctgccaggtcacgtggggagggcagcaggtgcccggcactcgtcccttgcagctggggccaaacacagttcccagcccacccggcggacgggccggc

SEQ ID NO: 189253 - DNA, 1174 bp, Homo sapiens
ggtaccctgaatattctgggtcaagcgattctcctgcctcagcctccaagtagctgggcctacaagtgcatgccacacgccaagctaatttttgtatttttagtagagatggggtttcatcatgttggccaggatggtcttatctgttgaccttgtgatctacctgccttggcctcccgagtagctgggattacaggcatgcaccaccacgcctggctaattttgtatttttagtagacatggggtttctccgtgttggtcaggctggtctcgaactcccgacctcaggtgatctgcccgccttggcctcccaaagtgctaggattacaggcgtgagccaccacacccggccgacattggttttatttctttcgctgcaacctgtttttagaagtttaaaatagggctattttggaactagttgtttattggacctctttaaatgggttagcgtatttttccttgtatgacacttaactcagcagcctctggataaaaagaatgtgagacacaagtgcattttttttcttgtttatggtactgtctccttgaggtctttcatattagccctctgttccagaaattaaaataacttcattgaactcataagggaataggagatttgtcctaaaatccaaacttggctttgaagatgctacagtgattttaatttttttttttttttttttttttgtggagaaggggaggtttcgcgcctctttgtgcgcccagggctgtggggttcgcaggggcgcgcgcagactctctgggctctccccggaaaccctccgggcctctcccagggttctcaaggcggattcttcctgtgtttttaacgccttttccaagtggggcgtggggattctcggggggctattgtcgcccaaccccgcgccaggggggtaattctgtggggtttttggcggcggcgaaacgcgggggtctccccccggtggtggggcccgggcggtggttcttgagaaaactctccccgacaccctctcaggggtgtggaactcccgcccgagcacttttgggggggtcctccacaaaaagttggtgttgtgggagaataaccgggggggttttgcagcccaccctttggcgcccacgccgcccatggtgaactttatatttttttttaaaggggacccacaaattgttttaacattat

SEQ ID NO: 189254 - DNA, 136 bp, Homo sapiens
ccatcccagacactttgcagaagtgggtgcagtggggactttggacgaatcagaagcttctggctgaggggacctttagttcttctaaccccagactcaggggactccaggactccctacaccctccagttatggg

SEQ ID NO: 189255 - DNA, 298 bp, Homo sapiens
tggagattgcgccactgcactccagcctggagacagagcgagattctgttaaaaaataaagagaagaatattagccttatcagttgagaaatgaaaaccctacgttttagaaaaacatcatagaagactgattcaaatgttttaactgtactactaaacctagaaattctaaagactagtatactggaactacctcccctgccttaggactgactattgctattttcttgtagatagtcactttgtaatgtagtggatggtattcactgtatattgtacctcttcagctcctttaata

SEQ ID NO: 189256 - DNA, 265 bp, Homo sapiens
agagaggagaaaggagacaagctggagagagagagggagacagagaggagaaagaagacagctagagaaatataagacagaggagacagagacacggagagatagagacagacagagagacagaaattacatggtgatagagagaggtggagagagaaacaaggggcccataaagagcagaaggggaaacaggaggagatgggacagagagaacagagagacagagagataaacagtgaggaagaaagaaaaccatgagaaagga

SEQ ID NO: 189257 - DNA, 153 bp, Homo sapiens
ctttagaaaatatccactaaccccaaagcaatgttataagtcttaaaatgattatttaatgattgtactgttactcatttataacctgacattattaggcaagtatttacagataaatcaattataagtgaacccatgagaaaatgtaattag

SEQ ID NO: 189258 - DNA, 408 bp, Homo sapiens
atatagagactgtgggaaaaacagcctgatcttttcagctctagtgaggaatttacaggagaatgtaaagttttaagtagtctatatcaaagaatactataatttcttccgatacatgtctatgattgtgaaagaccagaagttaagcttgagtaggtgaacagataggtaccagaatggccttaccaagtaagtaaacttagaacacaaacaccactccagttgacctgagaatcacatatactacagggagaatagagcactttcttaaaatggagtgagatattttcctctctccttttcataaaaccacagtgccacgtgcagatgatatatattcagacaaattagaataatacatgacttcttttttgaatctttaaaaattgaaattgtccacattattta

SEQ ID NO: 189259 - DNA, 458 bp, Homo sapiens
tgtttctgtatatgtttgaaaacttctacaaggttttcacattgaagctttgtatttttagttattaaatacgcatttaacagaaaagtcacagaattctcacttgaaagaattctatctttcaaaatccttagtacaaaatatagttttccatcatccttactagtggcaactaaaaaaagaaacaaacagatgcttattttaaaatctaggccgggtgtggtggctcacacctgcaatcccagcactttgggaggccaaggcaggcggatcttctgaggtcaggagtttgagaccacggtgaaaacccgtctctactaaaaatacaaaaaattagccgagtagctgggattacaggcgtgcaccaccatgcttggctaatttttgtgttcctaaagtatagtttagtttttattattttgagatggagccactgtactccagccgatagagtgagt

SEQ ID NO: 189260 - DNA, 332 bp, Homo sapiens
atcctctgagcttgctttccttattaacattcaagaaagataaaagcgccctggctcacattagtacccactccaattggggtgttcctgtcagtgttctgtcttgcatgtgacatagccccccaggtatacggggagccattacccacacacatcctcttcactgtcactcagaggacatgcacaggaagtggtggcaaccgccccttatgacacactcagtagttcttgtatctgttccactgccacatctcttccttaaaggcttgaaaatgcatctaagggtaatatttgtaataaaagtgaacttgacagatattaaactaaatttt

SEQ ID NO: 189261 - DNA, 236 bp, Homo sapiens
ctgtgtacttgttcttcaggcaagaaagttttatcgagttttgactgctgtgtgctgcaactcactgtggtcttctatcaggctaaaacataaaaatggaaaactcaccccatacccggttgttactcctttcttcttccaagctctctcttcttttctaagtcctcctgcttttgttgatgcttaagcgcttcaggcagttatttttttgcatattgtctggagtttatacttat

SEQ ID NO: 189262 - DNA, 504 bp, Homo sapiens
aaagggctgtgtggggctggacggatagttaggacttacctgagcaggaataagttttcaatggtacaggcagatgctttgggaatcaggaagtgacctgctcctccttgaaatgactctgggctggggcaatggtgacactgccacctcatgggatctggggttacctggtggaggaaagacgcaggatgaagagaaccaggtataaccctgccacttggagtttttcctacaacttgggctggtgaaatgctgaatctcagtttatgttcaaaataaatgaaacctcattctattaccaaaataaactgctcacatgtgatgttgataatgagacagccagacagaagctgccttcataccaaaacaagtgaatcaggtggtaggaataaatgaacaaagggcaaggcattgtcactgcccctttccttcagcagtagaaagactgactagaaaattcatacgtaaagaaaaagacctttttttctgttgttacaacctgaa

SEQ ID NO: 189263 - DNA, 313 bp, Homo sapiens
cctctggtggctccgagcatatgtggcaaagctgtgtcttatttacctcccacatcatcatcctctcctaccctcatatgacatttctgcctgtccccttgacagtggagtagcagctgcatgttccgaacgtccccaccctgccattttcctaaaatgctcactaacgttatttgactctcaggatgtgtagacattttaaagctgtatttcaagataaggccatttcaaatgaactgtgtcttatgcacagggtaataattctctgttcctggcttttttatttttaatgaaaaatgcctgcaaggacctc

SEQ ID NO: 189264 - DNA, 319 bp, Homo sapiens
aacaacgatgccatcataaattcttcctctcattagttttccatccaaaaccaaggaacatctatttcattaaacagttccttagattttaaaatgctactcaacaatgaacaaaatactaagatataacatgtcagattctcttatttttatttttttagggacaggctggcctcaaactcctggcctcaagcgattcccccacctcagcttcctgagtagctaggatgaaaggcactgagtcaccccatccagctagattctctttaacaatttcaaggggtttaagctgaaattagaaactgggtctcatcttgtg

SEQ ID NO: 189265 - DNA, 308 bp, Homo sapiens
gctttccacctccctgtcaaaacaataaaaaaggccacaggcctgtggttctggcctccagggaactggtggcttctttaacccacactgctgctgctgaatcccatttaggtttagggtttattttgtatatgcctttgtacaggctaaatgctggtctagttgaaaatcaacctaaaacaaccttaatagcatctcattttattgtgactttactttttgtgttgtttggtgttttacttttggagacagagtcttaatctgtcaccaaggctggagtgcagtggcatgattatggctcaacctcc

SEQ ID NO: 189266 - DNA, 495 bp, Homo sapiens
ctgtgtggagtcagcctttttgtgagtgcagcggccctgcaggatgcaccgggtttgagaagtggactcccccgtctcccgccacatcccaaaagccctcagccatgagggcaggacgaagccgacggtcgccctcgtgccgagatgacaaccgggcacagaggcggtggctcccagcttcctgccctcttccccgtagtggggttacccagcgtgactcatggcccgagccacaggcacccgcccagggagccacggcggggagacctggctttattagagatgcgttcgtgcctcatcaagtccaaaggaggaaactggcgcgtccctcactttccctgaaacaggctcccccacagcccaagcggtcaggttaaggtgcatttgcagacagatgccctagtaggaggctggagcttttggcccagaattttccctgctgtaggcccatggtcaccgagcctgcccgggggctgaggccctgaggaggtgcca

SEQ ID NO: 189267 - DNA, 527 bp, Homo sapiens
agcaaaggcctaagcagagaacctagatttccagctttgccgtgctgtatcaaggtatttctccacccccaccagtgccaaagaaggcacagactgagaactgggacttccattccaaccaggcagtaatgaggtatccctccctttttccagtgggcgatgtcagagaggacttaatggagagttgagacttttaccatagctcagtggtaataagttcccaaggagccaaccccttgactctggtcagtaaaggcctacagaagaactcagacgtccacccccatctcacaataataaggcagcacccccttcacacatcagagcaatacatatcaaaggaggcctgtaaaaaaaccctcaaaacccaagatttaagtaggatccagagtctcataacataagatcccaaatgtccagatttcaatagacaatcactcatcatacgaagaaccacaataccaaactgaattagaaaaggcaatcgacagatgccaactaagattacctagatgagagaatcacaa

SEQ ID NO: 189268 - DNA, 446 bp, Homo sapiens
cttggtatctcagcaagttcagcagcccttaggcctgatttgggtcccagcctgggtcagtttctattggcaaagcctgctgagcatactttctgacatctcctgtgcctactggagcattgctttctagtcactgataagccacttgtattactctgcagtgtttttctgtattgaacagtgacagaaggaactgcttgcagtcagcccaggttgggttgtgagttaagaagatggactgcatcaggtcgataagagcctggggtttttctgtataggagggagtatgctgtttccagttgaaaatatctgtagtagagaagggctgataaacataaagccgttctcctccttgaacctcattttgtgcatctaaatagatctgtcccctaggttctctgaatggcatctgcaaagctcgggcgtgtcctgaccggagatggccg

SEQ ID NO: 189269 - DNA, 358 bp, Homo sapiens
tcccttcaacccctcacctgcccctcaacctggccaatgagctgttaacacagcagtaatagtcccactagctttgggaagatcaccaaattcttcccccttcccaatcccttgcctcttacccagaactagttacataatttactgagctcagtgcaaatgaaaatgtgaggcctcttgattaaaaatcattaagactttcaagatggtgacaagagcaccttcagcaagcatggggtcctgtgagaccgcacgggctgcatgttcctaaagccagtgctgcccttgccacttccatcttaggttaccaggaccaaccatggagatgtatataacacaatttgagaggcactgaaca

SEQ ID NO: 189270 - DNA, 699 bp, Homo sapiens
tgctttttaaaattatactttaagttctggggtacatgtgcagaacgttcaggtttgttacataggtatacacgtgctatggtggtttgctgcacccatcaacccgtcatctaccttggtatttctcctaatgctctccctcccctagctccccaccccccgacaggccccggtgtgtgatgtccccctccctgtgtctatgtgttctctttgttcaactcccacttatgagtgagaacatgcagtgtttggttttctgttcttgcgttagtttgctgagagtgatggtttccagctccatccatctccctgtaaaggacatgaactcatccttttttatggctgcataatactatgctattttatatcagggacttgagcagctgtggagtctggtatccatggcagggtcctggaaccaattcccagtggatactgagggatgactgtacagctatagagtggccaacattcatttgtaaacagtacccacgagcctgtgtctttctgagtgaaatctgtgaagcaataatgaattgggaaaatactagcttgttatgtagattcagttgctttctgcttttatgaagttctaagtgtattagtcacaggatcagcgacagaaatgctacctttaagaagaatttcaatgtaatctattggggcatgctcacagaagttaggaaatcaatcatgttt

SEQ ID NO: 189271 - DNA, 363 bp, Homo sapiens
ctgtggtctgcgtgtgacgacatattgtgcgttctcagatggctgtgtcctcatacaattaaggtcccatttgatgcaagctcttccaatgcaggtgtggcttttcagtgtgtcttgtctagacttgtgttgggggcatggtgtccagtgcagcagttacatgaaagacctggctcttaagagtgtaactgcatgagctgcaggaaccagggacggatcagggtaggtggtgcccagcagataatttggcacatagcaggactcatcctgtctaggcttccagcgggatttctcattgattagcctggctgggaccaaatctgtccagtcacagggcattcagtcaaggctgccacctcagcc

SEQ ID NO: 189272 - DNA, 398 bp, Homo sapiens
acttttgcctttactaactcatttcacaagtatttgaggatacacttcagagcactgaggttacaaagacaacagtgtctgtcctcaaggtctgtctaggtaagacacacagccaaataaacaattctaatacagttatacagttttagttctgacacctccaatgagctgtagacttgtatttgtcatttccagtcagaatgcaaaacacagatccaaaacagaactttcaatttctcctccaaatctattcttccttcagctggtcgtgtaagtgatgccactatcacatccacttaagacaaaaacccagaggagtactgccttaatcagtaatcagtgttacccttcttctcactgtgcatgttaattttgccacatctttttttttttttttt

SEQ ID NO: 189273 - DNA, 490 bp, Homo sapiens
ttttcgtacatataatttctcaatcttgtttaaagtacacacgcacataagaagctaattaatagtacaaggcagaatcagttaaatgccacatgggtggcagacagttttataaacaccacccaaacctttatttgtacaaaagcaaaagcaagcaacctcatcgttaggagaggagttactgccccataacccaggaaagtcttaaaaagaaattataccaagtgtacttttcatctctatttctgtttttcactttttcagtcaatcagccacttactatttattaagtatttcttccatctaagcaaggtgggggagggagagaaagagattattcctacgtttatgattccaatcttgtttaaagtgtattcgtaaaacgtgagttaataatgtggcatcaaatgagtgccttgtgggcctcttgatggtgagtgttataggaatgtagaggtcaaaggaattgctgtggactgtggtgtgtgtg

SEQ ID NO: 189274 - DNA, 336 bp, Homo sapiens
gtaccccacttgagtccattgcgcatttcttagagtagagatggggactcattccaggcaaggtcacaacggcattttgttgccctcaatgctgtttttcactttttcagtcaatcagccacttactatttattaagtatttcttccatctaagcaaggtgggggagggagagaaagagattattcctacgtttatgattccaatcttgtttaaagtgtattcgtaaaacgtgagttaataatgtggcatcaaatgagtgccttgtgggcctcttgatggtgagtgttataggaatgtagaggtcaaaggaattgctgtggactgtggtgtgtgtg

SEQ ID NO: 189275 - DNA, 139 bp, Homo sapiens
atttcatcactgctggagaccagagaactttccttttctgaaaatatatctgatgtaagacagacttttattgggttaaaacatggacatttgagggctaatttgtatagcaactggcatcatcctaatatttgtatcc

SEQ ID NO: 189276 - DNA, 490 bp, Homo sapiens
catttgtagcatccttatttgtaatagtcaaaaactggaaacaacccagatgtccatcagtaggtgaaaggatgaacacactgtgctatgaaatgctactaaataagcagacaacaaagaattttatcgaatgttttgccactgccataacatggactgaccatccttctagcctccagtaacagttttctgctgccgactttgtagtccttaagccagtgtcacatgtttagaatttttgttgtatctttggtacttctgttgctgatttccatatcagtcagaatgagccaggttttactgtgataacaaccccaaatttcagtgacttaaaagtttgtttctttgtcatgaactgtatgtccattgtgggttagctgaaagttctgttttctgttattctcaccctgagactcaggctgatagaagtcattgtctgaaaccttcctggttgctgtgaatgttgactaatttaaacttgcttgatata

SEQ ID NO: 189277 - DNA, 396 bp, Homo sapiens
tgagcctcagctccttctaatttagtgacagagctaccattctcatctccacatagtatctcctgagtaactgtccagttctcaggcggcttaactcccactaagccccgaagagatagattttctattttttaaaacgcaagcccctataaagggatagacggtgcttcttttaaagagcttttaaatattattaaactcaaattttcctctctagcaggttcatggcatgtagagttaaatatagaaagagcgtttgcacaaagcctgtatttgattagttcccttcttaactgatataattaaatattgaattgacccagagtgctgaatattactttctggtgggacctgtgccaccaaatacctaaaagcctttagttgtttctttgctgc

SEQ ID NO: 189278 - DNA, 444 bp, Homo sapiens
cgggcactatggtagggcaggagagaagctatctgcaggccttctggaagctctccagtgcatgtccccactggggtgggggctgactgtctccacgtggggttagtcctgcagaacaggcaggtagagtagagtctgagggcatgaggaaaggcagtctactggagagggcacagagagttcaacaaacactgaaacttaagtttgtcctggacatcttcagcatccgactttctggtggaaagcttaaagtataaatgactgtgccctctcaaaagggcacagaagtaaaactgggaggattttgggaggggactggatgtggggtgaaaggtatggtgagagcagagaagaggggcctgagcctggggtcaggggaaagtaggctaaacaattcacaggatgcagacatttcagagaagggtgacacatcacttggccctg

SEQ ID NO: 189279 - DNA, 411 bp, Homo sapiens
tgggcagattacaaggtcaggagatcgagaccatcctggctaacatggtgaaaccccgtctctactaaaaatacaaaaaattagcagggtgtggtcgtgggcacctgtagtcctagctactagggaggctgaggcaggagaatggcgtgaacccaggaggcagagcttgcagtgagctgagattcgtgccactgcactccagcctgggcgacagagtgaggcgctggctcaaataataataataataatacaataaagtaccaaggaaataagaaggaagagaggaatggagagaggaagaagaaaagaaagatggaagagaaggaaggagagagggagacatggtgacagaaaagaaagatgaagaaagaaataatagataatcagcaactcaagaaaaagaaaaatact

SEQ ID NO: 189280 - DNA, 442 bp, Homo sapiens
cagtgagcctgaatcctcatctcctgattgacaggaaaaatctctgtggtatcagatcacctggattgcccagtgctatgggctcctggactcaagaaaattgttcaaagacgcaccaaaattaagtattcattattttcagagtttgtatcaaatttacagtggtagccaaacaggaaatatcacatgctgccaagatcaccacaggcatatttaaaaacttgtattaaatatctggttgctggagtgcaatatgaggtgctgttcaaagagcctctgtagctgtggtcctgccttctggcagcttacagcagcctaacgcagacaacccttacccccatgtaaagtgtaagaaggtaaggtttgacagagcagaagcatcgccatcttggacaagcactgccattttaagttctcccaattaaaaaccgcctaaatccag

SEQ ID NO: 189281 - DNA, 679 bp, Homo sapiens
tcaaaaaaaaaaaaaaaagtcttccttaataaaacagttaaaaactccaagcctcacaatactctgtaggcctcactttatacatcagatttggaaggtcacttcagaacaaaactgcccctaaggaaacactttcctttacttgcaactagctgcacagaaatctgggcccctgctgctttatagactaaaccctttataagctaacgaatactggttaaaatgcaggaaaagtgccattctggaggccctctagatacggtgtttggattggccagcactgtaatggatctatactgatttaagcatagcaaccagtgccatattgtaatactaattcattctcaggagggagtcaagaaacattttcttgagttaaaatcaaattaacccacataaatcaaacctgtgaacaaatttataagtcttgttccacactactgggccgtttgaccaaggaattaataaactgatagtaactcagccgagcacagtggctcatgcctgtaatcccagcattttgggaggctgaggcgggcgaatcacttgatgtcaggagttcgagacccgcctggccaacatggtgaaacccctatctctactaaaaatacaaaaattagttgggtgtggtgacgcaagcctgtcatcccagccactcaggaggctgaggcaggagaat

SEQ ID NO: 189282 - DNA, 1186 bp, Homo sapiens
ctcgtggatggagtgatggcgagagtacaccagataagggaggggaaggggtttttatttctaacgctgggtccctacttctgtgtctctcccccgtgggttagggtcagaccgcagaatctaaactgaccctattggctatctgtgaatattttccccaaataaggaagggtagggggatgtgtgagtcatgatggtgggatgtgcagtttcaaagagtggaatagctgcagaatgagtagccaagggaacagatgtgagttattgattagagctgatgggaaggttgtttacagtaactagaggcaaggaggcaagagaatcactttaacccgggaggcggaggttgcattgagccgagatcccgccactgccctccagcctgggtgacaagagcgaaactgtctaaaaaaaaaaaaaaaaaaaaaagaaaggcaataatactcaactattctcttcatctgaagttcttaggtctgtacttccccacagtgcttcaaaacagaggcctccaggaaccaggaagaaagaatggaggctttattacactgacactagaattatttactattataatcagaatagtattctagtatcagtgtaataaaatatctagtatctgtataatttattaagagcatgtttggactaagtgtagtttttacatttttttctgaaaaatttgatcctaaggaaaacttgaacatctaacacacccagtctagtagatttacttaattttttagcattttatttctttctcctcatgtaaatcttacagtgaacaatttgagtgtaaattgagcataaattgtacatgtgatgcttgacctttaaatactttgtaatgcacctcctaaaaataggcattgtcatactaaaaccacaatactagtatttcacttaaattaaaaataataatgtcatctaatgtctactttccgtaataactaaaattctcctcattgattcaacgtatgctcttgggtgtttttggatctaagatccattcaagatttttgcattgcaattgtcagtgtcttcagtgtctttttgcctataacagttattactgtccattatattgactttcagagagtcacactcattctcttagaaagtcatacaatcagatatttctgattggattctcatggtgtgtgtaaatattcctttatttcatgcg

SEQ ID NO: 189283 - DNA, 794 bp, Homo sapiens
ttaccaagttctgtggcagtcctttttcatgtattatcagttctcatgtgaacctcacaggactggtggtggtatcatttctcagttgaccaaggctcacagagattaagcagtttgttcaaggttacacagcctccacatagctgagctgtgcttggccgcaggcttggctgagcacatacttgactcaaaggcactcgcctccaaagctgaagcttcgttagatgtagatacattgttgtcttctcagagtcatcagaaagttagtccagggtaagaaaaaatgtcatctccaggcccagagggatagcctgcagcttagagggcacaggtttgccagtgttcattgaggaggtgaccagagggtgaatgggcagccactggcacaaactagcctgctctctgtggccaagcctgccctctgtggccatagtgaaagtaccaactgggctagggatgcctctgcccttagggttggtgcccagagttcatgccagtggcttttaagtgcctgggaatcaggaacttcctcagttcaccaggcctccaagccccaggatgcctcctgacagttctgttaaagacacactgagtcttctccaaggaaaattgaggaaggacacacccttcccaatattggcttctttcaataaatttctaaaagggagccagacatggtggcgcacctctatgactatagtcccagctactcgggaggctgaggaaggaggatcacttcagcccagaagtttgaatctggcctgcgcaacatagtgagaccccatctctttaaa

SEQ ID NO: 189284 - DNA, 770 bp, Homo sapiens
aaaagctgctgtattgactacacatgccttcatttcttctaccctgcttctttcatgcctgcttatctgaatgacaccaggatgacatttaaggcacatctgaagatggggaaaccacagcacagaataaggctgggcccttgaatcaataaatgaaggagaactactcaagagaacaaaaccaccagcaatatccacctgtatttgtcttttcataaggtctcactcagtcacccaggttggaatgcagtggcgtgatctgggctcactgcagcctccacctcctgggctcaagcaatcctcagcttcccaagcagctgggaccacaggcacacaccactatgcccggctaagtttttatatttttttggtagagatggggtttctccaggttgcccaggctggtcttgaactcctaagttcaagtgatctgctcacctcagcctctcaaagtgctgggattacaggcatgaatcaccgtgcccagccttttggcccactttttaataggttgctttttttcttttaaatttgttaaagttccttatagatgctacatattagacctttgttgaatgcacagtttgcaaaaattttctcccattctgtcagttgtctgtatactctgttgatggtttcttttgctgtgcagaagctctttagtttagttagatcccatttgctaatttttacttttgttgcaattacttttggtgtcttcctcataaaatctttgcctgtgcttatgtcctgaatggtattgcctaggt

SEQ ID NO: 189285 - DNA, 872 bp, Homo sapiens
aaaagctgctgtattgactacacatgccttcatttcttctaccctgcttctttcatgcctgcttatctgaatgacaccaggatgacatttaaggcacatctgaagatggggaaaccacagcacagaataaggctgggcccttgaatcaataaatgaaggagaactactcaagagaacaaaaccaccagcaatatccacctgtatttgtcttttcataatgtgtgacacatgtgctcatggattattgtccgaagcaagacatgtgaccaagcctaacatcaactgggtgaagagctatatgttcctttctcaagaggcactacaagtgacatgccactgggcagatggagtctcgctctgtcacccaggctagagtgcagtaccgcaatctcggctcgctgcaagctctgactcccaggttcacaccattctcctgcctcagcctcccaagtagctggcactacaggcgcccaccaccatgcctggctaattttttatatttttagtagagaaggggtttcgccgtgttagccagaatggtcttgatctcctgacctcatgatctgcccacctcggcctcccaaagtgctgggattacaggcgtgagccaccgcgactggcctaacatatttttaaaacctgcagaatgtttgtattacttttgtcatagtacataacatttaaatggatttcttgtttgtgtatgtgtgtatattcattcacaacactgatagtttttctgaatatttcctttggattttattcttttctcattcaactaaataagaacctgcaccatctttttctagtgtaaaaattacaatatctgaagtgaaactactagaataaatcttgtgacaattcttaaggat

SEQ ID NO: 189286 - DNA, 277 bp, Homo sapiens
ccgagatcacgccactgcactccagcctgggcgacagagcgagacttcatttcaaaaaaaattgagggcttgtgaagaataatgactttcatatttactgttgaggggaattgagagggtgactagtgagtacatattaatagtatggggcatccattctttactcaaggtagcaggttagatacccaaaacttttagttgtgcaatagtgtcccctcgcctcccccagacagttgtgggaaaggaggaaaaggttttgataaagcagagattaaag

SEQ ID NO: 189287 - DNA, 398 bp, Homo sapiens
tgcaacctgctttgatgaattcaagagaattggtggtagcagcaaggagccatagtgggttttgttgttgttattttctttccagtagcactttgatgaataaaaaataaaatcctttgttgtctgagtgctttatgttgcagtttctggctttgccttttaccatcgttctagtcaaatctatgggtttttttctgactgattgagctgggctctttcactgattccttctggaatgtatatatgtattactacatcactgcaagatgtcaaaatggaaaaggacacgtactttccttttctgagaccagcctgaaaagctgcagttgggtggaagcagagcccaaccgtttcttccaggcaaggtgtaccaaaggagcagaattctggggtgagat

SEQ ID NO: 189288 - DNA, 687 bp, Homo sapiens
gtgtggccttgagcatgtcattgaacctctctgggtgttagtttcttcatctgtaacatgagaataataacacttcataaattcattagcaagactaaacataatcatgcctatgaaagtgtggtagcctctaaaacattacgcaaatagccaagtattatcattatttctgttagtaatgaaacaatatatgcgtgtcagataataaggtaaagctccaactcctaatcttttcaggagactctttgcctttttgcatttttttttcccctgctaggatacatagagtggtaagatatgtagaaagcagagttcaggggaaagttagaatgaggcagagcttccaggatagtactttcttgttgatctgttatttttctaaacctttttcttttctgtgttgaaacacaatgccattttttgaacttcaccaattgttatctcagatatggatatgcctgaggcctgggcaagtcagggcagtgccactccagtttcagaaaagaaagtgtgatggggttcagcaggggaattgctgttgtacttcattagccaagctcagtaattccaagaatacccctgcgggtgtgggtgtttatgaaatgcagattcacaggccttgccccagcaaatttgataggagtctaggaatctgtatttcacaaacactgtcaatgaatcccatgc

SEQ ID NO: 189289 - DNA, 1636 bp, Homo sapiens
  misc_feature (1552)..(1552): n is a, c, g, or t
  misc_feature (1555)..(1555): n is a, c, g, or t
  misc_feature (1563)..(1563): n is a, c, g, or t
  misc_feature (1568)..(1568): n is a, c, g, or t
  misc_feature (1570)..(1570): n is a, c, g, or t
  misc_feature (1574)..(1574): n is a, c, g, or t
  misc_feature (1580)..(1580): n is a, c, g, or t
  misc_feature (1586)..(1586): n is a, c, g, or t
  misc_feature (1588)..(1588): n is a, c, g, or t
  misc_feature (1592)..(1592): n is a, c, g, or t
  misc_feature (1594)..(1594): n is a, c, g, or t
  misc_feature (1613)..(1613): n is a, c, g, or t
  misc_feature (1616)..(1616): n is a, c, g, or t
  misc_feature (1620)..(1620): n is a, c, g, or t
  misc_feature (1623)..(1624): n is a, c, g, or t
  misc_feature (1631)..(1631): n is a, c, g, or t
  misc_feature (1633)..(1633): n is a, c, g, or t
ttgcaggggaccctagaatagtttttctcctgccatttctatgaatgtctgaacgtgcaaatatgtcaatgactagggaaaatatagtgacgcactggtcattctacaactttaagtctacacaggttccttcatcaaaacagggcattaaaaacaactaagctatagagccagatcactggaggtactgtagtttataacctgcttataaaccccagttcttaagtccctcaatgcctagcatgctacctaccaatacgcatacaaataaatcagacgatcttgtgccccccagcccaatgtttaccaagacttcaaaatgttctggtgagatcacctccctgctatgtgatgcaaacatcagagtataaatcttttcagaaaactttttaacaactgttggaaattttaaagataaaagcaatacaggtcaagcagacccctgaagaacctctggagcaccacatggtgctggcaccagctctgcccccgactcccttcatcaactcaggcacctcccttcacctctgtaaagctaggtggcttgaactccataatctctgacgacaccatctgccgaatccacggcaaggacacacagaaccagagaggctacttcattaagctgcagtgtgcatttacatcaaatcaaccattccatagtaacaaggcaatatgaggccatctttttaaaattccataggagaatttaagtaaattgctagatccttccagttttttctgtgtgaatgatttatcccagcttctaggaatatgtgcaatattattccacagagcacatctttcagaatcttgtttcagattattgttacttaaatagtccatttctcctgaacagcccttcaggtaagagacattcaatactcattagaatctctactctcatgatgcattgtatgatctgagaaccaacttacatggtacaagtatagacacataacatcaaagaagatacacaatggccaagattctggtttcattagttaccagggaaatataaattaaaccacaataagattccattacacacccagtaaaatggctgataatgccaagcaccgatgaggaagtgaaggaactggaactctcatacgtggttagtggaaatgaaaaatgatgcagccactttggaaaatgggatggcagcatttgataaagttaaacacacacttagcacacaacacggcaattgcactctcaggtatttcccgaagtcaaaatataaaacgtgtctacctacacaaagacttgtagtcaaatgttcatagaagctttatccataatagccaaaaactggaaagaacccaaatgcccatcacttggtgaactgataacaagtagtaccgcttatcttcagggaatacattccaagactcccagtggatgcctgaaaccagacagtaccaaatcctgtatatactgggttttttttttctatacacacatacctctgataaagtttagtttataggccggggacggtggctcaaacctgtaatcccagcactttggaggctgaggcaggagaatngcntgaacccnggagncngagnttgcantgagcngngatnangccactgcactccagcctngcnacanagnnagactcngnctc

SEQ ID NO: 189290 - DNA, 882 bp, Homo sapiens
  misc_feature (798)..(798): n is a, c, g, or t
  misc_feature (801)..(801): n is a, c, g, or t
  misc_feature (809)..(809): n is a, c, g, or t
  misc_feature (814)..(814): n is a, c, g, or t
  misc_feature (816)..(816): n is a, c, g, or t
  misc_feature (820)..(820): n is a, c, g, or t
  misc_feature (826)..(826): n is a, c, g, or t
  misc_feature (832)..(832): n is a, c, g, or t
  misc_feature (834)..(834): n is a, c, g, or t
  misc_feature (838)..(838): n is a, c, g, or t
  misc_feature (840)..(840): n is a, c, g, or t
  misc_feature (859)..(859): n is a, c, g, or t
  misc_feature (862)..(862): n is a, c, g, or t
  misc_feature (866)..(866): n is a, c, g, or t
  misc_feature (869)..(870): n is a, c, g, or t
  misc_feature (877)..(877): n is a, c, g, or t
  misc_feature (879)..(879): n is a, c, g, or t
gccggaccctgatattctggctgtggaatattattccacagagcacatctttcagaatcttgtttcagattattgttacttaaatagtccatttctcctgaacagcccttcaggtaagagacattcaatactcattagaatctctactctcatgatgcattgtatgatctgagaaccaacttacatggtacaagtatagacacataacatcaaagaagatacacaatggccaagattctggtttcattagttaccagggaaatataaattaaaccacaataagattccattacacacccagtaaaatggctgataatgccaagcaccgatgaggaagtgaaggaactggaactctcatacgtggttagtggaaatgaaaaatgatgcagccactttggaaaatgggatggcagcatttgataaagttaaacacacacttagcacacaacacggcaattgcactctcaggtatttcccgaagtcaaaatataaaacgtgtctacctacacaaagacttgtagtcaaatgttcatagaagctttatccataatagccaaaaactggaaagaacccaaatgcccatcacttggtgaactgataacaagtagtaccgcttatcttcagggaatacattccaagactcccagtggatgcctgaaaccagacagtaccaaatcctgtatatactgggttttttttttctatacacacatacctctgataaagtttagtttataggccggggacggtggctcaaacctgtaatcccagcactttggaggctgaggcaggagaatngcntgaacccnggagncngagnttgcantgagcngngatnangccactgcactccagcctngcnacanagnnagactcngnctc

SEQ ID NO: 189291 - DNA, 404 bp, Homo sapiens
aaaagatctaagtgtgttttgggcggagtagggttccacaagtggaatattgtgtgcactcagtctcagaatgtttaccaagacatctgtcaccttcaccccgtcatctgatagcacagagcaatataacttatgaataatgctagtccttaacgacatgacattatcaacttctctgaataaagaacgtgttctaacctttactattctaaaatacttccttcttgagattctgatataaagttgaacatttatgaatagaatatttaattgcttaaaagaatttttcctaacagccctaaaggttgactatagagagaaaatttttttaagacactgctaatcctcatagctaacatttgagaagctaagaacaagatatttaaaattactttaataaattt

SEQ ID NO: 189292 - DNA, 585 bp, Homo sapiens
gtgaaattgtgctgagactggtcctggggtaccctcatcttattcagcttacacagggtaaaggaagggctctgagctcaatggcaaggccacatggctgacagcagaatcccatggtgcaaaggcaatttctttaggagaggcccactgcaacccttgcaaaatctaggaacagccaagaagggtattttctccataatctttctgaatgtggttgagtatatttgggttccctactttttgtcatttatatttctatgaacatgaggtttagaatattcagctaacttattagtcaatccaagacttgatattatagtacttcctgtttgtctgctgtttcactttgtgcagattcattcattacccatggtaattccagaaatggaaatttccagaaatggaaaataaatggaaaattccagaaatgatcaattcataagttttaaaattgtgtgccattctgggtggtgtgatgaaatttcttgccatcatgttctgttccttccagggtaagactcctgtctttatccagcacattcatgctgtagacaccacctgcctgtgagtcacagttgcagtctc

SEQ ID NO: 189293 - DNA, 493 bp, Homo sapiens
gtgtggcatgcagcagtgaatggctgtgtttggtggttagatgcagaacatttcttgtggttctgctggctgtgtgtgtattgcctgttttgattgtggttaacctgactcaccatttggttccttaaggttgagtttcctttcctgtcctttatgaacatcgtcaccttgttcaaaagggaactttatcctttcttttcaaacgtttactgagtttctgttctgtgttaggccctgtgttaggagccaggtacagaaagatgatcaaatatcttgactttaaataatacctttcacatttacctctttaatctcaggtagccctaacaaccctgtaaaattgaaaaaggttgttcatgtaccccccaatataaataactagtcacagagaaatgaacagacttcaggttacacattgtaatagtgactgagctgaagccttagtgttttgaccccacccctacccattcactagttaggagagtctaaataa

SEQ ID NO: 189294 - DNA, 124 bp, Homo sapiens
gtctcacagtcccggcgcaccaaatgcgtgtggagtcctcccggggaccactgttgatgatggcgttcaccaggacctgcagagggttctcgcctgtgagcaggtgtatgatctcgaaggcatg

SEQ ID NO: 189295 - DNA, 432 bp, Homo sapiens
ggctcaatcaatcctcccacctcagcctcctgggtagctgtgactacaggcatgtgccaccatgcccggctaatttttatagttttggtagagatggggttgtgctatgttgccaaagatggtctccaactcctgggctaagtgatcctcccacctcagccttccaaaatgctgggattatagacgtgaccgtgcctagccatgttagtcttcagtacaccttctctttgctgacagccccgcgctcccatgctcctgccagcctctccagccgttccttcctggtctctggctggctctgcctcctcagctcagtgcccagatatgtttttccccagggctcagccttaggcattctccacagcctacgctcactccttgggcgacctcattcagtccctggctttaagaccccatcatgacgcagacccc

SEQ ID NO: 189296 - DNA, 497 bp, Homo sapiens
cccttaacccagggcaaccactgatctttttggttgttttgttttgttagagaccgggtctcactctgttgccctggcttgagttcagtggcataataatagctcactgcagcctcaaactcctgggctcaagtgatcctcccactcaaccttccgagcagctaggaccacaggtgcacacaaccacatctgctaattttaaaaaactttttggagagatgggagtctcactatgctgcccaagcttgtattgaactcctggcctcaagcaatcctcccaacccagcctccccaagtgctgggattacaagtgtgagccaccacgcctgaccaaaaccactgatcttttactgtctccatagttctgtcttttccagagtgccatatagttagaatcacacagtatgcagccatttcaggttttttttttcacttggtaataagtattcaaagttctttcatgtactattagttttattttatttttaattgacaaa

SEQ ID NO: 189297 - DNA, 325 bp, Homo sapiens
aaaaatattcaaagaaaatgttagtcacttttcaaaaaaagcacagcataccaagatgatgtagtaagttaaatattcccttgtgctatttatagacataaccatatactgtatcatttctaattggaaaaggtctaccagagatactatacacctgatcctaaaactatacattatcttctgctacgcctctaggaaacaagactataataacttgaattttaagaactacacattcaagataaatatttgattggtttttccatctcactattaaaatgaagcataagaccctcaaattaggtttaaatgttttaacagtgaa

SEQ ID NO: 189298 - DNA, 587 bp, Homo sapiens
gccactgcacccggccaccactaccattttcaaatggagaaatagtacataagataacactgcgggctgggcgcaaaacaaacaaacaaaaagcaacataacactgagactgcagttcaagcagcctgtgtttatttcattgctaaatatttgtatatgtttaaatatggcagttattgtcctgttgattctctgaataggacaaagtagtctatcctccagtggtcccttctccccagtcccaatgtggtgaagagtgggatttttcctccaagagagggtttgttattcatttttctgtctcaggatttaagggcacagtcttatagtgccaggctgctttccttaagatctatagaaagacagaccgcaaaggaatggatactacacacattaaaggcgacacaaggcttatgtagggcctctttcgggctgttctcctcagagcaagactgctctcaggcacagaggtcagccacaaccctgtgttccgtgttctgatgctcaatcacatcaaggatggcagacaagcaactttcccaggtgctcctgagcttcagggagatgttgcctcagccggatgccca

SEQ ID NO: 189299 - DNA, 389 bp, Homo sapiens
tgggacaggggaagggacttcagggaaatacttttgattcaaatagttaaattttggggtaggagagaattgaaccttgaattaagtgtcaaggtgctaaaaagacagaaactctgatcactgtgaaaaaaattcttgatttattctcttagtcactggtatagcagccaatttagaaggaatttgccctgctgagtagctggtagtttgaggcagccattatttccttgacacataaactttgtgcatttcataaaggatagtgaaaactgttggaacttttcaatattcattaatgcagaaaaactttctcttaatattcttattctcccccagtctcttctcagaaggacctcaggatttagtcccatgaatataatttcctttcc

SEQ ID NO: 189300 - DNA, 211 bp, Homo sapiens
cagaaacaagcatacaatgtagcaccaatatatctggcaggaggcgtttcagtggaaaccttacaggccaggtgagagtgtcctaacacaggtctaaatgaaaggatagttcagaagagggcactgcagctggctgaaagagaacaagaaaggctgtaaggtggaggtgaatttttaattgagccgtgaaagatagggaaattctgtatga

SEQ ID NO: 189301 - DNA, 458 bp, Homo sapiens
tccatttgcccttttgatctagaattaaaagatgaagatgatgaagatgattgtttcatacttgagaaagcagctagagggaaaaggcctatttttgaatgtttttggaatggacgattaataccatatacatcagttgaagactttgactggtgtactcctcctaagaagagagggcttgcaccaattgaatgctacaataggatatctggtgcattattcactaatgacaaattccaggtcagcacaaataaattgacgtttatggatcttgagctaaaattgaaagataagaacaccctttttacaaggattttaaatggacaggaacagcgaatgaaaattgacagagaatttgctttgtggctgaaggactgtcatgagaagtatgataaacaaataaaatttacactttttaagggagtaattacacgtcctgatcttccttctaaaaagca

SEQ ID NO: 189302 - DNA, 1044 bp, Homo sapiens
aaggctgtccaagcttgattgcctatacatccagttctatttactttccttaatttttaaaattgggaattattttgaagacaaataaaaataatataacgaaagtaaaatctaacaaattccaaccttaaaaaaagaacaaacaacacaagtacaaacaaaccaaacccagaaccaatgagtggaagcttcctgtttacctatcttcaacacctttcatctttctactttccaacaggtagctactaaccaaaatttaacgtatatcattcttgtgtcaacagagcaaggcttatggccagaaatgaatgaaattcataatgaaggtattctgaggaaatatgatcttactctcaaagtctcaacaataccctgggtgataacaactggctctcaaggaacaagatagctcccaagcaactccagtgcccaggaaagatggtgaagagatctttgcagacaatctatcagttactggggcagaaaaatcattgtgactagtcatcttcatacgatagcttaaaccaacagacagaatttatagtgtagcgaagggcagtctaatgcagtagttacttggatccactcttgctgttttgtgaccctgggcaatcagcttaagcttgattgccagttgactcacaggagtcaagctcaaatctgtctcctggtgcagtaattttattagaacaggtttagcgggtagattctgggattactaggtgattggtggaaggaaaggggaggtctagaaagtccttggcagtacccagttatctcttcatgactcctcatgggtcccatgttcaaatttgggaggagttaatatgaagcatgtggtggcaattcaggctgtgatgacgctccttcagagtgaactccagttggctatattggttgcaactgatttcagccagttttgttatcttacaagcagaaggagtttcagtgtttcagaaagttgtttcttatctgctatcttgcaactcaagactttctgttagttactggtttaagttttgtacatggttgactacacttcgt

SEQ ID NO: 189303 - DNA, 682 bp, Homo sapiens
agcttgattgcctatacatccagttctatttactttccttaatttttaaaattgggaattattttgaagacaaataaaaataatataacgaaagtaaaatctaacaaattccaaccttaaaaaaagaacaaacaacacaagtacaaacaaaccaaacccagaaccaatgagtggaagcttcctgtttacctatcttcaacacctttcatctttctactttccaacaggtagctactaaccaaaatttaacgtatatcattcttgtgtcaacagagcaaggcttatggccagaaatgaatgaaattcataatgaaggtattctgaggaaatatgatcttactctcaaagtctcaacaataccctgggtgataacaactggctctcaaggaacaagatagctcccaagcaactccagtgcccaggaaagatggtgaagagatctttgcagacaatctatcagttactggggcagaaaaatcattgtgactagtcatcttcatacgatagcttaaaccaacagacagaatttatagtgtagcgaagggcagtctaatgcagtagttacttggatccactcttgctgttttgtgaccctgggcaatcagcttaacctcccccatatattagctttctaatgtataaaatggagatgacaatggtatctacctcattgaatggtgca

SEQ ID NO: 189304 - DNA, 593 bp, Homo sapiens
aggtatagggtttttttcccacctacttcattgtgtctccttttaattttgattaatattctgtttggggcaagcagacttacattatatctatatataaatatatatgtaatgttttctatttgtttatttggaacagataaaatgatctcagagcccactgcatcctaaaatggatatttatagacttagcccatgaacaacatggatttagactattttttttatgggattactacccttgtgtttattttgagttagttcaaaagttcttatgtgattttttccacttttatttattttttaaaactgtgtggactgaattgtttttcttccagggagcaagatacaaattatctggatctgaaactcgcagcctaaattacactttgtgctagtaacacagacgtgttctggtagtagtaatagcacaggagtagtaacggtagtttattataatactacagatccatttttggaaatgcagttgatttgcctgttgcaaggaggggaaatggacatcaatttcacagggtcatctgattcctcattagtagttcctatttggcaaattaaaatgcattttcagataa

SEQ ID NO: 189305 - DNA, 406 bp, Homo sapiens
aaaaaatgtcaagcgcctactacaagcctattattaaactaggtactgtgggatacaaaagtataagacatggattcaaaatttattttctttgttgaggagataagacagtatatattccagaagacatgcagtttacaaatgagtttagtttgaaaaattgtttttggtgtcatttgtttgcatcttgcagataatgcaggtaagttatagcagaaccttaaataatttgaagagcacttcaggaagaggttttaatgtttggtgactattgggaagcaaagaggagctttgttataccttgaagttggtgtggaggttggtgaataaggctgggtgacctttagagatttctacaggggttttctaggtgggtttaaccgctatgatggtgattaggggagga

SEQ ID NO: 189306 - DNA, 373 bp, Homo sapiens
aaaaaatgtcaagcgcctactacaagcctattattaaactaggtactgtgggatacaaaagtataagacatggattcaaaatttattttctttgttgaggagataagacagtatatattccagaagacatgcagtttacaaatgagtttagtttgaaaaattgtttttggtgtcatttgtttgcatcttgcagataatgcaggtaagttatagcagaaccttaaataatttgaagagcacttcaggaagaggttttaatgtttggtgactattgggaagcaaagaggagctttgttataccttgaagttggtgtagacaattgagacggtgtaccgacgctcgacattcgtatatcatgtgtcatatgctgtt

SEQ ID NO: 189307 - DNA, 657 bp, Homo sapiens
aggctgaaggtcaaaggatcgcttgagcccaggaggttgaggctccagtgatctgtgtttgcactgctgcactccagcctgagcaagaccctttctggaaaataaaaaaaaataaaaaaaataagaaaaaaaaaaagaggaaaactggtctgtgttgccaatctggtaagtttcaggaacaaggcaaacaattggtgttgggagccagttctctatgggtctctccagtttctgcatgtcttatgagcagattgcactgacagcttttatgggctactatctttcctgtacaggacatctgtagatagcattttaagatagcaatagtgtttctctctggagcagatggaagatttgtttgctatgcagaataataaaaataatgtctccatcaaagcaaaggctgggcaggattattagttcccttataaaaaatgggggtttcccaatctcagattttctcaactgtggtgcatacccactgcatgggcaacatccacctagacccacccagccaccgtgttacccacatggtctttgaggggcaagaaaatactatacaaacagagctgtcacaaacatgaagttcatactgcctgctgacccaggagtgctgtgtcttctgccatcatccgtggaattttaagaagctaactt

SEQ ID NO: 189308 - DNA, 811 bp, Homo sapiens
  misc_feature (776)..(776): n is a, c, g, or t
  misc_feature (800)..(800): n is a, c, g, or t
accactgtcgccatgaacagtgtgggggaggcatgcacggacatgaagcgcgagtacgaccagtgcttcaatcgctggttcgccgagaaatttctcaagggggacagctccggggacccgtgcaccgacctcttcaagcgctaccagcagtgtgttcagaaagcaataaaggagaaagagattcctattgaaggactggagttcatgggccatggcaaagaaaagcctgaaaattcttcttgaccttgacagtcaccttgaaggatttcgcaagtccagaaattgaggactctggatttttgtcaactaactctgtgaacatagccatcagatttgatgaggaacttaggagagaggagttttatttcctccttcgatgttttcctctcagttgtaaaagatgaactctttgagatgatttctcacctgctgtggtatcttgcaggaactgtgtgctaaaattgaacaatttttttgagattatggttgcaatacttggcgtggaatcagctttacataaatataccttgtatgcaaacgatgataaactagtcaggatgagcagagctgcctgacctcttgatttctgctgcaaaagacatatacactgtactggggtcactatttatgaaagcaattggttaggacctctttttttcctctcagggaactaatgctctgaaaagggatctgggcacaacagtttcagtgagtgcttttgagcacacttttattttatttataccaatgggtaaaatggggggggcccggttttncaaagggggccgcttttccccccnccccccttcca

SEQ ID NO: 189309 - DNA, 800 bp, Homo sapiens
accactgtcgccatgaacagtgtgggggaggcatgcacggacatgaagcgcgagtacgaccagtgcttcaatcgctggttcgccgagaaatttctcaagggggacagctccggggacccgtgcaccgacctcttcaagcgctaccagcagtgtgttcagaaagcaataaaggagaaagagattcctattgaaggactggagttcatgggccatggcaaagaaaagcctgaaaattcttcttgaccttgacagtcaccttgaaggatttcgcaagtccagaaattgaggactctggatttttgtcaactaactctgtgaacatagccatcagatttgatgaggaacttaggagagaggagttttatttcctccttcgatgttttcctctcagttgtaaaagatgaactctttgagatgatttctcacctgctgtggtatcttgcaggaactgtgtgctaaaattgaacaatttttttgagattatggttgcaatacttggcgtggaatcagctttacataaatataccttgtatgcaaacgatgataaactagtcaggatgagcagagctgcctgacctcttgatttctgctgcaaaagacatatacactgtactggggtcactatttatgaaagcaattggttaggacctctttttttcctctcagggaactaatgctctgaaaagggatctgggcacaacagtttcagtgagtgcttttgagcacacttttatttttatatagtaactaatggttaagattgatggtggcctggattagcaagaggagacagcttttaa

SEQ ID NO: 189310 - DNA, 484 bp, Homo sapiens
accactgtcgccatgaacagtgtgggggaggcatgcacggacatgaagcgcgagtacgaccagtgcttcaatcgctggttcgccgagaaatttctcaagggggacagctccggggacccgtgcaccgacctcttcaagcgctaccagcagtgtgttcaggtgagccctcccgcctctgttcccaggccctgcattctcggcgctgtgtcccaccacactcatcgtattttacggggattgggactggactggaagggtggagaaaagtcgcagtgaggccagtggcaggagctcgctcccctaccatcaccaccgaggccacttgggtgtctctccgaatgacaaatattggggcagtgcttttcaagaagcacagtcacatcctttggttcatttggtgttcaccctaaactcgcaaggtgggcatagttactcatattttatacataaaaaactaacacccagaaataggaagtgattaatc

SEQ ID NO: 189311 - DNA, 329 bp, Homo sapiens
tcccgggttcaagcgcgtctcctgtctcaacctcccaagtagctgcgactacaggcgcatgccacgacgcctggctaatttttgtatttttagtacagacggggtatcacgatattggtcaggcgggtcttgaactcctgacctcaggtgatctgcccgcctcgacctcccaaagtgttgagattacaggcatgagccaccacgcctggcccatttatgatttttaaaaagttatttcttgtcatgtttctccatgcaagttgagaggataaagcaaaagcaatatgcacaatgaatcagcaaagggctcattattaaatgtttactga

SEQ ID NO: 189312 - DNA, 367 bp, Homo sapiens
ccggttctggagaggggacagtatggcgggcaaactgtaaagtcccggcacgtggggggtgcgattccagcgagggccaggcccgtcttaagaagcactgtgtggggagtatatgagtccccggcttccgctccagggcatggtgcagtgagggaccccccacgccaggcatgctccttggtagggtctttctcaccggccccctgcagccgacagggaatgtgggagctggtgctgagggggtctgaggtctgtcctacctgtgatcccctgagtgaccttgggtaagtccctgtcccagcctcagtttccctttctgagcagctttggggggggggttcccgaagaaggcatctctttgaagttc

SEQ ID NO: 189313 - DNA, 231 bp, Homo sapiens
ggaaaattatagactagtcacactcatgaatgtagtttcaaaaatcttaaacccaattttaaccaacacaatccagttgtatataaaagacataatacattatggctaagttgggtttctcccaggagtacaaagttggtttaaaaagttggcaggaacaagaagaggatgcccactatcatccattcctacctgatcttctggtggaagtcctactcagtacaagaaaac

SEQ ID NO: 189314 - DNA, 371 bp, Homo sapiens
accctaccacagttagggtttaaataaaatactacaattaagagaaacacccatttcaaaactattactcaggtagccccaaacatctctgtggagtcaaaacattaagcttcatcttcttttggttttccatttggaattttgaagacagtgaagccaggttccttaaagggttacatttttttttttaaatcatttccaatgacagaaaaaggtgtcaaaagttgaaaatccttcctacttcaaagaaaggaacaagtgacacacccaaccctgatcctggtgtagccactgtgcagctgtaactgattcgggaatgagcccaggtgtgaagccagaatctgttccaccctctctctgcagcctggcaa

SEQ ID NO: 189315 - DNA, 185 bp, Homo sapiens
cacccacctcggcctcccaaagtgctgggattacaggcatgagccaccgtcgttggcaggttttacaaacaggacagatacaaatctgcttatctgctggaactggattaggttggacaaatgaactcttcagggcctttcaagccctacgttaagattgccaccaaaattctcggatgccctct

SEQ ID NO: 189316 - DNA, 276 bp, Homo sapiens
ttaattacctgcccacatagtaaagtgctaaataaatgttggacattgcttttgcaatttcatttatattctacccattaagcaatgtttaaaatctggaataaaatagattattaaagaaatatgcagagacaattatcattgaccctgattccatctggaaatcagggatgaagaatcacggagaaaaaaaggttaaaattatctctgatcaaaattaaagtctatcaaaatctcaaatggcaacgaattcttgctgaatggccttgtatgtga

SEQ ID NO: 189317 - DNA, 272 bp, Homo sapiens
ggatggatggatggatggatggatggatggttggatggatggatgaagagccttccagctgactcttcagaggcattttccaatccttcatttggttttgcctataagagattaacttcacttgtgtgcattcctttaattcaaaagctaattgttgagtatttaaaaataatttctatgaaaacattaggataaggctctttcccctttcaagccctttgcatatgctagtccttctgcctggaatgcctttcttccttcctctcttcaca

SEQ ID NO: 189318 - DNA, 332 bp, Homo sapiens
gcaagggcttttattgtggtttccacaggaaaggagaagcaaggcaggggcggcaggcttagggctggctagtttgaacaatttcagcaggctctgggtcacaggttgtctggtacttggctctagggttgactagggcatgggactagtggcccggcatgtaagcaccaaataaaggaggtgactgggagtgcagactctggatgggttggtgttcctattacaggcacacttgcaggtcatcagtctattatttctaggaattggtcagccctggaagaagcagtttcttcagtgtcaacaaggctccaagatgtcaaagcgtaaaacat

SEQ ID NO: 189319 - DNA, 129 bp, Homo sapiens
ctaattaaattaaatagtttttacacggcaaaaagaacagtcagcagagtaaacagacaacacatagagtgagaaaaaatcttcacaatctatacatctgacttttccacagggtacttttccacagga

SEQ ID NO: 189320 - DNA, 608 bp, Homo sapiens
actgggcactgtccctcccacttaggacacaacgtaggatgggagatagatttgtaaacaaatacatgtatggatgtaattagcgctgcaatggttatatgtaccaaatgtgagagacttaaaagcgtgtgtcttggggagagtaaggaacgactttataaagaaatgtgcaaacgagatctgactgatgagtgggagtgtgcctggcaggtggaaaaaagtctaacgttctaggtggagtatattgcctgtgcataagtaccaacgtgcgaggcagcatttagggcacaggaatctgtgggacccacccgggagccctggtagagtgcgagccgccacagagacgaaaacgaagggccctgcttactgatggtaacgatcgcatggtctggtggggagaccaaggcatacacaagtaatattaataattacagaatcacctaagagcaatgataggaggttcacggggttttatcacagctgggagaggtgaggcgcagagttcctgagggcactttttaaaccacctgagccgcaattataatttggttaagtaagagttgtaattaggtaccatggttttacccccaaaagatggtaaataggaa

SEQ ID NO: 189321 - DNA, 409 bp, Homo sapiens
acgtggcttgcaggaaagaacattggatatccctgggctctgttaaccaaatacctcctttctgtgtgggatctgaatttgcaaagatgcccagaccccagactgctgacaccagagctcctataagcataaatcactatagtcatcattagcaactcttctatctagacttggaactcctcgtgcaaattgctatgaccctatgtctgtgtgtgacttcttgggtcaagagcaaagcagtttaggcagggtgttaagaccacaagccatgcagttaagctgacctggattcaggttctccctccatcacttactagctgtgtgatctaaggtcactcacttcacctctgagcctcagcttcctcacctgtgaaatagaatggtgcttataaaggttagataaaatcta

SEQ ID NO: 189322 - DNA, 946 bp, Homo sapiens
tgaggatgtcttctccccttaaaccaggtctcttgactcggagtcttccaaggattgattctggagtgtaagtcagcaatatgaacttgatgctcattttggcctaaagatggagtcatgatctgtcccaggctgaagtacagtggcacgatcatagctcactgcagcctcaaaggcctgggctcaacggatccttcctcctcagcctcttgaatagcagattttatacacatctgcaaagtctttggccctatccacccttcctcttgactctgcactggccttaggcacactgcatgactttccaggctgggccaataaaagccatgcagcttccatttggttctctttggttgcttgttcatccctctggagatgtttcttatgagaacccagaagccatgctataagaagccacaaggagaggccatgtatagaaactccagtcaacagttccagatgaacctgtccttcaacactcagagccaagctgccagacatagacgggattttaccatgttgcccaggctggtctcaaattcctgagctaaagcagtctgccgttcgtgagcacacatccaggctggtttctttttcttcaggagccagaactgagccaagactcggacagggtcggaattcagaaagatgctacttccttagttgcacgcttctggatatgcgcaactacgcggacgggtccgcagctgcgtccacactaggtcccatgggctgtgacgaggaacattccaaccggagcggattggcaatcacgaggttacaccaccgacacggggagggacccaaagaggagagacaacatccgcggcaccccaactagagggcgcatagtgcagaccggcgacgctccgcacacacgacacgccactaatcagtcgcaccccgcgcaccaccggtctacaaaccactacactcaattctgttg

SEQ ID NO: 189323 - DNA, 321 bp, Homo sapiens
cttttacttgatttcacacacacacacagagtcactatctaaagaaatgtgcctccattacctacttttaaagttatgaattatttaaagattatataacctattgcttataatttaagagcaacagacaagattatattttaaaatactgtaaaggttttttgaaaagacagtatgcgcaaatacagaccacattgttgtataacagccagagatggatgatcaaaacactctgcagccgtcatgagaaaaagtcagaacagctgacaactagtacacgtacataactttgctcattatccccattctatcaaatatata

SEQ ID NO: 189324 - DNA, 530 bp, Homo sapiens
agaatgtgtaacaacgacccaaaaaggaaaagatgggtgataaaacttgcacgttccaatgtgaggggctagagtctccacagggctttcaaagacaactttaaaaattggtttgacaatgctgcttctacctgaatataaaagagttgaagtaggaaaagccaggtttttggaaattaaataatttatttgattatggctgtcattgtgctctgaatcttcatagaggagggaagaagaaagcttctgtctcccacaaaacctgaggggtggggctttagagagaccatctggagatcctcatctgtaacacatgacatttctggggctccacagaggatgtctgacccacagcaggaaaagtcaaaggtggggatattgtgactgactcagccctcaaatggaggagcatgcattgggagcttcattgagagcaatactgtgcttacagagtactgagagccaagaatgatgtttcctctgggaccagatattgagaaaccagcctgtagtcgttgtttttagtaact

SEQ ID NO: 189325 - DNA, 283 bp, Homo sapiens
  misc_feature (31)..(31): n is a, c, g, or t
  misc_feature (63)..(63): n is a, c, g, or t
  misc_feature (104)..(104): n is a, c, g, or t
ccctgtaacggctgatgctcacagtctgttngcttccctcgggtcttcctcgcctcaagtttnggagtggtaggacccatggctcttctctctgctccggctgnagattacactaggcctggaaattcctttgagagcccattcttctaactgtgctgggtggcattcctggagaggattctctaagcagtgtccaggtaacccactcttccctgaagtccccagccacattatcaagcgtcatcagttcctaaagcaagagacctcaatgtgcatcagcctg

SEQ ID NO: 189326 - DNA, 489 bp, Homo sapiens
gacagctgcagaacttgtggaaggttctttggcatcacacttgtttagtgagaaatttaattttattaacatccatagctgaagcagtgcacaaaatgagatgggctgataagatgtcaactctggtctgtgttggttaaaaatggatttctgacttttacactgctcttcccataccaagattaactgtaagttttctaagcttattttccacaaagcccacaggaaaggctggcttctttcatttagcataacgttttcaaagttcaccacattatagcatgtatcagcacttcatttttttgcatgactgaataatattccattgtatagatatcccacattttgtttatccattcagcagttgatgcatagttgggttgtttccactttttggctgttgtgaatactgctgctatgaacatttgtgtaccccaacacaaaaggtcacatattgtatgattccatttacatgaaacatcccaaaca

SEQ ID NO: 189327 - DNA, 431 bp, Homo sapiens
tttagaactgaagaaattgaggttcagagcttgccaacttgtccaactggacaattaactgcagaaactagaacttgatcaattccctgattatgaagtaacagaaatatgtagaagcatcctcttcctttaaattccaaacagggcaatcaacagaaaattaaccttgaatagtattgacagtgattattgctctcacattcaagaacaattacccctcttctaggaaatcagtaactaactttttaggagctaacttcaattcttacccaactaagtttccttcagtcttaagcagatacctatttacagattctctaaaaaggtctccctaattagtataactcattacacacctacttgttttcttattgcactactgtgttataattttaatactcatttcattttcaaaatccatccatcgaaca

SEQ ID NO: 189328 - DNA, 185 bp, Homo sapiens
gaccctggtagtaaaaggcctttagagctttcaaaggaatgaggttatgtctgtggatgccatcaccaagcaaagggcctctggtccaaatgcctggagacagccccaggtgggaaaaccaccaaatgggcaatgccctctctgctgcgcctgccacagcgttagagccctgcacgtaagcccgg

SEQ ID NO: 189329 - DNA, 200 bp, Homo sapiens
tcagaagcagggacttgaaggaacaataccgcctgagtcagttttgggaggagccagcctacaaagcagaatgaatctctcctgcttgacaacctcccttagcttcccatttcctgcaggacaaaggagaaggcccttgccaaggcccacaagcccatgtgaactggggactgtcttcctctcctatctcccagcccgtc

SEQ ID NO: 189330 - DNA, 195 bp, Homo sapiens
gtcactgcacccccatgggactgacatttctcagggctgaaggagagtggcacaaaggtcaagaacccactctgcctgagctcagcctgagctcaaactcccagttcaggctctttcctgttgttttactttgggaagataaatgttttacccatcagtgttgtcatctgtaaaacaggaattacaatattatct

SEQ ID NO: 189331 - DNA, 401 bp, Homo sapiens
tatttcattcttggtgaaacccttaaaacatgctattgacttccactttttgttgttgctcttcttccccagtttaaggtatcaaaatgtccaacttcttcatttagcttcttctccctccagtggaaacttctgcagaattgcacattatcaaagccagatatcctcaacaaaataatcgttcaactgcacctaatttcaattagatgaaatgagattggtgatgcttgacttttcctaacaataatgcccaagggcttcctcggctctacgacaaattgatagaccaaaaatcatttcactcagtgctcaggggcaggaacccaaagagaaaaacgcaatcacctttttcacatagatccagaagagacctcaagcaagaactggaaatgcagggtttg

SEQ ID NO: 189332 - DNA, 324 bp, Homo sapiens
agaaatgactgagcaggaatttgggcccaggtttcgtcaccaaattttgtatgttttagctatcattattgctgtccttgttattgatgttatcggccctgagggtataatgatgagcagaatatatcccgattctaagaagtcaagaggaaaggaagctagctttgctttatttcaagtttctcattcttttttgccgtcattcttttttgatcacaaaatgcccacctgtgctctagaaaccacgcctccattggacaggctttgggagtactggctccagtgatttgggtggttttgcactgatttctcatccagcaagca

SEQ ID NO: 189333 - DNA, 631 bp, Homo sapiens
aaatccataaaacagtctgataaaatgatgagcaagtctgttgtaactagtgtttggggcttttttgtgtgtgtgcatatcgcattttctgcttcacatccagtaccctatgagagtgaatgccttccaaacaaaggcctttctttggttttgcctgtcaattactttctatagtagcttcttgttcttttaccttccacagtaatatttacgattcatgagtctggaggttaagacagcaagtgcctgcctgcatggcataaattaatgctatctgtatagaattcattaccctgctttcacgcactcaaaaggaataatactaatcaaaaaattgctgtcatcgtctgtgtcctttgctggctgaggctgatgtgtaacagcaggtgcttccgaaagaaatgccgttggcacttgtaaaggctggccagacacagctatgtcctttttgcttagggaaagaacatcgtttcttttgatggtggattgtcagaaggaattttcgcagaatagttcaggcaaacaaagtggcacaacatgaaaatgatttcagaagccaagcttgactgtagaatttgagaacatcaccagtcaacaatcacacaaagaatgatctctctttggtctgtct

SEQ ID NO: 189334 - DNA, 279 bp, Homo sapiens
atacagtgttcatccttggaagatacttgatcctacttggagtggaggagggaacttcttgcctgagtattctcccagcaaaactttggtgcacactctaggctgatatgtagaaaatttcatgagacttttctgaacctttgtagagtcaatatttggcacttcagacacagtaaggttttaaaaacctggtttttcactttgtgttcatgcttgaggcactactgagttgctgctaatgttagcagggctgcctttaacttagttaggtatgctttg

SEQ ID NO: 189335 - DNA, 634 bp, Homo sapiens
tgacgcttaagacccccgctgtcattacagctctagtgtcgtgactgggatgagttcccgtgtgtgcacaaaatgggctcctgttttgaggcaatgcagttacatgaactctaggcaactctcctaactggtttaggacatgtgaggactatctacctctcctgtagcaaagaacacaggcatctgcagcagtaacgaggactgctgggcagttgtagcttaccctctccccataagaagttcatcctggctttgagctgatctcaacagggaaaacagtatggctgaaatagggttcttcactctcttgtctatggtgctatcctgggtttctgtgttccacaaggattttgcaattttcctggtgctctccagtgtacttcctcattcatgctagtgaaaatacagttgtttattcattgttttggtccctttttgctggggaagatgaataccaggcaagtctagacagctatcttgctgacatgccagtccacaagttttttcagttgtcttaatttgtaacaatcttgttcagattaaaataaacttaatttcaatagtatataaaaattttgcatttgtatagctctatttccttctgcctcctttgtgctattatttactaaattta

SEQ ID NO: 189336 - DNA, 125 bp, Homo sapiens
cttcacaatattaataatatatgtctttcctttaccatttccacctccaatataattatttgagtctttctacctcacattaaactattgaaactattaagaatccaaccaacatggggaaatag

SEQ ID NO: 189337 - DNA, 198 bp, Homo sapiens
ccatatcttttatacttcctcccactaatattataaatccactaatacagtacatagtaaaagaatcagattttttggatgaaacccaccatttaatgtgtttgacttgaattcataattctctccttctacaattaaaaaattaaagtgctaaaagattatccgcacgtaacatggttttacatcaagtatatatta

SEQ ID NO: 189338 - DNA, 136 bp, Homo sapiens
tgctgggattacaggcgtgagccaccacacccggcctgtagatcattttcttgccatcatggtacaaatgagagttctgttttatggtaactaaaaaaagttctttacttatttgttatgatatggggtattttga

SEQ ID NO: 189339 - DNA, 146 bp, Homo sapiens
tgagaagacaagggagggggagcctcatctgcccagagtcctcctgtcagcctgtccaaggtgggcctggggctggggctggggctagaggcctggtgatcagccaccctgcctttctctgcccttcctccctccctccctccaca

SEQ ID NO: 189340 - DNA, 194 bp, Homo sapiens
gacctgcctgagtaggtgttcctgcctatgtggcatctgcctcatcaatccccagggccctcttcttggtctttccctgctcctagggagatctttctcagaattcttgctccacttgctccagaactgctgaaattccttaggctttggtcctgggctctcatttcacaccacatatactcatatggtccaat

SEQ ID NO: 189341 - DNA, 337 bp, Homo sapiens
gctatcctaatgggtgtgaggtggtatctcattgtggttttgatttgcatttccctaatgagtgatgttgagcatctttttatgttcttgtcagccatttgtctatctttggagaaatggctattcaagtccattgaccatttttaaaaaaagagattgtttgattttttgttgttgctgaattgtaggagttctttatatattgtgaattttaattccacatcagttacataatttgccaaaattttcacctgtcctgtagtgactttttcattctgttaattgtgtcccttgattcccagaagctttaaatttacatgggaactggttttaaagt

SEQ ID NO: 189342 - DNA, 335 bp, Homo sapiens
ttttctaattcactaggaaaataaaagcaatctgaaggaaactctctcaacattacatcttggtaccctctagtatctagacccatagtctcctctcttctgttagtagagttgaagtcattatggtcctacttaacagcaaatgtttgacttacactctaaagtttactcctcctccacctactctagaatatcattagaacttcctcattttattcttgtattatcaagctttttctctttattggattgttcctgctagtttacctgttttaaagtcattctgacacaactcctcttcatttgacataatcatggtctcatttctctgctct

SEQ ID NO: 189343 - DNA, 102 bp, Homo sapiens
taatcataagtcaaatgatttattaataaaataaaattttctttatttaaataaaatttataggagatatttctcttaagagggataaaggttgaaaataaa

SEQ ID NO: 189344 - DNA, 569 bp, Homo sapiens
aactctctgggacagagctctcagaaggtggagtagactgccatctttgctgtttagtagccttagccattgttgccttcaggctttagagagtcaaggtgaccagggactggagtgaactgccagcaaagcactgctgcccttgggaaaataggtcagactgcttttttgagtgggtccatgatcccattcctccgcagtaggcaggatctaccaagtggagactccagccccctcctgctggtgtgttcaggctggcaaaatgtctgtacctccctgggttggagttcccaaagggagggggaggggcaggccaccatttttctgtttcacagccatcactaatgataccttcagatcctggaaaatctgaggagactagggactggagatgactgccagcataccacagcatccttacgaaaaagtaaccagactgttatgtgggcccttaaacctatgtctcctcactaagcttgggcccacagcacagatcccgcattctggacaattgcactgaatgattactcacctgcatctctctggggtagagcccccagcagacaggc

SEQ ID NO: 189345 - DNA, 593 bp, Homo sapiens
tcccacagagacaatccataaaggcagatgatgccaatgacagctccatcctccttagcctcagttccttcatttctaaaatggggacagtagcacttacccttgcatgttattgtgagcaatgagtgggatgatgtataaagtacttatcagagtgtctggtatacatcagtgcttgctcaatgaaatctatgtgagacagcagttgcggcaaacagagcttggactctggagtgaagagctaggtcagaaattaaattagccccactgcctaaaaaatacatgacttttgttagttgacttggtttcttccagtgtcagttcctttatctgtaaatgggaatgctaatatttatcttgaaaggttgttttgtgatttaaataatttaatgtatttaaagaccctagttcaccacttggcatctaggaggagctaaaaaaatgaaaacagttcttagtcaggttcccctttaacactattgctacacctaaaacaaccaatttggccaggagtggtggctcacacctgtaatcccagcactttcggaggccatggcaggcaaatcacttgaggtcaggagttcaagaccagg

SEQ ID NO: 189346 - DNA, 221 bp, Homo sapiens
gcgtccaggtcatcctttaacatagtatctctacgaaatgactgataaactccacccaccaaaagatgtcagccctggaggttctcaaaaacagtttcttaaatctgactggtctgtgaaataaaaaagctggggagacaggaggacaggtgaccactaatctagaacattaacaatttcacatatccaaattcaagtttatctgaatccctctaagtcat

SEQ ID NO: 189347 - DNA, 469 bp, Homo sapiens
atacctcaacatgatgaaagccatatacaacagactcacagctagtatcatactgaatgcagaaaaactgaaagcctttcctctaagatctggaacatggcaaggacgcccagtttcaccactcttattcagcatagtactggaagtcctaactagtgcaatcagccaagagaaataaataaagggcatctatatgaataataatgaaacttgacccctatctcttgccatatacaaaaatcaaattaaaacggattaaagacctaaatctaatacctaaatctatgaaactattacaagaaaacattcaagaaaccccctgagacattcatcttggcaacaatttcttgagtaatccgtgagggccctcacggattacctcaaggagaaacatacacatttattattatagatagagatttcagcccctatttcagtaacttgatccaactgacatttatagaattat

SEQ ID NO: 189348 - DNA, 648 bp, Homo sapiens
gaacttggcattgaacactatgtggttttgtgtaagcagaatttagattgtgatattttctgtcgcttcataattctaattttagactttcaaagtaggataattcactccagaaagtctgaaatctgtgattttccatacactgccaggtacattgatgtcagtggtttgaatcaaactgaatatcctttataaaaaatatggtggatcattttatatatctacctgtagaattgtgaccatgggttttctgtttttttatttataaaaatgtaggagattctttttatttgcatttgaaaatttcttggaaacacataatacagtgatatttatggaattttcctgcagtggtagtaaatgtgaagagtgagggataagtttagagcacaagcctcttactggtcttttgctttacttaaaaattttttttttcacttttctaattacttgtctgaattgcacagggtttcagtttgaatattgcaggtaccatgaagtcttttcttgtagctattatgtacttgtgtgatgccatcaactagattataagtgccttgagcataggggttactataaattcatctttgtattctattgtacttagcttctcacataacaactaatataggataagtataatgagtt

SEQ ID NO: 189349 - DNA, 264 bp, Homo sapiens
tcaactcttccatttcctcagcaataaaggtgcctcacagctctaccctgttcctaacacgttgaatggcagcctatgaactcagtaattcttttctttgtaatgggagttatcaaattgtcattttctttctgtacctcatattgttatttctcctattctaattcctgtatgtacaaacagccaattccagattaccgatatatcttttaaataagtccaagcataggccgggcgcagtggctcatgcctgtaatcctagca

SEQ ID NO: 189350 - DNA, 346 bp, Homo sapiens
gctggtcaagaaggtgtacaacgacattgtatcaaaggccacattgtgtggtaaagccaataggtcctacaggatttgtcaaggagatggatcttaagctcacccttaaagacaacagaatttggacaggaaaaaaatagccacaggatctagtccactgggatctgtcaaatggatttttcaaacttctgagcttacttgagaagaaaccaggagccaggtgagagaaaaagtaaggttcttgagcagtttctctcaagtcttcagggtacaggaagacttgtctgactgaaaaaatagatctgcaaagatagcttgggtcgttgttacacattctggtccagct

SEQ ID NO: 189351 - DNA, 136 bp, Homo sapiens
gtctgagggttctgggctctcttctctgccatgtgcattagcaccaccttccacgtgctcaccacacacagcagtgtgggagtcacatcaccttcgttctgcctttaatcatctctctcagccataccctcctcgc

SEQ ID NO: 189352 - DNA, 636 bp, Homo sapiens
cctttaggacaactatggccccaaaaaaaaaaaaaaaaaaagagaaaaagaaaaaagaaaaaaaatgttggaaaggatgtgaaaaaggcaaagctcttgtacattgctgatgagaatggaaagtggggaagccgtcatgcagaactgtttggcaggtgctcaaaaagttatatatagaattatggtgtgatctggcaagttttctcctagatatatactcaaagaattaaaaacaggtgttcaaacaaaaacgtgtacactagtgttcataacaacatcatttgtcccaaccaacgggggaaggaaccaaaatgcccatcaacaaatgaatggataaccgaaatatggtatatccatacaatggaatactgtttagtcataaaatgtaataagtactgatttatgctacaacatggataaaacttagaaacattatgttgtgaacataccagaatctctgggacacatttgaagcagtgcgtagagggaaatttatagcactaaatgcccacaagagaaagcaggaaatatctaaaattgacactctaacatcacaattaaaagaactagagaagcacgagcaaacacactgaaaatctagcagaaggcaagaaataactaagatcagagcagaac

SEQ ID NO: 189353 - DNA, 415 bp, Homo sapiens
caaatctggtaatgtttgggaacatttcgggagaggaaagggccagggctagtgcagctcagaaaatcatccgaactctttaaatcacagctgcacaggtgacttgatttagagggagaggtgtaaactgtcattatctgtgaatactgagctctaatcctgtagagctgcagtggagactgctagagaagatgattcctgatctgaaaacaattccagcctggaggatcctaaggcatttccttgtaagggtagttttcttctgtgcggaaaagaaatgaaagaacatgtgcaaatatgggtgggagaagaagaaacagagacagagagagagagagacagataagttgcaaaaacttggatctttgtatttctttcttttctttttcttttcttttcttttcttttttctttt

SEQ ID NO: 189354 - DNA, 248 bp, Homo sapiens
gagattctcctgcctcagcctcccgagtagctgggagtacagacacataccatcacgcctggctaatttttgtatttgtagtagggacaaggtttcatcatgttgaccaggctggtctcgaactcctgacctcaagtgatccacccacctcggcctcccaaagtgctgggattataggcatgagccaccatgcccagccgagacagggtgctttatacacattaagtcattaaacccattaaaaccct

SEQ ID NO: 189355 - DNA, 417 bp, Homo sapiens
tgcagtcaacaaatcatgcatgaagtattaattaagcaagtaattcctggtgtgtgcctatctctgtgctggttgctatgggtcaaactcagataagatgactatccttggcattcttagcaatccaaagaattagtgaaatataaagcagtttgtcgtgcagttaaaaactgtggactctagactgtgagtgctaagggagtgagagaaataaaggtcattaaggggcttggctggtcagacctttgtggaaaaggcatgtcttcatgtgggccatgatagatcggtaagatttgagaagggaagaagacagtccataagggagtggagacagtttgagcaaaggcacaaaggaagagtatccttggacaggtttattatgccctgtataccttggccacagagaatggtctgcat

SEQ ID NO: 189356 - DNA, 366 bp, Homo sapiens
tcacccaactcggcctcccaaagtgcctgtaatcccaggattatgtgcctgtaatcccagcacttttttgcaatacctggccaattataaatgccactttatagaagaggagaagtggcagagataagaaactggcaggtcacacaaagcccagattctatccaaagcaaaatgcatttgggacctgatatcgtttggatctgtgtctccacccaaatctcatgttcaattgtaatcctcagtgttggaggtggggcctggtgaaaggtgattggatcatgggggtgggtccttcatgaatggtttagcaccatttcctcagtgctgttttcgtgatggtgagttctcttgagatctggttgttta

SEQ ID NO: 189357 - DNA, 259 bp, Homo sapiens
tgaaggtaaaggaaaggagaggattaagagtagatccattgcacctgtcatgcctttcaatgaaagaaggaatgcaatgggaacacaggtttgggtgaagcaaatgaaataaattcagttttggacatcctgaatttgtgataccagtagccatcattgtttatggtttacctagcattgttgcaaatattttacatttatcatgtcgtacaattcttaccgtaatctcacaaaaaggacactattatttgttatcccc

SEQ ID NO: 189358 - DNA, 993 bp, Homo sapiens
acactcacacccacacatgcacacccacacacatgcagtcacacacatgcacactcacacacatgcacacccatacacatgcacagccacacacgtgcacacccccacacacgcagccacacacatgcacacccactcgcacacccaatgcctgccttgtctttccccactggcttttgtgactcagattgcagggcaggcccagcacccccggatcagagaccccgtctgcctgtcactccttgggcccctccattccctccctgcattcacctctcctgggcgtcataacctctcaacacctctttccctttcctcccaaaccctcttctcccttctctgagctgcttctctcctttagactttcctttctttctgacttcaccatctgaagagtgtcaggccctaccaagcaaactgggccatgcctaaggggacactgggggaaagggccatgcctgagggacccagcctgggggaaaggtgggagtccaaggccacagggctgcaggtctcatccagggctgactcctgtgtaagaggacacagtggcaggccacagccatcccaggaacacaccagcaaggctccccaaaaagccacggtgatgggagcggaaaccctggtcaagaaataagaagcaactcctgcagtctctccctgggtctccacggaggatttgcaaacgaaaatgaacagctgaagccttcctaggtaaaactcagtgtgccatggggccccatgtacacagaccaagagcccacacagaaaaggcagcttgcagtggcatccaaccatcatttcacctgccttctcccatcacagtttggggacagaaaccaaccacagaagaaaaaagatggcaagctgggcatgctggctcatttctgtaattccagcacttcaggaggctgagatgggtggatcacttgagccaggagttcgagaccagcctggccaacacagcaaaacctcatccctactgaaaataaa

SEQ ID NO: 189359 - DNA, 372 bp, Homo sapiens
tcagtccgtccttcagctctcccacctcccttagcccactctcctggtacccaacaggagccccatttctttgggctttttttctttacaaaaactggttttggcttaggacgctcagataagcattctcacattttggagaaaatactgttttaatcttcttcctctttatccaacttttgccagattaatcaaaacacattttccagtgccccttcaattctctttacgctcaattttcaggattttattttggttattaagagctgtgctagtgatacattcataacaagaaaaagcagcaggtggccaggtgcggtggctcacacctataacccagcactttgggaagctgaggtgggaggatcgcct

SEQ ID NO: 189360 - DNA, 223 bp, Homo sapiens
ctactcaggaggctgaagcaagagaatcacttgaacccaagaggcacaggttgtagtgagccgagatcatgccactacactccatcctgggtgatacagtgagactccatctcaaaaaaaataaaaaagatattatcttgtattagggttctccagattaacagaaacaacaagatgtgtgtatgtagagatatttgttttaaggaattggcttctgtgtttg

SEQ ID NO: 189361 - DNA, 369 bp, Homo sapiens
tcctaccctatcctctcaatctcaggaatatccagttattgcaaacatgcctctaaggggtcaagtcacactcactaccgccaccacttggtggctccactcaacagatcttcactcaacagttcagcactcaacagatcttcaagagcagggtcagcccttgcagggccttgaaactgagggcctccttaaactcgtgctgggtgatctccctagtcctggccctgctcagcagtctgccgctgaagtgctccctgggagcagaccaccagcccaatcctccagcctctccaggttggattgagtgtctggctgactcaggagcatcacatggggaccaggatgccagagggaggtggcgaggcccaa

SEQ ID NO: 189362 - DNA, 363 bp, Homo sapiens
gttttcaccatgttggccaggctggtctggaaccccgacttcaggtgatccacgttggcctcccaaagtgttgggattacaggtgtgaaccactgcgcctggccatgaagtgtccaataaatattagattgacataaagaaccctcaggtgtgctatctcatggaataccctcaaattcctctctggatcttcctatcacagttgtattattggggtcccatttggatctctcccactataggtagctcttcagtgggacgggctaggtaagagaggctgggagtaagtctgtctgatctaggatgtcttgcttaccacccaggtagggggttatatactcccagcctttctgattccattgt

SEQ ID NO: 189363 - DNA, 353 bp, Homo sapiens
gtgtgtgtttaaagactgagccaagtcacctccagggcagtgaaccttgtctcagggaccaatgagatgaaatgtacaagctcaaattgaaaacatttgtgtactgcagtctttccaggaagtgttctctaaccactgagctaaacacagaagaatgtataaatatgtatgctctgccaacagaagaattctatttgattataattttctgtttctatcaagtgcgtatccctctctgttggaaacacatggagtgtaagctgagtgggttattattttagcaatcatactttgccaaagatctggtcattttttccactaaggtatatgaggcactattcttttattttttt

SEQ ID NO: 189364 - DNA, 247 bp, Homo sapiens
attttaagataaacaaagactgaaagaatttatcttcaggagatctgtactacaagaaccactaatgaagtacttcacacagaaggaaaataatccctattgaaagcataaaaatgcagaaagaaataaaaagctataagagtaaacatatggatgtatccaaatgaatattgattgtattaaccaatgctaactatatgctgctggtttaaaagtatataacaaaacagcacaaagtatgagagag

SEQ ID NO: 189365 - DNA, 414 bp, Homo sapiens
taaaatatgatgcagttcaaataaagtctgcctgtgggacagttctgcacacaggctgctagtctgagattcctcctggcacagcccatgagaatttcctccctcacacatggaaagaaactggttgttttggaaaccagccaaagagaggctcaagttctccaagagaattcatatcagtctttgcagactagtattcatatttctttctactccaaatggttcaattacatctaaagtctgcgtgaaccctttacaagaaaccagtggccagtgtggatgaccagaagctactctggctatttgggtcaagatctataatgcctctctctgtttatattcattatttacatttttaaagttatttgtaagtgcacgtatacacacagtttacaaaaattcacaaatataatg

SEQ ID NO: 189366 - DNA, 199 bp, Homo sapiens
catgattgggtgcctgggcaaactcccctggctggttttcacctttctgttcagccagcaggttggaaatctggtactagaaaaagctgcatcccagcaagcatcatagagagatgagcatcttccttgtctattaggaagacgattctccaggtgataggagagagaaggctgagtcccaaagtgggcgggggacttg

SEQ ID NO: 189367 - DNA, 498 bp, Homo sapiens
tacatttattgtctcacagtttccacaagtctggaatccaagcacctcttagcaggatttcctgcctcaggtctcacaaggctgggatggaggtgtcagctgggctacgtttcttcctggaggctctgggggagatccccttctaagttcactcaggttatccacagagttcatagccaaggagatgcgggactgagttctgggctttgtgctgtcagccacaggctgcccttagcaactaggggccactcacagtctttcccacatggaccccccagtgtggctgcttacttcattgagccagccagaagcacctctaggatgggtttaacagtgtgaaggagtcttaaacttaaaagtgacgtctgccacctttgccatattctgtgggatagaaggaagtgccaagtcctgtccacccttgaggtgaagggattacaccaaggagtatacaacaggagtcaaatatcatggagaatactgggcaacatggcaaaa

SEQ ID NO: 189368 - DNA, 360 bp, Homo sapiens
atggggagttattgcttaatgactacagagtttcagtttggggtgataaaaaatttttggaaatacatagttgtgatgattgcacaacattctgaatgtaattaatgcctctgaattttatgtttaaaatggttaaaatggcaaagcttattacatatgcttttaccacaataaaacattgtaacattaatcatagaaccaaaaccataaaaccatttttttaattgtatatatttacagagtacaagtgcaattttgttacatggatatattgggtaggagtgaaatctgggcttttagtgtgtttatcactggaacaatgtacactcaccaatttcttatcaccctcccccttcccac

SEQ ID NO: 189369 - DNA, 181 bp, Homo sapiens
gtacctcacaagacctggcagaagcaggaagcacattggacagattaaaaaggaccaagaagaggaagaagaccaagaccctgagagttatttttgttcaccactgtattgaggtataatattttggggtctcatttttgttggagttctatagtatccttaatgtggcagaatctggaat

SEQ ID NO: 189370 - DNA, 559 bp, Homo sapiens
gccctttcttccctgtcgcatacggatgccaagatcctaactattgcttactcaagttgagtaacctggatcccctggacaaatctctcctggtgtgatctttaattccttagcggctgggacatttctcagggtttgatacgagtttttcaccctgcaaagaccctgaccaaagagaggtaaggttctgggagcctctgtctgccccgacatacttgtgttagcatgcagttctggaagaagctgagactgctgccctcctctgggaccttggggccatggtgttctctgagcaccccgtattgacgtgtcctaagagacgtccgaggggccgtttgtaccttctggcctggggcagccagaagtctggccaagtctcccggacttagccggatgtgggtgtgttggcctgtcccgccaactgggagctgagaatagcagaatagggtcagggggtgatgggaaaagcactagttggctgctctcctgggcagtggggcagtgaacagaggaaacatgatgcggggaggtgctgtagaaatgggcagtttggagaaga

SEQ ID NO: 189371 - DNA, 386 bp, Homo sapiens
ttctctttatcactatttttcagcaattagattttgatgtactgtggttatcctgcttggagttaagcttcttcgttgttggtttatagttttcgtcaaatttggaaaaatttggccactgtctccttaatttcatctttctgttctcccttccatatatagccactcgatattattccaaaaatctctgaggtttgattccttttttccctagttatattctctttgtgctgtattttagataaaatttgtttttcaatttcactgatcttctttagtatctagtctgctattcagttaattgttttcatatattgtatctttcatctctagaagttctgctttttaaaaaaatctttgatttttctcattaagtatttgtatta

SEQ ID NO: 189372 - DNA, 382 bp, Homo sapiens
tctcgggtttttgttgtggtctttttgtttgtttgcttgtttttgagacagagtcttgctctgttgcccaggctggagtgcagtggtgcaatcttgactcactgcaacctttgcttcccgggttcaagtgattctcctgtctcagcctcctgagtagctgggactacaggcatgtgccaccatgcccagctaatttttttgtatttttaatacagacagggtttcaccatgttagccaggatggtctcgatcccctgaactcgtgatctgcctgggtatttctttgtagcaatgccagaatggcctaacacacctagcccactgtgagcacttcttcaggaaatttctctgaactggatcaggtgaatcacctgtctgcaca

SEQ ID NO: 189373 - DNA, 157 bp, Homo sapiens
tcaaagtgaaataacagaagctaagaatgagctgtcaaacaaaagggacaccaagtccatgtgcctgactagaacaggtatatgctcaaaagggataaagaaattaagttgggccaggcacaatggctcatgcctctaatcccagcactttgggagg

SEQ ID NO: 189374 - DNA, 326 bp, Homo sapiens
tatgtgggctctggaatgacaccaagtagccattaagatgtcatatagtagacatcataacttttaccctatgttcaacagcgtacagccaatggctaatcaatattatctctggaaaccaatgagaatacctgtcaaaacttttatcagcccactccttgttcccctttgcctttaaaaacctgcttgtaccaaacagagtactccccaaggcaacctgaaatgggtccctggcagctgttctcactttggctcaagtaaactctttcgaaattatattttgtgcctcagcttcttccctttaggttgacatacactcaaggaca

SEQ ID NO: 189375 - DNA, 718 bp, Homo sapiens
gtattttttcccccagtttggagagctcacagtcctaagtcattctacttgatgtttaatttaccacaaataaatcatgtagcttaaagtctgtgtatttctgagagtaaacaggtagaaaaagcgagaaacagcagaaaatgcactccccatatttaggagttataatcatgtatgtaaagtgtgttctctgtttaaataacaaaacaaatttgttaaaatttgtacttatttgtaagtacaaataagggaagtgggaccagtaaactcgagactatattgtcaagaaaacttaaaaaagaagtgtttcaagagtaaaactctttccaaaataagctgtcaatccattgaaatgtgtccccaattggtgggttcttggtctcactgacttcataaatgaagctgcggaccctcacggtgagtgttaccgttcttaaaagcagcgtgtctggagtttgttccttctgatgttcagacgtgttcggagtttcttccttctggtggggttcgtggtcttgctggctcaggagtgaagttgcggaccttcgcggtgagtgttacagctcataaaggcagtgtggacccatagagtgagcaacagcaggatttattgcaaagagtgaaagaacaaagtttccacgtgcagaaggggaccccagcgggttgccactgctggctggggcagcctgcttttattctcttatgtggccccaccgac

SEQ ID NO: 189376 - DNA, 314 bp, Homo sapiens
tagtgcgagaactaataatatcaaacactaggtgataacctgttaatttccatctaaatgcaaaagaggctcttcaggactatggaatagaatgtcctctaaaataaagagaaaaaagctttcttcatttcctaggcattttcctctgagttcccacagtggcaaacattctcttacattaacctatgggacattgccccaaatatccattcaaatatcaggttctctgctatctgtgagccacttaagagcagtgagcatatttttggcttcagcattcttacagtctagcatagggctttgcacatcatagg

SEQ ID NO: 189377 - DNA, 259 bp, Homo sapiens
atctggagaggttgtaaaaatactgattgtagagagtctcataccttcactctattggggtagggcatggtgtcacattttgtaacattaactaaatcttcataggtgtttgctgtaaaactccatgaacttcagtgtgcacaccatctaggttctaccaccagcattttttttttttttttgagacagtctcactctgtcacccaagctggaatgcaatggtgcggtcttggctcactgcaacctctgcctccgggtg

SEQ ID NO: 189378 - DNA, 366 bp, Homo sapiens
taatctcgtttaaacaggaggcagtcattagatgagatttggaagctggggagtttggggaatggggacaataaaaaaggtaaaaaaacaaccacttggagagacagaatatattgtccactagagagagtgattggagggataccagatagagcataagcagctgagttggtattagaagcagtcaagtaggttatgtttgtatttttccttttaccaccaaggttcaaaagtccaggatcaggagcggaatttaaatatccacacatactctaccaccaaacacctacaagtatgccaggcatgataatatgcacttgcaagtttcctcatttaatctttatagtttcctttctcttttccctc

SEQ ID NO: 189379 - DNA, 481 bp, Homo sapiens
aaggccttttcatcccacaaacacaataatcaagccctgaggcaccaaaagcatccaagggacagccaggaaccaagaattcttcttctaaccatgagatattgacagacaaatcttcctgccaagataataggtccatcatgacccaatttaggaaacttgatagaataaaactatgtttgggcattttcttggaactggactgtttttctctccctgatgtagaatggcttctaagtgattactcaaactctagcttgcaaactgcttgaatcaaaggaagagattctcaatacccctgtacattggccttcgtctgtggaagtgtgtaagaacacggtgcacaatgggtttacgctctttagagagcctgtgtcagggttcggggagggacaggtatcattttaaggtcttcaactgctgcctccccaggatacccatggtcaagcgtgttccacatatttttccaaagtcatgattc

SEQ ID NO: 189380 - DNA, 382 bp, Homo sapiens
tgaatttctgttgtttataagccacccagtggaagggattttgttacggcagcccaaacagactaagacggtgtgaaaggaaaggaaatctcaggaccccaaagtcacgaagccaaagggaagtcaagccaggaactgtgttcggcaaacctgcccctcagtttattcctgaataagagggctacaaaggtaaaaaagctacagacctccctcgctgtttgcctgcaggaaattcccatggaccaaggacagacagaactcagtcatccctcagcagctcacctgagacaggtgcagatctgatggcttcctccaccctattgcttcactgagccagactagggcggaagcgactgttcctctatcctcctctcagatgtac

SEQ ID NO: 189381 - DNA, 103 bp, Homo sapiens
ttccaacacatactataatggaagagaaaaaggtaccacaagagtgaaatactaggaagcaagaaagacctgtctaaaaaaatatttaagacaaggcttaaag

SEQ ID NO: 189382 - DNA, 452 bp, Homo sapiens
ggtggaatactctgggaacctagcttcctctgggtattaattgatataaaagtaagtagatgagctggcacgatgcctgtgtcccagctacttggtaggctgaggcgggaggatcacttgtgcccaggagtttcagaccagtctgggcaacacaacaaaacctcatcccaaaaaaataaaagtaggtggaatactcccccatctccctacctcctactccacaagaaaggatgaagtatgccctcatggtagggagcatggataggagctcttccttaaaactggcaactggggtggtttgtgactctattaggagggataggagttagacagctggaaggatttaccaaaagttaggaaatgaagtaaaggaatgaggtgtcttctcctttttttttttttttttttatgggaaaaaaaattctggaccaagggcccagggggaaaaaaca

SEQ ID NO: 189383 - DNA, 265 bp, Homo sapiens
agttactgggtgggtgaatgttggtaccatttactgagacaggaaattggaaaggagcaggatttcaggagtagatgagtgggaaaatatgaggcctgtttcacacatgtcattacttcttatgacaatttatacatctctctcccattttgaatgtataatgttttagtctacatcaaaaaagatctaaagggtgttggcagataggtacctcccaagaatgtatacaagatgtgaaaataatgtttccctacatactttcact

SEQ ID NO: 189384 - DNA, 468 bp, Homo sapiens
gggccctgcctgtttgggctgcctggcatgcagaggccccgagtcaatcattgttgaaggccttaatgcactgaagagccagcccagtgctgtcaacaaaacttggggagctcggaggggcccagttgaccctggctggggcccagggagcctctcccagtgtctcaaccatgagaggaagttgcaagactgccatttctgtccacaggctcagctctttttggtcaactttcccagctcttggtctgaggcctgtgtgttctcacatgccttgtcacaccctatggggacaggttgctaggaaagtgggtggggggacatttcctcattttctagctcgtttgggccaaggctgagagatctatgaggtcaggggtcgtgctcccctctgtggactcagctttgaggacaccccctcaagtttcctgttgcccgcctgctttgtgattgcattagcacccggcctgc

SEQ ID NO: 189385 - DNA, 352 bp, Homo sapiens
tgtacaactcattgaaatctctctttataagtcactcataaacatgactgcagtcatatgcctcacagttactgtactttaatctgcacttgcttcctcctacgtatttacttaaagagtcacagcttgctggaaatgtatccttcctactgttgctctgtgtgtctccaacggggggattggatccttgtatgtttttttaaccagcagataattgtgtgctttaacatgcattggtacataatctgctttccacatagaattagagaatacccttatatctccagtggagtgtcttagtccatttctgctgctgtaactagagactgggaaatttgtaaaaacaaatata

SEQ ID NO: 189386 - DNA, 442 bp, Homo sapiens
tagctcacgcctgtaatccctgcactttgggaggccaaggcaggtggatcacttgaggccaggatttcgagaccagcctagccaacatggcgaaatcccttctctactgaaactacaaaaattagccgggtgaggtggtacactcctgtaatcccagctactcaggaggctgagccagaagaattgcttggacctggggggcagaggttgcagtgagctgagatggcgccatgatactccagcctgggagatagagcaaaactcttccttaaaaaacaaaacaaaaaaaacctgctgcattgggattcagtttcagcatgaattttggaggagacaaaaacatttaaaccaaagcagatcgggtggtttaaacaacaaatttattttctccacctttggaggctagaaacccaagatcaacgtgtcagcagggacccactcg

SEQ ID NO: 189387 - DNA, 645 bp, Homo sapiens
cagagatttatgcagcgagtcaaggagaaagaagcaacatttaaagaagctgaaaaagagctgcaggacaagttcgagcatcttaaaatgattcaacaggaggagataaggaagctcgaggaagagaaaaaacaactggaaggagaaatcatagatttttataaaatgaaagctgcctccgaagcactgcagactcagctgagcaccgatacaaagaaagacaaacatcgtaagaaataatagtttctcttactattctgagagccctatcattctacatcgcaacttcctgtgagattgtctttgtagcatttaactctgaagttctcattttaaaaattggcttgcttattgtatattttccccaactaaagtgtgaactcctagcggggtgtggtggctcatgcctgtaatcccagcactttgggaggctgaggcgggtggaccacctgaggtcaggagttcaaaaccagcctgaccaaaatgatgaaaccctgcctctactaaaaatacaaaaattagctgggtttggtggccggtacctgtaatcccagccacttgggaggctgaggcaggagaatcacttgaaccccggaggtggaggttgcagtgagccaagatctcaccattgtactccagcctggg

SEQ ID NO: 189388 - DNA, 602 bp, Homo sapiens
tacatatgtaactatcttcaggcagtaacacaaagcgcaaagacccttccatgctaaatccccgggtactcggcaggagtcacccataagcaaacaactaaatcttcatgacccacaattttctcatctgtaaaatggggtttataatacatttcccaaagaattgaagtggcaattatatgtgtgcccaaaaggtagtaggcattaaaagtgatagttccatttcctattttccacataagaactaaaagggtagtatgacatgtaatagcgctcaagaaatactttggtaaaacttgttaaattcttaaatcaagcacattttgccattttcttgcatcatcataattcctctgccaagtcatattaaaaaaagcaacaaaagcattttactgaaaagcattttactaactaaagcttttagctgtgaactccatatgtgtgctctttctatgttactcatttaataaagactaagataaatacaaggactcagaaatgtagacatgggtggcatgtactcagtgagctcaggtactcacattacctcagttttactggggaagcagatggcaaagtgctaaattaagtgaagtagcaag

SEQ ID NO: 189389 - DNA, 311 bp, Homo sapiens
gggtggcgtaagtacatcagttgtgtagcactcatcattatctccagaactttgcttccagttttcccgaaactgaaagcttagtgatccattaaacattaactccccattttcttctcccgcaacaacccttttattttctgtctctatgcacatcaaaagcacaagtcagagaccacttcatatccattagaatggctattatcaaaaaacagaaaataacaaatgttagtgaggatgtcaaaacaagaaccctggcacattgctggtcagaatataaaatggtgcagctgctatagaaaactgtatgg

SEQ ID NO: 189390 - DNA, 386 bp, Homo sapiens
cacagtccctggcagagtctggaaggcttcccagaagtggcacttaaggatcagtggaatgtttttttgcatgaaaagcagggaacagggccgcaagcagcatgaacaaccttgagaagtctggaaaaggcttcgaggattttggtgtggctggagagtaggctgcacgtggcaacatcaagaaataagacaagggaaagaggcagagtcaggcacagaggtgcctcaggagccacggtaaggagttgaggctggatctggaaccacagagaaccaccgaggtggtgttcagaagcagaatcacacagagaaacttgcattccagaaggttcactcaggctgtggcttggagaaagtggacgagaggctggaagatgctgctgtag

SEQ ID NO: 189391 - DNA, 348 bp, Homo sapiens
acagtggaccgagcagagcaagtggctggactctgtctagctcagatgaggtcccaagctgttgctcactggtatgtgcatttgattttgcttcattacatatttgagtccagcacagcagcaaaaagcaaagatgatatttgaaaatagagttccatcctagggaagactgccaaaaccagggcagcctgctttcagagtttgacttctccaggtgctaagccctagggctgtgggtgagggttcaggccctgccctcagggatgtcctaatctgatttgggatattaagcacacgacagaataatgattgatactgggtatgcttctgaacctaaatactcatttc

SEQ ID NO: 189392 - DNA, 309 bp, Homo sapiens
agcctggcgacagagcaagactccatctcaaaaaaaagaaaaagaaaaatgaagataattacatcaaggcacattgtaatcagattgcttaataaagatacactcataaaagtaaccagaaagaaaacaaaaaggaaaaaaaagacacacgacatagagaggaacaaagataagaatgacagcagatgtgtggtcagaaattattcaaggcagaagacagtagaactgaaaaagaaagtaggtcaatctagaattctatacccaacacaaatatccttcaaaaatgaaggtgaaataaacactttttga

SEQ ID NO: 189393 - DNA, 650 bp, Homo sapiens
gttgcagtgagccgagatcgtgccactgcactccagtctgggtgacagagcaagacttcatctcaaaaaaaaaaagaaaaaaaaggacgcagggaccaacctgaacatgatcccaatgatcaacaatggggacaattgagaaataaaataaatataagttatcagattaaaaccaagagaattaagtaaacatccatgagtacatactgatattaacggatgtttgaacaagtaagtggaaggtaaagaaaggaaaacaacccaaagaactgtaaaggatccaatatttactaaaattactaaaaatttggcaaagattattatacttactagtatttgtttttctcctcctttccttgagcatttagctaaattgaatttcttagatcccctctcattgggttgggacttttgtgccttatttttggccagatggaattttggcagaaatgacaggtgtcatgtataggcctatctcataaaatgactagagctatactgcccaatatagtagtcactagatacatatggctattgatcacttaaaagatggttgttataaattgagatgtgctttaagtgtaaaacacaagattttgaagatcttgtatttaaaaataactttaaatacatcattaataatctgatat

SEQ ID NO: 189394 - DNA, 150 bp, Homo sapiens
aacatcaccagtaacctctatggctacatttaatagacacttttccagtccttatgttacttgatctctcttcagcatttcaccctgctgacctgccttgctttcctagacaataagctcttctgattcttttttctctgtctccactgg

SEQ ID NO: 189395 - DNA, 334 bp, Homo sapiens
ttagtgtttattttgctaacttacaaaatggccgaactggttggcagagcttagtgtttttgtgggtgaaagcaaaatctggcaaaacaatcacaaagcaatctacactggaattccataaaacttatttccaggctaacttcctgccagtgatacaatagctaatatttacggagcacttttgtgtcaggcatatgtcaaaattctcctaatccttacctataaagaagacaaagcccaagagtgtgtgtgtgtatgtgcgtgtgtaagatatcaccccacagtctgaattatgcaatccacactatcaactatcagcgttaggtatcactgc

SEQ ID NO: 189396 - DNA, 593 bp, Homo sapiens
actgacctttctgccatgcaatctaactgatcagtaataagggacaggaatggtgatctgtcttattcattcccacaaggcaggcttggcatgaacaagaataacatttggcaaaaatctctgaagagatctgaacctcagcctcagtggaggtagaaggtccctctgcccatccttggttcctttaatttttcactgtccttcagcctagaggtaatagctgctcttttgctgcttccttaaggtccttttaaagttccttttagtagttgtattagtcccttttcataccgctataaagaaatacccgagggccgggtgcagtggctcacacctgtaattccagcactttgggaggccgagttgggtggatcacaaggtcaggagttcaagaccagcctgaccaagatggtgaaaccccatctctactaaaaatacaaaaattagccgggtgtggtggtgggtgcctgtaatcctggctgtttgggaagctgaggcaggagagtcacttgaacccgagaggcggaggttgcagtgagccaagatcgcgccactgcactccagcctgggcaacagagcaagactccatcaca

SEQ ID NO: 189397 - DNA, 379 bp, Homo sapiens
tggagccacagcctcagggccagggctacagagaagcttctggatgccctgacttccatctgtcacctcatgccaataaggaaagtttcgggtggatctggccgaggcggctggggtacagaagggggacccagagatggggcagcccagccctctgccctctcctcatccccatcaggtagattctgcgaacccctgccatgccccggggatcctgtgacttcgtgacattacacagcagtcatgtcacctcccaactatcctgatgttttctttgtggtctttcttttcagtgtcctcactgtatgcccactttacccacttcccacctccggtccccctcatgctgtgcatggatcccgaacctctcccagcccct

SEQ ID NO: 189398 - DNA, 488 bp, Homo sapiens
cctgcctcagcctcctgagtagctgagaccacaggcacacagcaccatgccatctttttttgtagagatggggtctcactgtgttgcccaacgctagtctcaaaattcctaggctcaagcagttctcccacctcagcctctcaaaatgctgggattacaggtgtgagtcaccgtgcctggctggtaatgggttttctgtcaaaattgttcaagtgcaacaaggtgactttcagaaagctggagggtagattttccaacttttgtttttagtgaaggaaccctttttcaggtaaaactgtgcagaaggcctaattgccagtcacacagaaatagagctgctctggtttatttgggattggtagagatgctgagccctgctactccaggtttgcactgtatagtggaaaagtctgttagacttagatgacttgtgagggcccttctgactctaaaattgtataattctaggaggagattgggcataggaa

SEQ ID NO: 189399 - DNA, 217 bp, Homo sapiens
cctaacttcaacagtcagaagcttggcctcccctccgtgaacacacacaaatttctgaattctctgcaaccctgcccatgccagggggagcctagagtgcctattccacccatcagttccccatgagattaggcaggctctgacccaaaggctgacatgtctctaggtatcgtcaaccttccccaagccttgtccactcacctggcatgttagagct

SEQ ID NO: 189400 - DNA, 243 bp, Homo sapiens
ttacctggaagaattctaacagcactattattctcattttacagatgaggaactgaggcacagaaatgttcagcagcaggcccattgtttagagctgataggttgtagagctgagatttaaaactaccaagtcgaagcttacaactgtgctatcttacttttttcaattaagagtcatccttatggaactttggagttgggagttccttagcaattacttaatctaaccctttcattttactg

SEQ ID NO: 189401 - DNA, 342 bp, Homo sapiens
ggccttccaaagtgctgggattacaggcatgagccaaagcgcccagcctagcctgtttttaagtatgaaggataatgagacataaggtagattggacctataatgtcttctcagaaatcatgttaaagacccaccgtatgaaaacagttgggggaatctgcccttttttgcccaaagcagtcctcacattggctttactaccccctccccagcctcccacattttgtactttgctctggacatcctcacgagccagatcctcattgaaaatgagcccctttgaattagctgcttaaaaagatggagctaccatgatgccacaagaaacccagcttgtgcaaa

SEQ ID NO: 189402 - DNA, 658 bp, Homo sapiens
aatgtgtgacattttaagttactttatactattaacttttacaatactttatggtctttttttttttttgagacacagtctcactctgtcacccaggctagagtgcagtggtgcgatctcggctcactgcaacctctgctgtccaggttcaagtgattctcctgcctcagcctcccaagtagctgggattacaggtgcctgccaccatgcccagctaatttttgtagttttagtagggatggggtttcaccatcttggccaggctggtcttgaactcctgacctcatgatctgcccgcctcagcctcccaaagtgctgggattacaggcgtgagccaccgcgcctggtctactttaatggtcttaaattgctggtatatttacaaattattgtggagtggagtgactattctgttccagacgttgttctagcactgtggatgtagcagaaaacaaaagagaccaaaatccttgatgtcgtggaacttgtttctagtgggaaaagacaataaacaaataatgtcagtagttataagtgctatgaaggcaaaacaggtaaggagctagagaatgtgggaggggctggtatttgagacagggttgtcatggaacggctttctgttaaattagcatttgagcagagacctgaaagaatagac

SEQ ID NO: 189403 - DNA, 301 bp, Homo sapiens
aggagccctggggaggagagcgggggtgtttaccagcttggtgccagcacagactttgctcactatcccagcagctctgtgcagtacacaccctgcacagatgttcagcccacactgaccacagccaaggcagtgagaggaggccaggtgtctgagtgtgtagaggccattggcagcctccatgggaggaggcgacatcaccagaagggcagctggaaagaattttatatctgaggctggagtagtttagaaactgagtttgcagtttaggctgaaaactcaggggcacctttctggtaga

SEQ ID NO: 189404 - DNA, 550 bp, Homo sapiens
aatcagatgggttttcataaccagtactttctcagagtggtaaatttaaaaaaatatataaagagaataaataatatttgttgagaatacttcaaataatgtgaagagttattaacttacagcaggagttggcaaacttttctataaagggccatatgggtctttgtcacaaagtcttgggtttttgtttttgtttttttaaacagctatttaactattcctagctaatgggcaatacaaaaacagtgggcaagatttggcctgtgggcagtagcttgctgaaaccttatttagactctaaattttttgaaagagtctacattgatgcatatttttttttcttcctccaaatacagttgacccttgaacaacatgcgtttgagtgaccatgggtccacttgtgatacacgtttttttcccaaccaaatgcagatatggagggctgacttttcatatacctggatgttcctgggccaactgtaggactagaggctgggggggtcttggaaccaatgccgtgtgtataccagggatgactgtttcttatggc

SEQ ID NO: 189405 - DNA, 365 bp, Homo sapiens
caggcacaagccaccactacccggctagcacacgttctaaagtatatattatcctaacaaagcctgaatgaactcagtttggtttcctctctctgtgtatgactaggatcttcacatgccttaccacctagtaagcagcaatctctccatcttattattgttacatggagttttagttttactgttaaaaacacacatgaaaaaacattttcagtcatctgttcatcaaatttatttgtgtattttgttaacttctgtggttacagtaatttcttatgtattgccttctccgagtcttttttttctggctgaagtatatcctttagtaattctttcagtaaaggtctggatattcggcgtgtgca

SEQ ID NO: 189406 - DNA, 387 bp, Homo sapiens
atcctcaggcataaatgggttttaaaggatgaattaagaatattattaccacatagctagaataactcctcaatctgtgtttactaaataaattcaaacttttaatgaaacctttgaggttaattgcattgtaattaaactttcaacaattgggtttagtttgaaaattattcaacttgatttactccttttgaaagaagtaaacacatttcgggtatgatctcatggtatggtttgtgtgggtgtttttatctttgtggaaaatatattattaggtacatgaagcagggggaaattaagaccctaaattcgaggatattatctgtatttaggaacagctgagctgttgatcaagcgttttctatgtttggttataaatttggggca

SEQ ID NO: 189407 - DNA, 835 bp, Homo sapiens
cactaggctaggtacgaggccgggttggtttaatcggccgagggctttttctcctgacttctcctggagatgaagagaactgcaaacactgtgtactgctgcacgcgggctcccccaggccaacagaactgctgggtatatccgcaccatgtacctggggattcagagccagcggcggaaggaacaccagcgacgcttctactgggctatgatgtatgaatatgcagacgtcaacatgctgcgcctcctggagaccttcctggagagcgcgccccaactggtgctacagctctacatcatgctccagaagaacagcgccgagaccctgccctgtgtctcctctgtgacttccctgatgtccctggcttgggtgctagcctcctatcacaagctgctgcgggactccagggacgacaagaagagcatgagctacagaggggccatcatccaggtcttctggcgcctcttcaccatctcatcccgagtgatctcttttgccctctttgcttccatcttccagctctattttgggatcttcgtggtggttcactggtgcgccatggccttctggatcatccatggcggaacagacttctgcatgtccaagtgggaggagatcctcttcaacatggtggtagggatcgtgtacattttctgctggtttaacgtcaaggaagggcggactcgatatcgaatgtttgcatattatacgatagtcttgaccgagaatgctgccttgacgttcctttggtatttttacagagacccggagaccactgactcctatgcggtgccagcactgtgttgtgtctttattagctttgtggctgggatc

SEQ ID NO: 189408 - DNA, 580 bp, Homo sapiens
aaataagaacatgtggtatttggttttctgatcctgtgttaatttgctaaggataatggcctccagcgccatccatgttcctgcagaggacatgatttcattctttttttatggctgcatagtattccatggtgcatatctaccacattttctttatccagtccactgttgttgggcatttaagttgattccatgtctttgctattgtgaatagtgctgcagtgaacatttgcatgcatgtgtctttatgatagaacaatttatattcctttgggtatacatccagtaatgggattgctgggtcgaatggtagttctgtttttagctcttcaaggaatcgccacattgctttccacaatggctgaactagtttacactcccaccaacagtgtgtaagcatttctttttctctgcaacctcaccagcatctgttattttttgctttgtccatttttaaattgggttcttggtgtcgaatgctttcattttagaaatatggtttcattggctttagaattctttcctttttttcttcccattttttagctctacctctccatgtcttctggcatcctcattg

SEQ ID NO: 189409 - DNA, 403 bp, Homo sapiens
tatgtttattgattgtttactatttgttgtgctgggttctttatatagttcatcttatttctcacaacaagtctatgagctggatagtattatatcactttgaagagagggatggaaaaatgagacttcagaaggtgagctagttgcctagcatcctatagcagtaaatgatggagttgagtacagtttgggcctctctaacctcagaattatgaaagtggcaataaccgtgccagcggttctgatgctgggaagttatttcagttggaagtacatctctgccaatggtagagggacccaaactgtgtttaatcacaggttcagtgaccatagtctgtagaataaacaactctctcatattcacttactctgatatttcaaacatatatggctgcttttatgg

SEQ ID NO: 189410 - DNA, 516 bp, Homo sapiens
taagaggtaaaaactatagaacctggtaattgattggctgtagaagattaaggccaaaagggagcatgtttgcaaggacagagagtttggacactttgaacggaagcaccttaggtaacatcagttctgccatgtaagttggtgcaatgttttctgttttagatgaagaaacatgtttagtcaggtaacttgtccaaagacaaacagctggaagatggcagagttaaagctggatttcatttaggtcttactcaaaaaactttgcacttttcccatgagtggctggtcctggcacctcagggcatgtccagaaccctcctagcatctgcagggctgaggatgcctaggcttctctctctaccaccgggacactcggatctgcctcctttaggcaaggttattgcaatggtaattgtggtttttgccattaaaagtaaagcaaaaactgcaattacttttgcaccaacctaataaaaccactgggctcagtgcttctatttgcatcgccatctctag

SEQ ID NO: 189411 - DNA, 495 bp, Homo sapiens
tcctgtcatgcagaggaaacagggcagagaccacggtactcccgcacggctggaaacaagcaaagaaacatttgagtattcgtaacacaggaaaagggccagatttggcttaaagctgctccccaagaagagtatctcagagtggacagacttcaggcatccagtttcactggttttcaactttggggatatttctgtttttttcccatatgttactcagttctcattttatctggaggtcgttttacttatctggagattgttttatctgaattgaaaagcaccttgggtttgtgaaacgtgaggcctctccaggtccacattgctagggtatgatgctgttgaagccagaagaatgggctgcttcagagagaaggagctccccatctctgtgggtgtttaaacagactggacacctgcttggcatgagagcttcttggaagagcagctttgaaagagaagcaggggaggaaggcaagaggtagtggggtcaaa

SEQ ID NO: 189412 - DNA, 339 bp, Homo sapiens
tgagtgtccccatatgaccagctgctgagggaagaagagatgcctcctttccctatgacccagatccctgtaacaaacctcatttcccataaggaaacctcagtgttctttgcagccaaaaggcaactaccaaatgcatatgaaaaggagatgaggtttcatactctctttcaacacagaaattcagatacttagtggacttaagtatggaaaaaaactacaggtagtaactggtcacacgggtctccatggtttctgtttatttcttgcaaaaaaaaggataaacttggccagctcacagcaacaaacatggaagtcaaaagaatgtgccttcagaaa

SEQ ID NO: 189413 - DNA, 623 bp, Homo sapiens
gtaattagcatgaggacctgttaagtgtataaacttgagccttgataaaattgtagtacccaaaaatgaataaagtatcccagaaataatgctttttcttttttcacattttatgaaacagtttaacactcagaatacagagttgacacacataaacttttcctttgtggtttcacgtgtttacatctttctgggtctgtctatttgcatgcctaccacaacttcccaggtgtctgtctttaagggacttcacacaattacttttttaattaatgttcttaaaactgtctttggctagagattcaaaatattttaagagtgatggaaactgatgttgagagagtaaagatttcaaaacaacttagcatgactaggtgtttccctctgtgactttgactaccaaatcattaactcctgtgataacaatgaacatttcacaacgtttaaaagttctcttattttactattggatttttataagtagttagaaatttatgcaagaaagtattgccactgtcttcatgaggaaactgaggcttgagaatcttgtgatttccttaaagtcatacagctggttagcggtagaattagaccttaaatcagtttattttcatggtcagttt

SEQ ID NO: 189414 - DNA, 483 bp, Homo sapiens
ggtaatttgcttttgtacagaagtggaacagagaatgaacaatggtatgacctacacggtataatgtggctttctttctggaaaatcagtaattaactcaaggaccaaattgtcttattctaagatgtttgtcttcaaaacaatcctcttcactattttcatctttttattgtggtaaatttgtacatgacagtattcaaagcattctcttacttcagcaaccattcgtttatgaagttcctgtacattgcctggttcactgagaacatgaagctgaatcagacagttccttcccttaaggaatccacattctggtagggaagatagagaagtaaacaaatgattacagtaggtacaaaaggtaccctggagtcctgaggaggactcacctctgctttagcacctgacagaggaaatgcctgaattgagtcttggagggtggtcagagattgctaggtgaagagatagcagcagaagcacaaa

SEQ ID NO: 189415 - DNA, 304 bp, Homo sapiens
tatctagatgttccccgcgcgcgtcatcttggggtatcgtcctactgcaggagaaccacttgaacctgggaggcagtggttgcggtgagccaagatggcaccactgcattccagccagggtgacagagggatactctgtctctaaataaataaataaataaataaataatattagtgcttatattacatattctctagaatttgattggtaagggttggcactaggctactagcctagccagaagcactgattcagtttcagtgtcaattattagccaaaatatatggtcctccctctccacca

SEQ ID NO: 189416 - DNA, 356 bp, Homo sapiens
tgattgcatttaacagaaggaagccgtttgagcattgcaggcatgttgtatttgcccttttcttgttgcctatatgtggaagaactgacagccatgaatcaggttttgggtccaagcagtaggtatataaagatgtagctgtctatatgcatatagtagaaatatgaaaatgtatacacaatgtaaaattacacttaaaatccttggccattctggaatatatgaaattccttaatatgcctttgttttggtttgtttggacctacgggccttacattagccatcccttttcctggtctcccttttctcccccaatccatttcctgctccttgcattcttactgtcctactcctca

SEQ ID NO: 189417 - DNA, 482 bp, Homo sapiens
agcgattctcctgcctcatgcctgctgagtagctgggattataggtgccaccaccacgcccagctaatttttgtatttttagtagaaatgggatttcaccatgttggccaggctggtctcaaactcctgacctcaggtgatccacccgccttggcctcccaaagtgctgggattacaggcatgagccaccgtgcctgacctctctattatcttaaagtctcgaatgattgttatcattactgccatttattgagtgcctactatgccccaggtgctggacaaagtgtttacatccatcatcttgtttatttgttacaagaattcagcaaggtaactaccatttgtgccaatatcctggaagaagaggcttagatggagtcattagtacagttttactggggagtaacacctgtgaaggggaaagagtggaagccatcagatcacgatgcagacctgacagagtccccaccaggccaatgggg

SEQ ID NO: 189418 - DNA, 132 bp, Homo sapiens
ttccatcattccagtcgtccagattccaacagaagaaatccacagaagaaccacggtgctgctgttgacgctcctctcctaatcagcagtggatctcgcactccaggtcattcttttcaaaacactgatgta

SEQ ID NO: 189419 - DNA, 475 bp, Homo sapiens
cccctgctgctccctcttcactctcaacgttacagaaaaggaaactgaagcttcaagcagtcaactgatttttctgaaagcaccatgagataagtgcagggccaaagcctcaacagttaagccaggtttccctctgattagctgtcacaagtgactacacagagaagtagactcggtatcactaccactgaaaaaaatgtaaactggtacattctgtcaacaatgatacagagatgccagtccctaatgagtagctagaaaataataagaggctgagtgccttggaggagactggaaagggatcctgtaggcctgtggagtcatgattcaaagatcgtaatatattccaaatgaaaaaggaagccactgaccagataagaaagggaatgagatcatcttacgtgcatcttttaaaattccttctggttgctgtgccaagaacagataaaagagtgacaaatgaagaagaggaact

SEQ ID NO: 189420 - DNA, 278 bp, Homo sapiens
tgtgtgcacaggtctgttagatgcacacaggtagtagagaaaaatgtgtataaattattcccatctgatataaaaaatatatatccatcccattcccatgtcttttttccttcaactgttgttagagggatgttgtttatctaattagggcccagctggcatactagaactactttctatttgtttagtccacctctctcaaatgatatgtgttttcttatgacaaactatggcacaaatcttcagctatgtggatccctcagccacttccttttctt

SEQ ID NO: 189421 - DNA, 234 bp, Homo sapiens
tttatttggggtttattagtctaaatagaaccaaggtaaacatatcaactttttcctcaaagtaataacagtacccatcctaacagatactcaatctccaattcactggttatcccctataatgtgtggtgtttttttttgtttttttttttttgtttttgagacagagtctcactgtcacccaggccggagtgccatggcatgatctcggctcacagcaacctccgcctccca

SEQ ID NO: 189422 - DNA, 396 bp, Homo sapiens
aggtttccccttctctcatcctgtccctgttcccgagtcattcctcctaggttaaggtttcccaagctctaccacttgacagtacccctctgtgcacattccagtttgtacaacacttggattagtattagcaatgtcttctctactgggtaagagtcttctgccgtcttggatgctcaattaaacagattagtttttctcattgctacagaccagctggtggtaaactatggctcacaggccaaatctagcccatggcctgctcttgtcctgcctgcaagctgaaactggttttttacatttttaaaggatggtaaacaacaataaagacaaagaacatgtgacagagaacatatgtggcctgcaacacctaaaaatatttactatctggccatt

SEQ ID NO: 189423 - DNA, 264 bp, Homo sapiens
tttcaagggctcaacaggcacacatggttagtggctactgtagtgaaaagcacagacctacgagcatgatgcaatagtgaaataaatcactatttcatcattctttagttatcttactgcagtggccaaaatattcctcatctttccaagaaggtataaaagacatctggagataaaatctttatacattttggggtttcttttttcacctattaaagagcacagttgaaaatccagaatttctgatttaacattcataaaggc

SEQ ID NO: 189424 - DNA, 183 bp, Homo sapiens
ctgcctcagcctcacaaagtgctgggattacaggcatgtgccaccgcacccagccttgggatcgatttttcattaaaaaaatctgtttttagactaaatgcctgcaatgatggtgttgccatttcctgagttaggaacattgcagaggaggtgggaggagaggaagaggtgggaggagaggaa

SEQ ID NO: 189425 - DNA, 236 bp, Homo sapiens
taccagatcagtctgtttttaagtgatctctgttgacatgggattagattcagaactttctttgatttcagtgagaaacaaccagggatggaacccttgaagagcatggaatcctctgtccttccggagggttgttgcaactgacttgtccccacccctagtagttctagagctaggttcctgaggcacatctgtatccttgaagaaacacttttatttttcttcttagattcaat

SEQ ID NO: 189426 - DNA, 304 bp, Homo sapiens
cccaaagtactgggattccaggcattagccaccaaacccaacctctgtttaaacatttataattaaagaagaatgtaaaagaaaaataacatcagaaatttttggtttttgaaaaaacatcatcatcccctggcgaacctaattatgaaaaaaagtgaaaatgcacaaatatacagagaatgtaagaattaggaagaccatttaaccacagataaagaagagagacaggtaatttagtagtatctgcatgcagtctcctcaactgaggatactgcaggtcacacatagaggccagaatagcact

SEQ ID NO: 189427 - DNA, 371 bp, Homo sapiens
gccattttacattcctatcatcaagagctaggctactcaaaagtaactgtatatatgagggaatgtagaagtcactgtgcgtgcccagggaatggtacaggctcataaaatagctcagaagaccttgagtttataccttgtgctgatctttactacagacaccctatgccaattttaaaaaagcaaaaaagaaaaccaaaccaaacctgatgagccctggggaatcagcatctgatctccagagttaccacattagaagattcaaacattcagttttcaacaacagtaaaatcataaggcatacaaagaaacaggaaaatatggcctactcaaagcaggaaaaagtaagtcaccagaaacttgctgagaaa

SEQ ID NO: 189428 - DNA, 345 bp, Homo sapiens
gctcatctgtaaagcagtaaaagctctgtccaacaagagcacactgattaacagacatccattcccctattaaggagtcaagataaagtccaaccgtgcaacagattttttttttactttaaacaacatgttgtccactgcttctccacctataaaatgaacatcatgactcctaactaaattggtaactcccaactgatgcctgccagatatataagtatgtatttcttgattccccaaatgaaaggtaagctccttgaaagaaagtgaggtttgtgtcaatcttttgccctaatacctggcactgtgatatgagtcactagattttttctttttttttttttt

SEQ ID NO: 189429 - DNA, 509 bp, Homo sapiens
gggcacagcagacactgaacaagttacttggtgactacagtgtcctcaactgcaaaaagtgtccaataatgaccaatagagtatttgcatcacctgctattttgattgccctcaagatttcaggcagcatcattttgatatggtatctttgtaagcaaacttaaattctctttggaacatgagtacgtgtaagcaaaatgatgtggtccaactaactttgaataaatagtgctgcaacatccaaagacacaatggattgagtaacctctaaatcaactgcccttataaatgaagatagtcagtgttaaacttaaaaaaaatctgaatgaatatgcatattatacttaagattgttctggttaatgtaaagaacaactgaggaaaagaatgaaactgaaaaaagaaaatgacatccaaacctttcttcagacagacaacctctgtgtcagttttcagggttcgtcatactgtttaatttcaaatctttatggagaggatatggggggaat

SEQ ID NO: 189430 - DNA, 717 bp, Homo sapiens
gttcttagtttcaaataactcatttattttgcagacatagaaattttgtcattctttatgaaagcaatgcggctgttctactgctacttcttggcaggcaatacctgcatagaaaccaatgagcatggctgaagtgaatgtcagacattctatttctgtctgcccacggtgcagcaaccactgacacacttggggcaacctgctttacccaaagtgcagcccgggatgaggccccacctcagcagaactttgatgcatgtctaatgactggcttggagaccttgttcttggaaactacagggctgacatttaagtatcacccatgaaatttgcctcaaggttcaacgctgacattagctaccaatttcggcttcataaccttggagtattctctttgctttctagagcattaaataccatcctacaaagcataaagccattattgacctgttattctgccaaaagacacatacactttgttgatgcccacaattttctttttcttcctctatggtaggtccagacctcttccgtttaggtagacaggcctccttttgtaggtaattgtctgcttccctgccatgttattggttgagtcatggctcatatccacctctctgcctttgcagtttttggtgtgtgtgtgtgtgtgtttttttttttttttattgttgttgttgacagagtctcgctctgtcatccaggctagaaagcagt

SEQ ID NO: 189431 - DNA, 906 bp, Homo sapiens
ctggcattgccctctgtcatcctaaggcgatggaccttgttgctatgtaagggaagtccttacccagaaggctgagaggaacagaatttccaaggacaaaacacttgccaagaagcccagcttcacaaatttcctctatttgtcaaccccttggtacatagttgctgctttgatgaggctgatttcagctgaaataccacagcagtgggaaaaggatataattctttccttgcattccagtgtgaggctgatgtaggcaaagaaacctgccaaagcatttagagacgcatgaagtcccctgttgtgtttaaggtctttttctccacttggacaggttggcagccactctccttctctcttgctcaatccttcctcctgcattccatcggagttcttgtttcccatccaaagagctcaattcctttctgagcaattcctgttttctagtcttccatctcttcctgttgtacagacaccagttcatcagaaagagtttcccagttaattttgatgtagcccagcgtcacctcttacagtgtctggctcagaaattaattcttccttaagtctaactcaatcccccatgttcctcccctgtttctaaactctcagcaggctccccattatctcctgaactaaattctgtctcctaagcccagccttagaggtcttcctccttctggtctccagggctagatgcactgtctcccctggctgatgcagcctcatgccggggtgtgtggccttggaaaggggaatttgacttgtacctactcacccccagggtcctttatcaggcacctgttggtcccagccagcctcttcaacctcatttcctatttttccttctacccttgcctggtggctggcccagtgccctactcaccatgtctctgaatggcatca

SEQ ID NO: 189432 - DNA, 839 bp, Homo sapiens
agctggccggtgaggatactcagcgagtcacccgcctcctcccaaagtgctgggattacaggcatgagccaccgcgcctggccttttctttctttattgatgggttatcaaaacatctgttgaacctcttgtcatagtttacccttgctacataacaatttagtgttttctaaccatattataaattctgtggtagaattaaacttattcaagtattctcagattgttgttgggctgtactttctctaatttgaaagatgctgggagtctgaatactaaaagtggcatgaccattcatattaaaataatttttaatattgacattattattgacacttcagttatttttatgaccaaaagtatataaagatcaaaagcataaatacataaaccacaacatcactaaagaataattcctattgagatatattgaaatttgtttttgtaattatcagcttctttggactacctattgaaatagtgactgaaacttaaaagtagttgctaaacaagtcaattatagataccttggtttttcacactgctttataataagttaactatagttactcagtcattagatatgttctctgttgactaaatggatgaatgtaatctttaattttggaaataattcaagttcttggctgtgtgtcacttctgttttttttcttttttaaatgtaactgctctttgccacctatatgtcttttaccatcctgtatatgaagaaagaattgtggctatttgcaatggtagcagcaatgtagtacaaattattttattttatttttttgagacagttttgctcttgttgcccaaggctgaagtgtcaacgt

SEQ ID NO: 189433 - DNA, 306 bp, Homo sapiens
ttttgttctttctgtacagattccagcatgcgcttcttaagtcctaaacaaatctctgaccaggctgctgtgaatgaagctttactcccacagtattatgaaagcaaacacaagcccagggtcaagtgcttcttttgttccaaaagttctttcccacgagttcaatcctgccattagcattgatttccatggctttaatctggggcctcctatctcagcttgttaaagaactgttcagctatgacttccttacaatattagggggaataacatgaaaagagaaaggtaaaaaaggcaaaaaaaaaa

SEQ ID NO: 189434 - DNA, 219 bp, Homo sapiens
gcccccaccccaccctaccccaccctaccccaccacagcaggcgctggagtcctgggaccaccagggtctgaggcccaaatccttcctcactaaggggaggagaggggtgttccggcagggcaggatgggaaggcgtgcttgggcgggattgtgacataagagtgccctggtgacatggagcagatctgtgacataaataaaggtgtcataaagacagg

SEQ ID NO: 189435 - DNA, 529 bp, Homo sapiens
gagtaaatgacaggatagatttggcccactggccacagtatgctgacccctggactaaaggatgaatgcacaacaatgcatacgtactttttaaataaaaagctaacataatattggaactgtaggtgaatcttcgatcattagagtactagaaccagtttgtatctattttcaacaggaagccgactaaatggaaaaagtctaaaagagcaatactttaaaaaaagtttatgtgtttttaatgggaaattgatcccatgcaattatgtcaaagagttgttatttttaacctagaaaagtaaaagctaaggggaatttttttttgtttgtttggaaaatgaagagtcttttaatagttcttctaaaatcttaggtttttgatattatgaggggagtgttgctgttatatacaagaagctattcagttgttcataccacaaatttgggagccatccttgtctccctccacccactgccccatcaccaaatgtggttaatgctggtagtgtttcaagcagatccctgttcc

SEQ ID NO: 189436 - DNA, 365 bp, Homo sapiens
gaacagatgttttatattcggaattcatacacggggcatctgagcacaaaatgaaaagggagcagatatctggaacttacactgattctgcacctttctaacggaagcaaagacgacacatggatttgcaagagcatcttcccagcagctgaaatgcaaccacaacactgcacttctgatcaccacaatgagaattttctcaaactggattatatccacagcaacccggctaccataactgcacttggtttcttcacctgacaaaattaaagcacttaaccactccagggtaggtgttacagagaaacttttaaaaactcaagtcaaaacaaagacaaaaccaggaattctcgattctggggcag

SEQ ID NO: 189437 - DNA, 1304 bp, Homo sapiens
atgactggctcttgagagccccaggcagggccccgagcaagtttttctaagtgccaaggccagcaaagtctgaactggccgcactcattaagtccctcatttggcaaaacaaaacagggcctggggcacccctggttcctggccttataggtcagtcaactggctgagaaatggtcaagaaaagaaacaatgacccttctgtggatgtgagtggatgatggactctggcctgtgtctactctcctgatgtgtagcccaccaacagtaatagaagtagagggtagggggttttgccaaggctaaggcttcaggtacttgctaacagttatagcagctgggtcactgtcatctggacttaccagttcatgccagtgtccctgtgacttatgcatagtgtgcgccacagccctctagaggtacctggagcccggactgccaggctggaggctctggggtactgaaggtgagctgtctgggcaaactattaagaacaagacgaactgttcacaatggagcttctcccacagatggggagctctgtgaggccttcacctgggtgcatgttggacttccattgctgttgctgttgtccctagacaagcccgttagcaagaagcaccggcaggggagccatgcactccataggcttgggatcacccccgggaaagcgatcttccccgggctaccacccccagctgcagttctgtgttagtgcatccttcaaagctaggagaattctagggtgaccagtgagctaatgttgagtgagcaggtattgacttgaacacactgcaggcctttggctgtctcatgctgtccttactcttcttgggaacagtgagtcactcagctggccggggtggggatgcatcctggtgaagagacagctttccctgaagatgctacagaaagttactgtcagatttcatttgtttctgtttcctgagatcaactaacagaagaatctaatggtgagagtgtcttcattcatgttttacgttttatcaaggcacactggaaagggaattatgtggctgacttcccttggccttcccaagagaagattctgttcttatgtcagtgtggcttctggaagtgtctcctatcctcccatcctccaggcctgtggtgtgacttctgccccgaagtcctactatagtgagtcatctggggagaggccactgaaaagaggccttcccttcccatttcctcccctgcctccttagaacacactctaagtcagaacttaatctaagaagaaggaagctggaccaggaaccttggaagtcagccagccctagaac

SEQ ID NO: 189438 - DNA, 604 bp, Homo sapiens
  misc_feature (59)..(59): n is a, c, g, or t
ataggatccccaagccaatacctgctcactcaacattagctcactggtcaccctagaanttttctaactttgaaggatgcactaacacactgcaggcctttggctgtctcatgctgtccttactcttcttgggaacagtgagtcactcagctggccggggtggggatgcatcctggtgaagagacagctttccctgaagatgctacagaaagttactgtcagatttcatttgtttctgtttcctgagatcaactaacagaagaatctaatggtgagagtgtcttcattcatgttttacgttttatcaaggcacactggaaagggaattatgtggctgacttcccttggccttcccaagagaagattctgttcttatgtcagtgtggcttctggaagtgtctcctatcctcccatcctccaggcctgtggtgtgacttctgccccgaagtcctactatagtgagtcatctggggagaggccactgaaaagaggccttcccttcccatttcctcccctgcctccttagaacacactctaagtcagaacttaatctaagaagaaggaagctggaccaggaaccttggaagtcagccagccctagaac

SEQ ID NO: 189439 - DNA, 136 bp, Homo sapiens
cgctgcaggtttgctgagggaaagagcactgcaaagatctcacatctggcaatcatttgtcaatagctggaaagagaactgcaggaaactttctggctcttggagaagatgaaaagacaaaaaccatgtgtcacac

SEQ ID NO: 189440 - DNA, 133 bp, Homo sapiens
ggcacacaggtcctatcttcctactctttctttttgaaggggcccaatttccagaaaggcagaggaaagcccaacctttcatcagaaacatttccaaagctttagggacaaatatgaacattccttactgtgc

SEQ ID NO: 189441 - DNA, 216 bp, Homo sapiens
acatttaggaagttatgaaaataaatcaggagaaagggactttgtgaaaaaggtgacagtagaaagggaaaggaaacaagttttcctagtcatgggaatcagtctatgtcactcatgtaataatcacatatggctgttatgagctattcctggggtatgaattttccaaactccattgggatgccttaaggaaaaaattctgccttacttacagtt

SEQ ID NO: 189442 - DNA, 1023 bp, Homo sapiens
cgctcaggctgccgatcggctcgttctctctgcgttgggaccgcggagggcattcgctgtgtgactcagggcaagtgtgcgcacctctctgagcctccgcggccttctctagcaaaatggtggagccggtacccggctgtaaggcaagctgggatgcgcggagtagcgggtggaaagctggactggagttctcactcggccgctgggtgacttcggtgcactagggatagtaacagtaccacctcgtagggttgtagaaagaccaagtgagttaatatttgtaaagtgtttagaacagcgtctactgcatggaaagtagtatttatttgttagagagactccaggaggtcttgcccagggattgacttctcccttccctgtctccaccccccacattcccgtttgtgagccaagccttgcttttgcaccggccgggctctcttgcctggaaatgcatacccatctcaaacctgggctttaaaatcacctcctctgggacgccttcctctacttctcacagttcaggcctgttctgccccacacagcagaaaatgcccacgatgcaataccagagtctgcatgggaccatttcaacaacccttagaagctgactcagctgtctcctggccctgacttttctaagatgagaggagctggtaggaacaatttgggaaccctcaaaggctgagagtatcccacccacttcacagatgaagcaaactgaggcccagagaagggaaattacttgcccaagatcacccagcaagtaagaaacagagctggagatgagctcaggccagcacggaaccacgcaaactccttctgtaggctttgtaaaggattgatgagaaaagcagatggttaagagctctacaacttctgtgaggtaaagaatatctgcagggctggacgtggcggctcttgcctgtaatcttagcactttgggaggccaaagtgggtggattgcttgagtctatgagttcaagaccagcctgggcaacatggtaaaactctgtctctcta

SEQ ID NO: 189443 - DNA, 1126 bp, Homo sapiens
cgctcaggctgccgatcggctcgttctctctgcgttgggaccgcggagggcattcgctgtgtgactcagggcaagtgtgcgcacctctctgagcctccgcggccttctctagcaaaatggtggagccggtacccggctgtaaggcaagctgggatgcgcggagtagcgggtggaaagctggactggagttctcactcggccgctgggtgacttcggtgcactagggatagtaacagtaccacctcgtagggttgtagaaagaccaagtgagttaatatttgtaaagtgtttagaacagcgtctactgcatggaaagtagtatttatttgttagagagactccaggaggtcttgcccagggattgacttctcccttccctgtctccaccccccacattcccgtttgtgagccaagccttgcttttgcaccggccgggctctcttgcctggaaatgcatacccatctcaaacctgggctttaaaatcacctcctctgggacgccttcctctacttctcacagttcaggcctgttctgccccacacagcagaaaatgcccacgatgcaataccagagtctgcatgggaccatttcaacaacccttagaagctgactcagctgtctcctggccctgacttttctaagatgagaggagctggtaggaacaatttgggaaccctcaaaggctgagagtatcccacccacttcacagatgaagcaaactgaggcccagagaagggaaattacttgcccaagatcacccagcaagtaagaaacagagctggagatgagctcaggccagcacggaaccacgcaaactccttctgtaggctttgtaaaggattgatgagaaaagcagatggttaagagctctacaacttctgtgagtttctccacgttggtcaggctggcctcgaactcccaccctcaggtgatccacctgccttggcctcctaaagttctgggattacaggcatgagccactgcacccaacctgaataatctattagagtctttatctctaagaagagaaatacatctgaactaaagggtaaaaaatggcatgttttaattggtaagtctaaatgcaaaacgatgacaataaaattttaaaggactgcttccttc

SEQ ID NO: 189444 - DNA, 189 bp, Homo sapiens
cggaataatcgctggttatcctttacacctacatcttagcagaattcaggaccctctcacaattctaaagggagattgtctttccaaaattacgaccatcagagaaatctgacaagactccaactgatcaagcaagactctgtttctatttttttttttactgtgaaatgaaaaaaggcaaaatgacag

SEQ ID NO: 189445 - DNA, 1287 bp, Homo sapiens
tgataagctacaacataaacacatctaggttcttgttcttagaatacagcatgaagaatttgctttcttctttcttcctaacattttcatgtgagatccagaaaggacacattgtctctggccattcgaagaaagaaagaaagaaagaaaaaaaaggtatttagagacagagagagaaaaaggctgaaatgggttcgctgggttctaaaaatccgcaaaccaaacaagcccaagttcttcttttgggacttgactcagctgggaagtctactctcctttataaattaaagcttgctaaggatattaccaccatccctacaataggtttcaatgtggaaatgatcgagttggaaaggaatctttcactcacagtctgggatgttggaggacaggaaaaaatgagaactgtttggggctgttactgtgagaacaccgatgggctggtgtatgttgtggacagtacagacaaacagcgactggaagagtctcagagacagtttgagcacattttgaagaatgaacacattaaaaatgtgcctgttgttctattagccaacaaacaagacatgcctggagctctgactgctgaggacatcaccagaatgttcaaagtgaagaagctttgcagtgaccggaactggtatgtgcaaccctgctgtgccctcacaggggaggggctggcccaggggttcaggaaattaactggatttgtgaagagccacatgaaatcaagaggagacactttggcgttcttcaagcagaactgaggctgcgaaaaatccaagtctctacagagacactgatgaagttgaaagggtaattgtttttccatgccaaatgaggaaatcaaattaatgagttgacaaacttttcctgagatgttatttcatctacatttagttaaacaacttagaatgatatctagaaaatatttattttcagccaggaactttagcaaactgtggcaatgatcactgggaatgaaaacgtataatgttctacaatttttgttatcacattggatgactttgaatatagtagtgacacttgggaccaaataaattattttatatgactactagaacaaagttttagtaagctgtctgctaatagagtcagaattcttccagattgtttccagctgtaacaggtattgaatttccaccgtgctcctatgtaacagctgggtggtgtaaaaaatgaacttcaaattatggagtggaagaagcgtaatgttaatatcttgtaaattcgtattccctattaaataaagctttcttattccct

SEQ ID NO: 189446 - DNA, 558 bp, Homo sapiens
actcttctttattggtcctttcaggtttagttcaagcttctaggaagctcgccctgttttctcttgcctataataatgtctccttttcttttcttatccctattccccctggattcctattagaaataataatggctaaaatttgttgggtacttatgagcccaggactagtatgcatatatctctcactgaattctaaaaaaaaaaaaatcctatgtctatcctccatcttacaagcaaggaagagactggtctgaaatcacagcaaggggctggggtggggagtgacctaacagtctccctccacaacctacagtagtaacaaaacttggcattgcctacctaccttggtccaagtccccacttaatcactaacttctatggtgtcaattatttcatgtgtactatttgaaagagtgagtcatctttcttgaaactgtttctgtctctctttttcttttctgagacagggtcttgctctgtcatccaggctgaagtacagtggcatgatcttggctcactgcagccccgttaccattcggatgttggagcggccgc

SEQ ID NO: 189447 - DNA, 400 bp, Homo sapiens
actcttctttattggtcctttcaggtttagttcaagcttctaggaagctcgccctgttttctcttgcctataataatgtctccttttcttttcttatccctattccccctggattcctattagaaataataatggctaaaatttgttgggtacttatgagcccaggactagtatgcatatatctctcactgaattctaaaaaaaaaaaaatcctatgtctatcctccatcttacaagcaaggaagagactggtctgaaatcacagcaaggggctggggtggggagtgacctaacagtctccctccacaacctacagtagtaacaaaacttggcattgcctacctaccttgcttgtaagatggaggatagacataggattttttttttttagaattcagtg

SEQ ID NO: 189448 - DNA, 548 bp, Homo sapiens
accagaagtcatcacttatagcacatcagaaaacacacagaaggcagaaatcctgtgaatctacaaatgtggagagccttttatcagaattcactaatctgagaaagtacagagagaagtccctgttagcatcttctgaaagtccagaaaccttttcttacttaacctactcagtttacattaaaaacagtgaaggggagaaactttgtaagtatgagaaatattttgcccagaaataaagggccatcttagtgagcagcagatatttgatatttgaaacatcttacgaatattttgaataagttgtaactttgaaaatgattcagttttggttatacatgagagattttagctcactggaaatgtcagtttggtaattgagactaaaaacttcctttagaaatattatactaaaattcttgtttctgatataccaaaattttattgaaaatattcagttacagacatactgtgtactaggaatctaacttcaaaaagcacaattaggtcgaatagtcataaatacaccaaatacaaatgcaaagtgt

SEQ ID NO: 189449 - DNA, 368 bp, Homo sapiens
tctgtgaacagaacctgacagtcagctaacagtatacggtcaaacattaggtttggggaaatgagacaaaggcatgtatcaattcctaacaaagcttcctaggatacagaaagacagagattaggtacaaattagacctacagggattcaaattcatgagcgctgcttagaaagctgcctgaaaggctgggcgtggtggcgcatgcctgtaatcccagcactttgggaagccgaagaggatggatcacccgaggtctggagtttgagaccagcctggccaacatggtgaaaccctgcctctactaaaaatacaaaaaattagccgggcatggtggcaggtgcctgtaatcccagctactcaggaggct

SEQ ID NO: 189450 - DNA, 550 bp, Homo sapiens
tggctgaagctgcagcagagggaaaattctagaaggaaagagagagagagattttcatgcttgaaagcattcatttgcaaggaattgagtgtgctggagaaaggggtttttggtggcaagagaatgagagacatctggagaacatgtagggaaaggagagagaaagaagatgcctcaatagcagagaaggctggaggcacctaggaagtaggatcataaggtatcatgtggaaggtaggaatggaaccaagatgtactaattaccactatgtgctaggcacgagctgttctcctgattatctcatttaatcctcacaatgtccggcacactgcctggcatatagtaggcactcaaaaatatgttgaatatttaatattaactaaaaaaaaaaaaatgtttaatattaaaaaaaaaaaagtgtgaacaatcctaagagatgtctattaccaattacatcttacagataagaacatgaggcccagaaaggttaggaaacttgcccaatatgtcacagctagggagaggtggaaggacaatgacttcaaagtt

SEQ ID NO: 189451 - DNA, 389 bp, Homo sapiens
ttgagaggcaaatactccctaccatacaaacattgggcctggccgtattaacttcctttggccaatgaaatataattgtaagttatttatatcatatcttaggagaaaattaagagcactgagtgtttcagcattttcaattttccctctgacctaagacaaagatagggctgttcttcagcctggaacactgagtaagacacatttaacagtgccccaaaaccacagacaacttgtagctaacatgggagctagaaacacatctttactgtaggaaggcactacaatttgagggttgttacagcagccttacttcggaaaagctagtccagaaactggtaataggagtacgttattgccataacaaacatgtaacatatgtgacacct

SEQ ID NO: 189452 - DNA, 312 bp, Homo sapiens
gggtgattagcggatctttagaggcacaaggaggacacctggggatctggggtgcagattgggtccagggggttataacagagaagagagaatttaacagggagagcagaggaggcgcatagatgggagaagaggcagaaatctatggagattgaggacgatctaaagatttgggagaaggaccaacaagaggttaaataagttgcaagggtggagcccagctaatttttgtatttctagtagagatagggtttcaccatgttggccaggttggtctcaaactcctgacctcaggtaatccacccacctcca

SEQ ID NO: 189453 - DNA, 349 bp, Homo sapiens
cttccaaattcctaaatgtgacattttaaatgctttattatttgcttccctccccagcttcccttctcagaatttcagtactctatgtagttatagcttagccgttggtagcctccaagatcctccccttgctctgtgctgctcctactctacagcttaaatgctgttgactccaatagggtccccaccctggctacccaagtgtcatgcttgtgtatattcccacctctgaacatcaccatcacctgaatgtcccacaggcactatcaacatatttaaaattgaacctggtgacttaagccaaagaaatctgatagctatccttgtcctgatgtttttatttcctaaa

SEQ ID NO: 189454 - DNA, 376 bp, Homo sapiens
ctttatgccagcagtgcaaaagttacacaaagtagcagcctccaaaaactattgtttacttaaatgaacaaaaaatgaaatggaaaacataagtaaaacattattaagtacaatgaattaatacttaaaatctgtctatgggatttaaaattgatttagccccttaggaaaactgtttgacagaatctatgatccagcaattccttccctgtatacaccccacaaaaataaatgtgcacacaaaaagtattgcaaggttatttacagcagcattatttataatagtcagaaaattgaaaaatccaagtgcttatctccagtggaagggacaataaattgtggcacatccatacaatgcccttatactgaaccgaga

SEQ ID NO: 189455 - DNA, 200 bp, Homo sapiens
acatacacttcccaatttggcaaaactacattattaagacaagttctaatctagtcaatttcagcattgctataaatagtggttcttacactctgtttttgtgaatctagtaatagctacacatctttccaaagaaatatacatcaggtgtcagcacacaagattttgtatagaatttcagaggcttcatggtccctccc

SEQ ID NO: 189456 - DNA, 234 bp, Homo sapiens
atagaacagatgcaaagctcaaggattccagaggaggcgtggagggaatgacaattagaggtggctttgaagaggaggactatttgacttgggctttgaagaatgcagaggagttttctgtgaggagaggggattcagggtcatgaagaaaagcacggaggtaggaaagggcatggtgggcttagccccacaagcacctcctgattaggtaccatcatgaaccatggctccact

SEQ ID NO: 189457 - DNA, 329 bp, Homo sapiens
tggtttctaggataccagattgctggtttttctacctacttggcttcatagtctcttttttggttcttccttattacacctacctcttaatattggactgcctcgtgggatctctgttgttgttgttgttgttgttgttgttttgtgagacagagtttcactcttgttgcccaggctggagtgcaatggcgtgatctcggcttaccgcaacctctgctgcccgggttcaagcaattctcctgcctcagcctcctcagtatctgggattacaggcatgcgccaccacgcccagctaattttttgtattttttagtagagacggggtttct

SEQ ID NO: 189458 - DNA, 192 bp, Homo sapiens
ttttatagtaccttacaaggcatgtcaaagggcaaaattcttttacttgtcttagttttttgtttgtttgtttttgtttgtttttttaatgactgtggaacattcttaatctctgcaacacaaattgcatttttctctgctcatctttgtatttgtgtgtgtgtgcacatgtgctcaggaaaggaataaact

SEQ ID NO: 189459 - DNA, 733 bp, Homo sapiens
aaacttttttcttttcagttcgaaacccagaaggacagataaagctttattccaaaggagcagatactattctgtttgaaaaacttcatccttccaatgaagtccttttgtctttgacgtcagaccacctcagtgaatttgcaggggaaggccttcggaccttggccatcgcatacagagacctggatgacaagtactttaaagagtggcataagatgcttgaagatgcgaatgctgccacagaagagagggatgaacgaatagctgggctatatgaagaaattgaaagagatttgatgctactaggtgccactgctgtagaagataagttacaggagggtgttattgaaacagttacaagtttatcactagccaatattaagatctgggtcctaacaggagacaaacaagaaactgccatcaacatcggttatgcctgcaacatgctgactgacgacatgaatgatgtgtttgtgatagcagggaataatgctgtggaagtgagagaagaactcaggaaagcaaaacaaaatttgtttggacaaaacagaaatttttccaatggccatgtagtttgtgaaaaaaagcagcagctggagttggagtctagttgtagaagaaaccataacaggagagtatgccttaatcataaatggccacagtgttggctcatgccctagaaagtgatgtcagagaatgatctcctagactagctgcatgtgtaagacgtaaa

SEQ ID NO: 189460 - DNA, 573 bp, Homo sapiens
aaacttttttcttttcagttcgaaacccagaaggacagataaagctttattccaaaggagcagatactattctgtttgaaaaacttcatccttccaatgaagtccttttgtctttgacgtcagaccacctcagtgaatttgcaggggaaggccttcggaccttggccatcgcatacagagacctggatgacaagtactttaaagagtggcataagatgcttgaagatgcgaatgctgccacagaagagagggatgaacgaatagctgggctatatgaagaaattgaaagagatttgatggtatgagtttagaagcatgatggtttgtgtttacaggaaagatagtatgtgtttagagatttagcacaggaataagccattggctaagtcatcttgcacacagcagatgtttctctttcaatcactgaatcatgctttatatgttggctttgagttttccatgtatggtcctagagagcctagaattgtatttctattagcagtagcttatgcaattggaagcttcccaagagtagaagatagtaggctacctattctttgtcaacctctgatg

SEQ ID NO: 189461 - DNA, 275 bp, Homo sapiens
ttttatgcccagccttgttcccttatttgagtgagttggaggtttgtgcaagattttatccaagtggaggtttttccatctgtgtagccacgggcatgtctccaggcacaacgccacgtgctagttcccttactggttcctgcagcctgatttccccccaccccaggctgctttctattttacgtggggataaggctctgaccttgggccgggggctctccaggggctcttcccttgctgtctacctaaggcaagctaactcctttcgtcccccg

SEQ ID NO: 189462 - DNA, 436 bp, Homo sapiens
  misc_feature (50)..(50): n is a, c, g, or t
  misc_feature (323)..(324): n is a, c, g, or t
tcagtaactatttgctgcatacataggaaatccctcacaagattataagntaacttgaaaacaaggatcatcttctcactcatcaatgtagcccacactctacctaaaagaatacattattgaccaggcgcagtggctcaagcctgtaatcccagcactttgggacgccaatgcaggcagatcacctgaggtcaggagttcgagaccagcctggccaacatggtaaaaccctgtctctaataaaaatacaaaaactaggccaggtgcggtggctcatgcctgtaatcccagcactttgcgaggccaaggtgggtggatcacannaggtcaggagttcgagaccagtctggacaacacagtaaaatcccgtctctactaaaaatacaaaaaagaaattagctgggtgtggtggcgtgctcctgtagttcctgctact

SEQ ID NO: 189463 - DNA, 215 bp, Homo sapiens
accctatctctacaaacaataaaaattatctgggtgtggtggcatatatttgtagtactagatacttgagagactgaagaaggaggaccccttgagcccaggagtttaaggctgcagtgagctatggttgtgtcactgcactccaaacagaggaaggtcctgtctctaataacaataataaaaatagaactattcaaatcaagaaatatcaagtg

SEQ ID NO: 189464 - DNA, 554 bp, Homo sapiens
tcaccttcatggtgttccataaatgataggtaagatacgggcacttttttaaaaaatgacatttggacataagtatcagatatttggcttatgacacagtaatgggtatcttaagcctagaagttgtgttttagattgaagaatcatacatgattctctttggctgtatttatccataaattgtcctgtccttggataggacatctagacacttgtgaagtggtcattagtaaattgagtgtgaaacatggcattttggagaataaattgtgaagcaacctccctgaaaacttattagtaggataggacattcatgttagcgagtggacctagggtgttgggcagagtcagggagaccaggtgacttttagcacagtgcttttctaccttgtttcggtctagatggaacagggttatcagtgtccagaaaaaaagtctttggcttccggttaatctgtccgccccagccattgaagagagtggggtacttatttatgcaatatcaccctaggccttttctagtgtttgtatatcatctctctgcaagtttcttc

SEQ ID NO: 189465 - DNA, 530 bp, Homo sapiens
gagtcttcacctctcttgcagggatgcttgtcagtgttgccaacttgctgagaactgaatgtggcagatgcctttgcacgggcagccccaggtttagttcaactaaacccagatggtttagttcaggagaaaagggtcctggctgagcagtgagggcccagggctggcttggtgtcctggcctcatacttggcatctggcccacactgccccgtgtctgctgcagaatgagagaaatgccattttctgctccctcagtgtcagctgttaagttacctgctcagctctgcctggtgtctgtctgtcccaagcctcagtttctttagtgtccctaaagaaggtttagatctgagagccacgtgtttgtcttgaccactaataggtataatctgtgaagttaatgggcaaatggcaccaatccttgggaatcttatttttgaattaaaagctataattgcttcttcagttcagctgagccttgagctgagccacaagaacggcttcgtcgtgtgtgcatctgtgagcccctcg

SEQ ID NO: 189466 - DNA, 749 bp, Homo sapiens
aagctggcttttctacccaccagctgtatgacactgggaaagtaacttaaactttctatgtctcagttaccttgtctataaaatggggtaataatagcatctacctcatagggtacaggaaggattaaatgagctaccatatgtcaagtttgaagagcagagcttagcacgtagatagtgctgcataaacattgggctgtttcccccatgttctctcttttgcttctgctgctttggaagccatagatcttttagcagcttcttgcactaggctcagctcaggtcccccatctgacagcaagcacttttagcttctggcgcttctcagcagccagcctctggccatagtctgaactcagaccctacaagcaatgcaatcccctaccttttgcttttggccctgttctgtttctggtactttgtttttgagcccatctgtgccctattacttttctcagctcatatttttttctgtccctgctgtatgtttggaagagaacaaataagtcgactggctgtgctgtctcgatctcaagccttgctaagttatttcattggtcacacagagatgttacctgtcctgttaggcatttctggagattatgttgtgagataaaggttcaaagcagtgtgaattggctttagccagaattaggaacacagcagaaaacttgtcctagaaaccagagagagcctgtcagtcttggtggattcacaaagccttcccgcagcaggcttgttaaaaaggc

SEQ ID NO: 189467 - DNA, 735 bp, Homo sapiens
caaattgttgggtacagtatacactgctcaggtgatgtgtgcaccaaaatctcagaaaccaccacttattcatgtaaccaagtaccacctgttgcccaaaaacctatcgaaatgaaaattaaaatttaaaaaaaaagaattcataaaaaaaaaaggttaagactgagtttttatgttatatgtcttttactacaattaggattttatgacatggaaatatctctaagacattctttagtgaaaaaacaagctacagagcattctgtagagtataatctcgtttacagatatatataaaaaaagtagaatgtaacacacatatgctgacctcaaagagaaggtctagaaagataaataccaaaacggtaagtgacaatctttactaagaaaagtaagataagccctaaacaatgaaatggaagccttagtttttattttgtatagttctatatcatttgaaatttttataccaagcctatattcctgtgttatctgtgtaaatatatatttaaaccaagaacagataggacaaaaagaggaaaaaacagcaagatgacatttaaacataaccaataaatgtaaatggattgaggcaggagtaagcaaactacagcccacagcctgtttattaagcatgtgacctaagaaggctttttatacttttaaaaagttgtaactaggctgggcgcagtggctcacacctgtaatcccatcactttgggaggctgagaaggc

SEQ ID NO: 189468 - DNA, 322 bp, Homo sapiens
tctccgctattgccattccacccacaggctggatagtgccgaagttacacttctgaggagtcagcatcctgacgcagcctaaactttacactcactccctgctctccagaatgcacacgtctgcctgtgcaaaaacgacaagcagagtcaggtgacctcagctaacaggaatgtgggcagggctgcggctgaatgccagagctacttttattaaattccttgttaagtaaattcaaaaggggtttgtttgtagctggcagtaaatacctaagacaagatctctggaatttctaccttttttttttttttaatttaaaaactg

SEQ ID NO: 189469 - DNA, 352 bp, Homo sapiens
tatccaggtatgaagctaaacatattacgtgagttatatcacttaatgtatgtagtaaggagaagaaaatcctggggtggtagcttcctttgctctgagtcatttggtaggtaacatattgaaactacttctgttagcaagttttcattatttactggcaccacaccttccttgctcatagtttctctgactgtacatccttgaacgagcatgaaataacccaataagtcttcgtgttgctgagtagttttcatacactatctagggtgttatgcagagcgtgtttagtggggtcagataaagatcagaggtccaagactggggcttcctatagtgagaaggggagttagga

SEQ ID NO: 189470 - DNA, 227 bp, Homo sapiens
tcctaaaatcacaaggtttgaactttgaagcacatctgacccagtttttcagatatggaataatggtcatgcatttccgttactgtgactcagttaatttgtgtctgttaggaggcaaatataaaactgctcaaagtagcaaaatttccaatggggaaaataagtcctcaaatgagtgacacttcagaaaaagaagtacaactttggtactctagtgtgaaatctaa

SEQ ID NO: 189471 - DNA, 332 bp, Homo sapiens
atctttattattgccttttagatgtctacaggattagtgtgtcgctcaccctgtagctgcattcttcctagctaagcaatcccaaacaccttgagcctgttacctattaggccaatttaaaaaatttctcttgttgcctttgttgttgggtggggtatttttggacttgctccagtttctcctattcatttttcttttaaattttaattaatgtatagtatactggaaaggttattatctggttctcaagtaaagtctcagttactatagccaagaactgggttggctttttttttttttttttttggggcaatgtgtccatttccctgtcg

SEQ ID NO: 189472 - DNA, 306 bp, Homo sapiens
gccttgagccctcctcaaatccccttctccctggctgctttcttgagttactggacatctgacagcaacaagccccactcctgtaacttcctgccgccccaacaaaattgggacccaaagtagtggcttggattagttttgtcctggcaagagttaacttccaaggtccacccattactatcatttcacgaaggagagatttagaagctaaagtgtaacttaattgctcagacagcagcgctcttttaatggtgcatgttaaaatggaggagaaaatgaaatgtaaaataattcagcctgataatg

SEQ ID NO: 189473 - DNA, 558 bp, Homo sapiens
cagaatctgcatctcccaggttctttctggccctacagagtcatgatgagattaatgagtaattttctccttaattcctcatataaagtattataaaggttttgtaaacttatcttggttttaggagggtttaattctagaatggagtgaaagtaaatgtcagtaatataaaaacaaagtatacaatacaataagtatacgtttaattgtatcctttttcttgttaaaaacttttcagttacttcctaaattgattaaattgaggcttgcaaacataatactgtttcttgtatttacatatttttgttgttgttgttcccaagatcgctttgaactaccgtcaacattttcaattggggcagaatctcaggttcaaataagtagctagtctgttgtaacatcagggcagcaattcagatttctggattctgaattcatttttttctgggtcacagtacactgcctttaggatgtgtctttttaaacttctttttcctctaaattataaaatcagttcataccttttggggaaattgcggaacaagtttacagttcctg

SEQ ID NO: 189474 - DNA, 255 bp, Homo sapiens
acaatggtgggacacatttgagagggaaatctgaattgcaattagttgaggaatgagtggaatgtgagaaagtggacacatgttcaatagctatggctgtgatgagaagacagcagatggttcctcaaagaggaattaggatgaagtcaaaggtgggaggtgtgtttttgttttagagtgaaatataggacatagttaactactgacccaggataattacacagaggggtaaagatgttggtggagaagagggag

SEQ ID NO: 189475 - DNA, 340 bp, Homo sapiens
gttcctctaccagatcacgcagtacgtatcataggctcgtgactgtctcgtggtttgaaaatcgtcgactggtgaacccccgggtggggatttcggggcgcggaggggcagggcctggccccctcgcacccagcctgggacttacccggagacacagaaacggcgtctcattgcaggaccctcatcgcaggcgagactccccaaacctgcggtcgttagcttcaaatctgcttgacacaaacctcacagcccttaaaacttcagaacgagatgtgggtggctttttaatgtttttatttttagaattttttttttttggttgggtaagaactgtttagaa

SEQ ID NO: 189476 - DNA, 400 bp, Homo sapiens
ctcctaaagtgctgggattacaggccgtaagccactgtgctcagcccctggctcctttttaagccctcctctcctgactcacttttgccagcatgatctcagatggttaaatgatgaggctggggtgtgtaatagaaaaaagtgtacttggaggctctgaagctgtagccactgttctaagcatttcatccacatctggtaatttactctccgatcaacactatgaggcatggacaattatcaggcctggttattctatgtttaatttatttatttagagatggattctcgctgtcacccaggctggagtgcagttgtgccatcttggctcactgcaatctctgtcgcccgaattcaagccattctcatgcctcagcctcccgagtagctgggactacag

SEQ ID NO: 189477 - DNA, 211 bp, Homo sapiens
tccttctctgtctttcactgtcctcctctgtccatcactgtcctccactgtccatcactgtcctccactgtccatcgctgtcctccgctgtccatcactgtcctccgctgtccatcactgtccattactgtccatcactgtcctccgctgtccatcactgtcctccactgtccatcgctgtcctccactgtcctccactgtcatccgctgt

SEQ ID NO: 189478 - DNA, 202 bp, Homo sapiens
aaaacaaaaccaccgagttggaagctgagccaaggtccaatgggggaaacaacgaacggaaattgagggcccttcaccctgtttgcatcctggaactgggagagctggagagagagaaaccctggctgtttgggaatcaacaactccgaaggagagaaagactcatggactgagctgcagcacagccgactgtcaaggagac

SEQ ID NO: 189479 - DNA, 517 bp, Homo sapiens
ttctgaagttttagtcacaaagtagcttttaaaataacaatgtttcttaagtcttaaatgcctttcttaccaattataatgacaaatcaattatgagatcagcctctgagttcaagagattaatattcatatttctcataaggtacagacactgcttttgttcatttgataagaattttaccagagacctactggtaaattttaccagagaccactggtaaaaaaacttactcagataatccagaggtaaattacaggattaagttacaaacgtaactgtggtagggagctgaacaaaaaaaaaattaacaaaggattcaattatcatagttctgattattccccttgacaatatggttttagatgctaaacgtaagtattaccatagtaaacagcagcatacacattctccatctttgcctcacaccaaacaagataaaacttccatgttaaccacatagaatggagaaaaagaatgtcaaatagttgtccatagtctgtgtttataataatgttc

SEQ ID NO: 189480 - DNA, 455 bp, Homo sapiens
tccctgaacttgaactacaattaggacctgtgtataatccctttgcagcctgtcttacagttagaggtaacttaggtatagaacacaactgtatgtgttggtgtcaggtgtactagtggtgagttttgtgtggaaatagtgttgcaaatggtaactagaggaaatgtaagtgatgtggcagggtcctgtgtatctgtctctgtttcttttaagatttgggaagaggaatgtgggagtatgtttttgtcgataaaagaaacatgaagagacataggaaaaataataaaaaagaagagtaatacatcgaaatgaaaattttccagaccacattagtgtgcatacatgagctgcacagagctgcttaagattagaatactgcccttcacatcaccttgaccttcctgccgcaggctgtccatgcacagtgactactcttggtaggagattcttaatga

SEQ ID NO: 189481 - DNA, 663 bp, Homo sapiens
tctcataggagactgaaaaccaagaatatacctaatggtaacaggcagtagaccaaagatcatggactgtggctctctcccagggcaagctctttagtctccctgatcctgaatttcctcatctataaaatggggatcatcaagcctatctggaagggttgcactagagatgcaggtgaaatcgtggatgtatgatgcctgccactcagtagatgctagttcttctttctcttgctgatttagcaacaggcttccttttaggccccacagagatctctcctttgttctcttaagtctaatatgtttagatctattgctgacacctgatgaaatttgccaagtgtcttgaagtggctacagtgccaaaaggcttgttcttggcagataccatatttcagtttctcagatctcctctggcaagagttctgcagacattctctaatcggagtttgggggctacttaaatgattagtcccactgaaggtagacctctgctttgaaaacagccctctgttgtccaggaagggcttgtgcatgcctttataagaggtcatgtaaagcatggttgggacagaagttgtattgggttcacttgtgtgtcctggctcctaaagcaaagggattatccttgccaaaggagaaatatttggaataaaataccat

SEQ ID NO: 189482 - DNA, 336 bp, Homo sapiens
tactaaatggctgtacctagatgtatgttacctaaatggctgttacctaaatggctgttacctaaatggctgtacctaaatggctgttacctaaatggctgttacctaaatggctgttacctaaatggctgttacctaaatggctgtatggctgttcgaggttggggagtctgggtagagaaaaacgttaaagtgtacagtttggtgacattaattacattcacagtgttgtacaattatcaccatcattttgaaaacttttttattaccacagatagaaactctttaagcagtaacttcccaacccccccaaaggccccgcagaaaaaaaaaagg

SEQ ID NO: 189483 - DNA, 402 bp, Homo sapiens
attttagaagtatgattttatagtgggccctccataagtgtgagttcctcatctgtagcttcaagcaaccatagattgaaaatatttaaggccgttcacagtggctcatgcctgtaatcctagcactttgggaggctgaggcaggtgaattgcttgagcccaggagtttgacaccaacctagacaacatagagaaaccccatcttctacaaaaaaaatacaaaaaattagctaggcatggtggtgtgcacctgtagtcccaagctaggagagatacagagcaagaccttctcaagaaagagagaaagagagaaagagggaaagagggaaagagagagggagggagggagagaggaaggaaggaaggaaggaaggaaggaaggaaggaaggaaggaaggaagg

SEQ ID NO: 189484 - DNA, 140 bp, Homo sapiens
cactgcacccggccgttatttgtcttaattttctaaaaaaaagaataagtaacgagaaatttttttattttttgctctttcatgtctgaaaatgtcatttctctactttcagaattaatttaatgtttggctagatatgg

SEQ ID NO: 189485 - DNA, 108 bp, Homo sapiens
ctctcaacattttacacaacaagattatgctccacatgatatacaaatatctgttgccaagccagagaaaatggatggcaaaatgaccaaaatcctattagttccctt

SEQ ID NO: 189486 - DNA, 456 bp, Homo sapiens
gacaaaatgtatttctttactctgatgtctttgaaagtatatatggaatcccttcagagtggatataataagaggtatattaaaatttatttgaccatacaaatattttcatgaaacatccattagaaactagtggtatcttaggagtcaatgtaataaagttttgggaataatattttatagcccaagtgatatttttggagacaactacgtaagtaaaatcgattaccttttaccctcataaaagagatgtaaagagaaattagactagtaaatacatatactttcactctgtagtacagagtgaatgtaaaatacagtaaaatgttaagattgtcatctacttttttaaaaaaaatatcaacttggaattgttttttaaaggctcaatcaaggaagtgaggtgtgcaataaggtagcaagtaaaacgcagtttgcgttttatgtcatggtaga

SEQ ID NO: 189487 - DNA, 273 bp, Homo sapiens
actggacctcattatggatttacttttgggatacactcatcattccagaggagggtaaaaggctgagaagcttaaggtatttcagtctgttttatgttactcatttgcgaaaagcaggctcatcgaatacaggtgagtttcaacgcttcttgaatatggcagcatttaaaagtcttcagaccgcatggtggctcatgcctgtcatcccagcactttgggaggccaaggtgggaggattgcttgaggccaggagttcgagaccagcctgttcag

SEQ ID NO: 189488 - DNA, 729 bp, Homo sapiens
aaatagaatatgatagggctaacttctttgaaaatgtaaatattaatattactcaaaacaggttattctagggctagactttagtaattcatttccattttggacaaatgttttactttgtcttaaatccatttgaggttcttgttgtgcataagtggttggttggatttttagggttcctgagaggaaagggttgaggaatataaaattcacatttgtacttttggtagtggtataggaaataaacctttagagaaagggggaattctttgtcaaatagcaattggaatataaatatgattataaacatattggtggaaaaatcatctttcttataagtggaattaagagcatattgttggatggtatgacagaagcaaactcctcccacagaatagtagaggcttatgaataggcaggggtagtcataaaaggaaacaatatcttagtttaaggcatttaattgcaaaaggagaacacaagtgtggaatacactaaagacctctgattcccagtgttcttaaatagcaaaagaaactctagaactttgcctctaaggtattacaagaactttgtcaagttgcacatgagaaaatagagcccatagccatatagtaagcaaaaaaattctgtttgagtattgacatgacagtttttgaaagttcaagcagaaaaccaattataatgagcactggaaagcccggagccctgctgttcaataaataaaaa

SEQ ID NO: 189489 - DNA, 245 bp, Homo sapiens
tgagacacattaccatgggtgatttatggagtttcctctttagatcagaaatacttcccaaaccacctcccacttggtgcttcggcacttacagtaaatgaagtcaagactgaaaatacacacaactccttccttactttgacatttctttttttttctttttttttttgagacaagagtctcgctccgtcacccaggctggagtgcaatggcacgatctcggctcactgcaacctccgcctccc

SEQ ID NO: 189490 - DNA, 168 bp, Homo sapiens
aatgccagtgatcttctccagggcttcagcttccctgaaagacagctactcagggcctattattaaatgtttaaggtatcattttttaactttgaaataaaaactgaaatatttggaaaatactgataaacgaacaaacaaaaaaacctgaactaactccctaaacga

SEQ ID NO: 189491 - DNA, 256 bp, Homo sapiens
attgtttcaatctcttgctactttttgtagtgattattttcttaaaaaatgggtcactgtataaatgcctatgtcatgagaattgaaactattctacattgtagatggcagttagcttttttgaattcatttccctctctaaatcataatattatctgctgtaatgttgtttttcccactttgctttttaagaattttcatgccttcacaaatttttgaaagttaaccctttcttgaccacatatcctagcaggtt

SEQ ID NO: 189492 - DNA, 129 bp, Homo sapiens
ggtgactggaatacaggatgggtaagttttgaaggaaaaaacaggacagttctggagcacaaagtacaatgtggccaccagagggtagtatttattcaacaaggatttcttgaacttcatactttacca

SEQ ID NO: 189493 - DNA, 655 bp, Homo sapiens
taggagatatacctaatgtaaatgacgagttaatgggtgcagcacaccaacatggcacatgtatacatatgtaacaaacctgcacgttgtgcacatgtaccctagaaaaagtataataaaaaaacaaacaaacaaacaaacaaagtaactgaagttggattttgcttttggtgtttgatttgattggagggtagctgttttgctggcacctcaagcagtgcctgatctaaaaagtgaacctcaaaaaggggatgcacgagatgatccacggggatgcacaaaaaaataggaatgtgtttctttacagtgtaatatttgtataccatacataccattattctactctccatttttatcaataaattagtatccatatattgagaggtcaaactcagccttttttcattgacatggctccaacaatcaaaaacaaactgaagacccagtggcagtctgaagcgtggaatggaaggcttgcaaaaaactgcaggaaggattgggaaaaagtgatgaaaccacaccaacgccctgcctgtcctagttattcacgttctcagtttagaaagaataattgtaaaaggagaatgatgatatttttctgaactccagttgaatgtgagaaaggggaagtgaacatgttcaatacaaggttcac

SEQ ID NO: 189494 - DNA, 161 bp, Homo sapiens
cccacaatcacatttcccagagtaatgagtatttcctttttgtccttccagatatgcatgttgggaacatattacataaactggtttgtaatatgttttgaaacttaatatgaatatgttttagctatcttttcatgagagaacatgcatgtctaagtgta

SEQ ID NO: 189495 - DNA, 303 bp, Homo sapiens
ctcagtgataagagatttagctcaagctgggaacaaggaccacaaagaagccagccagtatctgggttaacaaaaaaaagagtaagtgaacagaatagatcttgaaggtcatttgctattggttaggacttgggtggggccttcaatcttatgaacctgagcagggaaggtttggaaagactgtagtgctatttaataattattcctttgtttggacaaaaaaatggggtagaaacgggagagaatgggggaaaagctataagccatttcctccttttatgccagctttcctgaacttagttt

SEQ ID NO: 189496 - DNA, 164 bp, Homo sapiens
tccaatctatataatcccagatgagcaacataaagtccctacatttaataactacgaacccattaacaagacccaagtctgccaagattattaaactgaagtcacagacaagacttgtttgcatactgctggaatgtccccagtatgttgggtttctggtttgt

SEQ ID NO: 189497 - DNA, 101 bp, Homo sapiens
atctcctagtctacacaagcaatgagtcatttagaccattatctcttacatctttattctgcattaattacctgatcattttaaatgaaggctgttgttgt

SEQ ID NO: 189498 - DNA, 242 bp, Homo sapiens
catttaatcctcatacaatacttcaaggtgggtgctatgatactcaggctctttggagattacaaaatttcccaagctcatgaaattaaacatgaggagggaaaaaagcaagaatctaggaccatctcaatctcacactccagggtcagggcatccctagaggtgtatagaaacagttgttgcccagcttgggcaacattgtgaaatcccatctctactaaaaatacaaaaaattagctgag

SEQ ID NO: 189499 - DNA, 165 bp, Homo sapiens
agaggtaactgctgttaatagtctggtgactttgcagacgcgtttctgtgcttttacgtgcgtgtctatgcaactggaaaacgtatagtttttgtaatctaatcgcttttttaaaaaatcatgctgcgcgagtatttggctgatttgtcgttgtcactcgctgta

SEQ ID NO: 189500 - DNA, 343 bp, Homo sapiens
gagcagatggggaagaaaggcagcattggcattggaaaccacatgggtgtaaaattaacagggctccgtgcttgccagatggggcgggtgaaggaggggtccggaatgaacaggaggtttggagcttgtgtctgggtgagcgtgggactgggggtgggggtggaaagggaggaggctggagcaagatgctgagttaagtccagagtgtgtgtgggatggagagggagcttggataggaagcctggggactcgagggtctgcagctcagggctggaaagtcgaaggcgggtgtcagcagcagtctgtggcggggggaactgagctataggagaaagagtgggtg

SEQ ID NO: 189501 - DNA, 154 bp, Homo sapiens
tatactattaatatctatttatctatctacctctagatccatgaatttttaatttttattcaatgaactataatacattactatcataatttattttgattctcaacttattccatatttggccagtggaaccacttcagactggctctgtgtc

SEQ ID NO: 189502 - DNA, 170 bp, Homo sapiens
atgggcctaccataaccaaagggtccattttctggtctccctctcaccctgggacacttccctgtgtccttgtccatcaagcccccttaggcttcctgaataatattcttctccatagaaaccttctcctgacagctacaaagacttatttgcactgggagcctcttcta

SEQ ID NO: 189503 - DNA, 605 bp, Homo sapiens
tttattgaacacaaaacctgaaattgaggttaaggctgaaaggtccagtcctatacacctcagcatctaattttttccatggccaatggttaagatgatcaaggtctgatgtatataaaaatagcagtgtgtatagcaggatgaaaattagttcataagttaatgtaataaacatccattaagtgcttactacacacgaggtactgccctgtggtcatcagagaaataagttgcagcctttcccttgaggagtctacttaagacgacacctaatggcagaacagcaagacaaatgcaataatggaggtgctgagagacactatatgggaaggagtggctaattctgcttgaggaaatagggcgtgacatcaccagcaagggacaattaagtcaggtcctaaaagtgtgagcaggatttttgacacctaaaaaaggagggacatttcagaaagaagaaactgaatgtgaaaaaaattaaaacccgtaagtataaacagggttggtgagtctgggggttatgagaaattctgcaagggacaggaagggctgggagatgaggccaaagaggtaactgagtccaggttataagaaactctaaatgtcat

SEQ ID NO: 189504 - DNA, 597 bp, Homo sapiens
ctaaatgttacacatgaacccacgtatgtatgtggatgtggatggggtgttataccatgacttcctaaaacctagcttcaggcgtggttagctcttctattaaggtgcagtgaggctttttcaaaggacatgaaaccatcaaactactggaaaggaggactacacggaggggtcaaaccaagaacttgattttctcacttgtaatcttggagattatttaagggaatgcctagaaacacaattagcgtaaaattcacctagaatcagcattcattgcggtggatgaatcactggcttcagaatcacccacaaagctgattgatagttcagatttggggcccccaccttaggcccaccgaattggaatctctgggaggaggctaaaaactgcattttccagaaactctaggtaatttccatgctcctaacattgagaattgtcgccttcataatggtgtttgtcactacacaggtgttgtaaacctctctaaatggtttcttcagcattcaagtttgacatgacaaaatgtgcatgcatgcagtattcaattactgtttagcactgtaccctctgagaggaggagatcctggggtacg

SEQ ID NO: 189505 - DNA, 342 bp, Homo sapiens
agttacaagatctgaagctgctgtttgagatgcacagcaggactctggtgggtgactcaggagaaggaaggcagaaggcagaatccccgccctagcgaagattcgaatccagcacgcgcacatggcagtcgaagaagagagtgtagacagtgggcaaacttaagggactgtcgtatggggtgaacgaaattcttaagtgccaaggaatgcaaaaactggccctgggaagagtcaggaatgaggtggtttctgccagaggtgaggtctaagtggagttttcaagaaggctgtgggtgtggcgggcagagttctagggtccttggggtgctgctggcaggacga

SEQ ID NO: 189506 - DNA, 262 bp, Homo sapiens
caagaatggttctgcccagaaagccagttgcaggggccctggatgtttcctttaacaagtttattcccttatcagagcctgctccacttcccccaatacccaatgaacagcagttagccagactgacggattatgtggctttccttgaagactgacttatcactctgagttcaagattcatcttcagaatcctgtatactgacaaatatagaaatgtaaagtttgtattttcaatttattggatggcttaagcacctcagca

SEQ ID NO: 189507 - DNA, 375 bp, Homo sapiens
tagaggttgcagtgagccaagatcacgttactgcactccagcctgggtgacacagtgagacgtcatctcaaaaaaaaaacaaaaaagaaagaaagaaagaaaaagaaaaatattaaatgatgatgtaggtgatatatagatatggggaaattgaaaaggtagtagggaaatgattgttaccgagaaactactgtagagaatcagggaacttctgggaaatgtggtctcggtaagaaaaaaaaagaaaagaaaaacggtggactagtggcagtttttaacaagtgaatgacatggtcagatctatcttccagatggacagctactgacagcagaggacacacaatctctgacattcactctgtacctgcaccctct

SEQ ID NO: 189508 - DNA, 688 bp, Homo sapiens
ctcttgaaccctgcctcctggaagcaccagctgctgcgtaagatcatccaccaccaggtgagggcccctcctccagcgtgcaggtggccagtaaggcaaagcgaggcagagttcctgcagccaaaaccaaatccgcctccgccttggttctggaaccatgggtgccctagccagcaagtgccatttcttgactggcatccagggggaactctgagtctctgtccattaatttattagttcatcccttcatttagtcaactaactcatttcttcctaccactaactgagcacctacggtaccaggtatggtgctaagtgctgggaacaccacagtaagcaaagcaagcatggcccctgccctcagggagcctgcagtctggaggagaggacagccctacaaggagtgatcaaatgaatccagatgtcatcgtagttgtgataagctatggaaaggggaagtgcagacaggatagcagcgagagggggctgctggggagagggggctgcccagaccacacctttctgagaactgggaattttaactgggacaccgaaggtggccagatgaaacacagaggggctttctaggcagagaacagcacctgtgatgaccctgaggtgaagaggtggttggaggcagcagaggcacagggacaccggggagaggggctgtaaagagaagcatttg

SEQ ID NO: 189509 - DNA, 314 bp, Homo sapiens
ttccggcttctgtgcatccacctcctggttcacccagcatgagaccttgaagacaccctcatccattcctgtgtgtccccagtcataccaaccccatgacacaggggaaagacttggtttgaatcccacctctactgtttaagacctggtgaccttgaacaagttactgacctttctgaacctctgttccatcattcgtacagctagactaagaccacaacacagggcttgttttaaataataaatgcagccaggtgctgtggctcacgcctgtaatcccagcactgtggcaggccgaggtgggtggatcacat

SEQ ID NO: 189510 - DNA, 320 bp, Homo sapiens
aactcttgggttcaagtgatcctcctgccttggcctcccgaagtgctgggattacaagtgtgagccactgcgcctgatctctctgagggcagatcctgaatatggtagtatactgattctgtttatttgtaagctagtgattgctttccacttctacgttgtagctctctttccaaggaattgcttttctaagtttttacggcctcgacttgccaaaaggatctgggaagtatttggtacttcagagctttttgtcaactctatctttcagaccaccaaagatgtggttccccagtgcagctcaaggttctagcacctaa

SEQ ID NO: 189511 - DNA, 578 bp, Homo sapiens
ccacctggccctttccagaaaaaagttagctaaccagtgttctagatgctcttttatcctttgctttttaaatttcatatatcctggaaattattccataccggttcacagagacattctttattcttttctccagctgcatagcacggccgtctatgtggatgcatcacggcttattcgaccaccctcctatacatgtgcattcgggttattgccgatagtttgcacgtacagccaacgctgtgaaaaataataatgtggtattacagatcttttttaaacttcccccatacaatttctcataaatatccagaaagaaaactagttttcatttgctacacaaaaactgattcaaagcagattttgaataattttttcattgttgtttctttaagcttttattttgcctcctggttaaaacctcaaaaatgagggcaggatcaggaagagaaatgtaacgtgggccatgcataggctctcctggtacgttgtagccttgtgaggcctctgggggaatggccatgcacagatgacaggcgaggtgtcatttatacccaattccagtagtaaagagagtc

SEQ ID NO: 189512 - DNA, 474 bp, Homo sapiens
agtagagatggggtttcgccatgctggccaggatggtctcaatctcttgacctcgtaatccacccgccttggcctcccaaggtgctgggattgcaggtgtgagccaccgcacctggcctattttcttttaatgagaacctcagccaggcgcggtggctcagccctgttgtcccggccctttgggaggccgaggcgggaggatcacttgaggccaggagttcacaaccatcctggacaacatagtgagacctccgtctctgttaaaaaaaaaaaaaaaagaggggacctcattaaaggtatacagcaaatgaaactatgatatgatatattttggctttgtaaatcaatgttttcacatactggttttgttagatttatttttccatcagtgaaaacattttttgaacacaaattccttttccaattaaacaatttgtaagtaaagtttattcaaatgtatgttaaaacatttaa

SEQ ID NO: 189513 - DNA, 682 bp, Homo sapiens
tgctgtccttgctcaggatgagctgagccattgtggaagaactgcacagaaacactgctaatggtgacaaagacatacaccgagttcccatgacactaaaaactcagcacttctccaacctgattgcttttacattgtttgagttccacctcctctagtaggtaaccaacaaaccaccacagaggcagagttaaacaggctgagtcactcacatcagcactctcctctttcattccatctgaaaaggtgagcacttcctttggtgagggaggggaaagtaagaaatcacaagaataaatttaaagaggtatggaagcttaaaaaaataatttcgtgtatattacttggagttaggttatcctgcttaatccactgcttgccttaacgtatctgtgatcactgttattttattgtttcactaatatagtatacttcttgagacactggttttaaagacattatgttactgtccttaaatttctcagaagtgtttttacctcctagctggttgagggaaatgtttatcctatggaaattgcatatgcccactgcagaaaaaattgagtttcataaccctagattaaaaccttagccttggccgagtgcagtggctcacgcctgtaaccccagcactttgggtagccgagcggggaggaacacttgaggtcaggagttcaagacc

SEQ ID NO: 189514 - DNA, 636 bp, Homo sapiens
gatagataaagactgagaaaagaaatggtcaaagtcttcaagagctcaaattacatggataaaataaagaattcttcatcaaattctagaagatcttagttttaggaactgagcttttagatggcaataagcttatgaaattcattctttaaaattccaaaatcaaaaccctgcaaagaatgaaataagtcttctactctgatattctagccaatgtagggtgtgctctgtatggggatccttgagagatatcacacagaaacaaggcactcactgcactctgtgagcaatacgaatgacttttcttagtttaaaccactaaatgttggggtgatttgttactcagtaatacacaactggaatactctttgttctaaaaataaccccaaaacatagaaaacagaaatgagaactcaatctttgatgaagttagcattaataaatgaggacaggacaaacagaagaaaagattatacctgagagcgtacaggtgagggatatgtaagagaagcaaaatactttgccccacaaaactccaaaagagctcttcagcagaactgccagaagaggctggcataggtctgaaaacaaggagaatgcaaaagactcccaggtcccatccctactcagcacagc

SEQ ID NO: 189515 - DNA, 365 bp, Homo sapiens
  misc_feature (354)..(354): n is a, c, g, or t
cgactttatgacacaggtaatatctattatcatttgacaaataagaaaaccagggcacaaagaggttaagcagcttgctcatagttacacagatagcagatgactatttcaaaaagggaaatttatagcttccctcatgtaagatgagggaatgtgagcttctgaatgtgatgagcaaacgaaagaaaatgaaggaggcaaagtacaaagagagttgaatgaaaggactgaattgaaagaaatgctttctccttcacaattttctctaatcttatttggctgactgtggtgctcaaaaaaatgacaataaacaggtaagagaattataatcttacctgtttattgtcatttttngagcaccacag

SEQ ID NO: 189516 - DNA, 585 bp, Homo sapiens
aaggctgccttccagggtaaagtttatgattttcccataaatcacatataagcacttagcaaaaaatatttaaaactctcataagttttggtcctaaattcttttctcttgctgttactacaaaaatgacagagacaaaaaatttattatttataacggcttggaatctaattccaaatgagttgcttccgtagattcacgtaatactgcagaactaaatatgcaagattcccgattccaaatggaggccaaattccatccacacaggagacagaggaaccctcagcagtctctccttgaagtaatttttttttttttttttggaaacggagtctggctctgtcgccaggccagagtgcaggggtgtaatctgggctcactgcaacctccaccaccgaggttcaagcgatcccctgcctcagcctcccgagtagctgggactacaggcacgtgccctcatgcccggttaatttttggtccgttggtttggttttggtattttaagtagaggtgggatttcaccatgttggtcaggctggtctagactttgttccaggcaccaggtagctagcttgtaaattaatt

SEQ ID NO: 189517 - DNA, 409 bp, Homo sapiens
ggatttgttgtggaccctgttacatctagtggttgggtttgcagtgctttccctgactgttggccagaccagcctcttgtcctgcagagatgcccctccttccagatgtgtctggtactttcttatagtgttgtttcagcttagtcccctgtcccctgagcttcttttaaatgagaagttctactgaaaggcccagttgattcaagttaaacattttgggctagaatatatatgatgttctatgcttcttgtgtcacttcagggaccccagtcatattttgttgcttcaatacaatagatggcagtctggtctttgtgtgcattatgttctttctgtggactggaatgcaatgcatttaacacctgttgatgatcctggtcctagatggtagttttatttgggggcttg

SEQ ID NO: 189518 - DNA, 122 bp, Homo sapiens
ataaccagattgaaatctaaaaaatagaagggatgataattttagtagaaaatatccaaaaaactaaaattattaggacaaatcagttccaacaatttacacacaaaggtttttctaacaga

SEQ ID NO: 189519 - DNA, 479 bp, Homo sapiens
gcaaactcctactcattcttcaaggcccaacctgactgcacttcccctatgaaaccttcacagaagcccccaaatttaacagatcccactacttctgctcccgaaatgtaacagcattctatgtgtacttctatgcaacaatttccaaacttcattatatcaaccataatccatgcttcttgtcctcaccaggccatgaataactcaagggaaaaaactgaagttggtttaatctctatatccctaggctgagctggtacacacctggtaattagccaaggttcactgactaaggcagcctgggttagcagaaaaaacacaggacctgaaaggatcctgaagaatcagccagttttatttttataaaataaacacctttattttatgggaacctggaacctatagggttatgcaatttacctaagatcactaaatgaaagagtgataaaaacattactagcttctgattattctcttga

SEQ ID NO: 189520 - DNA, 438 bp, Homo sapiens
cttactgtcaagtcgtgacgggagtaagattatattctgcaatgctactcatgaatttggaaattggcagaggtctcaagatatctttcttacattattgcttgctttaaaacacaatcttatagaatttttgtacaaaatgaaaaaaaatctctccagtgaagccaacagtgtttattattgggtgtaggcacagaaagcctttgcaaggtatgagactccaagaaccaagacaatttttaggagctctgaccttgatatttaagatgtaaggtctctactgactcaacaaggcatagaggaagcatttccgaatttaaagcagactatgttctatttctggaaaaaagttatgctgattgctgcattgctaaaagaggatttgtcatcaactgaaagatctagccaaatagttggacccgtcacgacttgagtata

SEQ ID NO: 189521 - DNA, 445 bp, Homo sapiens
ttattatttttttttgcatctccactgataaactgacaatgcaattatccagtctttgatacaacttgtgtgcgaaaccatctgagcatggcaggaatttttggagtatcttttccatttttattaagtttattttggcagggtgggaatagaacaatgaacttttaactactgattcaaattgtttaatgagcagtcttaaaactactcacattgcttgtttctttgaagaaacagttttgggttttcttgaaacttgtacaacttgtttttgaattgttaacaaagctgtcataggtttatcttaccttaatttcaaaaaagtattattttttctttgatacagagtctagctctgctgcctaggctggagtggaatggtgcgatcacagctcactgatgcctcacttcccaggttcaagctatcctcccaccttagccttct

SEQ ID NO: 189522 - DNA, 404 bp, Homo sapiens
cttaactattttttatttttttgagatagggtcttgccttgtcacccaggctggagtgcagtggcatgatctcggctcactgcaacctcctgctgggctcaagcgattctcctgcctcagcctcccaggtagctgggactacgggagcataccaccacacccagctaatgtttgtatttttgtagagatggggtttcactatgttgtccaggctggtctcaaactcctgggctcaagtgatccgcctgcctcggcctcccaaagtgctgggattacaggcgtgagccacggtgcctggccccctgcttaactttaaaagtacaggctaataaacattaaggaagagaatgtccagatgagtacaaataatgcaaggtaatcagtgccctattaagagttgccca

SEQ ID NO: 189523 - DNA, 221 bp, Homo sapiens
agggttcagaattaaagaagttctcaaggttatactggaaaaaactccttcccaacctattcactcatttcccttccccgaaagaatctgatattaattatttcttccagatccttccagagatattttatgcaagtagaaacaaatgtgtatttatatattcaaagtcctcttgtttctatttttacaaaaaagacagcgtattatacacactgttctgt

SEQ ID NO: 189524 - DNA, 385 bp, Homo sapiens
agcaaaagaaatttaacaattttgaaaaggaaaaacatggcaaaaaaagaagaaaataatggattcaccatttctctctcaactggactatatcaaaaatcacatatatttttactactagattgaattactacattgcaatatgaggctacctaaaaagacaactcagaaattcaaaagtttgactctttaatggtgtaaactacaaattataccaaaccacttaagaactcttgatagactacctattatttgcaagcacactgggaggtacaagttactctaagccactaactactgtttatgaagttctatgtggtctgatctgagctcaagcgtattgcaaattcacttaatctatgaaccattatggaaagtgtgatca

SEQ ID NO: 189525 - DNA, 348 bp, Homo sapiens
caaaaaaactcagcctaccattaaattctgtaactttatatctttacgtatatttctgcaatttgccaagaaaaagcatttgagcatcctggaagggaactctgactgacacgcgggacaactgcaggagcggagtctccaaggggaatgagcagctccctcctgcacgcctgctgagccacggggtctgcgatggggatgtgatcaggggctgcccagagcctggatatgagctgtcctcagagtcacactttaaaacgcatgtcggggcaggcagggcagctctcaggccttaaaccaaactgcaatcgaagagacagcatcggcccgtcctgacacaccctgctt

SEQ ID NO: 189526 - DNA, 99 bp, Homo sapiens
atttacatataatgcattttatttatattttggtatatattcctggctaattcagtttatattcagtaggtgggttacaaactgctgtttgtttttaga

SEQ ID NO: 189527 - DNA, 501 bp, Homo sapiens
tggtccctgcagggtggggggccaggaaagcccacggtttccttccagcccaggcccactgaccccacagcactgagccaagggtgtggtcccagtctgagtccaaaagtctaagaactgggagcattgacatctgaggacaaggaaagatggatgtcccagctcaagaggaaagagagctcgctcttcctctgcctatgttcaatccaggacctcgacagacatgttgatgcccacaggcaggggcgaggcaggtcatctttactcagtctacagagtaaaatgctaatctctctgggaaacgccctgaaacaccccagaaatcatgttttacccgtgatctgggcattagccagtcaaatggacacataaaatttactaccaccggatgtcttccaccacctctacctcgtcaaaccaaattccagttcaagccataccttaaaccaaaggtgagagtaaggagtgatttagttatattctgtgaaaacaagcataggc

SEQ ID NO: 189528 - DNA, 573 bp, Homo sapiens
caggtgaaataaacagccttgttgctcacacaaagcctgtttaagtggtctcttcacagggacgccagtgaaaacggttaaagaccttggctcaaacttaagcctaatatgtttccactgagggttagacagagaagtgatgtgactgcatttcattttaaaagattacactgactgctgtggagaacagatcagtggtcaggagtggggaaggcaagagtatgaagtacgggaactaaaaataatccaggccgattgaaaattcaagaataatgtggctggagggtgataagatacgaggttatagagatgaattggaggtggggcatcatagagtatattgtaatgatatgggaagatgtctaccctatgatccaacaatgtacacaggacattcatttcttctacatcctccaagtatttctttgtttacaaggccagccatttgactacatttaatgcctcctgtccatcaaatcaatttgtccaaacaaccaattttttaaaagctagagtctaaaaagaatacctttgataaatgtcatgatatatccaatgccaagtgagttagtt

SEQ ID NO: 189529 - DNA, 510 bp, Homo sapiens
tttgtctcctccaggagtaatttctcatttgcttggttttcatttgttgaattaatgggttgagtgttgtaaggacattgtgtagtgattgtgttcttcttgacttttaaatttggcccaaaggcatgatttgtctcccttattctctaattttcaagttacatgtttaaaaatggaacctggagacatccaaaagattttctttttatattattctgtctctctttcctttataggggatgagagatgctgtggttaagaataggatccaatctaagtcacaaaaaagtggcctattataaaacttctgaaaaatttccacaatgaccattaagggggcagatggttctctgtctactgaaaaatgctgtgctaaaaggtcacatttcttaggcacccagagggctctaggaatggtttggaagttagagaatgaacaaatgtggtggagagtgctgattctgctctgcaagataatgttacgtgcttcccccattgtattcagtggtc

SEQ ID NO: 189530 - DNA, 386 bp, Homo sapiens
ataaaggtgctataatccttcatacaaccctctgagaactgctttttccgaaaagagcagtaagagcacaaaggcttacagagtttaagaaacctgttgtaaataatggaacttataagcaccgacgctgtagtctaggcctcgtgcctgtgactacagtgctttttccattacaccatgctgccttccagaagagtccccaaggagttacatttttctcccactgggagacaaggcagtaactaacttggcagaacagaaagaaatgagtgactgttttgtgtctctgccaagcaagtattcatgccctttgcaatatgacgtggacacaaaaccaactgatctttagcagctaagcattctagaatttgctgaagaattttctc

SEQ ID NO: 189531 - DNA, 219 bp, Homo sapiens
tcctacctttgacaaatgcaaacaaaagatagtgtgtgtcttagcaaattgtgtacatgtataggggttagaacaagacatactttacagttgtaaattgcagattagagatagataagataaccttcttgaatgtatcctttttgttctataattgcatttggctataatgtagaatagaaatgtataatgttctgtttatttgcatgaggaaaaaaa

SEQ ID NO: 189532 - DNA, 703 bp, Homo sapiens
ctcattttgttcagctttccaaggaatgtatatatggaagtcatcatcgatccacgcacagtgtttgtccctgcaaatgaggaaaatcagagcgctctgggaaagaactgcttacatgcagaagggatccaacaacttccaaagaagcctttgccatttgtgtccaggggtttcctggtatccctgcggctcacacaagataacaattgtccctcaccaacatgggcctgccttccatgccaatgctacctgggaggtgtagaggaaacacaagcgtgcttcagaaaggcagacaggtacacaggtgacaagggccatgtcatccagccccctgcgatacatctggaatctggctgtctggcttcaactatttatggacacagaaatgcacgtacatagggatgcacgtctgggttcagggtgcccttatagtgcatcatctcgctaaagagcactaatgttgagcatccctctcaacacccttgcttccacacctgcaatgcagctcacaatagcctcggggccatgcaatcctactgggaagactttgatctacaccgggatcaggataagccagagtctcattgcctatcagactcagcttggagtggcagcctatgtgttcatgccacatgcatgtgctcacaatgcatgggacacaacatgggcacgctggcctgaaagctatgcctgctgaccacaa

SEQ ID NO: 189533 - DNA, 387 bp, Homo sapiens
ccgtgagccaccatgcccggcaaatgatctgatattttattacattatagcagctttccaagaatttggtaaactacaaacctgtggactaattgtagttaattcctatacacactgaaaagtaatttgcagcatttttctcattttgagtagggctgaaactctgctgtaggcctacatataatcagcccattctccagaagggcagggctcttatttcaaaatattgccttgttccaaggcttcctctgtctcggaagttctttatttgaagtgcgttaggtatttactgtgtcgaaggctttcccacactgattatcatctcaaggcttcatcaaaccaatggatctttacactggcattcatactgtctttctaaaataagtt

SEQ ID NO: 189534 - DNA, 319 bp, Homo sapiens
tactagaagctgattacctatcccggggaggtaggtgaggtaaattaagaacatagatttggggagaattcaaaggattagcaggggagcaatacttgggctctaactctagggaataatgctgatacacaaggtaagatttctgtctgaaccacaaaaacaaaaaaatctgatcatcagtctgaaatcaatctctttaagaggttttaaagattcttccagaaatttgactaagttttcattttacaagagacacctgttctctgaagcctctccgggatacagctccccgggatacaggggttaccggagctcgaaa

SEQ ID NO: 189535 - DNA, 375 bp, Homo sapiens
taaaatactctcaggtaaacaaaaactgagatagttcatttttactggacctaccctgcaagaaatgctgaaggaaatccttccggttaaaatgaaagaaccttagacagaactcaaacctgtaaataaataatgatctctgataaagataagtacatggacaactgtaaaagctagtcttactgtaattttggtttctaactatgctttttgttttccacgtgattttattttatttatttatttttgagacagagtctccctctgtcgcccaagctggagtacagtggcacaatctggactcactacaacccctgcctcccaggttcaagcaattcacttgcctcggcctcccaagtagcggggattacaggc

SEQ ID NO: 189536 - DNA, 606 bp, Homo sapiens
aggaggtatacaaaatataaaccaaactataaccagtgggacatgactagcctgaggaagcacagcggtaaggagctagaatatacacttaccacacttggactttctactgtttttttgttttgttttgttcgagacggagtctcactctgtcaccaggctggtctcgaactcttgacttcatgatccacccatcttggcctcctaaagtgctgggattacaggcgtgagccactgtgcccggccctataatttttaaataaaaaaattagctgggcatggtggcacatgcctgtagtcgtagttacttgggacgctggaacaggaggatcgcttggcctagcagttcaaggttggggtgagctacagtttcattgcactctagcgagggtgatagagtgaaaccctatctcgatatatttaaaaaatataaatataatgaaattaaggtatgtacattgctttcacttaatagactgcagtatagagtaaatataacttttatttgcactgggaaaccaaaaaatttgtgtcactcactttattgcaatattctcttcattgtggtgatctggaaccaaacctgtgatatctctgaggtatgcc

SEQ ID NO: 189537 - DNA, 594 bp, Homo sapiens
tccatatggttggacgaggagagatgtggtttctccatgttagcccagctagtctctaactcctgacctcaagtgatccacccaccttggcctcccaaagtgctgggattacaggcgtgagccacctcgctcaagcacccttaggttttaaagtttaaccttggggtgtttaaattttgcagttagatttgctaggtagtcctgggtattttgggaagttcttgttttggcagcatgtcagactttatccttgatgcttgggcctttcaggtttgagcctgctctgctggctcggaactagtttagtcggaaggggctggcagttgcctgtagggggtagattcatctggtgtgtattatgctgatggggttttttggttgtttactcatttggaagatttcagtatggaccagactgtttgtgtagagtgggaattgagtaggttggagtcggcatgattctgagaccgaaatagtaattatggcttcgtttgtcctgaaggattctgtcgtgcacttcagttgtctcagcctcttcagagttgaacgtgatgtggttgtcatcgtccaaccatatggtaccgagctcacttt

SEQ ID NO: 189538 - DNA, 706 bp, Homo sapiens
ggtagtcagaaggctttttggaaggctttgaagggtgggtagacttgtgaaggacataaggcatgccaaggtggcctaagaaagagtatcagccaggcaaggtggctcacacctataatcgtagcactttggaagacagatcacgagcccaggagttcaagatcagcctgggcaacatggcgaaaccctgtttctacaaaaaatacaaaaattaaccaggcatgatggtgcatgcctgttgtctcagttactcaggaggctgagttgggaggatcacctgagcccaggaaggtcaaggctgcagtgagccatgatcatgccactgcactccagcctgggcagtagagtgagactctgtctcaaagaaaaagaaagagtaggctgggcgtggtggctcacgcctgtaatcccagcactttgggcggctgaggtgggtggatcatgaggtcaggagatcgagaccatcctggctaacacggtgaaacttcatctctactaaaaatacaaaaaattagctgggcgtggtggtgggcacctgtagtcccagctactcaggaagctgaggcaagagaatggcatgaacgcagggggggtggggcagagcttgcagtgagccaagattgcgccactgcactccagcctgggtgacagagtgagactccgtctcaaaaaaaaaaaaaaaacagtatcaaggtgagaccagcca

SEQ ID NO: 189539 - DNA, 199 bp, Homo sapiens
gtcctaataagcctgggagcacaacaggagtccggggcttatttcatcccttatctacaactgtaaaagacagccgtccccagagcagccattttagaggcctacccctaggagcgcattctctttctcagggttgttccttgctgagaaaaagaattcagcaatatttctcctattttcttttgaaagaagagaaata

SEQ ID NO: 189540 - DNA, 209 bp, Homo sapiens
aagttccacctgttgagcagtattgtgcatgaagagatgctgctcaactgcggcatgcccaggaagccgtatgttacgatcctggtgggatggtccttcacagtcatccttcacagtcatcaggtgagcagacatcaaactcagaacagccagggattgagaagatgagcaacagtgggactcctcacacaatactggctcagacaggt

SEQ ID NO: 189541 - DNA, 216 bp, Homo sapiens
gctcatttgagcattcacatgttcattcagccagagcttaatttaggaccaatcctttctctaaaggaaatgtaagcaatcctaagctagtaactaagctggttgttatagtctcattttacattccaattctaatgtctttctttatttcttatgaccaaacctttttctagtagttcattttcagtatcccgtctgatttactaccatatcttt

SEQ ID NO: 189542 - DNA, 441 bp, Homo sapiens
atgaacattcacccatgctgctacctgtctactcacgtttgacttttttatagcttcagaattctgtcattcattcaaatttcctgatggctgctggcaacagttgggcagagaaagagctttgaattgaaatttgaactaggatgcaaacctaggtcttctacctctaaactggccacagaaccctggataaaatgatagcccctctggtccttggtttccttctatgtaaaatgaaataggtgtgtctcccatggtgcccttcagcacggacatcttctgattctggtacccttgctttgttagcaaacatcagagtggtctttttaggggaaggaccctgggagagggtccctgactgcagggtaaagagactggttttcttgtgtgcttgtcttcttctaactattcccagcccccgtactcctggacaggctggca

SEQ ID NO: 189543 - DNA, 221 bp, Homo sapiens
caggaggctgaggcagaagggtctcttgagcccaggagttcaaggctgtagtgagtcatgatcatgccattgcactccagcctgagtgacagagtgacatcctgtctccaaagggggagaaaatggagagaagggtgtggaaaggggctgatgggaaggggagccctcaggagctggcactttagcttagaccaggatgctgagaagaggctggtcctgcc

SEQ ID NO: 189544 - DNA, 824 bp, Homo sapiens
gtgatgggaaactggatatggttgcatgcatctgtagtcccagctactgaggaggctgaggtgggaggatttcttgagtcaggtagttcaaggctatagtgcactatgataacaccactgaatagccactacacttcagcctgggaaacataacaagaccccatctcggggaaaaaaatgatggggtgtcatttctgtggttcaatttgaaaagactgtgacctcctcttgctattattctctcactctcgccttctcagcttgcaagcatggatgcagcaagctgccatgtgtgcaaggcccacaggcaaggaactgaaagtggcctctactaacaaggaatcaaggctctcactcaaacactctatgaatccaatcaacaaccacataagtgagcttcaaatcagatcttttcccagttgagccttcttaagagaccatacggctggcctacaccttgattatagccttgtgagagaccatgaagcagagaaccctgctagtttatgccaggattttgaaccacagaaactgagataataaatgtgtgctattttatgccaccaaactttgggtaaattgttacaaggtatagacaactgatacagctgtttttgcatgacaacactagagttgattattgttacagggaccatatgattcataaagaataatatatttactatctggctttttacagaaaaagttctgtgtgagaatgcaagcaaggaggctggcaggtatagtcttccatgactcagaaaggagggaagaaccagctccacgagcactagtaactagatgagctacatgagcactagaca

SEQ ID NO: 189545 - DNA, 356 bp, Homo sapiens
aatttacaagactatagtcatgaatgaaatgggatatatgaagctcctagcatgtcacctggcacaaatagtgtccttcaaatattaggtcctttcctcttcccacaaggaacttttagactgaaagttaatcttgggaatgagaacaaaagagaaagagtaaatgaagctcaggggaagttgagtggtcagaagaaggaaaagctcatgtctactcagcataaatgtggtatttaggacaagctctgtgaaggaggtaatgtttgagctgggtacgaaagaatggaggaagaatttgcttatactgtgattaggggccaagttatgccagacaaaagcattaggcacatgcaaaa

SEQ ID NO: 189546 - DNA, 360 bp, Homo sapiens
tccattcactggttcatgccaggatgctgaaatgaatcctttcttctaataccacaatctaacccttctatcaacttttgttggttctaattcctaaatacagcttgagtccatccacatctcttcagttccactgtcaacccccagtccaagctactgtcatctcttgcctccagcctaaagccaataaccttctgacactgtctcctaaattctcttcttattccttctaatcaactctctgaactttggaacaactaaattaacatggttcatatggccctgaatcatctgaccactcctatgccaagccttgtcttgaaacactcaccctcctcagtttgctccagcacactgacc

SEQ ID NO: 189547 - DNA, 224 bp, Homo sapiens
agagaaaagaaatcgcacatccccacctctatcagggtcaccaaatgaaggcatcaatttcaagtcccgttattatctgcaaggaactctgcattgcagcacttacagacacaacttatgctgtctcctggtgcccacacagctttcgggtgatggcagattgtcagccaaccattccccccagctgctctctcttaatttgctccctcatctcaccacgaaaa

SEQ ID NO: 189548 - DNA, 397 bp, Homo sapiens
gagtaggtggttggaggtagcaccttcctgagttaattcgtgtggtgctaacaacatcatctgcctactaatgttgtctttttaaatttagcacagcagactttgataacctgcctagaccagaatacaggccttcttaggaataagcagctttgcagagagctgtggacagccaacaagaaatggtagaaacttagatagccacacaatcatagcaggagacttcaataatctaccgacgacattagacagatcatcgaggcagaaaactaataagatatttgggacctgaatagacacttgaccaaatagccctaacagatatctataaaacactccacccaacaagagaatatacatacttctcatctgcacatagtacataccttaaaattga

SEQ ID NO: 189549 - DNA, 221 bp, Homo sapiens
ccccactacctaaatggctgtaattaatttatatttactaataattttcagaagcactttgagtttaagaaattgtccatatgtcatattttctaatgagtatcagaaatttacttaaattaaggtttatcacttgggtgagatctttgaaaatgatttgctaccgtaaggcatgactgcctggcctgtaaatctgacacaacttttcctaagttgtggct

SEQ ID NO: 189550 - DNA, 409 bp, Homo sapiens
ggcagattagatactaaacacaaattgaagactaagatttgtgaaagtaaaataaagagtaaggaaaaagcaagtatttcagaatgttattttaaactaaaccaaaaagttaaaaagaaagaaaacaaaaacaaatggcagcatagtaaagtggaaaaaccaaaagaccaccaggagatggagacctgtgttctaaacctatttctgcaattaagtggttaagagacgtttggcacaatcatgcaaaaattaagagagtgaactttgggaggccaaggtgggtgaatcacttgaggccaggagttcaagaccagcctggccaacatggtgaaaccccgtctctaccaaatatacaaaaattagccaggcatggtggcacatgcctgtaatcccagctacttgcgtgacc

SEQ ID NO: 189551 - DNA, 514 bp, Homo sapiens
agaatggccaaaacagtcttgaaatgaagaacaaagagaactcacacttcccaatttcaaaacttactgcaaagctactgtaatcaagacactgtggtactgctatatggatagacatatatagatgaatgaaatcaaatggagaatatagaaataaacctttgcatttatggtcaattaattttgacaagggtgccatgataatttactaggagaaagaatactctttttaacaaaatgttttgggataagtgtatatccacatggaaaagaatgaagttggattcctaccttacaccatgtacaaaaattaacttgaaaaggatcaaagacctaaatgtaagagctaacactaaaaaactcttagaagaaattttagatgtaaatctttatgaccttggatttggcaatggtttcctagaagtgacaccaaaagcaaaagcaaccaaagacaaaaatagataagctggatttcatcaaaatggaaaactcttgtgcttcaacaggcactgtg

SEQ ID NO: 189552 - DNA, 542 bp, Homo sapiens
ctggtctcgaactccagggcttaggtgatcctctcgccttggctgcccaaagtgttggcattacaggtatgaagataaaaaaacctcatgaccagccaaaaaacattgttaaatagctaaaataatacatacttattctagatatatatatgtgtgtatatgtttaaatagggttaaaaatgaatcctacttcagacttcctttcctctccagaggtaacagcagctgagtttggtgttcactctgctgaccattctgtctactttatatgtttactatatatacacatatatagtatatattacatattatatagtatatatgcctgtattatataatatattaagtaaagggggggcttacttggttttttaacttaattttttgaataagcaaatggtttagaaatgagaaacattttcttttatagctacctaatatgtcataatatagatgaaaatgttatcggaccatgttttttctttttaagaaatgagggtctcactgtgttatccaggctggagtacagtggctattcacag

SEQ ID NO: 189553 - DNA, 250 bp, Homo sapiens
aagtgaaaccatggacactattagtgctcagacacaaagctgacagaagcagaaatgaacatgttcttaacagtgtatgtgtatgctgctttgacgagagaggaacacaccgccttaagactcctgggagcatacgttttgaagggtcagaaagaattcagctttgaaaagtagaattaacagccactttggtccaagtttttcacaacaaagcactacaaagtgggaattagctctgcttacctttttt

SEQ ID NO: 189554 - DNA, 381 bp, Homo sapiens
agctggggaggcctcacaatcatggtggaaggcagaaggcatgtcttacatggcagcagacaagagagaatgcgtcgagtgagggaaaccccttataaaaccatcagatctcgcaagacttactgccacgagaacagtatgggggaaaccgcccccaggattcagttatctcccacctggtccctcccacaacatgtgggaattatggagctacaattcagtatgagatttgggtggggatacagccaaaccatatcaaacaccaaattcacagatgctaattaatggtgggaagtaaggggtgataagtcacactgaagtattaaaacatcaaaattttaaaatgcttttaaaaagattgtgcccttctgtgttcttcca

SEQ ID NO: 189555 - DNA, 284 bp, Homo sapiens
tgagccctgccttgggctgactgcctctcacctccagatcaaaatgtgcccctgatttctgaatgtctcctgcccaggcctggaaaacctaaacattattaccttcccctagcctccctcatcccctaaaatgaggtttctaagggttttatctgctgttgtcaagtttatggccataatttgaaatgctgttaatattactgtcagcagagagctacaaattacaaagttgtaaagtttctttatagtgataactgtcagccttcactagcagcacccgcaag

SEQ ID NO: 189556 - DNA, 425 bp, Homo sapiens
tgcttgggagccaatgttctaggaacagaagtaattccagtgtagcaaaggcatgaatgaggttaagacagagcaagataatggtggtgagagacaaaatagacagaggtcaggattttgcagagttctacaaaccgcattaaacaagataatactctattctaagggcaatcaactaaataactaataagcaagagagtaagtgaattagactgcatttttagaagattatttggaatgtagaatgaaaaatgggtcagagtaggacagatggtagatctgggttgggcaaaaacaggaccctggggggaaaaaatgaatcaattgcagaagtaattctgagagagaatccgcaggcctgggctactgactgggtgtggggaccaaagcagagggaagacacattcctctgactttacttctca

SEQ ID NO: 189557 - DNA, 171 bp, Homo sapiens
aagtgaattaatggttcatttgacagtggagttttatgaatgcttctgtgctgtgggatttcttgtttaatcaagttagctgtatccaaatcaacagagttaatgtgggctgccagccaagatgtaggtcaagagtgggttgttaaaatgttagtcgttaaaatgaaactc

SEQ ID NO: 189558 - DNA, 937 bp, Homo sapiens
tttggagatttggctatcatctctctcctggttccccagaaggtcagataaataacttgctttcagcttggtggcttggtacttcagcatgagttattccattttggtttggtctcttgggtgtagtgcgggagctcagtccaaaccaatagcctcctgtaaattttatttaacagtctttgtcagaataaagatatttacttttaattttcttgaagaggagaaagtcactttttaagattcacttcacagcaaaactttgtaaaagccctcgtgagatacctcctcctcagcgcaaagtttgcagtcatggcagcagctaaaaatgtgcctacaggccgcatgccaccatgccatctccctgttaccattaccttcttctttctctccttcctgctgatgcagcagtgcctccttggatacaggatcattcctgctctaggctttttcctgagaggggcagctctcctgggattctggcgaatcaaatgcttcatctcaacagatttgtttatattcgccccttttccatgtggtgggaggaaaaactttttcactactttctttaattcaatgcttggggactgctgaattagaataacagaagacagattaacaggataaaagttacacagtttttattaatatttacatacatgggagttcacagaagagaaaatcaaaaaagtagtctcagggtcttgtatcattcaaacataggacagggcggattgggcttcaaggggtcataaattgtggggaagtgactaggaatatgggggaaactaatggaagataggattattttagtaagggttgctaattcagtctcatccaggtgccgactcctcatcttgtgataacttgtgataagagttgctctcctttctgtggtccggaagtacggagcaccctcacaagggaaatttctgccctg

SEQ ID NO: 189559 - DNA, 161 bp, Homo sapiens
aggggcagtgtataaaaaatggcactaattactgaaacaatgttatttaccacatacactggcagaatgtttactatgtttctttacagccggggtttatttttgtttgatgtatttagttgctgtgaaaatgaacgtgttgctcactctcgatagacctg

SEQ ID NO: 189560 - DNA, 263 bp, Homo sapiens
tatgataattatttgatctgtcctttccaaatcttcctgtttcctctacacttcaactgacaagtcctaacaacaactgacgagtcctaacaatgttgccatctctcaagtttagagatttgttgcattttattccttaagccttataattcctccattcaagattttagatacttcaaaagggtattttctggaagaattctctaatttctatgatagcaatgtataaatctaccgaaactcttgcagtcatctctttatgg

SEQ ID NO: 189561 - DNA, 217 bp, Homo sapiens
aactttcttatctcaccctcccatctctgcctactgaaataccacctgcaaaggatcagttaaatgatttgtggtgtacacatacaatgggatattatagagcatacatctaacgatcatacctcaaatggggagtctttcaaacatgcttatctggatcttctaatttttctacaatgatcgcatataacttgagtggttatgtaactgtaagaaa

SEQ ID NO: 189562 - DNA, 521 bp, Homo sapiens
tatttaaatgatgctatgaagaatgagcaggacttgaacatttcaggcaggaatagtggggaaaacagaggtggagattataggacaagtttaaggaatgactgaaacaattcagttgaagtacagagttatctgcaggatggtaggggaaaacacaatagaaaacatagatggggacaaagcatagaagattgtgcatgctttgattcttgattctgcaagagattatgcacgagttttaatcctgcatgagaatggcaagaatggtatttgtctcattcacaataacaagcataaaataatcagaatgaaatcagtagagaagaattagcctgttttacgggagtgaaaaagcgcaatctaaaaatttgaaactggtatacctgcaaaaccctgtttacaacaacttaatagatccttacccccatcctctcaaaaaaatattttatcaatgcatcatcacaaaccatttatccatgtaacaggaagccacaagagctgagagacagcccacatctcca

SEQ ID NO: 189563 - DNA, 326 bp, Homo sapiens
cctgctgcatattggccaattagagtaaaaatcagatagggagactacctgtcaacaaagtaaaagatatagtccagagacaaataacatttgtatcagtttttctttttccaaagtcttcataaaaccaccctttggaataaactgaaaaatgctgcatttttgcaaaataggaatttgaaaagaaaaaaaaacaaacaaaaaaaagcctttgtcttctgcctcttttacggcttattgcttgtatcccaactagcaatgaatctggcgaatgaacacagaatggcaagacgtatttctgtaaatctccaggaggtttaaacaca

SEQ ID NO: 189564 - DNA, 274 bp, Homo sapiens
cttcataactagaacatttcccttcttttttattataaattctcattttgtattttaatcacttttgctttgtttctattgatgaggcagaaagaacatggtaagaagcagctcttctccagtagagaagtccacccagatactggtagtggtgtgttccttttccacaagagttctctcctgtcaccatcagggagcatgcttttgaaactggctcattatgccttcatgggaagaggtccaggggtctggttttattagaagtggtatgaac

SEQ ID NO: 189565 - DNA, 607 bp, Homo sapiens
gatgtcgaatgtatgttgaagaaagtacgcacagtcttatcttctgaacattttgatggaattaaccacaaacttcatgcaagaacagtaaaaggaaagatactattcaagtccagtacatcataatgcagaattctgtatcagtaccaccaaaagatgaagataaaaatgaatgccatttcccatccagtactgaagtgttaaagttagaagacatttgctaagtcaaatcacttcaggaagctcatcctgggagtggaggaacagatgttctgtcattgccacattcttctggacacagactggagaactataggaatgtatgttgaagaaagtacgcacatcttatcttctgaacattttgatggaattaaccacaaacttcatgcaagaacagtaaaaggaaagatactattcaagtccagtacatcataatgcagaattctgtatcagtaccaccaaaagatgaagataaaaatgaatgccatttcccatccagtactgaagtgttaaagttagaagacatttgctaagtcaaatcacttcaggaagctcatcctgggagtggaggaacagatgttctgtcattgccacattcgtgatcaag

SEQ ID NO: 189566 - DNA, 323 bp, Homo sapiens
tgcactagtcaatgaaagtgacaaatgcaagattctctgagattcttctctgccattaggactgtgatgttagagttgccatcagtctggatcctggattctggggttagatagatgtgaagtaaagcttctcctcttacaacacatgaggataatttagcatagatgagaaataaacttttttttttgagacagtctcattctgtcacccaggctggagtgcagtggcatgatcatggctcacggtagtctcaaaactcctgtgctcaggtgatcctcccacttcagcctcctgaatgggtaagtaggactcaggtggtgtg

SEQ ID NO: 189567 - DNA, 413 bp, Homo sapiens
ccttaatagtcagagaaaatcaaattgagatacacaattttacataataaattagctaattttggtggtacagatgaagagaatgttaagtcactcaagatatctgggacatttaaaattgatacaaagcctttgaaaatcaatttgtaacaatttatcaaaagccattgaaattgtgaatcatttgaccccatgaatgtaggaaaacctctaaacacgaacatttcattaaagcattacctagcaatatttagttggggaatggttaaactaattaacatgcagccaagctgcttaaggaagtctgttgatcatgagagttctccatctgacttgtgccaacagttctagattcaggaattttttatgtagactctttatatgcttttatttttattattttgttttatttt

SEQ ID NO: 189568 - DNA, 389 bp, Homo sapiens
agattggggtatacctatctcatagaatatagagttcattgtgaagatttcataagagaacagtgccaagtgcttaacacagtgtgtggcacatagttaggactcagtaactatttactcaataaatgaaccatattccaggttacccaaactcaaaatattggagtaattttttgcttgcctctcttatattcagtgagccctactggtttttagaattgtagaattttaggaatctctgtctttactggattttttgtttgttttgggcttttttgtttgtttgtttgagatagggtctcactccgtcaccgactgcactccagcctaggtgacaagaataagactccgtcttaaaacaaaaacaacatatttgttcacttttgaac

SEQ ID NO: 189569 - DNA, 437 bp, Homo sapiens
tcaacgcttatacttcatgctctactatctcttctttttttttttggagacggcgtcttaccgggtcacctagacgctggagtgcagtggtgtgatcacagctcactgcaacctctacctcctgggctcaagcaatcctcccacctcagcctcctgagtagctgggactacaggcatgtgccaccatgcccaactaatttattttattttgtagagatagggtctcactatgttgcccaggctggtctcaaacccctggactcaagcaatcctcctgccttggcctccctaaatgctaggattataggcgtgagctatcatacccagcctgtgttgttttttaacaatatataataaaagccaacatttattcagcactgaagtattttatacacattagctcacttaatttttacaacaaacctgtgtgggaagta

SEQ ID NO: 189570 - DNA, 142 bp, Homo sapiens
atctacgttatgcagatatatcttttgtatcaatagtaaaaggaaacatgcatatttctaaaaatgttatgcaatgtactgtagcagatagaaaacagatggatgttattcttctaagacagtggctgctgtacttgagaga

SEQ ID NO: 189571 - DNA, 360 bp, Homo sapiens
gcactccggcctgggcaacagagtaaggccctgtctcaaaaatgaaaacaaataaaaataacatgaaaacactaaccaaaagaaggctggtgtagctctattaacttcaaagtggactttcaggaatacttcatattgaaaaaagcttgaattccacaagaagattaacattttcttatgtacctaatggtataaccttgaaagatatgaagcaaaattgagagacacaaagagaaaaagacaaatccaaaataacatggctgggcgcagtggttcacacctgtaatcccagcactttgggaggctgaggtgggtggatcacctgaggtcaggagtttgagaccagcctagccaacatgg

SEQ ID NO: 189572 - DNA, 208 bp, Homo sapiens
ttccattgttttgggggacacacaaatatctgcatgattttgagaaactttatgttaaactatttttttagttctcttttgcatcatgtctaaaatgtgtgagagtagtggtcactgttctattggtttttatgttaattttctgcacattccatctttttttattagtatattcttgaaatatagtctgaaattataaaatataatg

SEQ ID NO: 189573 - DNA, 539 bp, Homo sapiens
tagctgtaaatgaaactgacggcaaaaaacagagcagagaagtttaaagaaaaaaaataacagcattcctggtgatgccccattgggccaatgaaacaaacacattctgaagcctttcctaaccaggagccaaccaatctcatcactgtgaagccaggttagtttggttttccatgattttcatctgactgaaggcatctcaagtatacaccgaggggacaaaggcaagctttggaaaatgtggtagcaagtgatctgcaagctactatttaataaactttatgccagctcaccctaccctgcagacatcacagcagcaaataaatgagagggaggggacccagaatgcttaactggggaagaaaaactgaggaagacattgtatactcatggcctgcctcttttccagttggctgagaagccctttttattaatttgttccatttccttaccatgtccttagcagtggagatatattttttggaaatgtattgatcacaattatatttccttacactgggaggacaaggaggctccct

SEQ ID NO: 189574 - DNA, 857 bp, Homo sapiens
tgtctgtgtgttaggtgtagacatctgcaggaagtgtggaatataaattggagaagtaaaaattgcagtccctttaagaagtctatgaggttctgatgactaagcagggacaatgaaaaggccaaaatgagggaggggggtcgaattcaagagaaattttgacacttgcatatgacttttaagttccttttcaatcctgacttccaatgactgcatgtgaggaaatggaagcgggcagtcaaagatgggattcccgagggatacgatttggtagataacagaatgactcacaggaggttgtgttcttagattgtttatggtgttcccaaaatagaggcaccattgagctgctcagaaaaactgttttgtaaatggggtatggtatatatgaatctaaatctctcttaagtgagtatttagtcaagtttaaaggacatgccatccttttaatcatcttaatagacataaacatactgaatcatataattaataacaatttgaagtgaccaattaaatcaaatggacaaagtccaggtcctgcgagcagctgtggtgtcattcagggcgacttctgtgggtctcatttgtaaaaagacaggtttggatgcatcctactgatggcccttttagtctcaatgggctatgattctgtgaataattttgctatactttaaatgtaacaatccccttttaagaaaatcaagcagatgtgactgagaacaagtgtaatgatttgtttaccaaacatgtaggcagcacctgctagtatggcgtccagcaccagggaaatgtattaacacagaacacagaatcagcatggcaggctactgtattccatgaataaaccactggggcat

SEQ ID NO: 189575 - DNA, 206 bp, Homo sapiens
tacaattattacacgtcaaccaaaaacaaaaggaaaggaaaataaaaagacacaaatattttccttaaaaaaaaaaaggccctcaaattggaaaggaagaagttaaactgtctctgtttgcagatgacatgaaaactctaaagactctaccaaaaatgttggcactaataaaaaatttcagcaaagttgcaggatacaaaatcaat

SEQ ID NO: 189576 - DNA, 391 bp, Homo sapiens
gaagagaaagagagatgggagatgtttgtcaatatttgggttttgaatttcaattttcttgttctgagaaataaaatattgtctagaaaagacatggggcataaaacttataccttaaataataaaggacatttttccttatgttctcccagctgaaaccctgccacaaggttaagaacctaaaccaagctggttaagaacaaagggaaaacaatatttagatgtcggcttttcattttctctataaaggctttcctgcccttccccacaccttcaggctaagtaggaaggagaacgttagagccaccagatttatttgtgggttttgaagtcaggtggtcctatatatcacttttggaatagaggctgggaagagacaagccccataggg

SEQ ID NO: 189577 - DNA, 453 bp, Homo sapiens
ggtctccttgtctccccacacaccttcctatgtaacttcacttggacccagactaacctgaataccactaataacaatatctaacatttattgagcattattgtaggctcccagtaagagaacagagccatatctcttcatgcctatcaatcattgtcacctactgtgcacagtggctggcattcagtaggtactccatgtacactagctcaataaatgaatgaatgagtgagtgaatgaatgttttctccctgctcacgggttcctgagtgatgttcccagcaccgtttaaatgttctacatgggttatctcatgtaatgctcatggcaaccctacaaaggtactattattgtcctcatgtgcaaatgagaacagtgaggccaaagtgaaagtggtctagaaacttgcccacttttggctgggcgcagtggcttatgcctgtaatcccagtg

SEQ ID NO: 189578 - DNA, 635 bp, Homo sapiens
tatattgtcagcaacaccctaagggtgaagagaagctgcctgcctctgtgcaagacattatctgagcaggcgcctcatccagtgggacgatgccatccacatttggaagcaggctgagaaatgcttcggcactggcagcaactcctcatcagaaatgctctctcgcattttatagtaaacctgtgttgactctggtggggagctctaaaaataccttatcatggagatttgacatttcttatagcagccgatagtttacattgacaagccccttggaattgtttcagaacactaatcacttgctgtcagcagctagttcctctgaggggaagagcggggctgatcctgcctctgttgtgagactgcatgattagagggacatttctgaattcatgtccattccttcatttccagtgcatactgaaatcaaaataccatcaaaggctgatagaactgattcacagaatttgtttttaggaatttggattttttaaagtacagctaagcctggtggtggctcatgtctgtaatcccagcaccttgggaggctgaggtgggagaattgtttgaagccaggagctcaagagcagcctgggcaatatagcaagaccgcatctctacgaaaaataaaattt

SEQ ID NO: 189579 - DNA, 702 bp, Homo sapiens
atgtctattcagattttctatttcttcatgatttgattttgtcttgataggttttgtctgtctggaaatttttccattccatctgtgttattcaaattgttgacatatagttgcttatagtacactcttataatcttttttatttctgtagaattagtagcaatgttgccactttcacttataattttagtaatttgagtttcttctttttttcttagtctagaatctagcttaaggctggtcaattctgttatcttttcaaagaaccaacttttgtgtcattgattttctctattatctgtctgttctccattttgtttatctttgctctgatctttattttttccttctttctgctagcttgttctttttctagttccttacattgtaaggttaagctcctatttgagacctgtcttttttaatataagcatgtatagccatcagtttcccccttagcactgctttcactgtcgaacaagtttttaaatttgtgttttcattttcactcatctctaagtattttataatttcccttgtgatttcttctctgatccttggttatttaacagggtgttgtttaatttcgtgattttttaaatgtccttgttgctgatttttaactttactcctttgtggtctgaaaagatatcttgtatgatgtagatctttcaaaatctattgacacagactttgttgttg

SEQ ID NO: 189580 - DNA, 362 bp, Homo sapiens
aatgtctagaagagtttttccagtattaccttctacaatttttatagtttcaggtcttaacatttttgatccatcttgagtttatttttgttttgcttagtcttgctttgtctatgcaggttcttttttgtttcatatgaattttagagttttttagttatgtgaggaaattatgatgttattttcataggaattgtattgaatttgtagcttgcttttggtaatatgatttttacaatactaaccctacccatctataagcatgggatgtgtttttatttgtatgtgtcatctatgatacctttcagacatattttacagtttttcttgtagagatctttcatggccttcattagggataa

SEQ ID NO: 189581 - DNA, 178 bp, Homo sapiens
gcttttttctgcatcaatcgatacaaaatcatgtgatttttcttcattagtctgtcagtatggtgcattacattgattgattttcaaatattgcaccagccttgcatacctggaagtagccccacttgctcatgatgtataattatttttatgtattgctgaattttattagctaata

SEQ ID NO: 189582 - DNA, 329 bp, Homo sapiens
aacatggtggtccaccgctcacgggaggtcaccatattgatgccgaacttagtgcggacacccgatcggcatagcgcactacagcccagaattcctgggctcaagcgattctcctgcctcagcctccctagtagccgggattacaggtgcctaccaccatgctcagctaatttttgtatttttagtagagaaggggtttcaccatgttggccaggctggtctcgaacttttgacctcaagtgatccgcccgcctcagcctcccaaaatgctgagattacaggtgtgagcctggcctcagaattctgattttaaaataatttagcaggaa

SEQ ID NO: 189583 - DNA, 141 bp, Homo sapiens
aaaactttaaaaagatttttattttaaaatgatcaagaatataacatataaaacaagaagactaaaaaacagaagagaataagaggaggaccttaaaatctattggatcttagatatggcctcgctaggcaaatcgaccca

SEQ ID NO: 189584 - DNA, 312 bp, Homo sapiens
tctggtaaatagtgctacgtatatgtactaagattttttgggtagggaagagaattaactgaaatattttgaaaatatagaaaaatatagaatatggtaaaatgaacactttcatgtccatctagaattaatatatattactgttgtattatatttgtttcaggtctttttcttttgttgtttattttgtttaagaaataaaatgttacagctacaactaaagtcttacagtcttaccaatttttttttttttttttgagatggagtctccctctgttgcccaggcttgagtgcagtggcgcgatctctgtt

SEQ ID NO: 189585 - DNA, 213 bp, Homo sapiens
taaagctgtacctccacaagcacccataattcatagttaatatcaaagattagtgttcccatacatcctcacagcctttacattggaagaatcaactcaaacagcagtagaagcactaccaaacaggcagagagtagtaaaccaaactctgctctcctatccagtgatcttgcaggatcagcataggaagcacaccatcttcacactaaaaag

SEQ ID NO: 189586 - DNA, 447 bp, Homo sapiens
tgaagtcaacactagcagaaagagtgtacaaacaccacaggctttcagctgttgtgaggcacatatttaactctgatgtaactatggccaagaagaatgtcatagttctaaataaccaaaagaaaaaagtttcttggtgggtaacgaaaattttttctcagttaattcaaaggatattctttcgtattagttttctatatgctcagttgcggatttgagaatcttgtttccatagataaacaatattcgggtgaattttattttctgcaaaatctcattctaatagtagattttaaatttataaatatctgtaaattaatttctccttgttaaagtcaagatttgaagccagggctttctgaaggagtatggcaattcaaattgtcaagatgttgctctgtaccaacattataataggtactggggatataaagacagatatctttg

SEQ ID NO: 189587 - DNA, 458 bp, Homo sapiens
tgaggctggtctcgaactcctgaccttgtgatccacccacctctacctcccaaagtgctgggattacaggcgtgagccaccgtgcctggccataagcttggatctttttgtgcactcactggtggctaggggcaggctacccagaaatatgcaatgtgtctgatgaaaccagttgaagttaataaaaggaaaatttgttgtgtttaattcctataattgactgatatcagggctttattcatttatagtcagcctgtgttgtctgtgttccttcattaggttgactactaccttttagttgttcaaaacagcattagttgttcaacacagcatatgcaatagaagacatggttcccattctcttggaatcacagggaaggtttttatgttttatgttttggaacttaggaccattaggagagagaaatcaataatcatcagctaaatatttgaaagag

SEQ ID NO: 189588 - DNA, 139 bp, Homo sapiens
ccacagggcagagctggagactgggctgttttgaaggaagaaggactggcagaccagctcttgggaaagctccattattgcctgtgggaggctggacctgaacttgcacctatgaacaaccctgccatttagagctttt

SEQ ID NO: 189589 - DNA, 405 bp, Homo sapiens
ggtgtgtaccaggaagtagggtaaccatgaagagtacagttttcctcatgtgataaaataatggaacctactatgctttttcctttctaaaagagaatcataaatattttgggggtatggggggtggtgatgacgaagcctcaaatattaaaagatgtataacaccatattccttctaacatggtaagttgagactatccagctggtaatgatataaaaatttgagtcaaatagatactttcataaagattattcctgtgtgccacaactgcctgaaagtattcaggcttaaagtgctctgacatacttggtatatttctgtcaattacttaatctcttctgtatatgctctcccaaggggaccagttattcccattaatttatgccataaaagggcagatgttt

SEQ ID NO: 189590 - DNA, 525 bp, Homo sapiens
tgaactcacatttactattatgtgccaggatttataatagatacaaatacttcattaaagtctcataacaacctgtaagataggtattagtatatttatttccacataaggaaacagattgagaggctaaataccctgcccaatacatacaactgtaagtggagaagctgtattccaacccatattctcctcaaatatccctgtagggacaagcaactctgaagagaaaaaagctgataaaagtctatgtaacagaaagaatgacacataaggctatgaagcattagaacaaaggaaaacgataaagtcacttacctagtatgtctttgtgagtgtaaaagcgtgtcttaagtggcttgtattcatggatccgtttgaaggtttttccaaaaggggctggtggaattattttattacaaacagcacagcaaacaaagtttttgtaatctgaatttctgatcatagttaaatttcagatgtcttctcctacttacagttaaaataatcttagaatcagaaaaagtc

SEQ ID NO: 189591 - DNA, 185 bp, Homo sapiens
agacactactgagttgtaagcagcctaatgctgccatcaatctccatttactaagaaaaagtaaaggataaaacaattcacatacaaggctaactcctgctaccgtggaatactgctgcatggatctacttatatgcagttttttttcaataaattcagtcacccctccgtatctgagtgttcca

SEQ ID NO: 189592 - DNA, 330 bp, Homo sapiens
tcatttagaggtctccagagcctacccataattcagagaatatactttaatacggttggcatgaattagctactgcacatgtaaacccatctggttaaaattgtataaaccatagttagcataaagtgaaaatagatgctacctttctcaaaaacatctgtgaatttttaatctttgatttggaagttatgaataaagtgtttttaaaagatggccctaaaaattccaatattaccaacccttgttctaagagaatgacaactcaataatgtggatttttaaattgtctttgaataactactagattcttgcctttccttataaacaccg

SEQ ID NO: 189593 - DNA, 150 bp, Homo sapiens
cgggactccatctcaagaaaagaaaaaaataaagtgtattcccagactgctcataagttgcaatggggaaaatattaatcacacagtgaacaaattgaataacacctgaccaaacaaaattaagattcccagtgaaggggatggccatca

SEQ ID NO: 189594 - DNA, 1256 bp, Homo sapiens
atttatacatgatcctttttccttaatttatacatgatccaggcacatttgaaatttggtaggcattgcaaacacatttgaatattgtgtatttcatactattctttaaaagtaatcttatgtcctttcctacatgtaaaatattttgttaatctatgccattagtagtattatatataaaatatagttccccgtcccccttttcattgagtttgatattcttcagtaaagctgaatgttgtaattcaccattcatactaatgttattgacttttgtaacttactaatagggatgttaaaagtaacaaaaccaagtcaaacttggtgtatttttattttaaatattaactctaaagcaggattactaaatttgattaatctggtcaatgagaatcaaatggaaacatatcattctggaggtgcacttactcttctacaatgtggccggatcatttgtcattcctgaataggtctttctctcaacctgcaagagctaaaccatcttcaaaacataaatcttgttcctttctcattggaagctttgaaaataatgataacactattagtagctagtagttactaaagtgctaaagtaattgtggggttttctgtattagcttatgaactgttgcttctacttagcccttttatagaaactctgagctgttactttggggaaattccacaatgtattagcagccacaaatttccactggtaaccaaagagtacctaagtagtttttcattattttaagttgaatttgaataaagattccagaaataaacatggagctcagtattcaggaagcttaatactgttttgatctacaagatccaaataattatccctatcttcagaattaacttagtctgtaatgtggcttcaaaaaaagaaaaaggcctttttggaaacaaaggcttaacacaattggactttttttaaaaaccaaattttttatcccaacaagggggagaaaaaaaccaccaaagaagggggggtatataaaaacccccgtgtgggggcgggggggggtgacagacacacaaaaaaaaaaaagaaaaaagaaaaaagaggaggggagaggggagggaagagaaggaagagagaaaatagttgtgattgtaaagaaaaaacactcttagctctactaaaaaaaagttgcctaagttttatattatatatgtaatatgactaaataaaaaatagaaaaaaaaagaaaagagtacattttattttttatatatgtaatagacag

SEQ ID NO: 189595 - DNA, 489 bp, Homo sapiens
gtctagagatcccctgtacggttgatgctgatgaattccatgaaagcaggcaatatacaccttctcttagcaacaattgggataatttttattttcagcttctttttttcccgttttctcctgtcatgtggttctgtcatttccaggccactctctcctattactgagattcccatgagtgaaagccagattgcaataatattatccttctagagaggaatttttatctctttggtgattatgtttgagcaactctgccatcatatcatggttatttaattctgttgtatttacaagcagttctccagcctgctgacagttgtcacttagaaaccttactggtggttttcctttcttctgctatactcatcaaatcctgctgccactgtacatcgtaatgttatcccaccagtatatggctaccttataaaaaggatttttgaagaaagaaacactgtctaattgagatttatatgtaccaagccttaa

SEQ ID NO: 189596 - DNA, 282 bp, Homo sapiens
cccctgcattgttcaagagtcagccatatttctatacagattatttttgtaatccttcgaattttttatgctttcattttatttttatcaaaaattgctgccaggcatgtctagagtttttgtttcatatcagttaagaatatttgtgcttcacttttgaagtccatcttcttctatagatactcttagaaccgtaaacagctactctatgtttaaataatatttttttctttttgatggaatttaggattaacttgaaaattgctcatggttagtagatgc

SEQ ID NO: 189597 - DNA, 298 bp, Homo sapiens
tagaggatcccccaggtcttagggagtagggtcttgggagagagtagtaacaaatacgaaaactagaaaagtaagcaaagacaagatcatcaagggccttacacataatgctaagaaatttgcatcttatttaaaagtaataggaagcagcaagatatcttaggaagtacacaggtttaggtattccaatggcctcaatctgtcacttacttgaccttcatcaaattctggccttcccctaaaggaacccgggggttaccggagccttcgaatttcgtaaattccatgggttcattag

SEQ ID NO: 189598 - DNA, 321 bp, Homo sapiens
ccaccgcacccaggctcttttatctctttaatgtagtttcattaatcagaatcagatgttcatattcttagaaatggggatagagataggaatcagctgtgttctggtttctgctaccaaggttggcaacctacttgataacaaaactaaggaatctgtgctaggcttgatagggctgcggctaattttttgtttatttacctacctgctgttaatctgatagaacccagcttattgactgaacaagacacaaagtggttcagccagatggggtgataacatgaatcaaaccggatatcttagttttgtgattacttttat

SEQ ID NO: 189599 - DNA, 328 bp, Homo sapiens
cagtttgccagcttctctatatttgtgaaaattaagcactgaaagcaaagctctctgttctcaatttaaaaagggaatctacctataagcccagcacatttaaattgtttgtatgacagaatgattaggtattattttctttgtatacttgacatacaaggcacatcatttattactaaaagtatttctaatgaccactaattttctttcctatagagtcacacaaaaaactttgagttgtttatctgacacaatgtgggtcacaccaattagacagaagccaatctttgcctctgtcctactggtgctgcctccaggagccagcctt

SEQ ID NO: 189600 - DNA, 269 bp, Homo sapiens
ataactttatcctatggcctcaatttcatcttgcaaaaaaatacggattagataatggcacttccttaaaaggtttgatgggatttcaatggaatattgcatagaaagtgcttgaggcattgtaagtacacagtaagtgaagtgttgaccattattaatatcatgatgataaagtgtgtaacttattttataagtaccatataattgaaatttgccaatagtaactcctcggagacttccagggaactctgtcaatcaaaaaaagcttt

SEQ ID NO: 189601 - DNA, 514 bp, Homo sapiens
tagaatggtggtcccttttgtttatttctaaactagctgctatgatccctgcttcccttctgcctctttacccctcccttatttgtcacccttctcctcacttctctattaggccggattcatctttggaattagtaaaaatcctgcctcttccaggaagcctatcctgactatccctatggaactctgattacttcttaatttgccacttactgcactcagttttgtatagttatattttattgttttatattgttctcaatgatggattaaaattattgttgttttgtagtcacttcaagttatatgtgcatattattttcccagcccagtgtcagagtactagcagatataagcagatataaactacgctttccctcccccgctgactttatccccacagctcatggctgtctccacgaagtaagtgattctgtctgagtaggtattttttttttttatttaacctaggatcagacctaagggagttttgttgttgtcgttgttgtttttg

SEQ ID NO: 189602 - DNA, 602 bp, Homo sapiens
taacacagaagtggtgagaagtgatcagaggcggatttcctggtgcattgaatatgggatgtgagataagcagaggagtcaggatggcttcccggactatggtccaaacagtggaaaggatgcagtggctgtaacctgaagcaggaagtctgcaggtgggacagaaatgtttgttaagggaagtgttttcagagtttggttttggatatgttaagtttgccagtgtaaatggacatactgtgtagacatttggaaatatgaatcttggaaatatgaggttctgggtatgagcagagtccaaggatgagcctagggattggagagctgaaaccagaaaaagaagctagaaggagaggccagttaagacagtgaaaagaagcgaggcatgaggatcacttgaggccagtagctcaacagcctgggcatcatagcgagaccctgtctcagcaacaacaacaaaacggacagtgaagagagtatttgaaggagaggggaacaggcagcgtattgcttattgctgaggggcaaagtgaagaccaaggatagactgctgggcttgacagcatggagggtgctgggggcctaggcaagtgcaatattca

SEQ ID NO: 189603 - DNA, 556 bp, Homo sapiens
taacacagaagtggtgagaagtgatcagaggcggatttcctggtgcattgaatatgggatgtgagataagcagaggagtcaggatggcttcccggactatggtccaaacagtggaaaggatgcagtggctgtaacctgaagcaggaagtctgcaggtgggacagaaatgtttgttaagggaagtgttttcagagtttggttttggatatgttaagtttgccagtgtaaatggacatactgtgtagacatttggaaatatgaatcttggaaatatgaggttctgggtatgagcagagtccaaggatgagcctagggattggagagctgaaaccagaaaaagaagctagaaggagaggccagttaagacagtgaaaagaagcgaggcatgaggatcacttgaggccagtagctcaacagcctgggcatcatagcgagaccctgtctcagcaacaacaacaaatcatcccggtagggtaggataaacgcggaggtaaagagatattctccatcatattggcccaagctgaaggaatgattccttcgcactggcgcaccc

SEQ ID NO: 189604 - DNA, 291 bp, Homo sapiens
gccaaggtcaccatttttgggaccacagtgacacccagaacagtggggcaggggcgatgagtggagctagaaggctgctgaaatgaaggctgaagaggtggacaccacaggtacaatttgctttgcacaaacctacagtatgaaaggccagatttgccaaaacagattagggatcagagtctacaaaagaactcttcacaggaggagccagcatggggaccctaaagggttctcctaggaagtaggggttctcctaggaacttttaaaagtcctagtgcctgggagcaaga

SEQ ID NO: 189605 - DNA, 582 bp, Homo sapiens
atgacttctcctcctgctgctgaggagtgacagattgtgaccaatgaggttaagatgactgtaggacaagtttgccctcagtgaggagaggcctgccaagttccactgacgtttggttggggaccacagaaagaaacatcaccattcaaggtatttggcccttattttgtcctagttcactaaatggcagatcctggggaggagattatttcaccagtggattcttcagaggtatgggggcagacagaacaggctttcttctccaaaagttcaagcttgctgactcaagcttcttactcatctctctggcatgtcactgcactcaggagaagatttgtgcaactatcaggtgcaaactcaagtatcaccaaagggatactttctgattaaatagagccatcgtgctctggggaccatctcaatatcagtggaatattgagggggtctattaatgtttataagttccttcgaaattcagcctttttctttgaaagctgtaaggcagcagttaagggcactcatactgctgctatggctgtgtgtgtatgtgatgggaaaggctggttgccaagcagcggagaa

SEQ ID NO: 189606 - DNA, 263 bp, Homo sapiens
tcccattgtcttttagttgtttgaccttggacagacttctgagctggacagtcacctatacaggaggagccatgaaattcaaagaaattagcatgaggataaaacaagaacacaaaaagaaaggaaaagattttgtaaaccaccaagctccatgcctggattcattatgattgtgtatcaaagtcaggacctttctcttctggtgagcgctcacttccagtacctgacaccatcgcgagatcatcacaatcacccacaaaggg

SEQ ID NO: 189607 - DNA, 598 bp, Homo sapiens
aaaggcgatctcacaatattgcaggggcaccggtgactgggtccccctggagtttttaactctcagacttgtctgcactgaaccttccagcaattcttcaattacagttcaggtgttcctaccccagtgttggttcctgcagcagtttttacttgtgcatctctgtcctggtaagctgtaactcactgtatttactggtctctttctccaatgtgaggggcagaagttgtccttccttgtcgcctttcttacagctccaagaacagctgttgattcttaagtttgttcagctttttacttcttgttaggatggaatggtgacttccaaactccttacatgtgaaactgaaaacaaagtctaaaaaccacttaaaaggaaaaaaaaagtaattggttttaaaattttttaaaccaacagagaaccctctttttttttttttttaaccaggatgagatttttaggtggtaccccaacacatgaaaaacatattaaatcagagctgcaggtgtcaaaggaaaggggaaagtttgatgcagggttccaggagctattggcttgacctgcccttccttgatcacttcttaactcccagagaat

SEQ ID NO: 189608 - DNA, 266 bp, Homo sapiens
tctaccggggattggctgactctctgttagggagtataggaattgtagcacagatgaagccagactacgtgatttaatgagaatgaaacaaatgactggacaagctgggcatcgtggctcacatctgtaatccctgtgctttgggaggccatggcaggaagatcgattgaggccaggattttgagaccagcctgggcaatgtggcaagaccctgtctctacaactaaacaaacaaaatccgcgggggtaccgagccctcgaattcg

SEQ ID NO: 189609 - DNA, 491 bp, Homo sapiens
tctaccggggattggctgactctctgttagggagtataggaattgtagcacagatgaagccagactacgtgatttaatgagaatgaaacaaatgactggacaagctgggcatcgtggctcacatctgtaatccctgtgctttgggaggccatggcaggaagatcgattgaggccaggattttgagaccagcctgggcaatgtggcaagaccctgtctctacaactaaacaaacaaaatcccaaatgactggacagaaagaggcttttgacttaagaagtttgtgagggcataaaaaggcagtgagtatggtgggatgccctaacagaagtcctgacaagtatgagatgtgcaaccctagaaaaacaacatcccttcacccttatttttttgatctgagaattaggaacaatagtcattgccctgcctacctctcatgtttgcttagagcaagtgcattgttaaatgccaacctgttgtgtaaactgtaaag

SEQ ID NO: 189610 - DNA, 173 bp, Homo sapiens
cttccagagtggggagtggacaaggaggagtcttacatcaaagggatgaaggtggcatttctgggagcaggaggtttttggaggtgggggcaggatctgagatcaccccacatgggctgtttcctatgtcacagctgcatgggaccagccctttgaatagattcccagctggt

SEQ ID NO: 189611 - DNA, 458 bp, Homo sapiens
cttttactgttggagaaagggattttgtaccttaatgatgccatcagaaacctttcaggtgacagaaataaacactttaaaggggatcaggtccactacattatctagatatggtctctaactgtcaatgacaatactattcttcattcccctagtttcttccaaagcaaaagcttgaaacatacgtaaagtgggccaatcattcattgcttcactcactgatcaatcttccaccaatcaatggtaatcggaaaactttggcttaaccttcgattcctgatccagtttaaagccaatgtgcacaggatgctccaaagccatgttattcttctggaaacaccttccagagttcggcttatacaaaaaagccagaaagttctacttttaacaccttcatctgcagatctgacaataactcttcagctctgcagaatgttaatgggtctctaaagaattgt

SEQ ID NO: 189612 - DNA, 411 bp, Homo sapiens
tatctaaggaatatagatagtgatatctaagaaatcactgcctgatctaggatcatgaagatttatgcctgttttctcctgggaattttatagtgttagctcctacatttagatatttgactcattttgttactttttatatatggggtgagttaggggcccaactttttattcttttgttgatggatatagagttgccctagcaccatttgttaaaaagactattctttccacattgaattgtcttggcaccagggacaatttcttcttatggctgatttcagctccatttaaaagtagcagaacaaacacataagcaaaaccattatatttcattactttaagtcattgaatgcacgcagtgaagaataagtgcatatgcatttgggaattaaaacactttttacttcc

SEQ ID NO: 189613 - DNA, 160 bp, Homo sapiens
ccccaaaaagaaacactgtatttattagcagtaactactccccattctctgcctcccctatgcactaaccactaatctacttgctgtctctatggatttgcctattctgaacatttcatataaatagactcatataacatcgttttttttgtctagcttc

SEQ ID NO: 189614 - DNA, 472 bp, Homo sapiens
gattacaggcgcctgccaccacgtgcccggctaattttgtatttttagagagacggggtttcaccgtgttggtcaggctcatcttgaactcctgacctcaagtgatccacctgcctcagcttcccaaagtgctgggattacaggtatgagccactgagcccggccgtatagtgttttctaaattttaactttgaaaatttttaaaagacataaatgtataaagacatgctagatgaagtagctgccagtgcctcaggaattcctacactgatagcctctgaggcccagcatggagaaggtctcagggaccaccacatgggcccagtcttgtgccacaaggtcaagtgctacctgtatagcaagtgacatcaaatcatcgacattccatcgttaaagaatttgtgactgtcatatggaaaaattatttggtggggaattcagataaaaataacagaaattgtgaccaacaagg

SEQ ID NO: 189615 - DNA, 567 bp, Homo sapiens
tgtctcttcagagacatcacataagacttctgggtttatctatctaggtttctggaggtaaagtgtaaacattttggctatgctagttcccaagtttggtaatggggttaccgtcttacagactccaaacttgtattccacagctttatcaaggtgcaaaaggcatttctgtttagggtactcttatacaagacaaaacattccaaggatactttgtacagatcacctgacataattcagttgccacagtgactcagtcagagagattgttaactggttttaaataaatctcaagtattgttactcttatacccactgtatataaagtcagctttaaattcattaacagctcatttatgttcttctaaactaagatttgaatgtttctgatatctttatttccaataattgtcatggcccttttgagagactgcaaaagctcttaaaccttgagcaaaaacaaatattttcattgttcaactcccctcctttctggttgcacattactcatgtccgcctcagagcatgaattagtttatgccagaatggatcttttctgtgatacct

SEQ ID NO: 189616 - DNA, 392 bp, Homo sapiens
atctcaggggatccagcgagtgaggagtactaggctcacaaccttacccatcacagcatcacccaggggtgaaatggactaataaaggcgtcagctttctgtgtgtctttttctgtggacataagcacttatctgtcttggttgtatgcctaggagtggaagtgctctaggtcatatgcttagctgtggtagaaactgccagacagttttcccaagtgctcatgccagcgtaaacacctgtcagcaacacgtgtcagcaatgtatcagttccagcttatcatgtccttgctgacacttggtactatttttttgtttttttttttaattttagaactctactcataggtatgtactcataaatgaaaacgtacatccacataaagacttatac

SEQ ID NO: 189617 - DNA, 260 bp, Homo sapiens
tcgtctagaggatctcaataaattgttggtcattgattattaatagttaattatccagttatctggactttttccaaaagagtttatctataaagagcatctactctatgaaatgtagaaataaactcaaaggatagtaaatcagtattcagtctgtaaatattacctcactgtgtccatgacatttgtgaacttagtaaccaaatttaaggatttaatgtgtttgcttgttgttaacatcaatgaccaacaatttattg

SEQ ID NO: 189618 - DNA, 320 bp, Homo sapiens
ggatccccccccttggcaagcttagggccttctcaggtctgccttgcaaaggctatagtcgatccagcattctaggtactgcttgcacagtattttgttttctatccttttactttaaacctatttgtgtctttaaatataaattttgtctcttgtagacaacatatagttagattatggttttttattcattctgccgatctctgctatttgtccatttacatttaatgtaattactaataaggtaggttttatgtctgccattttgttgttttctctgtgtattatgtcttcagttcctcgttgcacagaggcttaaa

SEQ ID NO: 189619 - DNA, 926 bp, Homo sapiens
ttactgtaaaggaaagagaaataaggcattttaaagaagagaaatgaggtcaagaggtttagggtcagggcagggaagtggagtttatttagaactcatgcaataagtggctcaatatatgacttctctaaagtcatatatcttttagttaattccttgagtaaaacagaaacaattgtctatcgtgacttttttcttcaagctctttaaaactctccccactcccaaactatatcactgtctaagaagaaaggagtttgaaaatcagtcttgttacatagcttaatttgaatacatccaaaaaatgacattgcattattttcatatttgctgaatctattttttggctggagtattttaaagtagatttttaaagtagatttcatctcttactacttcacatgcataggactttttctttatataaccacaatacttttatacacctaacaaaattaacaataatttcttaataccatataataaccaatctatgttccaatatccccatttgtccccaaggtgaatcaaaccaagattcagacaaggtgtacgtattacatattattatatctgcgaagccatttgttttttattcccatttacttgttgatgaaaccagttcagttgtcccataggaagtcctaccttctggatttgtctgataattttcctttggcgctatttgacttgttcttctttcttctgtatttcctaaaaactggaattgtgtatgacagcttgataatatacagaaccgactttccggactcagtgcacttctacctacaggtccattgagctcagactgcagggggctgggtaggtggagagctgaccgcaagatgctcaccacccgtagagggtgcgtataggtagagaaagggcggtctagggcctttctctgcactaagtggcgagacagc

SEQ ID NO: 189620 - DNA, 943 bp, Homo sapiens
ttactgtaaaggaaagagaaataaggcattttaaagaagagaaatgaggtcaagaggtttagggtcagggcagggaagtggagtttatttagaactcatgcaataagtggctcaatatatgacttctctaaagtcatatatcttttagttaattccttgagtaaaacagaaacaattgtctatcgtgacttttttcttcaagctctttaaaactctccccactcccaaactatatcactgtctaagaagaaaggagtttgaaaatcagtcttgttacatagcttaatttgaatacatccaaaaaatgacattgcattattttcatatttgctgaatctattttttggctggagtattttaaagtagatttttaaagtagatttcatctcttactacttcacatgcataggactttttctttatataaccacaatacttttatacacctaacaaaattaacaataatttcttaataccatataataaccaatctatgttccaatatccccatttgtccccaaggtgaatcaaaccaagattcagacaaggtgtacgtattacatattattatatctgcgaagccatttgttttttattcccatttacttgttgatgaaaccagttcagttgtcccataggaagtcctaccttctggatttgtctgataattttcctttggcgctatttgacttgttcttctttcttctgtatttcctaaaaactggaattgtgtatgacagcttgataatatacagattaaacattttgggcaagagataactaaaatcagagcagaactgaaggaaatagagacacaaaaagcccttcaaaaaattaatgattccaggagctggttttttgaaaggatcaacaaaattgatagaccgctagcaagactaagagaaaaaaagagagaagaatcaaatagacaagtagagccgag

SEQ ID NO: 189621 - DNA, 954 bp, Homo sapiens
  misc_feature (678)..(678): n is a, c, g, or t
  misc_feature (696)..(696): n is a, c, g, or t
  misc_feature (717)..(717): n is a, c, g, or t
  misc_feature (723)..(723): n is a, c, g, or t
ggcgggtcgggctctcccttgggtgcttagccccgcccccgtcccactctgccctgttgctgtcgcgccgctgctggttgctgtccctggacccctaccatggaggagaccatcaaagatccccccacatcagctgtcttgctggatcactgtcatttctctcaggtcatctttaacagtgtggagaagttctacatccctggaggggacgtcacatgtcattataccttcacccagcatttcatccctcgtcgaaaggattggattggcatctttagagtggggtggaagacaacccgtgagtattacaccttcatgtgggttactttgcccattgacctaaacaacaaatcagctaaacagcaggaagtccaattcaaagcttactacctgcccaaggatgatgagtattaccagttctgctatgtggatgaggatggtgtggtccggggagcaagtattcctttccaattccgtccagaaaatgaggaagacatcctggttgttaccactcagggagaggtggaagagattgagcagcacaacaaggagctttgcaaagaaaaccaggagctgaaggacagctgtatcagcctccaagaagcagaactcagacatgcaggctgagctccaaaagaagcaggaggagctagaaaccctacagagcatcaataagangttggaactgaaagtganagaacagaaggactattgggnagacanagctgttcaactgaaagaacaaaacagaagatgtctcagaaaaatgagaagatgggaatcagagtggattcagtttcaggcccagtgtcaactcaagagaacgaactggggaagctggttcagggagatcaagatacgacagagcagtagaagcagtgaaaagaggaagaccgaagaaagtcgaagcagacggtggagcaatgaagcgaatgaaactctgcatgggaacaa

SEQ ID NO: 189622 - DNA, 486 bp, Homo sapiens
tacatccactagtgtaggctggatctggcccataagccatggcttgctaacctctaaggtaaggcattccagcatcataaaacaaacattttccaataactgatgacaaaaatcaggaagaaactaagtttttaatttttaaggcacaacttttattactattgtttattactatttacttataggcaagagctcagtcagtataccactgactgcttcatgtaaatctttctaaatttgaagtatattttcccaaatcttaaatctaacacattatgtgtgtactcacgcatacccccatgaactctcccaaatgttctttattttcaaaatcgtgggtcaaaaatgtgtactttaaaacccacatcagatgctctgaacttggattacagtttccaagtacaaaaataatactgtttcattaaataaggcaacaaaactttagttagtaagaagggaaaaaggcactgggcctacactagtgga

SEQ ID NO: 189623 - DNA, 117 bp, Homo sapiens
ttacctggccctcagagagaagcatgtacattctaagagtttagagtgaaatcctggaatccttcccattctgtctccaaggggtgaaaattttgtctctttttaagaagaggaagg

SEQ ID NO: 189624 - DNA, 484 bp, Homo sapiens
agcacacccatcccagtatggtgacactcagcagctcaaactcagtaggtctgaaaagtgatcgctctccccttgacgctctccttcctgctgtgttccactcagcaaggcatccctccaggcacccacataagaaactggatgctctcccaggttcctcttttttttcttgtctcgtagctcatccagttctattgactctgtctctttaaaacccctcaaatgtatctacatctctctgttcctacagccgccccactggcttctcatccagagtattccaacagcctcttaactgggctcaacatcaggtcttcctctactttcaaccttttctaccactgcccagctgaaatgcagatgtcagttgtgtgaaatccttcggtgacccttcagctgctttcaggtaggctgcaaagtccttatcacggaatgcaaggctcatgcaatttcaccccacccatcttctcactcttgtctcttg

SEQ ID NO: 189625 - DNA, 424 bp, Homo sapiens
cccgtggggtgagggaggatggaggatgggaccggtgggccgggatgtgtctgactgagctgcccaggtcaccagctcaggcacagagggctgttctggtggaaggaagtctgggggaacacaccatcagctcattttggtgccagccgtggatggggtggaaatccagagtagggagcagcagctgaccggaagtgtgaccttcacagaagggtgaccgccacagcgtggccaaactccacgaggcagtctagagggagacagcgtgaccaggacagctcgcagcacacactgaagctgcagtcactctgcctcgccctgtggcccctggaccatgcccaggccaagctctgccctcctgccccacccttggggcatggttggtttcccagcctccctgagagctgccccctaggctgtgggg

SEQ ID NO: 189626 - DNA, 218 bp, Homo sapiens
ccatggagaataactccaccctaaaattttctcctagcaccacagactctgaaatctgtcaatcctttacttccccctaccaaaaaaaaatttttttttaaatgcaggggcataattttgatacactttcttttattgtcgtgcaatatataacttaaattttgccattttaaccattttaagtgtacaatgcagtggcattaattatattcacaatg

SEQ ID NO: 189627 - DNA, 277 bp, Homo sapiens
cttggccaggagtttcctttttaaatcagacccctcaatgagaggccccacagatgcagcctcttgcagacctgccagcccaattctggagccaggtttgttggattcatcctgtatgcaaacagcttctccttaaggctttcctctgaattcagctctggccccaccctcaaactgacttctaaatgatcccactcttgagcaggcgtctaagaggaatattttcgggaggtagttgtagttcatgttactgctgaaggccacccacctcacctcc

SEQ ID NO: 189628 - DNA, 517 bp, Homo sapiens
tcccgcatcctcaaaatgcccctctccctctgtgaccaggcatctcaaggatgtgcggctaccccggccaggactctccagggccccttcttaaagcagctcaggtcccttagtaacatgggcaacacagggtcacacctgctgccacggtcttcaggggagagtctgagccccagaaactcctcacaaacctcagagccaccaggtccaggcctggagccccttcccaagtctcacttcctgcacaactgtcctggggttgcctgtctaacgcgctccccagcccactgcctgctggttcggaggagcctggagagcaaggcccaggtgcatgggcctgccatggagtctgccccagtgccttgtgcagtcactgtccagctgagcaacttggagtggaggctgtgagacctgcctctgggcgaaaggccctgggatgaccttggggtgactgggagagagatgggggctgtggggaggagacgtggaggtgtaggcagggagagcggccggctgg

SEQ ID NO: 189629 - DNA, 406 bp, Homo sapiens
aaagtatatgatcagatagtttactaaaaagcagatacaagtgaatcttgtatttgtaaaaagccactcaacctcatccattataataaatatgtgtattaaaattataatagttttcatttctcagattggcaaacgcctgaatgtttaatgatatatttggttgaaaaaataagaaactgaaactgtcatacattattggtggccctgtaaattactacaaataatttggaggacaatttggtaataactactaaaattgcaaatgtcccttgacctagaattacacttctaggaatttatcctgtagaaatatccatacatggatgaaggaatgaatgcacaaagttattcaatgtggtgctgtttgtaactgaaaaacgttataaacaactttaatagggga

SEQ ID NO: 189630 - DNA, 640 bp, Homo sapiens
cccagtagattgtgcaagactaggggtggatgctgagttcccaacaggcactgagagacctgagctccaatggactgtgggaggccagggctggatggattgattggatggatggattgagaggcctgcatcccagtcgattgtgcaaaactgacgaccagggctggacgctgagttcccatcaggcgttgggaggcctgcaccccagtagattgtggggagctgatggccacagttaaatgctgagttcccatcagacactgagaggcctgcacctctacagactgtgggagctgatggccagggctggatgctgagttcctgtcaggcattgggaggccagtgccccatgagatggtggaggctagaggccagatacgagatgcacttctccgtgatgccttggagaaactcaacgctgtgggaggcaggcttgcctggtgccaagcactgtggggatagatgggagggggtcaaggagggcaatagtgggtttgagcaagaagtagacgcaggggtctccctaagtgggatgagtttctgtgtcctccacaagcatttcctgagcactcactgtgtgccaggctccgttccctgaaagcagcaatgaattttttttttttttttttttttttttttg

SEQ ID NO: 189631 - DNA, 543 bp, Homo sapiens
agccgtgttcatttacagataagaaaaccaaaggccaagattttcagacatttattcaaagtcagattctccatgttccacagcctccctcccattctgagtgcagctgatgttgcccatggtgggaagcctgtgtcactacacgttggttctctgtggggtctgttgggctgagtggtgcacacccatccagaccctgcctgcctcatccctggtgagggcagctccttggcttatttccttcagccagagccctgccctcaggtcttatagtcatgtctggtctgaggaaacggagactcagatcccttctggctaggattctgggctcagacactattctggctttgacatggcagggcctcctgcctcgttcctgtgtcccgtttccttctctgagtctcagttcttctaagaggcttctgtgttagttcctgttctgctaacgtgcctgatatccaggtcccgaattgggaccaagaccctgtcctgtccctttgttagtgataaccaggtgtggtggggagacatgggtttgaattc

SEQ ID NO: 189632 - DNA, 850 bp, Homo sapiens
gccgagcccaggcctgcaccctaggcaggcactgctccgtgatccaggaaccacctctctctacagctgggagtgagcagtcagagagggagacagccttgcccggtgctacccagcaagctagtcaccgagtgggcagagggaggagcggccctcaccggatgtcaagcagcctgggtccccagtccagctctgcctgtccctcgcaataacgcctcagatggggaaactgaagcccaatgtcacggaggtaggaaggggcagacgtagacttggaaggattctgtggcctgttcgaggttccgtgcatgagccgtgctccgtggagagccaggtctaccgttccagcctttgctctcccaggcccctggctgtccatgtcccacaccaccctgacacctgatacttgacacccgtgtcaccaacagctacagtgcaccacggccttggaacaccgcactcagtgctctgcctggatgagccctgtacccccatgacgaccccactgtggacattcttatgtccattttacagatgacgaaactgagacgggcggatgcagtgttgtgcacaagccacacagctggaaacgtgggctggggactggaacccaattacccgctttggctctataatcctctttttatttttatttaatttttttatgagatggagtgtagctctgtcgcacaggctggagtgcagtgacacgatctcagctcactgtaacctctgcctctcgggttcaacccattcttgtgtctcagcctcccaagaagctgggattacagttgtgtgtcaccacgcctggctaattttttgtatttttagtagagatggggtttcccca

SEQ ID NO: 189633 - DNA, 428 bp, Homo sapiens
caggcatgctccaggcactgggaacacagccttgaaccaacagacaaaaccgtctgcatgcatggagcttgcatcctgacaggagggacaagcaagaaacgaagaaataaatcgacagcattccattagttagcacctagataaaagagatatacctatagtgttcaaagcttgagctatgagaaataaaagagcaaaagatcgttttcatcaaaaggactatgaagcatgttatgttttacttaacaaaaccagtgctaaccatgttacatcctccagacttgaagtgtgtgggtgtgtttaacagacacaattttacctttttttcccttttaagttatccgtcaacatttttcagtctctctttaaagagcatcttaaatttgcataatagtcattcatcttaataaaaacattacactgttgtt

SEQ ID NO: 189634 - DNA, 161 bp, Homo sapiens
tcagttgaaaatccataagagcagaactgggacttctctgagaaggaagaaattctatctgtggactgtagctttagttcatgcctgagggttccagcctgctcttcctgatggcctgccctgtggatttaggacttgcctagctagccccatagtctcac

SEQ ID NO: 189635 - DNA, 626 bp, Homo sapiens
ttgtgacatgctctagtgtagtaccaggccataaagtgacactgttgtttagcaccctgaatttttccacacaggtagtaactgtccagaaacaatcaaaataagcaacaagtggtttgtccatttctaagaatcttagaatattagttggttgtaatgtaaagcattacctgtcactggaaagctggagagagtggccttaaccagaagtggccaacaatcaggtattattttaaggtctaaactttttcatctgtcagcaatagggaaacaacagttcaaattatctttgtagataagtacattgtttattacagggtaataagggaatgttatgaacaactttatgtcaataaatttaacagcctaaatgaaatggacaaattccttgaaagccaaaataccaaatgctcactcaaagagacagtctgaatagtcctatacatatttttaaaattgggcttgcagttaaaaaccttctcacaaagaaaactccaggcccagatgacttcactggtaatactaccatttaaggaaaagaactgaggtggagaaaatacttcccaagtcattttaagaggcaagcattaccctgatatgaaaagtggacagagactgtataagga

SEQ ID NO: 189636 - DNA, 188 bp, Homo sapiens
tataccagttcccagaaggctcggaactcagaccccacttccagaaagtagaagagttgcacacaggagtcaggttcggcaggatgtgagctcagtttgcagagcagaggttgtttttctcatttttcacattgtcggttggaacatgtttggggagaggcaggcagctaggatatcccggggcctca

SEQ ID NO: 189637 - DNA, 358 bp, Homo sapiens
agttttaaatataaaacaaaataaattaaaaaggttatttttcaatacgaattattttagatgtatccaatgatacaaattgccgtaatcagaaacccagttttacatttgtcttatttttttaagtctcagctttttactacgttatttttctagacagtgggtctcaatatttgtggtgattagaatcatctgtggaagtcatttaaatgaagattcctgggcatctagagattctaattcaaaaagttggggtgaaggatcaagaatctgccttttaaacaaacaccaaaatccagttattcagttagttaatccagttagtgtgctcacatcatagaaggagaaatgctgatct

SEQ ID NO: 189638 - DNA, 333 bp, Homo sapiens
atatatatcattttccttaacagtaatctatataattattatttaagattaaaaaatttttggcttgtattccaaatttctgaaacaatatttccaaatataaacctgacttagtgattggatttgattagaatagtagtctgcatataaggtgataatatgtctgtgaatgcaagagactatcttagataactgcttggttttcagatatcatgacagaatttatacatgtatgcatgtataggtgtttgcatgtatgcatttatttatttttaatagaaagcaaagggtaaagtaagctgtggtaaatgatattgacacagacaaaaccta

SEQ ID NO: 189639 - DNA, 635 bp, Homo sapiens
cctcctgagtagctggtattacaggcatgtgccaccaagctaatttttgtgtttttagtagagacggggttttatcatgttggccaagctggtctcgaactcctggcctcaagtgatctgaccacctcagcttcctgacatgctgggattacaggcatgaggcatcgtgccctgtgttcattccattttttgattttcgtttcttcgtctataaaatgggggaaatttcctatctatttggtaagcatatgctcagaatcaatttacataatgtttcagaatagtatcttgaaatactctgcaaaaatcttgcatactaattttctcagtaatatccaaatgcatttcagtttatttgcctctcgagtgtcatataccttttcaagtgtgattggatcagtgtgtatttaaaaactatgggaaatttcttatataactcatgctcagaagcaagaagtgctaagtaacatcatatccacttagtaatgttatatattcgtttttgtagtactgggtcctactctgttaggtctacctggggtagacctaacggtagacctaacccaggtagacctccaggtagacctaactagaagtgtgaaaacgtaggcttggattaaggggacagcgaattc

SEQ ID NO: 189640 - DNA, 380 bp, Homo sapiens
ctgcctcccacaaatcaggtttccttctgcctggatctgctttaaaactgtagcttgacagctgtatttaaggggcattgcagcacagggaccgctctgcacattcagtaagcctgctttgagcatcctttgtaaaacaggtgtggcacaggctacagacacagaagacaccagtattctgccctcccggaactcacagccgggggtggggacagatgggcattcccctgacagtcacacaaatgggaaaatgcaacctggggtaaccgcttcagaggaaaatcttaggggccaagaggaagaattagtacagcaggaaggctgagcctcctctggagcctctgcagaggtgagtttagagttgacaaaggtgggaacgg

SEQ ID NO: 189641 - DNA, 148 bp, Homo sapiens
gccaagcctggaggggggtggctcaggagcactgcagactcactctgcagggtggctgcctcagtgttcccatctgaaaaaggggaacaggtaagacggctcagattatttcagaggtgcttctagcagtgacctcctgccaagctgg

SEQ ID NO: 189642 - DNA, 464 bp, Homo sapiens
gtttcttgaacaaatatttattattaatcgtagtcaccatttactgagtgccaggcactgttttaagtacacattttttacttcatttaagcctcctgacaatgctgaggggaagaccatttcattttacagatgaaaaaatgtgcttagagaccttgaaacttcccaaagtcacatagtttgttagaagtagacctgggattttaactcagatctgcctgccacttcaagcccatatccttaataaacacttcattgcttactatgtgccaggctttgggaatagtgtagtgaataagtaaacaaaatagatacggttcttgtcctcccagagtctcttgtgtggaaaaagagaggaaaacaagctactattatatgttataataaatgctatggaagggaaatgcagaatggagtgctatgagagcacaaaagcaaacaaactagatttggggtgcaagggg

SEQ ID NO: 189643 - DNA, 335 bp, Homo sapiens
aaaacagttcagtgaatttcacgataccagatacaaagaacctaaactggctactctataaaatgtctactgtgacttggagtgatgacagtggattcattttggggatcgggggagatgtatcctgaaagaataaggggctcactttgtgagcaacttgtgaggaagccatctgggaagatacataacgttctgtcttggtgggcacctggcttatgcatgaggctagaacatggggtaatgcaaatacagctctccatttgggaacaaaaggacagcagtattgcatgcctcagattcaagcttgacttctctatggctagtgagttggggcc

SEQ ID NO: 189644 - DNA, 669 bp, Homo sapiens
ttacatagctgacttgtagggtggttgctcttggccatagttgttaggagcacagcaggtaatgttagactgacctgggttctattccagcttttccacttcctagcagtgagactttgcacaagtgactttacctgttcgaacttatccaagcctgaatttttgtactggtaaaataatagtactcacctctcaggattgtttagaggaaaaagtgagataacagttttaaatcacttagcatagtagtcacttgattgttgctactaattgttcccaacatcacagtttcattatgataattattattcgaaataataaataacttcctatctttgtggcctttatgaaaggtctctgggaacctctattggctacagcttagggtgaacagtttgctagattcatctcctcacatactcaggctaagttacttctatccaaggtaattgtcttctacaaatacaacctgcttaaaagttaggcattacaaccacaaagttatcagctatggaggtcaaagatactgaacatttcacttaggctgcatctcttttcacttctgaatctactccttcaattatctagaccggtggttttcaaaacttttgaacagcaacataccccttttgtatccaagtgaagtcatatacagaaccacaacacata

SEQ ID NO: 189645 - DNA, 130 bp, Homo sapiens
gcctccattcttccatctgctgccagggtcacctcctgtgactccttcttctcagcccaaccctgccaaaccacttgcaatccttgggacttaactatacgctgttaaactgccaaatctctactcgtgt

SEQ ID NO: 189646 - DNA, 113 bp, Homo sapiens
tgtttgaggcataacacctaagagagtaaagaaatctgcacaattagacctcacgttttagattaatatttaaaatccagctgcttattactggggagaaaaacttatcagta

SEQ ID NO: 189647 - DNA, 454 bp, Homo sapiens
tttccctcgtttagggagttatattcattctaaggagggcatggacagccttcctgagaaggaagcatttgagcagagtcttgaaaggggtgaggagggagtgagccttgaggctgccagggtggaggcggggcaggaagctgggcaggcagggaggccaagaaggttctagggggtggaggagcctgaggtgttggtttaaggagcagcgagagtgggtgagtcagagcccccacccccaccccaggaatcctccttcggagggagcggcccactgtggaccaggctgccactcctggaaccttcggaattcaccttgcgctcctctgcccaggcggctctgcagtgtctctctctctctttttctgtctctatgtcagtctcctttctacctctctctcagtctctttcttctccatttttactttttcttttattctaactccctttcctt

SEQ ID NO: 189648 - DNA, 901 bp, Homo sapiens
gtgtgagccactgtgcaagcctcgggcagttctttatagcagcgtgagaactgactataacaccacccaaatctaaattcataatctagatctttctccttcactgtactggcagacagtacaatgtagaggataagcacatagcctctgaagccagactgccagggtttgagatctcagctccagaactttactacctatggaatcttggtgatgatgttctttaccttctctatgcagcagtttcccatctgtaagacgggagcggcagcagctgctatctcaaaggattatggtgaggatgaagtgcgttgacatttgtaacggcctcgcacataatttgccctgagtaagcattagctggctgagcaccaaccccactaggttcaccacctgggtatctcatgcttacttcagactttcattatgtttaaaactgaactcgttttcaaacctactcttccttttaaatcccctgtcctaggtaatggccctcaccacagtcacctaaattgccaagccagttctgtaacttttctccctttctctcaaattctatcttactggaccctgaagttgtacctaactgccattgtaatttgcatgtatatgctcttctctttctccatggctgctgtcttggttcacatgtgtgtcgtcttcacccacactatgccagtagtctgactgggtctttttgcctccctactcacccctgcacactgctgtattcactggaaaagcaaatctcattgcttcttttgcttaaaaatattaaatggcttcctattgctatcaggttaaaaatctgacctgtgctcttcactgtgattttgccccccaggggacatttgacaatacgtggagattttattgttattgccagaagtgggaaagaggt

SEQ ID NO: 189649 - DNA, 139 bp, Homo sapiens
cactcctcacatcttttatgacagttcacaaagctaatttcaacctactcaggttagcaatctgagcaattccctgctcccaacattatttgcagtccaaataattcgcttaaagctcaagaagcaagataaagtctag

SEQ ID NO: 189650 - DNA, 606 bp, Homo sapiens
tcttagccttttgaggtttcataaggagcatggcgggttaattccagttaattactgaggaggaagggtttttcctttacagtcttaagttattcactctacccattatctcagaaagttggcacagattggagataagtttgtactttctccaaactttaggccagtttggctgccatctccactttgaagccaggacttcaatctgattccctgttgatgggcacattaccattggtaaaaacatttatgaggtatttgatggaggttattgtgtcttccttctgtataaggaacattaccattaaattagaacaagtgtatagtctaaccaagaggagttgccccatggtgggtacttagtcaaaaatgatcaaatttaaggacctgtcccaatgtgaaccaccaggagtacttgtttaaattgtggtttcttgagctaatagttgaagactgttgttgtaggctactgctttctcaaacgtacctgataaaaatcatttgtagtaactgtttagtatacaactttccaggctcctttccaaaagattgtgtttggtggatccaggatgtggcctaggaatttgatttttaacaaccatccca

SEQ ID NO: 189651 - DNA, 211 bp, Homo sapiens
aagagaacaagactagaagactactaccaacaactatcactatcattttaggtaagaatggattacttaacactaaacaagagcagtaagaacaggaaattaaggcagttcattcatttgaataaatttatctttagtgaaaaaatcatctcattagttttatttctctttttatcacagacaaatattttgaaattactaatatatttca

SEQ ID NO: 189652 - DNA, 156 bp, Homo sapiens
tctccacctgctgtaacacgcataacttcttccctcaatccagaaaacccgagcagtgaccctgctctttatcaagtgctatggcaaaataacttccctagaaggccaggacaccttaccctaggacatgggcgagaaatcaaaacacacatgtct

SEQ ID NO: 189653 - DNA, 394 bp, Homo sapiens
agtggtacccctcacggattactcaagtgatccacccaccttgtcctcccaaagtgctgggattacaggcttgagccaccatgcctggccagccaacctctttttcatgtggagtggtaccttctttagtacctctgagggtaccacagagataaaatagacatagtcctagttatgcagcttatagcctggaagaggaagtaattgaataatgaacaattgaacaaattaattaaataatgagataatttaagattgtaatgagggctccagagggtgatgtaagaatatgtaactggagaacttagagcctagtcatggacaataagggaggcttctcagaggatgtgacatttaggccaagcgttataggatgattggggttggctgggtg

SEQ ID NO: 189654 - DNA, 386 bp, Homo sapiens
ccgcacagcttctccgccccacagcttacataagagtcttacaaggtctccacttggaacagtcctaatattacttactagatccactgaaacaacccagaggagagaataacaatacaagatattattaaagaaatgctgcctttttttacagcatatttttgttgctttttgtatattaatagcttcttatataatacttattccactgagacctaaatatttatattttatgagtctatatattcattcaaaagtgattttatgccctttaataatattttgtaatttttttcataaaggtcatacaataagacttttgttagagttactgttaggaattcagaatctgtaacctttactcaaaaataattttaaggtgggtg

SEQ ID NO: 189655 - DNA, 124 bp, Homo sapiens
gcctcctcagagatctgtgtctctcgctgagttcccagtctcatgctctatgaaagtccttcctaaaagccaccattcaacatgagcttctagtcctgctgactcaaatgatgacatcttgtta

SEQ ID NO: 189656 - DNA, 141 bp, Homo sapiens
aaggaccctcctgtccagctggcaagaaggacttaatttttggtttcaatttctttaaagagaggagaaaagggcagcggggcctttttaatctctcgcatgacaactcacagagtgcttccaagtctttcatgtactctc

SEQ ID NO: 189657 - DNA, 935 bp, Homo sapiens
tgggtggctcatgcctgtaatcccaccactttgggaggccgaggcgggcagatcacgaggtcagattgagaccatcctggctaacgcagtgaaaccccatctctactaaaaatacaaaaaattagccgggtgtggtggcgggcgcctgtagtcccagctacacgggaggctgaggcaggagaatcgcttgaatccaggaggcggaggttgcagtgagccgagatcccgccactgcactccagccagggtgacagagcaagactccgtctcaaaaaaaaaaagaaaagaaaacacagtgctatgttcaaagcaataatcaaatatcactggtcaagatttcaaagtaaaaaacagaacttatatatacccatttccaaataacagctttttaaatatatataacattacatacattattaaactggtctatgcagatatttctgaccacaacctaataacttatttagataacagctgtattcattgagtgcagagcagagcaaaataacttgggtaggttctaacatcagttctcctgagaagcaaagttcagtacaacataagtaagcagcatgtagttaaaggtaaggtaaagatttcaagaagcaggaatcctgtactctctcaagcacagaactggatgtgtgacctatggcacacacttcagcaatccagtgaatagtcaatctactaatctaccctctgaaccagtttggtactatacccagtttggtgtcctcttttgtgatttttttttgttttgttttttcttttgaagacacagtctcactctgtagctcaggctggagttcaatggcaagatattggctcactacaacctccgcctcccaggtacaagtgattttccttcctctgcttccggagtagcttggattacaggcgtccgccaccatgcccagttaatttttgtattt

SEQ ID NO: 189658 - DNA, 177 bp, Homo sapiens
tcccatcacccgctgcacctcccctccttccggttcaggcccgagcaccctgaaatctggattctgtcccccagcgccccagctccatggcttctaaacctaaatccattgaaaccttttctgtcctctaaattgactgcctaggttccaataacaccatggtcacctccttccttt

SEQ ID NO: 189659 - DNA, 189 bp, Homo sapiens
ggtcacctgctacacgcaaaaagaaaacaaagcaaattaatacagtcaaaattcaacggcaccttcaatggtaaaatggctttaaattgtgacaaagccccaggggtccctaaggcatttctagggtttctttaaataaaaaaaaagtgtagtcaatcacagacatgtttgctttttctctgcaccgtt

SEQ ID NO: 189660 - DNA, 218 bp, Homo sapiens
tcaatttccacaccgaatgtagacatgcatggcatttattaagccctttatggtaagcttactctattcaatgttaactttgtttaagctgagaaaatttatgcaaactaaatccacaaggtgcaacccagcgacagatgcagcggacatcactttaaggctaaaaaaaagttgagctaaatgtgtggcagacactgcagcctgtgtgaaagttgaag

SEQ ID NO: 189661 - DNA, 549 bp, Homo sapiens
gagggcgggtctggcatgcaagggacagaagacacaaagcatccttttcttgggctttgtctgaatttgtcttctcacgttttttcctgtttacaaaagagggtcatgttcctagttagtcacactctctcatgtcttagaggcatgagcgctcctcctaagctgaagtgaaattgtgaattctgggatgcttaggtgactttgaggaggaagtcttcagtggttactcctctggtattctcagcgtgtggtgggtgtgaatgtcctccctctctgggctgagggaatctaaaataacaagtcctagaatcatagtctccagtttagatgagacccacaagatcccctagttcactgtcaggcactcgacttccctgcgatgtccctgtcaggtgcttgtgtggcctcctgctaatgctggaccacagctccatctgtaggctccgtggctcagtggaaaacccttccttctgtagagctgggcaacttccatgagacttccacagggttttctaagcagttattctgtcttcccttataagatccctt

SEQ ID NO: 189662 - DNA, 311 bp, Homo sapiens
aattcaaagtgaaatgggttctaccagccactcaaccagaccacagaggccctagggaggcagcaagctcaggatgggtcctgggcattgttttgcttggggaagtgaaactggcatcctttgcttcaaaggcttcatccctcctgacttgaaggtgtggccttgaccagagtgacaagattgcaaacactggggtgaagaaaatgtatcaggttgcagcctttttccttccagaatattctcaacttcctgttgctttttcaaatcagttacattttcagaagagactcttagtttaaagcagtgcccct

SEQ ID NO: 189663 - DNA, 762 bp, Homo sapiens
ggcttccgctgaggtggttgcaggcctggggcagagcctgggtggtcagaggccggggctagaggcagatggaagggaggcatttgctgacagaggacggggcacccgggctccccactgcagtcggccttgcctcctcctcctcctctacctccagtcaggctggacgggagggtagccttgtggctgagaggggtcagactaggtggcacaggggctcctggaaagacagcaggcttcctgctgggcgttcccttgttggagggaatagagtgggggtgggactctgcaggggtgtccttgtccactcgcacccctcgccgcccaccagggccatgctctgtgacttgggctgatccccaccctttctgggcctacagcaccacaggccgctgtacccccttagagctgcccctctctggcctggccggcaggcgtcttcttaactcctctgtcctctatattcagcatgttccttgtcagctgctgggccggccctgccttgcgctagcagagcctctcctggcagcttctcaggtctccctaatggagacaccaggctactaggacactggctggggccaccccctcctgcctaatgcctcaccttacagctggggaaactgaggcctggaatggcccagagtcaccaaggcaaagttggggctggtcccagcctgaggctccagctgatgccctcagctcccagagagggggtgccccatctagctgggtgcaggggtcactgcttgtcagctcagg

SEQ ID NO: 189664 - DNA, 288 bp, Homo sapiens
gaactcagaaattatttgtagttcttctcccccgctccaccctgcccaagaatgaggatatagagtcaaacactgtgttcagcagttgtttgtgttagctctatcccccttttgcaagattatgatatttatttgaaataaaattgggttactttatttagtttgctgtcagtgttaggttttctttttgttttcatttttgcctacttcccattcttactgattttttttgaatatgtggaacattaacatgcttccaaaaattaaaactatacaaaaatatatccc

SEQ ID NO: 189665 - DNA, 607 bp, Homo sapiens
caggggattacacaaaatgcgtatgtacacatagtcagcactcaataattggtggctactttattctcaccatgaatataatttgggatgcttttggctgcaggtaattcaacccaaactcaaaatgcataagcaataaatgcatttctcctcttgccttcacttctcctcctgcttctccttctcctgcttctcttaacaagaagtttagaatttgggcaattgaattagaggctcaacatcatcactagcttctttcttatttagtctgcctaggttaattagatttcttaaatctataaaatgttgtagttcgtcatttttggaagattgtcagttattatctctgttctttttcttctttccatttgagatctcaactgattgtatgttgcaatttctcgttgtatagtctatatttcttattattctagatatttttatctccctttgatgcattctagataatttcctctgacatatcctccagtttattctctttttagctgtgtctaatctgcaattaaatgtgttcactaacttcttaatttcaattattgtattttttagtgctaaaatcccttccctatttaattatttcccaaat

SEQ ID NO: 189666 - DNA, 190 bp, Homo sapiens
ccccctttgaggtccagtctaaaagtgtcagacatctctgaccttaggtgggcaccagtgttgctttgtatgttttccctccagaggcaatggcctaatatgagcttttctcttgtccctggatgaaggtctcagcttctagcttcctaccaatttagataggccatatcttcctgcattccttgcaaga

SEQ ID NO: 189667 - DNA, 195 bp, Homo sapiens
taagtctaaacagtgtgggacttgattagtcacctgttgctgcatgacaatattaccataaaatcagtggctccaacaacatgcatttactctctcatggtgtctttgggttaggagagaggcatgctttagctgagccttctgcaaggcttcactcagcctgtgagttgggctgcattctcatctggaggttca

SEQ ID NO: 189668 - DNA, 487 bp, Homo sapiens
gttctgaggatcccagaacgctgactcttatcactttattttttttattataacattgtgaattttttcacttatatctacatagtattttttccaatttttaattatgaaaaatttcagtcatacacaaaagtaaagaatactgatgcacacaatttcaaatcttatcaagatttcatcacatttcatctatctgtttttctgtttctttgctggaatatttaaagcaaatactagacatgtacataagtcttataaatatcacgtaagtgaatgtaccacacctgtgtgcacattcccccagttaaacatttgttacttccagttattcactgttgtatacagtgcaggcctgtcatgtcatataggtggcatgtctgagagtttcacccatgttcatgagccataacatttaggtgtcattaactattaccacagttcactgcgaagattttctcgggtagacagcgtgtctttccttagtgtg

SEQ ID NO: 189669 - DNA, 218 bp, Homo sapiens
gagaagtacttcctggatatatatggatccaggcaaagcttaaactaattcaccctaaaggaaaaataagcttaattctctcaagcataattttattttaagagattgcaagggttaacgtattatgaattagtgaaaaccatatgactgatactttaacaagtatctttggtggagccctttttattctaggcaatctacctccctggcacatcaga

SEQ ID NO: 189670 - DNA, 647 bp, Homo sapiens
aactgatatgtaacaataacctttgccaccaaggaacaattggtacagttcctctttggtcttggcacagagaagcagtcttaaacctccgtaacagtccttcacccctctaaaactcatgaagagtttttaacaaagtccccaaatacactagagctgatgctacaagggggacctttgggcaagtaaagcaaatttactatttccagttaactgcaggctgagtatttaaagaatctgacagtcttttctcaaaaaaaattagagttaaccctaactaggtttcagaacctacagaaatcctcagtacctaaaatagctatttaagtataagtaaggaatagtaagtaacaagtaagttacaagcagcatttcagcatctccttaaatatttaagaatatctcagggtggagttggacagttaaatcacataaataggcaaatgtatttgctaaaggagcaggccaaagctgaagagttaatgattctcaagtgtacaacattatctgtgtgtgtgtgatgggaaggtggtgtattttacttgccatgcctttttcttacagctttcaactgcttcttgtttcctcaagtgtggatatctgttactggcttgcatccctcttttttgaggtatctaaccattctg

SEQ ID NO: 189671 - DNA, 488 bp, Homo sapiens
agtgtggtccctgcactagcaacatcagcatcatctgagaaattgttagaaatgcgaattcttgagtctcaccccaggcctactgagtcagatactctggggtgtagcccagcaatctgtgttttaataagccctcctggagattttcatacatgttcaagagtaagaaccactgctctactaaaacctcaaggtataagtcagacgttaagaactcaaaggctcaccgaggccaagaaggacacatgaatgagggaaaggactggaaataagattatcaggagtgggaggaggaaactgtgttgaattggagagctgcccttgcttaatgggagcagctagtgattattctagacattggttcccatttaggaatgtgaagcaggtccaaatataattttccaaaagctgaaagaaagcatgactgtcttacaaatatacagtgaacgtgtcaaagattaatttaactcataataagaatttagtaa

SEQ ID NO: 189672 - DNA, 234 bp, Homo sapiens
tgtagatgggaatgtgaaatggtacaggcactttggagaacagctgggcagtttcttagcaggtgaaacatacacttaccatatgagccagtaaccccactcctcagttttcacgcaatgaactaaaaatttatgttccccaaaaaacctacaggtatataattatggtagctttattcataattgtcagaaactggaaacaacacaaacatccttcaacaggtgaatgggtaa

SEQ ID NO: 189673 - DNA, 102 bp, Homo sapiens
ggctgtgatgtgtcttttgggaagaagggtgggattataatctcactccggttagagaaatgatgggtaacctttaacaagttattcctcttttgggggctt

SEQ ID NO: 189674 - DNA, 267 bp, Homo sapiens
atttagtaacctcttctccagagtatataatatcaaatcagacttaagattattaatgtatttgacataattatttaagaacagtgagactgtataatctttccattctgttcatataacaacttcttaaaaattactttgcctttgctggggtaatacatgcttctagtctgtcatttttttttccatgctggccttcataagtaacattaagttctaaggtaacatagtttgttaagaagtctgtaaaagaaactgttcagccaa

SEQ ID NO: 189675 - DNA, 140 bp, Homo sapiens
tcaattttaggcactttaagtaatgcttccatgaacgttcttgtcaatgttgacaaatgcaagagctttccatggggtatgtaaaagggtgattaatatttccttccttgtattggtggggtgggcttatggacacagca

SEQ ID NO: 189676 - DNA, 372 bp, Homo sapiens
tgtcactttgtcgtccaggcaggagtacaatggcgcgatctcggctcgttgcaacctctgcctctggttcaagtgattctcatgcctcagcctccttagtagctgagattacaggcatgtgccaccatgcctggctaatttttgcatttttagtagagatggggttttgccgtgttggccaagctggtcttgaattcctgacctcaagtgatccacctgcctcagcctcccacagtgttgggattacaggcataagccactgtgcctggccaagacatttttattgggatgattttgccatttgattgtcaagtcaaaagttttcttcggctatcagtttttatcaaagattggtacttaggataaattttg

SEQ ID NO: 189677 - DNA, 250 bp, Homo sapiens
gtgaactgtgctgtgccaactcattgaagctgagaactcaatttcccagaatttcctccccatgtggttatggttagagatgaccaaaagaggaacatgagtgaaatttggagagtggagacaaagcagtggccgtgactctctgaaggtcactgtggtccggtgtgatggtgggtggtgtctcccgagatcacctcccaaaaacctttttttttttttttgagacagggtctcgctctgtcacccaggc

SEQ ID NO: 189678 - DNA, 308 bp, Homo sapiens
tcaagtttcagctgctcaccacccttcctgactatttcagtgtgtgtcaaattttgctttctccaaagtcataagaattgtaatatagtgcccaacaatagataacctggtagatagcctggcagtgctgattgtcttggtgtttagattggcacccaatctagattatgcaccttggcaggcagggacaccatctcatacttctcacgtgtctcttgcccatttctcctatcagtgaatttgttgagtgatcaatttactttgagttaggtctacctgggtaggttacctgggttaggtctacctgg

SEQ ID NO: 189679 - DNA, 247 bp, Homo sapiens
taccaatgatccttcagtctctccctgggcacttccaaagatggaaatttactacctcttcaagcagtctgttccattttagcaattctgatttactctatccccttaaatgtccatttattccataaaatatttactaaacatctactacatgacaagcatcatttcaggtgctaggaatatggcacagaacaaaacagtctggctctcaaggaacttacactcctatggagagaaacatataatc

SEQ ID NO: 189680 - DNA, 187 bp, Homo sapiens
cctaaatgtttctcatttcctccttacccttgcactactcagcttccaaggaaattgacttccagagcaagcaatatcaaggcacagaagctgacagaatgccttctatgaggacaagaagccagcctgccaaaggctcaggccctagtttttttgtttttgtttttgtttttgtttttgagacttg

SEQ ID NO: 189681 - DNA, 484 bp, Homo sapiens
cacatggtaaatgcccacgatgcgatgtgcgcggaatgtcagaaactgacaactagttcaggcctcaacgcagtaggaaaaggatgaaaaagaaactcattttaaatcaactaaacaagtgcaaaagccatacatatagaggagaggagatacgaatggcatcacaacataattcctttgccatcgaaaacttccatgcctttgaggttttaaatgaagacttccaaaactgatttacttaagactctacgtaaaacgcctgatctttaaacgcaagaaaagcaagatgaatgtattactttcctggaaaaaaaaagcattaaaggagaaaaaagagtaaagtgtactgatgggggtgggttctcacatcacagggcactgcagctgagacgtgcttgaacggcccccgttttctacccgcaaattctcaattgctagataaacaacataaccacactttattgggcgcacatcgtcaaaccct

SEQ ID NO: 189682 - DNA, 239 bp, Homo sapiens
ttaacctcttgttgtgtgttcttccagaccttttcctatgtatggatggagctgcatacattgtttttctttactgggttcagaaaaatgaaatcaagctattcatacttttctgtattttgcttgtgttcatttaaaaatatcatatagcaagctttcaaagcctgaacatatagatccacttcattattttcagcaattccattatttctataacaagacttaactatagtttaact

SEQ ID NO: 189683 - DNA, 240 bp, Homo sapiens
ggcacatgcctgtaatcctagctactcgggaggctgaggcaggagaattgcttgaacccaagaggtggaggttgtggtgagccaagatcgcgccaatacactccagcctgggcaacaagaacaaaactctgtctcagaaaaaaaagtaagcacagacttcttatattaaaatgtagaaattaagagagagagtgtgtatgtttatgcttgcttgtctagtgtttgcataaacactggaag

SEQ ID NO: 189684 - DNA, 291 bp, Homo sapiens
ttttccaaatctgatttaatgataagacactgagtgttgagagagcaccgaattcaatgaagaaggttaagtgcaaaacaccatgattttcttgagatgtgagtgtgttgagggagggggatggagagggagagcaggcaaagggagcagaagctggagaggggaggttgacgggatccagatcagcatatcttactaggttagtatttaatgaactggccagtatcagagtgatttggaggtgccaattaaaatgtgaggagcactgcaattttgtgtccagggttaagt

SEQ ID NO: 189685 - DNA, 321 bp, Homo sapiens
ctaaagacaaaacttaaaagggagttctggagggaggggcatgaacaggtggtaaggaattagcccagccagtctcactataggcaagcccactagtcaactggtgccatgttgtacccacagagcccctattttaaatatgactgtagacagtggctcactcctgtagtcccaatgctatgggaggccgaggcaggtggattgcctgtgctcaggagtttgagatcagcctgagcaacatggtgaaatcccatctctactaaaaatataaaaattagcagggtgtggtggcacatgcctgtagtcccagctacttgcggg

SEQ ID NO: 189686 - DNA, 518 bp, Homo sapiens
aatcatgggttctggttatgccaaagcactcactcttcaaaagtttccatccagagttggataatcccacacagaaggtgttctttcaacagaccagcatccaatagacccaatgcagcatttttcttcctggttccacattaatacatcctatctctgctatgcttaggtccctgatttataaatatttcagacatattttctcaggacacagggagtacttaaacttccacatagcagagatacgacatacaataagctgttatctggaaactcctagtgatgctttgagtactttacagtaatctttctggtcttcctctcaaccccattaagtttttctagaactagctgtgtggtcttagacaaatcatgtagcctctgtgagctccagttgcctcatccgaaaataggggtaatatttcctaccttagagagtgctgttatgattattgagataaagtattacagatgttaaatgtttaataaatgttaacatttattatttttctacattc

SEQ ID NO: 189687 - DNA, 526 bp, Homo sapiens
agtcgtgacgggagcgtgcaacacagtgaccctgcgcactcagaggaccagtcatccagtttatatcgtcgacactgggccattgtaccgctgactctcagctcttcaaaagggctcatcagaaggaaggaagaggcagaagttcaaaggacttatctcacccctcatttgttattctaatagacttcagggggagatgtgcagtgaaaatagaattggtgaccagctgggtgaccaggtgagaaaaaggcattacatagatgatccctttccctcagttccaaagagtaagcaagcactggagtgtggagtcctatgtgcaccatcatgtgatcctagcttgttcatgggaacctgcctttaaacctgacctctgacaactcctttccttcctcagcattaagaacttcagttctggccagatgcgatggctcatgcctgtaatcccagcactttgggaggccgaggtgggaggatcatgaggtcagtagttcgagaccaacctggccaatatagtgaaaccccg

SEQ ID NO: 189688 - DNA, 419 bp, Homo sapiens
aaatcaccccacacacactctcagatcacagaactataagaagacaagaatgcccactctcaccattcctattcaatatagtggtggaagtcttagccagaaaaatcaaggaagaaaaagaaatgaaagacatctaaaaatgaaaaaagaagtaaaaccatctgtcttcactgactatatgattatatacttagcaaaccctaaagactccaccaaaaggctcctggaagtgataaaggacttcagtaaagtttcaggatacaaaatcaatggacagaaatcagtagcatttctatacaccaattacattatagcagagaagcaaatcaagaatgcaatcccatttacaatagacacacacacacacacacacacacacacacacacacacacacaaagaaatgcctaagtatacatct

SEQ ID NO: 189689 - DNA, 271 bp, Homo sapiens
cttttggtactaatgggttgcaaatatgcattgggggtgaggaggccactggtgttggacgtggagctttgtagttggaacgatggacgtgccctttgtgtgggggtcatgcagtcacgtgctcggtggctttcatgcagtgtcttcgtagggtggggagggatggcaggcattcagttggtggcaggttgtgttgggtcctttccaagctttgcttcattcaggctttaagcaggacctggcccgtgaggcacttggtgcagagtgagaa

SEQ ID NO: 189690 - DNA, 179 bp, Homo sapiens
tgctgggattacaggcgtgagccaccactcccagcccaataatctgtaatttttatcacaagttcccctttgggagcggcagggtttttttccagtttttcacaccctggagagagactacacgcctgcttgaagggcaggccctggagttccaggctctttagggcagctgtttccac

SEQ ID NO: 189691 - DNA, 351 bp, Homo sapiens
ctgtccactggcgtttgttatagcctcgtccagcctcctccatcaggaaagccaactcatcgtttcagcggtgtatcctgggatgaagttgtttcgtgcagtctatccctgtttcccatttcttgaaattcattggtaactttgccccaacaagtgtcttgtaaccacttccctcgttctcattattgtttttcctttttatatttattatctttccagtagaatttagtgaagaaatatagtctgccatcttgaattgtggaacagcatgcatttaaattgtattttatttaatttctgcctgaaaatattgagttctcagtgatttacatcagttggtatgtgacagct

SEQ ID NO: 189692 - DNA, 377 bp, Homo sapiens
ggtgcgggtgcataattgcataatatattcctgttacaatacatctaagtagtcaaatatcagcaatggaatctgattcaaccaaatacataacaagatcgaaagggaagtgggaggatattgtcaacaggaggagaacatggcaagtagatgagaaagaagggaaactttttatcttttgctttgtaagaatctttactgcggaaagacttaaaaacagtgtttttcattatattgtataagtcctcaaagtccaaaaaaagataaaaaactatagagcattactcttacccaaaatgactcagaggtacactcttgggtctccattcaaatcaactccacagaatatgcagactccaggtctcctcagaaagctc

SEQ ID NO: 189693 - DNA, 2304 bp, Homo sapiens
  misc_feature (1644)..(1644): n is a, c, g, or t
  misc_feature (1918)..(1918): n is a, c, g, or t
  misc_feature (2302)..(2302): n is a, c, g, or t
aacctattatttcagataccattctgcttaggtattcagtattctcaagggatttttctccacaataagaaaacttgatgcttccagttcttacctcagtatgccactgataaagtaaaacagatctaaaagaatagtttcaaagagatgtaaaatgacaccttatgtcaacttgtcttttcctttttcatgactcctttttcttctttctaacttttggcatctgtaattgagatttccttccaagcatatttagctcaacttaaatatacttcattgaggctttggcaaaccttttcaagtataaggataatacagaattatctatttttctatagtttgttttattgctgctgttattgttgttttattttgtttgctataaagattagcctcttgttcaatggaaaatatgatcaaaaacagtgttcaaaaattatttaagggccccatcattacagcaatcattagtcctactgtgtatgaaatttctaagtatttctaaatgctcaaccctagacatgcccttcactgatatttttaatgtgctttcagtaccttggccatttaataacttatgttcttttttcaaatcttaggaagaaattgtgttttggaattgggccaacagtatgtgtttctccggtggataagcaaaatttcataagaacaaagatgattcaagcagatgtttatcatgaaactgccataaaaagcacccgaagtcacaaagataaacatcaaatccagtccttggaaatttcccccaccctacctgagcatcttttgaagtagatattcaattattttgaaggatttttaaagaattttctagatttcatctaaaagacacttttgaaatctgcgttaaaattcatggaaatatatcctagatgaatttggaggaatgtaagcaagtaggtacaaacctttattttatccctcagtgactcactcagttgtgaataggaagggctctctgtgatctggccacagcttatttcttgccacattcctattttcagtcctcttccaatcatgtggaacttccagcatctccttacacatgccatgttatttcacacttttgtgactttgctcatatttttctctctccctggaaagctccccgacaacctccactgccattacccactaggcaagtacatcctgttttcagaatcagcccaatatcatctttcctagggaatcttgtcagactgcccttcattaccaacagacaaaataactaccttatctttggttctgtcttcactctagacctatgtagcatgctacttataacactgcattggtttgttggcatttgtattttccactgagcaaccataacttatgtgtagacaaaaattgtattgctcacctttggattactaggacctagcagtgttctgattcagagtatgtactcaataaattcatcttgaaaagtgaatgaatgaataaatgaacgcctgcatctccatcattgatttactatttaatcagtgaagtttttaaattatattcccccatatcttgagatttgatcttgtgttaaatcagttgcacatattagacattactttgtccttttcacttctccttagcacatatgggctatataatctttataaaggttanagaaatatattgtaatatgttataacacaatcaagatacatctgaaacaacatagtgcaggcactatttccgatgttcaacatcatgctggagtaaaacttagagactcttggaaaaaagaaatacttaaataatgtcaccagtgtaatgtgctacattgtaatggtgttatgcttattacatgtgttatctagtaatgcacaaaaagcctaatggatttgctcatattttcctcatgtgcaaatgaaaacactgagtctcagagagattaaanaaattgccaaatgtcatgtcaagcgattttgatcctggtatttctaatataaaagcccatgttttaatttattaactgtttgacatataacaataatagatcattacatgttaatataaataacctatgtatgaagactaattatatttttacttctgcattcaatcaactgcaacatgtcattttggttgatgtgtacagaaaatactcaacatctcgcagatattgggttggaaaacagaggacatttttatatctgtttcagataaatgtatatatttttctttgatagtacaccaaaatttgacaagtgactatttcttaaagggtagttgcagcatgaaatccaaaataacatcaataaacttttcattctctgttacnct

SEQ ID NO: 189694 - DNA, 242 bp, Homo sapiens
ctcctttacccctccccttccacactcttccccgtcccttcatgcttctctccctccctcccacaccagatggtgactgagtgctcccatagattccacctctagccaggcaggttcacacatctgcaggagtaacggtgatacagcgtgatggggactataaccagagctttgttctttaaaaagaaaaaacgagggccaggcgtggtggctcttgcctgaaatcccagcactttgggagg

SEQ ID NO: 189695 - DNA, 280 bp, Homo sapiens
cattaacaacagtcactctcctcccaaggacagcgcaaaaaggaaacccacttaatgaaacagatgtgcttagtgtattttagctcatcccttaaacagtcactaaataccggcatcccattggatttgtctaggcttacatcaaggaagtttcttctcttaccaaatttcttacatcgcctgtaaagaaagcacattctttcactcaggtgtgtctcctcagctcctcttagctcagtcttcagtttgcttcttttttattccttgcccttggtttcca

SEQ ID NO: 189696 - DNA, 719 bp, Homo sapiens
agggctctggtttaaaaagcaaaaagtagataaactgtcagtgtggccaagaataactgatccattttattaactgataaatactatgatttaatgcttttgcctttaaatttcagtacattgattaaacctataggggtttatgaaaaggtgctataacgtggaagggaacaacaagcagattaaaaagattaagttcagatttaaaatattaagcaagatggctgattagagactcctggtgctcgtactcccaacaagaaaggaccacagcaatgaatgaacagctaagatttgactggcgtgttgaagggagagtactggagtgcagcagggaaggggaaatgtgtagtgactgaaaatccaggagggtagtgtgtaggcacctggcctctgcagctacatctcctgcaccccgatcaaatcttcccgtagtcaggagggacttcccgttctggggaaaaggtaagcagaagatccccaccagtcctcaccgccatcacaaacacctacagtccttaccacaggagaatcccatagtcctagcaagccctaagtcaaggtggacagctgctgggaattcaagcagttgcattgctccagatcatgagaataaggtatgcactctccaaccctcacccacctgtaggccaacctgccctgctgcagcatggcaccattgaggccagagccacctctgttgtgcgccccgctctgtg

SEQ ID NO: 189697 - DNA, 363 bp, Homo sapiens
gaggttaggaagcacctaaccctggcttgtggtcctgaggctgcggctccttcagcttccccatgtgggacctctgagcagaggcctcagtgtgccctgagggtccacggtgcagggggctcaggacacggctgtagaaccgctgacccccaaccctgctccagcgcgtgtcggggacttgggcacgaatcctggctgcagcaggttcatgggtggcctcgcacaggtatggtgctttagcatggggtccacacaaggacccggaggccctcagacttcgtggtgtggcctctgtggtgtttcctggcaagggctgggccaggctttgttgacttcctgtggctactaggaagagcccaatcc

SEQ ID NO: 189698 - DNA, 346 bp, Homo sapiens
gtggagtacgatgcaggagaaggaagaaagagtaaagaaagggggtgagaagagaagacagaccaggagaaagataagggccagggaaagagaccagccaggaagtggcccagaagtaaagtaagcttgaacttcacacctgggctcacttagccttccaggtctgcctgtggtcttggtattgtaatcggctcactaattgttcacagctcttggactgatttttttccttgtactttcagaggctttctctgaatgggctagccagagccatacagcagcttatagaaccagtagctgggtggtgttgtccccatgggtctggagaagggaggcctcccagttg

SEQ ID NO: 189699 - DNA, 363 bp, Homo sapiens
gcgattgattgagggatggtgcctgaccagtcacatccagtgagatagaggagatatctttctggggctgctgggaaagtaaagctttctttcgctgaagctttcagaagagaatcacacatcctgtggatggtgtagggtgaggacatgagttctatatgggagcagttttctttcataagaatcccacacatgtgcaggactggttactggttggaaccactaagtaacctattgggaggcagattggtaatgatgccatctaagctgttggaacaagacttcttagttaaataagccactaagccccctccattgcttaaaagccagtttgatcattgtttcttagaacatagtgacctg

SEQ ID NO: 189700 - DNA, 186 bp, Homo sapiens
tactgcctgttttgaaatttacatatatatattataaacataaattacataaggtataattcacatgtggtaaaacttgccagttttaagtgcacaattcaatgagttttgacaagtgtatagtcatgtaaaggctaccacaattaggacataaaacacttccatcctccctgaaatgttctcttg

SEQ ID NO: 189701 - DNA, 512 bp, Homo sapiens
cagcattattttatttttatcaatgaaccttaaaatctttaaaaacattttcccatgactgagatactgttagctcaatatgcttgtggccaccacctgagtttcctgattgttgccagacagaccgctatcaactcaccctctcaaagtgcagtgtgtgcttcagatttatccccactgaattatcttgtcagttttaagctattatttgtgcttcaggatattttacaatcttgattatttggtccaacatattaatgattcatcttatatttttatcatcttaaaattcataagaatatctccaaggtattgatggaaatgttaaacaagattgtatcaagggccgagttaagttaagcaatgctaacattcaaaacttaatgagaaatataatttagtaagaatggtactttgatgcttgtatttcctttaatcttgctctaatttatagcctattaaaatatactgtttatgctaataaatacaaattaaattttaaaatacatgtt

SEQ ID NO: 189702 - DNA, 324 bp, Homo sapiens
  misc_feature (242)..(242): n is a, c, g, or t
  misc_feature (248)..(249): n is a, c, g, or t
  misc_feature (261)..(261): n is a, c, g, or t
  misc_feature (263)..(263): n is a, c, g, or t
  misc_feature (266)..(266): n is a, c, g, or t
ttccagagtggccgtactatattatattcccaccagcaataagtgacctagtttttctaaatcctcaccagcatgtggtattgtcaaagtgatcttttcatctaaatgcatatatatacatatatatgtgtgtgtgtgtgtgtgtgtgtgtgtgtgtgtgtgtgtgtgtatatatagagacagggtctcactcacttgcccaggttgtagtgtagtggcataatcatagctcactgcagtantctttnnacgctccttgtncnttntatagtggtatactactgccccactacacccgacgcgtggcaaggggggactcctcta

SEQ ID NO: 189703 - DNA, 452 bp, Homo sapiens
gacaatctaggtgagaagatgagacatataagcacagagtacatggagagtttggaaactaagaacaagccatgagatctaagctgtatgggaaggggtatcccagcaccacaggtgatatagtgtcttcagatgtgactcagtacagtcccagtactggtgtccagaaggatactactggtgtcacccctctcccagctttagacagctcaacacacagagagagactgtttggaagaaagtaaggaaagagaacaagattctctgcctgttaatccagatacttcttgcagatcttatccaagaccaccaatgttgatctgaagccagcacatcactgggtcttacccacagcccattttaaccctacttgggtaccttgttgctattttcactcaaggccctaggaattagcaggttgcaaagccagccaggcttctgtccttcccttc

SEQ ID NO: 189704 - DNA, 374 bp, Homo sapiens
acagccggctgggggggcgctccaggtttggctgagacgttcccgccaccagccggctccgggcgccggcggcccagctgccgtaacatctcctcgcaggctgcgatggtgtccaggagctgccgctgccgctgctccaccgcgtccagcagctgctgggcgcgctcctcccggggcggctgtgggggtggcctcccgccgagccccagccccgccttcccgcggtccacgccggcagcctcccggtctccttcaatcctcctgggggtcgtacgattcttgaagacagttttatcacaggtgtacatcagcacaagagtcactaagcagtgtaaaattatatttactgcatgaaagtagaatgggttcatacc

SEQ ID NO: 189705 - DNA, 484 bp, Homo sapiens
tcccaattcaaagatatttgttcgaagccgttccactcaactgtcttaatctcttgagaggagtcttggtttattgtgaaacagtctcctaagattgcttgaaatgcctgtgacgggaacctggtctgtaacctagcagtgtaatggtcttaggtcctttcatgtcttttccaatgcttaatgataggtaacctatattccaaaattctcagtggatgtcgttcattcaaaatatataatacatataggttctagcaaacaatattttacctacaaaagaaaagcgaatgtgggctggaaacatccattgattttagatgtccatgtactaaagaggttgtattcagtgtagctcactcaattctgattgaatatccacatttttaaacctgctctgttagagctaacctatagaacttcagtttctctgttggcgaatggtaacagtagtgcctaccacaacagggatatcagcaaaattgca

SEQ ID NO: 189706 - DNA, 665 bp, Homo sapiens
agtttattcttcagattgataagattcgctttctttgaaataactcagtttatctccaaaccaccatgattcatactccttttgtgctccacagtaccaaaaacaaagctacgcacatgggtgggtacaaagagttacctactgatggaaattaatccaaagaattaaataagttacgaaaaaaaaatcaatgatgtcaagtaatagttaaaattcaagattttactttagtactggttattcataaatagattcttttatcccatattagaatattgtcaacacaagcttattggaaaggttgacttaactttgccccatttttcttctttcttgctgctaccctatgacagaattaccatctctttgatgaaaacaactcaataaagaattctctttcaccaaactcagcttttgttgaacttgttaccgcaaatctattccctatcttatccagtcacatgctgaaaaaaattccatcttttaaaaatctgttcatggataacttacggttctctgaaccaccctatcaggaaggcagatatagtattacgaactctggctgggcgcagtggctcacacctgtaaccccagcactttgggaagtgggcgaatcacaaggtcaggagtttgagacatcctgaagacagcatggtgaaaccccg

SEQ ID NO: 189707 - DNA, 334 bp, Homo sapiens
ccaggtaacataacacccttatttctaaaggaatgggactggtctgaactcctgagctcaaatgatcctctcgcccccaacctcccaaagtgctgggattacaggtgtcagccaccgcacccagcttcactttaggtagttctctgacaacttttccatttcttctatcttacacatattgaattaatttcaattttaacaaattttcctagggagtttttcattaaggttttcaaatttattgagttatttttagcatttttgttttctctgtatctcaggttatgctccctctctcatgggctttctctttttcttagttaggtctacctgg

SEQ ID NO: 189708 - DNA, 283 bp, Homo sapiens
agaagctcggacctagagagtgaacgacttgggcctcctgtctgcctgtttgctgacagctgtaccataagagagtaagagcaccataactgaagataagcctcttcctctgctatgaccttacagcaacaccccagtaccctctattgacaattaggctaacacttcagcagttgggaaaggagaaatgtttacagggtccagtcccgctaccaccaatagagcaaagatggatgcatttggagctgagaggaaatgggttgataactggcacaactagtat

SEQ ID NO: 189709 - DNA, 341 bp, Homo sapiens
actttaatttatttatttatttttaatttttaaattttatttaaaattttttatttatttattttgagactgggttatgaaactggctaatttttatatttttggtagagacagggttttgccatgttgcctaggctggtctgcaactcctaggctcaaacaatctgcctgcttgctgggattaggagccttgaaaccatggagtgttacatattatatatgtatcaattaactgcaaacattatttattttgatgtttgagctttccagcaagagctcctttaaactggctcctgtgaaccgtaaaaaaagttttaaattgtgctaaaatacacataaca

SEQ ID NO: 189710 - DNA, 111 bp, Homo sapiens
atgcctggccccctcctccaggctggctcttctaatccaccttgagggatcagaggtgagatgcaggatgaactgtgcccatggctcctgctgctgctcaaggggaagtgc

SEQ ID NO: 189711 - DNA, 275 bp, Homo sapiens
atttgacattaacgcagttataataatatttatgcagttagtaaaataattctttaaatcacaaagagaaatcctaaattaattgttaactaatttctgtatttaccaaagaatttctgtgaaataaatccaagtaaaaattttaaaaagaaagaaaggccataaacccaaattgcacttgattcagctcaccattcaactatgagatctttgcaaactgggccctcatctacatagcatctggtaaacaaatgctgttgagtgaaaacgcagtt

SEQ ID NO: 189712 - DNA, 445 bp, Homo sapiens
gccagggctcggatgggcatttttagtactgaaaaggaattaaattagctagttgaatgcagcatgaacccaagtccttgacttgattagtaacacaaagcacactgttagcagtgaaggaaaaaacgaatatgtaaggagtagttatttcaaatcattttctctgctcgttttcatttatggaaactaaatgggtaactgcttctgttcctatctgcacaataattttgacaacatattaatataatgttaacataggatggaaagtgggaattagcaatgattaacagatattcttcaaatatatgtactttcttcagaagttaacaaaggatttgaacataaattctaccatgtctcaaatagcaccattcaatagaaagcatctgcacaaaaattatctcaggttattttactagtactacatttatttctcttattactt

SEQ ID NO: 189713 - DNA, 274 bp, Homo sapiens
aacacaaatcctatattctattaagggaaaagcagaaatattttctagatcatatggattttatttggagtggaaaaagaagatggatcctgaaaacatatcttgcaaatattttgcctcgaatattctttgtcttcaggacactgaacttgtcgcattttcttcctctctaggcccttggcagcctcaatatttttgcccagattttctatgtgagtagagtttcgggattctctgctttttctgcacccagacaatatgatttctgctcatt

SEQ ID NO: 189714 - DNA, 337 bp, Homo sapiens
tggctaaatcccaccaatccttcaaggtctaattcaaatactacttcctccaaatctttgagcacccctctaggccacaataaatcttccagggttgactgttcatcccaggacatatttagcactttgtagctctttaaataacatgtaccaaatgaaagatctaaaaagttacatagaagtatagaaaacttaagacttgttaaacaattttacacttgtagatcatatgtagttactgccatcacaaaattaacagcagaaacaaagtgaaacaattttccttttacctgaggctttttctagaatattacaaagtgcaaaaagagctgtgtca

SEQ ID NO: 189715 - DNA, 276 bp, Homo sapiens
actctttctcttctagggattttccacagtgttatctgtaatttataacaatgattttgaggaacaaaatcatcaaacaaatatgcatgcacgcacacatgtgcacgcacgtacacacacgcacgtgcgcacacacacattcataccatatgctcaggatggtttcaatttttaaaaaaattgtatgtgaaagtccatgaatctaactattagctctcttaaaaaacagattaattaccctccaaaagtaagcccatccctaatcaatatgagata

SEQ ID NO: 189716 - DNA, 154 bp, Homo sapiens
actcatcacatttaggaaaaggcttttaaaaaaatcattacagaccacattatctgaacttggcatacctcttcagcttcttcacttattactcactccccattctccttccgtattacaccttctctacaatgcagtttttggcttctccaat

SEQ ID NO: 189717 - DNA, 434 bp, Homo sapiens
tggcttcagttcttttgcccaaacagaggaaaacttgcaggtgggaaacacccctttcctgactccctgattctgaactgggctgtccatcaacaatgcaaggtctgagttccaggggtccggtgggcaggccacatcgtgcatgtggtgtgagggcctgaaggtgcttccacaagacggatactcagagtcattttactctggttgaagccttcccacccagccagcatttgacaagcaccactaacaagcagtgaaattgactggctgattccatctctccatcctttcaaactcgtgctaatgagcaggcgaatcacaaacagggaaaagagggaagaggcaggatgctcggataatcccccaactggaacaccccttctgcaatcattgcaatcatgtggacatgcaccagctggatttaaaatcgatta

SEQ ID NO: 189718 - DNA, 551 bp, Homo sapiens
agcactttcccggtaaagcaaacctctaaagcatgtagcaattgctgtgtacttaactttttgcagaaaagggaaatgcaattggacgtgtagcttcttggagggaggttttggaaacagaatgaatatataaagatgccagcaggagccagctcgggggtagatgaggatggcaggtggcggcgaggtgggagtggtgaggggccatgaggaagagtggtgggaatgaggcggcagcacctccatcccaaggaactttgcacatagtgatgaaacagtctaccagtgatgatatagtctactgttctatgtcttgtactgaacttgcagttgaacagatggtacagttcctccctgtaggctgatgtcccaacttttgtgttagtctagtgtggctgacgtggggaaatattaaaagtaaagaactgtgaggagtcttgactccagggaccgctcaaaagccaccctgaccaatatccctgtttctgacattgcaaattctgtcctattcatcctcagtgtctgacacataatgaatgtttgttgatcaa

SEQ ID NO: 189719 - DNA, 326 bp, Homo sapiens
ctggagctgtctctgggaaaataggagatgtggagagggggtgcagatccccagtcctgaggttttgggagtccctgaaggagcagttggggggtggccccatcagcgggagcagggtagatgcaggatttcctcctgcttagcagctgtcgcactgcccttggttgcttgagagcccggccacctggccgggaactatgcaaacaatgcacaatgcgggcctcagctgtccaccggccctgaggaggcaaggccttgcctaacttgttttcctctcaccttagctaatactgagagttctctgcaagtttctccactctcactca

SEQ ID NO: 189720 - DNA, 532 bp, Homo sapiens
atgaattggtaattgttactgttattagaatgtctttctcgaggagctcaatggacttcaaacccttaactgaattctcagggcatattaataacatagaaagggccaagtacacagcagttaacattttacagatgaggaaaccaagaatggaataaataacggtcagaacatatgttgatgagtaagaaataaattttcattagactcctaataaaattgcaatttcttttaaaaccaccggccattctttaaaggaaaaggcatgcacagacgctggcaatgcgtggcattgctctgcatatacctgcagagagagctttctgtgtgttatctcagattctgtttaggaggaggtggggtatcactgaatacactgaaattgaatttccattccttgttcttccttagcttcggagtttgataggcggggagtggggtaggaagtatgctggccctgcctacactctcattctgctggtttttgctctgtgcacatctgtgcaaagccctgccaacctcacgtggctgt

SEQ ID NO: 189721 - DNA, 427 bp, Homo sapiens
atggcacttcctccatatacacatgtcataagaaaatgtaaaatattggtacagctgcacatgtagaacatttactttttaaatgaaaatatgacatttcaacattacacacaacgtggcttaatcaagaaaatatatgtgaattcaaaggtgacatcaaatttcacacatgcttaacttcatattcagtgtacttgtaggtacttatatgcacagaaaaatgtaattagcctaatttaaacacaaaaggtatggttcattttggcacaatcagatgcacaatgtgccatcatgctgtgttcactaatgtttatgtttaccaaattattgttactatccaagatacattctctgatgacaaaattattgatgacaacatatcataaatggcacttcctccatatacacatgtcatcagacaatgtat

SEQ ID NO: 189722 - DNA, 269 bp, Homo sapiens
ctgaaggacattagaggtttatattcaacctcctccttttccgagaaagaacctggagcccagaaggacagattttccccaaattgtacagcacatcagtacacagctaggcccaaagttcagggctcaccctgccctaggcagagctcttgctgagttaaagtctctgtagtccaatcttgggcatttaatatactggcctttgttgtccccatttcactaaaggcaatatcatgaaagaaaaaatgaattagatcactcgaagtccc

SEQ ID NO: 189723 - DNA, 220 bp, Homo sapiens
acaaaaaacaatcagaagtagtgcatctgtttcaattgaagcaacgtaaaagattggcaaagtactataaccttaataacaatagatattattccccttttcaaaaatagagagagatagactatacttattgagcacctacttatatcaaacaatgtaccaggctgggcacaccacagaggcaattcagaatggtcactgagagcatgggatctggaat

SEQ ID NO: 189724 - DNA, 462 bp, Homo sapiens
ataccagtgaaaccaccatctgcaatggtaaacattaaacgttgtttaatatttttcttctgttggggatgattcaggtccttaggggtctctccattctgaagcatcacctcttttttctcttcttcttctttcttctcttctacagaatatgaggaagaaaaatgtcagctcagccaaagcccagcaccatcgcccttacccagaacactgtatgctacaagaatccatccacctacaccccttctccacctgggtgtctctcagacccagaaaatggtgccattggcccactgacaactaaatgtggggacaggtacaggcttttatcttgggataaaatggctagatgagtctggagtttcggcgtgtgcatgcacacgccgagcatccatacaaatcttctataattatcctaaagaactgatgcatttgtttctgagatatgattccagaaggggt

SEQ ID NO: 189725 - DNA, 226 bp, Homo sapiens
ttacataccaggtagactaacagctagaagtacttatcattttagctgttaggtctaccccaggtaaacctaacatcttatttcacccataaatatttaggtatgtgtgtctaagaaggacttaagaaactataaccacaatgatatgattatttctaacaaaattaatagtaattccctaataacatctgatacttcatcttcagattttcctggtgcttttttt

SEQ ID NO: 189726 - DNA, 299 bp, Homo sapiens
acacttgtgtttcactggctgttggcagatccatgtccctcagtttatccaactatcgatggagtatgcttgtagtgcagatcgactcccttgttgaaatagtgtcagtgggaaagggcctcatgaatagtcctgacttttgagtgttctttcccagtgggtcttggatcctgcagaaaacacttgtgcctgctaagttttcacttgcactccctagggcttcctgatttggttttgaacttggctggcctctctaaaggtctttgctctgggcatgctcggagcactgagctagacaa

SEQ ID NO: 189727 - DNA, 363 bp, Homo sapiens
cagctggaaactatatgcaagtctgccagatatggcaaactgtgagtgtttggggagggggaaggctataaagctgttaaattgcctacagttctgatacagcacagaacatctggtctggagagcttgaggaaacaccattaaataggccgaaaagaaaaaaatctttgtgctaagaaacagtccaggttttgtacgctgttgtcagaggtataaaaaaaacttggcacaccgtattatgattggtcagtcacgtacagagccagacactctagcaatcggggtttgttagacatctggtctagttccaccagccccttcaatgagggaggggagatggaggaatagaaatgaagcagctac

SEQ ID NO: 189728 - DNA, 658 bp, Homo sapiens
tatattttaccaacccctggtttaaaacgtcctaaggagtatgaattattagcaattggtgactagcaacctggacttgggtaaaagtaaagctgctgcacctcaaaaatagcaattttgagtgagtggctctttgctttattgcaaggaggatattaggagtgtgtaagagaggcagttactcttgaaccataactaggtgtaattaagtactgcatctgtttaacattgtttaaattttatagctgtattcatagaacaatagctacagctataaatacaatgtatatttgaaatatatatttaaaatcttttaaggaaaaattttggcttttacaagtttgaactttgtagttgtaaatcccccatttcccaaggagattgttttttttttaaatacacttttttggtaaggcagagcttcctaggaacttaagtgctgtattgcagcagaacagttattactccttcacactcaggttcgctgcagcgcattatcactcgttcctaaaattttcttcacttgttttttttgacagtgtattgtctttttaaccctcatttaccctccctgctcttttcttttcagtcttcattgaagattcttccttttctacccatcttttaaaaattgtcataaaattatataatacaaaat

SEQ ID NO: 189729 - DNA, 895 bp, Homo sapiens
aataggtgcccattgggcatggtggaacaatcggtttttataaggttgagcaggaacaggaaaacaacatagtacaaaaatgtgggttaacatcaggttacttgaggttattttccttataagggttaaagcagagggaacttccttatgccagctcacactgtctgtctggggatttgggtatcttctttcctgaaggtaaggtaaacaatttagaagtttaacatgagtgactctattttggtttggtctgttagggtctaggagctcggtccaaattagtggccttccatagattctgtttaacactggaaggagggtccgtagtgttgcgtgtgttagggtgactgctgagagcactgctgaatcctggggaggggcctgcaccttagaactgatcagttctacagtgttagaaacagacctcttttgtcagaaattaagaattcagaaaagttcaaaggatataattaaagtttttttttttttgagacagagtctcgctctgttgcccaggctggagtgcagtggtgcgatctcagctcactgcaagctccgcctcccgggttcacgccattctgctgcctcagcctcccgagtagctgggactacaggcatgtgtcaccatgcccggctaactttttgtatttttagtagagacagtgtttcaccgtgttagccaggatggtctccatctgaccttgtgatctgcctgcctcggcctcccaaagtgctgggattacaggcgtgagccaccacgcccggcctaataaagttttaaaataaaaaagttagacatagctagggtcacttttatgattttggcatataaagagttggcacttataaaatgtacatggttatgtaaatatgttttgtgttttaaaaatttaat

SEQ ID NO: 189730 - DNA, 405 bp, Homo sapiens
aatttgaaataataatttcatttacagtggtaagggctgcatacctgccagttcatcctcagagagctatgctacgctttgcagggatggaatatttaaacagtatacacactggtggaaatcttaatccgattattaatacctgaaaagaacaatgtacaaattgctacagataacctcctcttttagaagttgagacagtctgaaaaattgctgcctttggctagcacaaggaaactgatttcttggcatgtgtgtttttctttccatgccaaaagtacttctacaatcatagcacagaacttccagatttcatactagactctttctgtcctcagagtttataaactgtctactatcagatttctagctcttttcactggaagcattgcacagcactttaat

SEQ ID NO: 189731 - DNA, 853 bp, Homo sapiens
agactacggctaggtagcgaggctgggtgttgatctgtcagaggtgggggccagtgagggagagggaggagatcaggaggagaactgacaagccagtagatttaaaggtgtgaaacttttttttttaaatttatttatttatttattttttattttattttttattgatcattcttgggtgtttctcgcagagggggatttggcagggtcataggacaatagtggagggaaggtcagcagataaacaagtgaacaaaggtttctggttttcctaggcagaggaccctgcggccttccgcagtgtttgtgtccctgggtacttgagattagggagtggtgatgactcttaacgagcatgctgccttcaagcatctgtttaacaaagcacatcttgcaccacccttaatccatttaaccctgagtggacacagcacatgtttcagagagcacagggttgggggcaaggtcatagatgaacagcatcccaaggcagaagaatctttcttagtacagaacaaaatggagtctcctatgtctacttctttctacacagacacagcaacaatctgatttctctatcttttccccacatttcccccttttctgttccacaaaactgccattgtcatcatggcccgttctcaatgagctgttgggtgcacctcccagacggggtggtggccgggcagaggggctcctcacttccagaagggcggcgggcagagggcccccaactccgacggggcggggcgggcggaggccgcaattcctccggaagggcgtggccggcgggggtggcccaactccctccgaaggggtagaagccggggaaaaccgtcatcccaaagggggg

SEQ ID NO: 189732 - DNA, 357 bp, Homo sapiens
actactagcacagcccagatttcatcatttagtacagataagtcatttatctgggggtaatgtgtcacacagatccatgttctggaacagggcaaataaattatccaatgttaactttgatagctcttagccatttcttagtcacctaaacctgtgtgctgaatcagtaaggtaagtgtgcctatgtgaagtacctagagaaatgctagctgtatgtatatatatgtgtgtatatatgtctgtctctcagattcacacacagtttccactaacaccacatcagaaggagaggagatatagctgttattaacagggagctattcacaggctccactatgtgtttgcaacattaataaa

SEQ ID NO: 189733 - DNA, 582 bp, Homo sapiens
tgcagctattgtaaaaggggttgagttcttgatgtgattctctacttggtcgccgttggtgtataaaagagctactgacttctgtacattaatcttgtatctggaaagtttgttttatattggctgtgggtttatcatagatggcttttattacactaaggtatgtcccttgtatgccattttgctgagagttttaatcataaagggatgctggattttgtcaaatgctttttctgcatctattgaaatgatcatgtgatttttgtttttaattctgtttacgtggtgtatcacatttattgacttgtgcatgttaaaccatccctgcatccctggtatgaaacccacttgatcatggtggattatctttttggtaatttgttggattcggttagcaagtattttgttaaggattttagcatctatgttcatcaaggatatccatctgtagttttcttttttggttatgtcctttcctggttttggtattagggtgatgctggcttcatagaatgaattagggagggttccttctttctctatcttgtggaataatgttaaaaagattggtaccaattcttc

SEQ ID NO: 189734 - DNA, 528 bp, Homo sapiens
tcgaatcgagctcggtaccgtacagtgggcagtagtgcttgagaactgctgagcctgaggatttgcctgggtctgcgcctgggcccccgcccttttacaaaaggtccacggcctctcaagagctggacatgaaggatgggccaagtccagtcttgatcggtaatgcccacttgacactcccaggagcagcatcctgagatacacgtaaatgaaaaattccaagtgtgatgagcagaacgtggttgtgtgaacaatcccatggtggtggggatgtggggggcaggtcaaggagcggatccctgaaccccagcagattaaatcctgcatccttctttcctatttcctggtttctctgctccattttcctctagtttccacttagttacttcttcctacctgctgtgaagctctgcaccctgctccatggggtggttcccaactgtgctttagagtcccctttagagctttctaaaaatacacggactggggcaccaccctcagagactgattcagttcaggcagagcctg

SEQ ID NO: 189735 - DNA, 193 bp, Homo sapiens
ccaccccagcctcccgagtagctgggattataggtgtgcactactacacctggcctaggtcatcatttttaaatgccactggtcttgctttttaattacaaattactgtgtataatttaaaaactaacagctttgccattgtcaacttagtttgttatggattgtttggttaatgctgtagagtgagttgtga

SEQ ID NO: 189736 - DNA, 272 bp, Homo sapiens
taggatactcctttgcaccatcttgtctctgcactggcttttcccatgcactctcatctatctgcacggctctaattataatccatatgctgagaacagccaaagccctgccgtcagtcagctctccttcctcagctttgcaaccagctctccactgaacatctccacctggatgtcactcagaaactgcaaactcaactggctcaaaggagacatacaatctcttccaaatctgctgttcttatggccttgattctaatgaatacccccca

SEQ ID NO: 189737 - DNA, 587 bp, Homo sapiens
actaagccaaaactccccttaagcattcaaatgtactaaagaaagccctcagcttgctgatttttttaattagcaaaaaagtaaggctatagactacatgtatgtgtccccccaaaactctcatgttaagattctagcctggaagcggtggctcatgcctgtaatcctagcactttgggaggctcgaggcgggcggattgcatgagctcaggatttccaaaccagcctgggcaacacggtgaaaccccgtctctattaaaaatataaaacaatttagccgggtgtagcggcgtgggcctgtagtcccagctactttggaggctgaggcaggagaattgctggaacccaggaggcggaggttgcagtgagccgaaatcgcgccactgcactccagcctgggcgacagagcaagactccgtctccaaaaagaaaagaaaagaaaagaaaagaaagaggcagatgagccaacttaaaggaccctatcattcaaggaaggtgcgaatcttccttagagactgtaccacttaagctaagcgccagggtagggcaaaagactggacctctagggttgacacgggcattcagca

SEQ ID NO: 189738 - DNA, 123 bp, Homo sapiens
caatagtatgcttaatctacatatgatattttataatatacttttaaaaattaatgcatgatataaagcttttcatatcaatagctatatgactacataatctcattatataaacataccata

SEQ ID NO: 189739 - DNA, 376 bp, Homo sapiens
tacagagaggagctcggttagagaaacagctatttggataaacagaggggttctgggctaggaacccggacacgtaggtccaacccagcttagcgcccctcaaaagcctgacaagtaacatgatctcctggacctcagtttccgctcctgtaaaaagtatgtatgtgaagggtctggattctccctccccaaccctgcagagcagaagctggggattctgtactccccttccccagtgtaggtctcagtagcagtgaacgtgcagcaaggccaggcagaggcaagggctggctgctgtagctgcttggtagaacttctctgaagcaggaaatttgggcagcaagtgccctggctagtctcaccctgaccaaagcct

SEQ ID NO: 189740 - DNA, 342 bp, Homo sapiens
atcacacaattataaagtaaaatggattaccacatatttatagcaggagaaataattttaaaatgagggtgtttttctattatatttatgtgggttttattttatagtcactagacagtaaaatccatcaagcattttataactgcttacatcacaagtattcagtaattatctgggtaacctcggacccaacactcaagcactttggttctcagttctttatatgtcaaataaatagatcagtcaagatctgtattatccaaatattagcatgtggctatttaaatgtaatacttcaaaattaaagtaaaaaattcagctttgaatttgagacacatttca

SEQ ID NO: 189741 - DNA, 940 bp, Homo sapiens
caagagctggccgtgggggaagagcaatggtgtgcggaggtgggggaggccctatctagggacaagcagaaaacttagggtgggcagatccccccgacccctgtgcaggggctgccggagaccaaaaaggctgctgtgtgacctggaccaagccccttgccctctcatgcctcagtttccccttctctccacggagggattgagcaggacatggagggccccttccagtagccattctgggactccctgcacctgtccccaggggagggtcctgagctggcctccacgtggctgctgttccccatagtggaaccttgtgtgtggagacggctggaaaggtcccgctggagcaagtgagccaacctcctgggcctggctgcttgggctgggtcatccctgggaacaggcctgtgaaccggtttggacgccgggcagtttttgtggcctccctggtgctgaccacagggccttgggggcccagtgagggccctgggctggccagctttccctacccctgcttggtcctgcgcctactcccacggggggccaccattgggcaaggggcccctcctcggcccctgtatctgggctcgcctggagttgtgtgaccctccccaccgcctggccttctccatgggggctggccttttctcggtggtgggcaccctgctgctgcccggcctggctgcgcttgtgcaggactggcgtcttctgcaggggctgggtgccctgatgagtggactcttgctgctcttttgggggttcccggccctgttccccgagtctccctgctggctgctggccacaggtcaggtagctcgagccaggaagatcctgtggcgctttgcagaagccagtggcgtgggccccggggacagttccttggaggagaactccctggctacagagctgaccatgctgtctgcacggagcccccagc

SEQ ID NO: 189742 - DNA, 520 bp, Homo sapiens
caggcctctgaggctcccttgccgagggccccgagctgcagggacagtgagcagtgagtcccttgggcatcccgctcctgggcaggtcaccaataggtcccccgcagttccccaatggaactgttccagtcctccccgaggcctccacttcaacctgtctgtgtctgcccaggcctggagttgtgtgaccctccccaccgcctggccttctccatgggggctggccttttctcggtggtgggcaccctgctgctgcccggcctggctgcgcttgtgcaggactggcgtcttctgcaggggctgggtgccctgatgagtggactcttgctgctcttttgggggttcccggccctgttccccgagtctccctgctggctgctggccacaggtcaggtagctcgagccaggaagatcctgtggcgctttgcagaagccagtggcgtgggccccggggacagttccttggaggagaactccctggctacagagctgaccatgctgtctgcacggagcccccagc

SEQ ID NO: 189743 - DNA, 156 bp, Homo sapiens
ctggcgtgtatagaggatccccgtcattttctacacccatacatgcatctacacctgcacctactcctatacccatacgtgcatctacacctgtacctaccctcacacctgcacctgcatctacacctgtacctccaaccacacctgcatctacac

SEQ ID NO: 189744 - DNA, 1317 bp, Homo sapiens
gatttgtagggcccccaagtcatttttacacatatatagtagtgaggacaggacaataatttagagatttgcaaaacaaggttcttttctgttttggtaactaacttgcagtgtgacaccaggccagtcacttgccctttttgggctgtgggagctggtctctaaagatggctcccaatgagtcatgcctcctggtgttatgcctttatgtggttccctctcacactgaatctgagtagctctgtgactagttttaaccaccagaatatggctaccatgacactgttcagtcctgggtctaaaccttgagcaatttccacattttatgtttttttggggagccccaagccactctgtaagaaatctggctacactgtcacatggaaaaactgtgtggagagacccttaggcaacagacaggggcctccagatgattccaaccacagctgcagaagaaccacccagctgagcccattcaacccagagaactagtagatataagatgattattattagaagatgctaagtcttggagtgttttgttaaacagcaatagataacttgaatataaaataaggaaatctataaaatgaggaaatgttactagatcagtctcttccaaagggctcctgacacattaatgaaagatgttacaacatctgtgtgttaaaaataccaatatataaagcatccattcaaacatttttctcctttaaaatggaataaagattcctgagtacatgacgagcgagcacaagggtcagtttgtgggaatcaggaaagcacgccatgacccaactacttcattacttaggaaataccaaactgcacaataattctgacttccgtatcttacaatgtgaggtttttagtcctagattagtttaatttatatccaaatggaccattggctaaagatgaaaaatgaaaagggtagtaaaggaggagctcaaaaataataattctgaaaaattcttcctaaatccaaagaaattagtgtttcaatattcccattttatgaatgaacaaactagtgaagaaggtacaaaatccttggctgaatgtaagaatgtgagaggctttttgtcttgctttgttttgtttttggtagatctgttttcttgccatttgcttcttttccccttccagtcctcatgaatccagtgatccgagagctgtggttattaaagacattcttaagcttctttcttgtgtatctgtgcatacctcatctcactctgtgcccctctcagctgcacttgaaccaaggtacttctgatctctcagtgtcagtttgctcatgtgtaaaatggggac

SEQ ID NO: 189745 - DNA, 348 bp, Homo sapiens
aggcgaagggcgcggacagataagaacttgggctaataccaagcgtgtggacagacccagaggggtagaatggaaggcagactctggaggaaaagggcgagagtgcaccgaccacccagctcgccagagggcaggggaggagggacggcttcctggggtgaggggctgcacgccggagccccaggaggttgcacactgttcctcccacctcgccactgcacccccaccaaggatggaattggaggcggggggcagattccagggtcagggctgtcaagagtgaatgaggcgaggagacattcaggagcagagaggtttcagacgcggaggttccgggcacgccctcaa

SEQ ID NO: 189746 - DNA, 243 bp, Homo sapiens
ttgcgccactgcactccaatctggtgacagagccagactccgtctcaaaaaaagaaaaaaagacttaaatgtcagacctgaaactataaaactactagaaaaacatagagaaaactcttcagaacatcggcttaggcagataatttatggatgaaatctcaaaagcacaggcaccaaaagcaaaaatagttgagtgggctataacttctgcacagcaaaagaatcaacacagtgaagagacag

SEQ ID NO: 189747 - DNA, 273 bp, Homo sapiens
aggcaaaatttaaacagaaaggtatttacaaagagaatttgcatagaattaatgctgagttttctggcaatcagttgccctcttttccttcacctgtgccctatagaaagggaaaagacatacttggaatgctagaatgagaccaagtggtcattaaagacttcctttggttcaagactggaatctgtgctgagatcttccaagagcgagtgctacctgccccagtaattaaagttcccagggaacaagattccatgtgctctctcactaatt

SEQ ID NO: 189748 - DNA, 282 bp, Homo sapiens
aggaacaggagggcaaaacatgttcttctggaagtgctgcccaaagacatggccaccggggaggaaaggaagaaagcagcacagagccaagtttgaagtcctggaagagaatctcctgagacattggctgaggaacacagaaagttacttgtggcagaatctttctggaatttttccattctgggatactctgagcccattttgtcacaggtcatcatgacttgatgaatgaatatcatattggttaattcctgcggcttaataaaatcctttgttcaagaa

SEQ ID NO: 189749 - DNA, 799 bp, Homo sapiens
tccaaagtgctgggattacaggtgtgagtcaccgcacgcatcctgtatatcacttgtaattatcttttttcttcttttttgagacggagtctccctctgtcgcccaggtggaggttgcagtgagcccagatcgcgttactacactccagcgttggcaacagagctagactttgtataaatatgtttaagtaattacaatttatatttttctcctgtgattgaaacacttgaaatggatcttatgattaatttatgtctggtatctttgctcctctacttttgataaggcttctaaatgtaactttggaaattttatatttgccaaagtaaaaagtggtgtttttaatgatcattttaatgtagcttattttaaagctttttaaaaacttttccctgtccctcgtcctacaactacaatccaatacatactaaatctcagttggccagcaaaaggaaacctaaagattgagatcaaggtttgtattttcttttttttatttcgagtttttatcaaagcttgtatataagattactttattcctgcctcttctcaattgtttcttccttgtatttgcccttttcctttcctacttggcgagatttggctttctgttcaggaatctttttgccgtctttgttcagttttatcctagtgagaaccacttgctgtggtgaatgtctacatggatagttgtaccattagccttttcccactgcactcattcagtgtagatgacatttcttcctgtaagcctggactactttgccaatttgctgacctttatagtgtcctcataca

SEQ ID NO: 189750 - DNA, 736 bp, Homo sapiens
gatacgtgggaggctgaggcaggagaatcgcttgaacctgggaggtggaggttgcagtgagcccagatcgcgttactacactccagcgttggcaacagagctagactttgtataaatatgtttaagtaattacaatttatatttttctcctgtgattgaaacacttgaaatggatcttatgattaatttatgtctggtatctttgctcctctacttttgataaggcttctaaatgtaactttggaaattttatatttgccaaagtaaaaagtggtgtttttaatgatcattttaatgtagcttattttaaagctttttaaaaacttttccctgtccctcgtcctacaactacaatccaatacatactaaatctcagttggccagcaaaaggaaacctaaagattgagatcaaggtttgtattttcttttttttatttcgagtttttatcaaagcttgtatataagattactttattcctgcctcttctcaattgtttcttccttgtatttgcccttttcctttcctacttggcgagatttggctttctgttcaggaatctttttgccgtctttgttcagttttatcctagtgagaaccacttgctgtggtgaatgtctacatggatagttgtaccattagccttttcccactgcactcattcagtgtagatgacatttcttcctgtaagcctggactactttgccaatttgctgacctttatagtgtcctcataca

SEQ ID NO: 189751 - DNA, 443 bp, Homo sapiens
gctggaaatacagcatgcagaccaaacaaaaatctccacagtcactgaactcatattctagtatagggagcccgaaaacatttacaagtgaatctacatcactttgatagagtaagaaggcaagtgtgaggaggccgaggggctttctagagtgatcaagcaaagccctacatttgaacagagacctaaagtggtgagcaatctatctatgcacaggtatctggaagagaacagcaagttgaaaggttcaaaggcaggagattatcaagtttcatagatgtgtttctcaaacttgagtaagaatcaactggagggcttattaaaacatacacctgggtcataagccctaattttgcctcagtaggcctgggctcttagaatttataattctaccaagttgctaggaggcgagcagactagaacatatagaatggaaaaagatg

SEQ ID NO: 189752 - DNA, 159 bp, Homo sapiens
cctctcccggcctcagagaaaatttccagggaaccgttttctggtgttaatttgttaagtcttcttactaagtgagaataacagctggtggggtggactctgacctgacattaaagttaattagaaatgtcatcctccagggaacatcgtcccctgagg

SEQ ID NO: 189753 - DNA, 146 bp, Homo sapiens
ttggattcaccctctccaaggcggttagaaccctctgagatcattcagggctttgaaagggcttggtaatggcgacctgtgtcctcactccacggagatttagaattaaggcagacctgcaacacaggagcaattattgagtacct

SEQ ID NO: 189754 - DNA, 424 bp, Homo sapiens
tactggcttcatagagtgagagggagtgaagaccctgatctcttgagaaagagaagaatgatgggtgctacaatcccagttcgattttccaagagtggaggctgccatcatttccttacaaaacacggaaggcaaacactttgaaacagcaaatatgatttcatttatttatctttaagagaacacaatttcacatgagaaaagcatttttctctcatcagcatgactttgaccctactcatttcaaagtaataaccttggcatcactgtctaggaagcatgtgattctgtcttctgtctgagtcctgaacaagtggaattcttcccaaataaattcttttcaaatatgactgacatatagtcccatgataggtcaggaaagatggttatactacaaatcacctcaataaacttatgtattcca

SEQ ID NO: 189755 - DNA, 327 bp, Homo sapiens
tattcatttaaaatgaattacaaccatatctatggtcactttaaatgaaagccatttgaatatattcttgttaggtgcaaattaatctaatttcttcaaaagtagtcaaagcaacagtagatacaacaataatgtctccttaagttctattttgccttcacagtgaggtctaaaaagaaaaggacattaaatttaagcaaacctttgaaaacaactcctgttttgaaaacaagtttttgaaagtttctaagtcaagactacctacattaaagagttatatgcagatgccatacaatcctcagtaggatcatatgcctctttaagagg

SEQ ID NO: 189756 - DNA, 396 bp, Homo sapiens
taacaaagatctgagctaattttatcactaggaatttttggaaaaatggggttagaccagggtttctcaaccacggtactaatgacatttttttgacatgcagtctcgctctgtcacccaggctggagtgcagtggcgcaatctcggctcactgcaagctccacctcctgggttcacaccattctcctgcctcagcctcccaaagtgctgggattacaggcatgagccaccgcgcccagcctaatttatttaaaacgttgactacttttccatatcaaattattgaaagagttttaaaaaatatttttattagtttctctgacaattagatgtggattcgagtaaaagagggaagagaacaagtgctcctttagattcttttattctcttcctgtg

SEQ ID NO: 189757 - DNA, 460 bp, Homo sapiens
gtaggtgtttgttaatttttgtatatatcatgttcaatggagtgaaattaagggaatcatctatattttgtgtaggcagatcaattccattttactatttctattgaatatttgattttgctcctcttactctcttctctgaggcagtatcatgagaaagaaaagttggttgtaaatagaccttctctctcttgcatccatcatctgccgtcacaaaggaaagtagtttaacaattaagtagccaaggatgacacctgtgtagtagaggttctgcattcagctgcaccctggatcctgggaacataattggacccaaggcctgccccattgtacaccaaagaatgttaataacatggctgcatgcatgcatgtgtgcacacacgatacactggctacacatttgtaaggatctgtttttttcaggaattatatgtatctaccaaagcagatagatacata

SEQ ID NO: 189758 - DNA, 264 bp, Homo sapiens
ttagcggatcctttagaggacaaggaggggcttaagaggggagactttcaaaactgcaaaagcaaaagcaaaccacctatcactgtgcacacaaggaaaacagagtccgccacagtccgggatatctgcttcagattcaaacaccttcctcctcggaactgtgaccggctccagcactggtcacagacgagcttggcttccaacacggtgagactgggcgagaaagattccttcacagcctgagcactgcctccttggtgctgg

SEQ ID NO: 189759 - DNA, 270 bp, Homo sapiens
caacagaacgagactccatctcaaaagaaaaaaaaagaaatagagataatcacacctactttgctacagagttgtggggagactccagtgttccccacaggcctggcgcacctcctggctcacggcaggtgcttggtgagtgatggttccccactgtttcctctggaaatttagggcaggaggtggtaacaataacagtcatgtaatcactcccagtgctaagcaccgtcagcccagatggtctcatgcccccttccctcggtgctcaca

SEQ ID NO: 189760 - DNA, 402 bp, Homo sapiens
agcctcccaaagcactggaattacaggcgccagccatcacacttggccgatagtgcgtaattgatcagtctgttgaatgaatgaatgaacaaatgaatttatcctctctgaaattctcagccttgagataccaatttctacttcagagattataaaaaagtgcttatgtctctccatattaaaacaagaattttccccaatcatccctgctttctcctctaggtatcctccctatttctcttcttcccaggcagacttctagaatgaaatcactatggtcggtctcttctccctcccctcaaatatactcttctgaaactgctctgtggtaaccaatgacctccacaaattgccactgcagaggattctttttagtccttttcttacctatttctacccttt

SEQ ID NO: 189761 - DNA, 127 bp, Homo sapiens
aaggatctggaattaaaattgtttggcttctcattagcaacaccggatgcagagagggagcagtcaccttcaaagtttgtagtgaaaattgttaccaacttagatacccagccaaactatcagttaa

SEQ ID NO: 189762 - DNA, 220 bp, Homo sapiens
catctcttctttgtctacaaatcatagtggctctgccatccaaaatacattcacaatttgaactaccagccactctcacttgccttcaccctagtccaagccactgacctatcttttttgcatttgcccttcagactgtttttcttatagcagccagagtgagcctcttaaaataaaagattatattattccactattcaaaatcttccagtcgtttccc

SEQ ID NO: 189763 - DNA, 260 bp, Homo sapiens
agtgagtaagtaatggagtctaagcacatacaaatcctgagttgtaatcctaccttgggaaagtcttccgggctacaagtctggttcccggacagtaaaaatgttagacatcgtgaatccctcaaaaccctagatttttgactctatttataatgtccattggttagggagatttagaaatggtaccactatattctggatttgataaacatgagcttgctaaatcagaaaatatccaagaatcaagtcaccaaccaagc

SEQ ID NO: 189764 - DNA, 901 bp, Homo sapiens
gtgcccctgaaaaagttattactctgtcccttcatgccctgtttcatttgtaacgtagggatactgttagcatctgctcatagggtatgttctgaaatttttcaaaaataaaacatgaaaagcatttagacagaacctgacatacagaaaacaataaatgttgttgctggtaaccacagtagttgtattactaaaaatgacccagtaaaaccccagctggaaaacttaattgtaatgcaaagctgaagctctgttacttccgattccaattttgtttcaattatttggaaagaaaacatttctttaaaaagtatgagatgttcctagccctataaactgattagaaaatgtagtttaggccaggcagtggctcatacctgtaatcccagcacttcggtaggccgagggaggaggatcacttgagcccaggggttcgagaccagtctgggcaacatagtaagaccttgcctttacaaacaataaaaaaattagccaggcatggtggtgtgcgcctgtggccccagctactcaggaggcttaggtaggaagattgcttgagcccataaggtcagggctgcagtgagccatgattgcaccactgcactccagcctgggtgacagagcaagaccccatctcaaaaaaaaaaagtagtttaaatttttcttggactccagattattctcttagagacaacagatttggaacgaagcttttgtagagctctccacatccagcagagtacatctggggaagtcgtgatcattcagattatgtttcctcatatataaaatgaaaatgtaccagtcctaccttcctgcagcactgaaagactgaaacaagataatatgtagaaaattagtaagagttctcaaaggccatgtggtatcatcgtcatcattc

SEQ ID NO: 189765 - DNA, 410 bp, Homo sapiens
cagcactttggcaggccgagtacggtggatcacaaggtcagagctcgagatcatcctggccaacatggtaaagccctgtctctactaaaaatacaaaaattagttggcttgcaagaaatctagttaaattcaataacaaccaaagtgagtcttcaaatggttgttgtgggtgatcattctaaactatgagctgcatatcacatatacatattttacatcttaaatgaacatgtattagataaagaatatctgacctgtttagttctcttagccatgagaggtggactctttgtaatgctattcccagtagggtgtctactaaaacaaagtttcaactcctgcggtctgtcaaaaagcttaaggtccagtcttggaaagtatttgtaactaaaataaaaaaaaaaatagaa

SEQ ID NO: 189766 - DNA, 359 bp, Homo sapiens
agatcagttaggagacagcctcccttacaagttagggaggacaatgactctgatgactagggcagtagtagagatggtggaaacatgcagattctggatatattctgaacgtacaaacgacaggactgcctgttaaattggatatggggtataacagaaaaggagtcataaggatgacttcatgttttttggcttgaaagaatggaggtggagaaagccatgagtggtaaagcttttggaaggagaatcagaaatgtagtactggacatattcagtctgagatgaattttggacatccaagtggtggggatgtcaagtgggcaatagggtatatgagtctggggttcaggagagatgtc

SEQ ID NO: 189767 - DNA, 943 bp, Homo sapiens
aatcctggtggcagaacttccaggcctaactagacaatgatgaagaactctcctgtcaacaaactgtcaatcacagtggtaaaatgatcacaatgggctcactgtggttgacagtttgttgagcaggacttggaaatcctggtggcagaacttccaggcctaactagacaatgatgaagaactctcctgtcaacgaacggaatctgttttcttagggcgccagatattctgccagggcatctttccactgcctccctcagagtccaggaattgttaagcccccgcctccaagaaggggaacactttagatcgcaaccctcttcccccgaactgtatgaatcatgttccaggtagtttcttcctgtggggcttggagggaaagcaatttattgaaacctcgatgcctgaaaggctcttacaagatggagaagttttactgggtctgtatttctgtaccaaatagcttcccatcaaggagagttgggctgtgcaggctgtttcccgtggggagccgcatcctccccaaagggattctgacaaggtgctaatgtaccacataagtgactgctaaggtcactgaggtgtccatttacacctgtcaggctgaaattcttcaggcaccacaagtgggatgagacacaggcttccccagtgctgggctgtcactgactcagtgccaccctccagggcctcttcagccctgcccttggcacgagatcaagctatggttccatttctgctgtctgcgttctgtggccaagcagacctactgaatacctgagatgaccagggaaatgacttgtagctcccttagggctaaatttcaacaacctgacaggaattaagttctgtggcctttaagtgggggctataaatgcctatctgactgggcagcttcagctcaagagaggcaagagaaacaagagtatgtctagactgtaca

SEQ ID NO: 189768 - DNA, 193 bp, Homo sapiens
atgctctataataagggcagtcaggctgtagcgtgtgtgctgactgctggttttggaactaagtgttgttagacccccaactgcctcgtttgttgatgtattgtgtggctgttttcactgtaaatggcagagatgaaagcagatagcccctgacttaggatggttcaacttgggacttttcgacttcatggta

SEQ ID NO: 189769 - DNA, 533 bp, Homo sapiens
tggggtgtccacataagtgtcatctcctgacatggggaagtggtgggtggcattcagacccagcttctctggacccttccttgactttggttcaccctgcaagtacggctgtgggccggcctgtggccaggtggtcttagctggaccacgagggctgtgtgctttgcaggccccagtaacagtgacaaaatccattcaggacatgctgaaggcaataaggtgatggctgggctcacagaaaaagaggcgggggccttcctggactaggaaggctgagtcatctcctggtgggtatctccaaggagtggaccagaccacaggagccccaaaagacccaaattctttgtgttcaatacccagccttcacatcaaccctgctccctccacccccaggttcctagtaagccctaagcatttgcaccaggctctggcatgcagtaagtgctcaggacatattttaagataaaggaatgagcgctgcctcctcactgggttacaagggccagcacctatttggtgtccccggagctgag

SEQ ID NO: 189770 - DNA, 350 bp, Homo sapiens
acttctggctgcctgctgctgacctctcagggccctgccgggctttcagagccctgctatcttgcaatggggtcctccctgactcatcccaccctggacgggggctcctgctcatattctctgctcacatcttacacttccaacatccagagactgcaggcagcttcgtactgtgagtgacgaagtcgtatcctcctgcttcagaagagaactcaaccaacagccaagtgtgcctgcagagcacacacggtgcttaagatatgtgccctaacggaaccaacaatcttcctcagaagccagtggttcgcaaagcagccctcagatggacccctccgtggttatgcctggca

SEQ ID NO: 189771 - DNA, 355 bp, Homo sapiens
ctggaaatgggaaacctgattcagatcacaggagaaggtagaaaaacatttggttcaacacaatactgccccccttcttttttttaaagggaggaaacatatttcaaacctaggaatagggaaaggattcaagacccatcgtggaataaaacacagaatttaaaatagcatccgatgtgacccaaaccagcaacaataacgagaaaaccacccagtccttccagagatgcaccttgtttctgctgcagtgttgctaatcaaaatcgatctgcccatccaagcaatttaaagaggaagggcggcatttgtagaaaatggtacatgttgataaagcatgacctgtcccacatagaga

SEQ ID NO: 189772 - DNA, 260 bp, Homo sapiens
tcgagctcgctaccatttctcattgcgaaatctctctctctagggggtagtaatttcccacacatactacaggacttggcacactaacagttaccaatatttaattagatgatcaaatatgtactactgtttgggattatacaacagtgtttccatattaggtaaaataattaaaacatcacaaaagctcaatcttgcccagttagtcattcaatcgtaggtcttactgtatatgctgctgctctagggacagtccagca

SEQ ID NO: 189773 - DNA, 402 bp, Homo sapiens
tctagttttccttctcagtcttattaatacctctaaaggggggtagcaataagtaataataaagacacttcatgtgtattagacattgttataagcactttcatacattaactttatcaacagcacaaagcaaaactgaagtcaatggtctattttaatgctgtagctatcaataatctggtgaggatgactgaaaagagcaaaatatctaatgaaccatactgcctattgtatttattctaattaacatgctctactcaaatttaaaaaaataataataatcctggtattggaaatcctggtccagaaaactattataataaaagcaataaaatagttaatagttcaattaactcatattttctggaatcatcaaaaggtttaagacacacaaaaatttaa

SEQ ID NO: 189774 - DNA, 906 bp, Homo sapiens
cattggttttatcagaaaaataaaatgggaagagtcacatctccctcagctaagaagatagattacttgtctggtccccctttcaaaagacttgaaggtactaagatttcctaggtccttcaccttatgactgtgtgccaatttgcaggcactagttgggacctctgttcatgagtcagcttcatggggatggttttctagcttgttccttcaccacatttgcaggttggatcccatttccctctcttcagccttgtcttggagacacagttctgtatgactgatgcacatcagaccctgccttcatttctgttttgcttccatcctgctcatatttccaatcccctcttccatcccatccaagtctccatcacttaccatatcttccttcaggacacaggagtcaataggccacacctggaaaccatctgatgctcaggactcatttgtgcttgcccaaaatatactaccctctgttgcatgttgctgcttctgttttattttctccctgaaaccttgctagcttttctaatttggccatctagttacctcagtttgagtctccattccttcactccactcaattcaagagtatcccatctgatatggtttggctccgtgtcctcaccaaatttcatgttgaattgtaattctcgatggtggagacagggcctggtggaaggtggttggatcatgggggtggtttcaaatgatttagcaccattcccctagtgctctctcatgatacagttttcatgagatctggttgtttcaaagtgtgtggcacctcccccaacccccactctcctgctggccatgtgaagatgtacttgctttcccttcgccttccacgacaattgtaagtttcctgaagccttcccagaagcagaagcctgtacagcccgc

SEQ ID NO: 189775 - DNA, 466 bp, Homo sapiens
ggtcgttagttatatagattatagtgtctttattaagttaggaaggctgggaatttctcttaagaattgagaagaaaatattccccaatggtaacatactcatttaaaatgggggctaaaattactgttactgtccctgagagacataggagaggagcctctggggtgaattgaatattttttttaagccgccagctgtgctattcactttgtttccccaatgattaattgcatagatgatcctgagctcaatagacacgcattgactgaattctcagaggggtatctcaagttgcttacactggggatgttttgatgaaaaagttctaagtgaacttttagcttgctgttgattttccctgctaacatccagcatcgaagagatttgtcttccaaaggtgaatgtgaccttttgacttaggtctttcttgataatacgacctttccttctagcacacctcttcag

SEQ ID NO: 189776 - DNA, 459 bp, Homo sapiens
tcatcttgggcaaatctcgcacctctctaccagttccctcatctgcaaaatgggagtgataatgcctagtcttggcaaaacttgttgtgaggtggaaaagggctagtaaatctaaaaatgctttgaaaactttggcagtgctattgacaagcaaggggtcactggagtctgtcgtttttagtacaacgactagtattttaatcagccaaatgtgtgtgactggtctatactggagcataggtcccttcagaatggaaagacttttccaattttattcataatttctttagacaatctacaggaagagattgtcaagtgtaaacagagtttccaagtaccacaaaaccacagaaagtgatgctgagatggaaaacgattttcctgccttcttccattccaactggatccctctcccatgtggaaaatgttgacacgtcaacattgaaaaataacttagaa

SEQ ID NO: 189777 - DNA, 469 bp, Homo sapiens
ttcctattaggcaactagatgtctagttatctcatttccaattgtttactacttgggcaaccttaggcaggtcatttaaactctctacacattgattttgtctgtaagatggtcacagttaatatcaacctgcctgaaagtggtcaatgcaggtattaatatacgtgaaaacactccataaagagttagatggcgtaaaacattgaatccaaggtctagtttagtacagcactttttgagattaacggatgtttgacaaatactaattttgacttttcaaatgtaaaaatatgtgatggattaatgaaaaaccaaaaacaaaggaacgctaatcatagctgtgaatatgaaaagcaaaaatcaccaggtagagtggctcacacacggaagagagaaatattctatatcttgattgtgcttatagtcacatgactataaacatttgcctaatgaactcatcaaactgtaa

SEQ ID NO: 189778 - DNA, 752 bp, Homo sapiens
gctcagcccctaacatgccctgggacagcagctgagccacctctaggtctgagtctgttcttcacctgctgaatgggagggaaggtaaatggcctgcaggtctggggtgttcaaaccacaggacctcagctccaaagaaatcaatgatgcctaggagtcccctggggagaggggcagcggctcaggcaccctcaggatgaccagccttggaatgacccttttctccccttggtctcatgagccctcatatttcctttcccacagtggggaccaaatctcatttgaggaccaaaaggggccagggccagagaagacgacttctccatgtgactacccacagctcctgcagaaaacagggagtgacctttgacccttagcatctgcctccacttcctctcttggcaagggggatcttgttgctgcaaacccacacaccttgagcagagggtaggagaggtggtaaggggcaaccatcacctagcaatgctttggaggacaccgtgtcgctctgcctgcctatctcatcagtatccaggaccacctaatgagggagaaatccttgaagcaattttgcggagaagaaaactgagtctcaaagtgacagcatttgcccactgttactagagagtaaggcaagagacccagccctgggcctggtccagggctttctggaggcagtttcaaacctaggcctccgatggccttagtgtcatgctcttctccagcccctgcctcggctggctgtcccacta

SEQ ID NO: 189779 - DNA, 672 bp, Homo sapiens
gctcagcccctaacatgccctgggacagcagctgagccacctctaggtctgagtctgttcttcacctgctgaatgggagggaaggtaaatggcctgcaggtctggggtgttcaaaccacaggacctcagctccaaagaaatcaatgatgcctaggagtcccctggggagaggggcagcggctcaggcaccctcaggatgaccagccttggaatgacccttttctccccttggtctcatgagccctcatatttcctttcccacagtggggaccaaatctcatttgaggaccaaaaggggccagggccagagaagacgacttctccatgtgactacccacagctcctgcagaaaacagggagtgacctttgacccttagcatctgcctccacttcctctcttggcaagggggatcttgttgctgcaaacccacacaccttgagcagagggtaggagaggtggtaaggggcaaccatcacctagcaatgctttggaggacaccgtgtcgctctgcctgcctatctcatcagtatccaggaccaccgcacagggggagaaaactcaggagcaatgttaaaaggagacagtgagcgacgtcctcatacgactcacaataggccagaattaggtacacgggcacccccatgagagctcagaccgctatcgatatgcca

SEQ ID NO: 189780 - DNA, 691 bp, Homo sapiens
gctcagcccctaacatgccctgggacagcagctgagccacctctaggtctgagtctgttcttcacctgctgaatgggagggaaggtaaatggcctgcaggtctggggtgttcaaaccacaggacctcagctccaaagaaatcaatgatgcctaggagtcccctggggagaggggcagcggctcaggcaccctcaggatgaccagccttggaatgacccttttctccccttggtctcatgagccctcatatttcctttcccacagtggggaccaaatctcatttgaggaccaaaaggggccagggccagagaagacgacttctccatgtgactacccacagctcctgcagaaaacagggagtgacctttgacccttagcatctgcctccacttcctctcttggcaagggggatcttgttgctgcaaacccacacaccttgagcagagggtaggagaggtggtaaggggcaaccatcacctagcaatgctttggaggacaccgtgtcgctctgcctgcctatctcatcagtatccaggaccacctaatgagggagaaatccttgaagcaattttgcggagaagaaaactgagtctcaaagtgacatcacagtcacgatgttagttagagaacgacccgagacaagctgccatgcctgcgttcactctatgatggaacccccttcaaatctagc

SEQ ID NO: 189781 - DNA, 153 bp, Homo sapiens
atattgtgtataggtggtggctattagaagactagtagttcttggaactgttcctttttttctcacaatagtagttaagctgtgtcattgggatacaaagggaaggagaaggctatttccattcttagaatagaaaaattggaaaatgccttg

SEQ ID NO: 189782 - DNA, 438 bp, Homo sapiens
aacaaataaacaaaagaaatacaggatgtgatgcagggagtgtacgtagttggaattaaagcacttaatgggatagggcacggcaagggggcagagaaggtgctatcggagctgaggcctgaacgaaatgaaaaacaaaacttcataaagagtggaggaacatgctccaggcagcagacacagcacgtacaaaggtcctgagggaggccccaaggcactggaggataagaaaagagatcaggaggtcaggcgcaatggctcacgcttgtaatcccagcactttgggaggccgagacgggttgatcgcttgatcccaggagttcaagaccagcctgggcaacatagcaaaaccctgtctttataaaaaatacaaaaattagctgggtgtggtggcgcaggtctgttgtcctagccactggggaggcagaggagaggaga

SEQ ID NO: 189783 - DNA, 266 bp, Homo sapiens
cctcatccccctcccctaccccatcacactaccaggggtgaccacttcaatagcctggcatctatttttctagacattttgctaagcacataagcacacacacagaattaacaaaaatgcttcataccatacatagttttctgaaggctgattcttttattcaacaaaatgtcaaggagattattccctgcctacacatacacctattttgttctttttaataactgcataagactccattataatgatgattccacaatctgcat

SEQ ID NO: 189784 - DNA, 103 bp, Homo sapiens
cctatttgaactcaatcaactctttacagacccaaatacagtaactatatgttaggacttcaacatacaaatttgcaagggtcacacttctgcccaaaacagg

SEQ ID NO: 189785 - DNA, 200 bp, Homo sapiens
aatactatccagcaatgaaaatggaccatagcgacacagaataacatggtggggaaaagaagaaagacccaaaaggatatttacactatgatttttttaatataaagattaaaacctgttaaaataaaaactgaactataagggaaagcaagagaaaaagcaagaggcctgtgcgttggctcatgcctgtaattccagaa

SEQ ID NO: 189786 - DNA, 623 bp, Homo sapiens
acaatttaaagaaaaaagtgctttataaaaaaagatcacatattgtaggtcacagacataagaagaaatggtgaggaaggtgcaggtatccttcaagaaaagtatctctaaatatttactgagtgtatacaataataacaataatattatcaaatctgaaggaagttaaataagatggggtggggtggagggcagaacgatttagccaatgacaagcaagaatatgtaatttatatatatataagaaagtatagaaagtactaaataagatagtgaaatcagtcaaaatacagctacaaccacaataaaagcaaatggggcaaaagttccagttataaaacagagtgttaaactagatttaaaaacaaaatttagctacatgatatttacaagggacctaaatataaacataaacctaaaatataaggctacaaaaaaattcaaaggaaaagataaacgcaacaaaatattgagaagataaacatgaacattaatcaagacaaagctctattaacatcagacaaaacaggttttaagatgaaaagcattattagatatcaagagggttaccaaacagtgataaagatgcaatttatttacttaattgaagagcttcaaaatat

SEQ ID NO: 189787 - DNA, 284 bp, Homo sapiens
gacttttgaagtccccttatatatatagacttataaaggcagctttaactgaagcatattttacacatgttctatttggttgaagatatgaaattaccatttttgtagataaaatgtatttgaatattaacactttcatatagccaacctaattgttaccaacacccgaaacattcacaattacttgacttggaaacttcaacattccagaacattcacaattacttaacttggaaacttcaaattccagaacattcacagttacttgacttggaaactccaac

SEQ ID NO: 189788 - DNA, 359 bp, Homo sapiens
ggatatgtacctgtaaggaagtgatgcatgtgggactgtgcaggcagatctcatctgcaatgcagttatgactgagacctcagctcatcctgtagggagtttggagctgggatgctctttggaattgtcacaaattaaggcaaagggggccaccctttgtgtctttgtatcagccagctattagctacttggcttcatcctggagggggctgtgtaacattgggtaagagtctggcctagtgagaggtacagctgtaaatagttagcaacaagaatgcccagcagctggggcaataagagcctcagccctgaaaaggggacatgggtggagcacaatagtatccactacaacatccact

SEQ ID NO: 189789 - DNA, 442 bp, Homo sapiens
tcttcaggcctctgctggcgggccataatgaaaagggagggagagaggcagccccaggaaagtggtagtatcggtttcccataagtggcaacaaattaacacaaacttagtggctcaaaacacagatttgggatattaaattgctagaggtctgaagggcaaaatgggtttcgctcggctaaaatgaaggtcttagcagggttgtattccttctgaaagctcaagaggcgaatccatttcctgcctcttccagcatctagaggccacctgcttccttggttcacagcctcctcctccatcagagccagcagtgtagcttctctcattctctctctgattcttctacttcccactcccaccttttttatttttatttttttatttttttgagatggagttttgctcttgttgtccaggctggagtgcagtggcacgatctcag

SEQ ID NO: 189790 - DNA, 146 bp, Homo sapiens
ttctaagcaaggtatcttaatcttcccacaaacaagcaagacacagttttattttattaaaagagaccactaagagctaagagagtgtttttttcacgatagatgtgttcttagttgaggactgttgcaaaaccaccatttgcttg

SEQ ID NO: 189791 - DNA, 339 bp, Homo sapiens
gaggtggagcaatgagctgtgatcataccactgcactctaacctggctgacagagcgagaccctgtatcaaaaaaagaaagaaagaaatccggtggtccagagagccaggtatcaaaaccagacaaagatatcacaaaaaaaggaaaaaaaagagagagagaagaaagaaagaaagaaaaacttcagaccaatacctctcataaaagtagatgaaaggccgagcacagtggctaacgcctgtaatcccagcactttgggaggccaaggcaggcagatgacctgaggtcaggagttcaagaccagcctggccaacgtggtgaaaccctgtctctaatttt

SEQ ID NO: 189792 - DNA, 436 bp, Homo sapiens
tgctacccttcctcccagctccccaggtacacttccccaaccttcaaatgtcatccagatttccaatttgacaggatgctgaggatcttgtatggcatgctgcctcaaattatttcactcctttttccttttccttcccaagaaggaagatgaacattcatgagctgactcaggccgagaatctttcccttccacttagggtgagccaatcaatagctctacccacagtcctcactgtgctgatgaccaacactgcattaatggcattgctatttagcagcgcaaaagaagggctcactagaaaataaatttattgtccccctccatctcccccttcagtgaatcccaccttactgcttcctgttagaaggctttggaaaccctgtgggttatcaaatagcaccatttcccttggcggtgttacactattgattga

SEQ ID NO: 189793 - DNA, 318 bp, Homo sapiens
ggaagtgaggccgactgggaaatgagacaggaccattagttacccttaagatgacctaaaaaatattttttacagatctgataaattcacactattatatagtttaatacacacacacacacacacacacgacttggagaaaagagctgagtctagtcttagttttagaaatctcatttttactaagttctccagtgacacaaaccgcaagctaaaaagtttcaaccaaaatttaagaaccactgctttaaacaattctgttcttgaaaaaacaaatgcaagaaataaagagaaagtaatccattttctaaataaagg

SEQ ID NO: 189794 - DNA, 218 bp, Homo sapiens
ggggctttcgtggactgcagttcgcatggcaggcataaggagcgctaatccagtgatgacagcatctttatgcctacctgggaagatgcagcagccagcacagccctaatatcagattaataccggggtgggggcatgaggcatggctggcacctgagaaggcaaaagggaattctgtgattggagaagaagcaaggcaggtgtgtcattaaggtcag

SEQ ID NO: 189795 - DNA, 329 bp, Homo sapiens
accaagatggtgccactgcactccagcctgggagacagagcaagactccgtctcaaagaaagtttttgttgaagctatctgcgtttgccttgcctggcatggttttggttcatgtttccttcccagctccctgagtgactctccctaaagcagggagaaagggagggaagaggtaaacagaatatggccaagggaaatcccacacatgtggttggcagacttaccatgagccagaccctggctagttaacgggtatccagttatgaccaaaacagacatggaccccttgtatttctccttctgactctaacctagtaatgcccagtcat

SEQ ID NO: 189796 - DNA, 123 bp, Homo sapiens
cagatctaattaagcctttccatccagctgccaattggcagtaaatacacaggaacatgctgaactgcacaatgagcctgcaatcagcaaaatctagactgtgggaaactacaagtaaatgac

SEQ ID NO: 189797 - DNA, 447 bp, Homo sapiens
ggaattacagctctcattcataatcttatggatgcgtcatcatctcacagtccattgttgaacaaaatgtcagtatgtagtacatgactatattttatctgtattattcatcatatagagtactgtggctgctctgtgaatatagttattgtatgtatttctttaagggaaaatgagttctgagatgcaaaataaccaagttaaaaatgaaaggcgtgagccaccgcgcccggcctaacctcatcttttaacagtcttactcttgagtccctcaagctacagtcacctgccttccactctcgtaaggtatgacacccccttcccacgtactgatctctctactggctgttccttgtgcctggagtatttttcccagtttatagtatagcagatacattcttatctttcaggtctctgcttgcttgttactgcttaagagcccttccc

SEQ ID NO: 189798 - DNA, 389 bp, Homo sapiens
tcttagaaaaccctgtcatttgtgtgactccttaacagtctctaagtgacagctgctagtttggcaaagaatctttcaaaatgaaaaatgagaaattctacaaactgtgtcagcaacaacttatttatttcaaattctagccagctgcaaaaaggaaaaagaacaatcatttcagttccagcctagagttgttcttccttcacagtttattcctggactcaggaaatcaactggaaaattaatgccagtgattctgagtcccaaggaaaacaatatctctgagaaccatttgctaaattcctcttgaccttcctggtttggctggtatgaggaataggctataaatgtaggaatgaggaggaagtctctgcaattgtggggacttgtca

SEQ ID NO: 189799 - DNA, 582 bp, Homo sapiens
aaatactacaaagttccaattattccatccagtgggaaggaacaagtaatgcaaagtaaatcactgtctggttttagaacatgtatttctacatcaatcttaagatagagacaaaagatctacgcagacacaagactgagtaaagtaacaaaattcgatcccaaagatctaatttcggaagtttacaagtgatttagctttctcactctaccctctaatgaaaaatttgctccccacttcaatgcaaaaatgggcaaccttaattcttaagccactgcaaagtatataaagcagaactcagctatttataaaatactgccagtttatacatttcctggttaattaaggtgacaagtaagtctatagtttagatgacgttcttttttctaagggaagttgaaattgatctatgttattgagtttaatcaagcaaagtaaggtaaaataaacattttgttaatttatagaatcgttctatagaaaattctagttgtaaaatttactgaattatgtttatatatgtacatgtatacagaagcaataacttcttgtatactaactgtgagattcttagataataag

SEQ ID NO: 189800 - DNA, 344 bp, Homo sapiens
ttggccctccatatccatggcttttgcatcatggattaaacccactgtggatcagaaatagagaaaaaataattgtgtctgtgctgaacatgtagacttttttcctgtccttattgtctaagtaatacagtataacaagtatttacatagaatttacttttattaagtattgtcatcttatataagggacttaagcatctgcagattttggtatccacaagggtgggtttggggagggaggtcctggaaccagtctcccacaaatactgaggcttaactgtacaaatgatgatgtgtggaaaccaaaattaaaaacaatttctttttataactcacctgtcaac

SEQ ID NO: 189801 - DNA, 500 bp, Homo sapiens
ataataatgatgatggcagaagtgtgaggctgtaggacacagggtcagggtggagcagccctgagggggaggggcaagggagggctctggcacttgggacccatatggcaaactgcattgtctgttgggaagggttgaagacaagcccgggcctgtcttcttgtgcagcctctgtcctgggctcgcacatttggtaggaggagccaatgaagtaaacggataggaaagtgtccacactctggctggcacgggtgtgtgctcactgacggctgggtcctttctctataacctttacctccctgaaaatctcagatggtgggtctccgcctgcctgcttctgagacggtgggtcctgggcctcagggagtgagagagagtgggcctgctctcctgcagaagggactggtctttgaaccccagaatcgggggttcttgtgtcatcaccaccatccacatgatattccttatcaccatcctatcctgatgtccccattgccgtc

SEQ ID NO: 189802 - DNA, 557 bp, Homo sapiens
caaatgggttcaaattccacttatagcttttcattattgtaatccagagccaagtcagggtctcattatggcttgggaacttgatcatttaaaaatgacttattcagtaactaaaagagagaagttttttgcgtttttttcaactattttcccaaaaataaatcaaattgtcacatgagaatatatatgaatttaaagaaaacgattttctgatgaagtacaatgatcatgatggtagaacttccttcttaatccctgacagttgctattggatagtgtcaatattgctttataaggtcaatagaaaatcagtttatttcactatagtacatttcctgaaacattttctgaacatcatgtttaccctccagaagtatcctgatatggtttggctgtgtccccactcaaatctcatcttgaatcataacttccacaattcccacatgtcatgggaggaacccagtgggaggtgactgagttacgggggcacgtctttcctgctctgctctcatcatagtgaatgagtctcacgagatatgatagtttaaaaaaaaaaa

SEQ ID NO: 189803 - DNA, 650 bp, Homo sapiens
gtaccagtgatattagatgaggaaatagtgggggagtggggcccccagataactgaagcttctaactaaggaatatatcaagttttgtaaatagtaagaaagtgatgaatttagttttgctcattattttgaagtattaatggaatttctaggtggaacagacagtttaatatataagaaagaaagaatatatagcttctatgtatatatatagacagtttaatataaaagaaagagaatatatatagctaaggaatatatcaagttttgtaaataataagaaagtgatgaatttagttttgctcattattttgaagtattaatgggatttctaggtggaatagacagtttaatatataagaaagaaagaatatgtagcttctatgtatatatatagacagtttaatatataagaaagaaagaatatatatagctaagaaatatatcaagttttgtaaataataagaaagtgatgaatttagttttgctcattattttgaagtattaatgggatttctaggtggaatagacagtttaatatataagaaagaagtgtgaatgtaatgtaaagaagtgtgaatgtaatgacaaaattctattaaacagtattaatcactaggtgataatttttagaggttatatgcaaaaga

SEQ ID NO: 189804 - DNA, 493 bp, Homo sapiens
acctcccacccagccagcagcccagctctcctttctcgtctgagcaggaaccaaaggtcctccattttgtaccctagaggagtgaagaaacagtcaccaaacaacacaaagcgtcagatctgttacttttccagccatgactcccaagcttctggctcaaagggtaccgagtggtcaacaccccgcctagtgcagggggcatctggtttctcacctagatcggggtctctcaaatgtacttcttctatcaatgatgaatgctcttggcatttagaaatggagtgataaggtggtcacttcgagtaccttacccttttttctcttgcgtcaaggctggctttccattagcagtgataatttaatatagatccagcccaaagggtgtttcatgagctgatactctgcctgtgacttatacatcacagcctcggccctactgattgattctttttcctgtcaaatttataggaaagtgcaagaactgtacaaagaa

SEQ ID NO: 189805 - DNA, 110 bp, Homo sapiens
acttgtatacacgtgattgtaggtagttttggtgcttaatgaaataataccttttatttaagcttttggtactatgttttgtttctttgaaaaggttgtgttggatatta

SEQ ID NO: 189806 - DNA, 357 bp, Homo sapiens
cagagttagtagatagaagagttgccacttgcaggcaggtctgcctggtgccagagcctttgattttcatcatgtgctgtacagcttccaagatgactttgtccagggagaaagtgagagggagggcaggagggatatatcactttatcttcatgtagagatcaccctttattttagcaaagttgatggatggatttaaaatacagtataattattgcaaagtgctatgagagtccagaagagggactcattctgccaagaggagggctttacaaagaagatatttgacctgggtttttttctaggctgagaggataaatctagccttttaatcatgtccaaaactgtactcggcat

SEQ ID NO: 189807 - DNA, 413 bp, Homo sapiens
gtcatcataaatctaaaatcagtacttaaccccaaaagatcagttgtagaatgattttaagaagatctctgggggatattacaaggttacagtgacatggctgccaaagaacttcaaatgtactctttaaaaaatatgtatatgactgggcgtagtggctcacgcctgtaatcccagcactttgggaggccgaggcaggcggatcatgaggtcaggagtttgagaccagcctggccaacatggtgaaactccatctctctaaaaatacaaaaattagctgagcatggtggttcattcctataatcccagctactcagctggctgaggaaggagaatcgcttgaacccgggaggcagaggttgcagtgagccaagatcgtgccactgcactccagcctgggcgactccgtctca

SEQ ID NO: 189808 - DNA, 228 bp, Homo sapiens
actaggaactaggggcaagctgttgtggggggaggcgtatcattttcaccatttcagaggtaataaaactggggcagaagggttgaatgaattttccaacattccagagtaagcctgtcccagagctacgatgagaacccccatcttagattcccagcccaaagcactctccagtggatcagctgccaaggctgtgagtaaacgtaaggacacacacacacacacaca

SEQ ID NO: 189809 - DNA, 251 bp, Homo sapiens
tctcacacacacacacacgcacactcacatacaaacacatttttgaagtttcttctacagaatcacaacaaatggcatgagggatcaaaatatttaccttaaagtttctccacttttatttagatccacttaaacatgttcatgttaactcagacagcgactgcactgctcttcacatcatcgaacgctggcatcaccatcactttcataaaatagaccattcgcctgtcaccatttgcctgccagcctca

SEQ ID NO: 189810 - DNA, 153 bp, Homo sapiens
ttagaaattgccaataagccaaaataactggaaagtgcccacagtttgccccttgccccagaggcatcgttgctgttttgccgtgccacttacctagagagtgtccatctgtgaaggttgggttgccccgaatatagctgtcaccactgtcct

SEQ ID NO: 189811 - DNA, 529 bp, Homo sapiens
acagattgctttggagaggtaagatggcaatgagggaatgaatggattcagctccactctatgtgtgggagttcagccagcatatctggttgaatttgttcagcctttaagcttgggctttttctctttcttgccacatcccttagaggcacaaaagatgagactgtagcctattggaaaccaaacctgagaagattcatcttacagagatgtgttccgcatgctacaggatgactgaagggacaggcaaatttagacctcaacttatcccatctttactgcccattagtctttctgagaggaaaaagacccacaaaaccatggagagtccattcaagctcttagcttcacacagagaaaagctcctctcgtgccaatgagctgtcttgaaggcatgtgtcgttgttcataagaaagtacaggttagagagcagatggcttagtccagctcatgactactattgtaaaatcatccttgcaccatgttcatttgcttaaagctggttgcctttcctctggtgaatgtact

SEQ ID NO: 189812 - DNA, 1482 bp, Homo sapiens
gctaggtaggaggcgcgggtgaatcggcgagggtgtcctctcttactacagtgagggaggctatctggcggtgatattttgaagtattcaacatctttcgttctaaatccatcctgaaatatttatgaagctcacggcagtgcttagtaaatatttgttgaaagaagtatttaagaggaaaatcaatgtgacgatgttggtagataggaaagtcaaggatacttcaaaagtatgaagttaacttgtgccatcacttaagagggcaaaaacacaagagcatattttcagtgagaagacagtgatttcaattctaggtatgttgtttgacattgctgggatgtggaaatagagaggtctgatacacatgctctgtgctcagtgatgaaaggcccccaggaataagattgtgaggaagttgggaacttgttttcttaattagtggttctcaaagtatgatcttcaggccagcaacatcagcaccactggggactttgtggaaatgtaaatttggggcccaggccacacctacttaattgaaaagtctgggatggggttcaactatcagtgttttaagaagtcctccaggtgatctgctataccatgaagttgaggaccactatcttaaaaattaatcagaactaccaagctctaatgctcaatgctatccagacttttggtgataaacctactaaggcatgctaacattgtgttctttgtacagccaggtcctccctaacaggggatctaagaggctataaataaaagcaatgaaagcttttactctatgcatttgaatgctagctataccactttctatttatgtgtcttaggaagtaaattgcttaacctttttgagcctagggtcctcatctgtaaaatgggaatgctaatggtacctatttcattgaattcttctgatgattaaatgagttcatatatgtaaagtgcttaaagctgtaataagtttgctgcttttaaaatctttactcatttagaaagtcacttgcccctggtccccccaacctttttttttttttttttttgagatggagtctcactctgttgcccaggatggagtgcagtggcgcgatctcagctcactgcaagctctgcctcccgggttcacgccattctcctgcctcagcctcccgagtagctaggactacaggcgcctgccaccacgcctggctaattttttgtatttttagtagagatggggtttcaccgtgttagccaggatggtctcaatctcctgacctcgtgatccacccgtctcagcctcccaaagtgctaggattacaggcctgagacaccgcgcccgccaccccccctcttttctttaactggcctaactaaatatttagtcttttcaagtttacctcaaacctctcacgtgtgaaagctctactggttagccctagagttaattatattgtattgcttggctcataggaggtatttaataaacacattagttgactg

SEQ ID NO: 189813 - DNA, 216 bp, Homo sapiens
tcaatttctacactaatatttataacagcatcatttgtgagcctcactcttagaaggcttagtttatgaccagtttgtaagagatctagtgaatacacatttttctaaatactgcattccaaatttaattgtatttaacagatacattccaaaggtcctaacaaaaacaaaaccaggaaataaaatgatgggatgaattggctcttctggtggttc

SEQ ID NO: 189814 - DNA, 464 bp, Homo sapiens
gaagtgagtgtcctcgaggtgcagagcgcagtctgagtcggcgcttgacgtctgcggtctgaggacggactagggtctgggcttggggctgggtcctgaagtcggggtctgagtctggagtcgatcttggggtagcattggaggtttggagactggggtccgccttatggcgtcttgggtctctggtattaagtccagggtcctgggtctaaagttctggatggaggtattgggggttgaggtcatgggactggggtcttgggtctggggtcttggggaactgcctctgaccagtcggtagagtcagggtgtgaggtctgggtctccagcctgggttccgcgtcttgagggaggaggacctggaagaaccagggctggagtgaacagactccattagttgagagaggtctgggatgacacaggggctcgggaagccactgcctcacacctccccattctgtggc

SEQ ID NO: 189815 - DNA, 313 bp, Homo sapiens
tgagcaccaaatgttagacattgccccagaactgtattgtagccctgccattgtttcccagtctggggaagacttaagcagaaactaggacttaattctgacattttagttatttctctgtaggggggaggttccagattgagcatctgggcattgggaaaaatctggttagaaatttgggccttcctgcagattgcgttctctgcagccttatggtaccagtcagttgcttttacaattttatttatttaagaaaatttttttgtaaatttttcaagtgcaattttgttacatggatatattgagtagtgga

SEQ ID NO: 189816 - DNA, 388 bp, Homo sapiens
cacaattagcataccaagactcatctgcaagtgaaagccactgtgtaaagtttggaagaggtgattgttctgccaggtgtaaagacattgatgcagaaacaaaaaggaaatacgaaagagcgagacaatatgatatcaacaaagaaacacgataattctccagtaactgaccccaaagaaaaggaaagttatgaatttcctgaaaaggaatttataatggtgtagaaattgaacctatcattgatggacatttgggtgggttccaagtctttgttatggtgaatagtgccacaataaacatacgtgtgcatgcatgttatagtagcatgatttataatcctttgggcatatacccagtaatgggatggctggatgtgtagaaattgaa

SEQ ID NO: 189817 - DNA, 333 bp, Homo sapiens
ttgttgagcccagacaatgatttgagggttggcaaagtgccttgtttactttcctggttaaaagaaggtaaactgcatcatctggtgtgaccagatggaaccaaagtgcctttaagtatgcaggtattgctttacttcaggattaccaacttatgcaactgtagtttcttctttggcaacatgctgattagtaaaaaatacctgggcacttactaatttcatctaattcaaagagaaagtttaggaggtcacaagttgtggactttgcatcttggttatcacaaaattaatgacccaaggcaatgaaggctttgacttcatgtgcagaagata

SEQ ID NO: 189818 - DNA, 792 bp, Homo sapiens
ctacccttgcccctcccagcctctgataatcagtattcttctctctacttccatgagatccactcgtttagctcccacataaatgagaacatgcaggattttcaagaccacatctttatcacaacctgcaatctctgccccatagcccctgttcagcatcatctaatgtaatgattcttgatcttgtgcttccagtgctctagactttctccaattcctgggcatcatcgtgtttcctctgctcctgggcccttgcacacacacctttaggttaacctggccttcctgtctcctctttcctgaggtgctagctcttcagatcttaatttgggtgtcaagtggctttggcaaggcctcaggcaagactttctgacctatttggattagacccaatatttgtagtaaatgctttatagtttcccatatttttaaaatagtatttattacagcctataatcacatagtttatagttatgtagtcattgttacttgattaatgtctccctcctccacaaaggcaaaaacagatccgttcactacttatcccagtgcctaccacagaatcagtgcacaaatctcttttagtatcacataaaaactgtggaccctttcatgagaacaaatgaaaatatagacacatccacagcatttccccccacagttttagggagtttgttccctgacccctagccttttccctttaaaccaggctttaaaactgctgccttgaagattattaataataaaatagctgattaacacacttgtggaattttcaaataattggtcttt

SEQ ID NO: 189819 - DNA, 466 bp, Homo sapiens
tgcagtgagcctgtggtcgatcactgtactccagcctgagtgacagagcaagcctgtctctaaaccaaaaatatttaagaagaaagaagaaagaggaagaggaagaagaagaagaagaagaagaagaagaagaagaagaaaaaaggaaggaaggaaggaaggaaggaaagaaaaagaaagaaagaaagaaagaaagaaagaaagaaagaaagacaaagaaagaaaggaaaaggaggaaaagagagagggagggaggaaggaaggaaaggacggaaggagaggaaaataaaaattgaggatccaatgcttatactgctgaattgttcaaaacatttaaagaggaacttatactaattatttacaaactgttccccaaaaaagtgaaaaggaggaaactcttccatactcattctatgaagacagaattaccttattccaaaatgcgacaagtacagtgatcgaccaa

SEQ ID NO: 189820 - DNA, 796 bp, Homo sapiens
atcaagtaacttcttcataaggcagcaggaaaagagagtacaagcgaaagaggaactgccaaacacttataaacccatcagatgttgtgagaactcaactcactatcatgagaacagcatgaaggaatccgcccgcatgataccatcacctcccaccaggtacctgcctcaacacgtggagattataattccaggtgatatttgggtggggccacagaaccaaaccatatcatagggttttaagtaaatgagtgatattatttgagttagagtagagaaatatcacacttctataaacaattactatatctcaggcactgtatatccaccttaggtccttttcctttaatcttcaccaatgaatgggtacaattattatcacttctcagattagtaaagtgaggcttagggaggaaaagcaacttgtttggagtcacatagtgactatatggcaaatctgaacctcaacccttgtcatctgcctccagttcctggctcaaaatactcattaaaggctcatttttattgccattgtttatgatgtttatttttctaacccttccaagagtgttttgtggattgcattattcttttcttctcaattttataaataaaagagactcgcctcaaaatcacaactgaaggaaaaaaataacaaacttgtagtttcctctaaagaacttcacggacacccagctcagaagaatttggcccggccagggatggggcggggagggaaggactggctgccgcaatgttttgggttcggccatcccatttgtgagaattaggaatg

SEQ ID NO: 189821 - DNA, 519 bp, Homo sapiens
tgcaggagggaagggagaagatatcaaggcacagtaggaagtgggggtgagctcaggtctgatggccatgattttctgagattactaaggaagacaaaatgatagccaacatgaacatttccgaaggctaggggtccgtacgctggagtgagccattctaagataaatgtaggctcggttctttttgtaaatgggactatagcagacatgtactgaaacagggctactgctaaattgttgagacagaatgcatatgtgaactagagaaatatactctgctccaagatatctgtggtttgcagacattgctaagtgattcctatgtcaaaattttaatatagtctcataacagcactttatctggctgaaactgactgcctttttcttcaaatacatgtttgcttagctatatattttgctacataaattagatattaatttgcaaagcacttgagatctaattaattatagtaaatttatttctgctttatctcaacaacagctccaaacaatacccta

SEQ ID NO: 189822 - DNA, 455 bp, Homo sapiens
cagtcacagaatctgatgattaatctacagtggggtcctgaagaaagtatgtgcatttccccatgactaacatgaaattatgggcaagcagatgttaaccacagctacactggtataggataaagctaatacaaacggaagggaggacgactgtggcttccagaggcttgtctgtgctgggtctgatcaggccctggagaaatgactaaaacaggaaaataggggcaggcaacgcagtttttcaagaggcttaaagcatattattttgagccttttctctacttttttacaagccctttctcttacagaacaaaaaaggtgctagagtagttatggtttgattcttgtacccaaattgtctgaaattttactggtgcttgaaatccaagtctgggattaactagtcttcagcactagatgggggcaggttgtatctgtttcatgtttctaaataa

SEQ ID NO: 189823 - DNA, 606 bp, Homo sapiens
tacatccgttaattcttaaagatgctcaaacacaaaataaaatatattttgaatgtagacaagtaggcatcatcaatttttttaccacagaaaaaggtagtattttatatactttttccacataaaagtctacctctgaatttaccttttcactcggcttttcatttttacttgtttttttagttttccatcataagccagtcttctattatatcaatacaaactttataaacttgtttacacttaatttttgtcttattctgccttgaataaaaatagtcatagtggatataaaaagaaaattctaatgatttaatttgatgtcagaaatacataaaaaattgtaaggggataaaaatctcactgcaatagctttctcacctttgcataaaaattatcactttgatttcagacaagtttttacaagctgtggttattaagaggtggatctcaccatgtgagacaaaaaaacacgtgtgtgccaattctaaattaatttccaaatatgaaatacatccgttaattcttaaagatgctcaaacacaaaataaaatatattttgaatgtagacaagtaggcatcatcaatttttttaccacagaaaaa

SEQ ID NO: 189824 - DNA, 401 bp, Homo sapiens
gagtaagctgggattacaggcgcctgccaccacgcccagctaatttttgtattttcaatagagacagggtttcaccatgctgatcagactggtctcaaactcctgacctcaggtgatccacccgcctcggcctcccaaagtgctgggattacaagcatgagccaccccatccagctgcaataatttacacaataatagataggtctaagatgaagactgagtgtttgcatttctaagaagttaccaggtaatgttgatcctgctgatgctggcaccacattttgagaaccactctcctatgaaatctcatcttctcccatggtttgaacaatcatctaccttttcagtgaggcctacagtgactctcctattgaatatttgtgtaaactgattccatccta

SEQ ID NO: 189825 - DNA, 662 bp, Homo sapiens
  misc_feature (464)..(464): n is a, c, g, or t
  misc_feature (469)..(469): n is a, c, g, or t
gtggtatgttggtgggacaggttttctgtgggtgtgtgtattgattacattgtttagttatagggaatgtgcacctgtttttgtcgtgtgttgtgtgttttcagctgggtgtggtggctcacgcctgtaatcccagcactttgggaggccaaggtgggtgaatcgccagaggtcaggagttcgagaccagcctggccaacatggcgaaaccgtgtctctactaaaaatacaaaaatccaccaggtgtggtggcatagatctgtaatcccagctactcgagaggccgaggcaggagaatagcttgaactcagggagtggaggttgcaggtaggtgggtagatgatgtgctgggaatttgtggaaactcccttcttattgcttttattttcctagtgagtgaggggataaggttgtcagctgaggcaggggaatcgtctgaacctgggagacagaggttgtagtangccgngatcgcgccactgcactccagcctgggtgaaaggctgcgactccatctccaaaaaaacccacaaatataacaaaataccacaaaaactacgtatctcacgactggttcccagttgatagacagtcactatctagagacagggtctcactttgtgattcgtactgtctcatactgactgatggcaacattttgc

SEQ ID NO: 189826 - DNA, 366 bp, Homo sapiens
agggttttccactctcattggtagggtggatttcagtggtatgtaatgataatgatttgcttccatgttacaacatgtgaacagcttatttatagatcatgagctgcatccctctttcctctttttgtgcatgtttgctttcaaggagaatatagtgacaaaaattttaatctgccttttagctcaatgctaggttcttggtaatttgttgagcaaattaatgactttcatgtacatttacagataatataagcaaagtatcataatattggcacaaaaaaacattaaggttcaacttaattctgtttttcaaaatatattttaataaaactatacatgtaaacatctgtacttgattttaatcat

SEQ ID NO: 189827 - DNA, 377 bp, Homo sapiens
cctcctcccaacagaaaaggatacattcctcttgagtctaagagcttttagtcccttctaggtcctcaaatgagacctggaacgtcatccttctttaaggcagagatgacctgaaatgtcactgttttgtagggctgaagttcctgtccccgctgctctctgggccactgggccaggctggccaatccaccactgaggaggaaggcaaccaatatctgttgggcacccgccaggcaccaggctttgtgagtgttatcacatttaatcttcacaactcttcaacagggtaactatgagccccctttcacagatgaagaggccaaggctcagagagatgtgatgagaagaaacagagactcggagaatagccaggtggc

SEQ ID NO: 189828 - DNA, 776 bp, Homo sapiens
tcaaagttcgaagtgggatgatcacgggcagacctgggtggttgggaacaggaagcatatggcatcttgcaggctataggcaccacaaaatggaacgcaggaggacaggggcttgggagagccacttcactgtcgggtaaaacaacggagcaagatgagtgcctccggatgcttggtttccccaccctccagtgtctgcttgctcttcaagtacctccaccaagctaatgacagtccactttaggacatcacgggcctcgaggttacaactttcccaggctttgttatttggttctctactgcacagaaatagatagaattctgacagccatcattgttaaacatcaggattttctaagaggacagacttaacagtaacatcatggcctcagcaggactccagctccttgctttcatcctggccttatctggggtctctggagtgctcacagccactctgctgcccaactggaaggtgaatgtggatgtggactccaacatcataacagccattgtacagctgcacgggctctggatggactgtacgtggtacagcactgggatgttcagctgtgccctgaaacactccattctgtccctccccatccacgtgcaggctgcgagagccaccatggtcctggcgtgtgttctgtctgctttggggatctgcacttccacagtaggaatgaaatgtactcgcttaggaggggacagagaaaccaagagccatgcttcctttgctggaggagtctgtttcatgtctgcaggaatctcta

SEQ ID NO: 189829 - DNA, 532 bp, Homo sapiens
ttcgctcaatcctggttttgccttttttccttaggctttgttatttggttctctactgcacagaaatagatagaattctgacagccatcattgttaaacatcaggattttctaagaggacagacttaacagtaacatcatggcctcagcaggactccagctccttgctttcatcctggccttatctggggtctctggagtgctcacagccactctgctgcccaactggaaggtgaatgtggatgtggactccaacatcataacagccattgtacagctgcacgggctctggatggactgtacgtggtacagcactgggatgttcagctgtgccctgaaacactccattctgtccctccccatccacgtgcaggctgcgagagccaccatggtcctggcgtgtgttctgtctgctttggggatctgcacttccacagtaggaatgaaatgtactcgcttaggaggggacagagaaaccaagagccatgcttcctttgctggaggagtctgtttcatgtctgcaggaatctcta

SEQ ID NO: 189830 - DNA, 208 bp, Homo sapiens
tttcttttagggcaagatctaaggaacctgaattaacataagatcattttctagtcccaaacttgtaaatatggtttaattttcccaagtacattttgatagagcaatgtaagaaatattatagatggatctaaataattgactttccaaaattaaagacccttattcatcaagctttttgctcttgaaaggaactgggtttcagaca

SEQ ID NO: 189831 - DNA, 350 bp, Homo sapiens
tggtgtacccctgtaatctaagctactcaggagactgaggtgggagaatcacctgagcccagggtgttgaggttgcagtgagccatgatctcacaactgcactctagcctgggtgacagagtgagaccctgtctctaaaaaaattaaaaattaaattaaattaaaaagaaaagagaagattggactttccggcattctaggcaggttgtgacttggaatcaaagtaatgtgaatattaatgaatatgatgttattttgtcctgatagaatggcaatctctgcactctctggttatacctctttaaattcaaccaagtgctatgtctatattttttagtaattttttaata

SEQ ID NO: 189832 - DNA, 696 bp, Homo sapiens
cagcccacctgcacccaggtgaaataaacagccatgttgctcacacaaagcctgtttggtggtctcttcacacagatgtgcatgaaatttggtgtggtgactcggatcgggggacctgcctcaggaaatcaatcccctgtcctcctgctctttgctccgtgagaaagatccacctacgacctcaggtcctcagaccgactagcccaagaaacatctcaccaatttcaaatctgccactcccagagcccgtggaactctggcccaaggctctctgactgactccttcttggcttagcggctgaagactgacactgcccgatcgcctcagaaaccccgtagaccatcacggacgccgagctttagttaactctcacagtggaggaatctaatttgaagcactgagaaggataaggcatccatttgaaaaggactcctatattgcaacatgaattctgctaaaattgaagcaagaacaaacatcaaatttatgatgaagtttgggtagaagaacgatgaaattagtgacgctttataaaaagtttattgggacaataccccaaatgaatcagcagtttaaaaatggataacttattttaagaagaaacaagatgatgttgaagatgaagcctgcaacggcagaccatctacatcaatttggaaggaaaaaattaatcttgttcatgccctaacggagga

SEQ ID NO: 189833 - DNA, 839 bp, Homo sapiens
cagcccacctgcacccaggtgaaataaacagccatgttgctcacacaaagcctgtttggtggtctcttcacacagatgtgcatgaaatttggtgtggtgactcggatcgggggacctgcctcaggaaatcaatcccctgtcctcctgctctttgctccgtgagaaagatccacctacgacctcaggtcctcagaccgactagcccaagaaacatctcaccaatttcaaatctgccactcccagagcccgtggaactctggcccaaggctctctgactgactccttcttggcttagcggctgaagactgacactgcccgatcgcctcagaaaccccgtagaccatcacggacgccgagctttagttaactctcacagtggaggaccttgcaagagggtccgagacatttgcatcatcattcagtgagacctgtaaacacagcatctgcctttgaccacatccatctggaagaacctgagagataatccattttatgaaattttccctaccctgaaatgggagaatgaatctaatttgaagcactgagaaggataaggcatccatttgaaaaggactcctatattgcaacatgaattctgctaaaattgaagcaagaacaaacatcaaatttatgatgaagtttgggtagaagaacgatgaaattagtgacgctttataaaaagtttattgggacaataccccaaatgaatcagcagtttaaaaatggataacttattttaagaagaaacaagatgatgttgaagatgaagcctgcaacggcagaccatctacatcaatttggaaggaaaaaattaatcttgttcatgccctaacggagga

SEQ ID NO: 189834 - DNA, 690 bp, Homo sapiens
cagcccacctgcacccaggtgaaataaacagccatgttgctcacacaaagcctgtttggtggtctcttcacacagatgtgcatgaaatttggtgtggtgactcggatcgggggacctgcctcaggaaatcaatcccctgtcctcctgctctttgctccgtgagaaagatccacctacgacctcaggtcctcagaccgactagcccaagaaacatctcaccaatttcaaatctgaccttgcaagagggtccgagacatttgcatcatcattcagtgagacctgtaaacacagcatctgcctttgaccacatccatctggaagaacctgagagataatccattttatgaaattttccctaccctgaaatgggagaatgaatctaatttgaagcactgagaaggataaggcatccatttgaaaaggactcctatattgcaacatgaattctgctaaaattgaagcaagaacaaacatcaaatttatgatgaagtttgggtagaagaacgatgaaattagtgacgctttataaaaagtttattgggacaataccccaaatgaatcagcagtttaaaaatggataacttattttaagaagaaacaagatgatgttgaagatgaagcctgcaacggcagaccatctacatcaatttggaaggaaaaaattaatcttgttcatgccctaacggagga

SEQ ID NO: 189835 - DNA, 137 bp, Homo sapiens
cttttattattatcgcatatatattaaatggcttctagtgtttatgattttattgtagctttttaagatctcatcacactgccatcttaagcaaaacttctaagaaaatcgacttgaacattttcatttttatttta

SEQ ID NO: 189836 - DNA, 247 bp, Homo sapiens
cttttaccttcatgaggaactctttggaccataaactccttctgccttcactcacatatgagaattgctgaacactgagaacttgccaggttctaggcttctggctgggcactgaggggtggcagggggatgaaaaatgcaacatgtagctttcagggggcacttagtctgctgagagacagataagaaaacaaagacagtaagttgcagggatgagggcttggacttgggttaggaggggatctct

SEQ ID NO: 189837 - DNA, 149 bp, Homo sapiens
tattgatattttgggctggataattgtgtgggacttggtgttgcaggatgtttagcagcatccatgggctctacccgttagatatcagtagcattcccccagtagtgactatcagatatgtctccagacatttgtgtgtgttttttttt

SEQ ID NO: 189838 - DNA, 373 bp, Homo sapiens
aatgactctttcatttgggagtgtatgctcttagagtgaggtctgcctttgcattttgaggcattggagcagcaccaagctcctactaaatgagttctgaagcaggtccccaggctgacatgtgtactttgggctggtgatcactatggtgagagggtatttctttttttgcaaacctctccatcctattactgtcattctgtctcctatggtcatagtccaagggtgcttaggaagctgatttctttacctcatcgacttccacccattagcggtgctaaggaaaacaaatgggattgaaaaggcaagttgccagatacataaaaataatctgggtgaggaccaagagtgagactgtctgtattcagcctgt

SEQ ID NO: 189839 - DNA, 809 bp, Homo sapiens
acttctcctttggatgtccccctgttagaaggcagtcaaggccaagttaattataccagtagtgctgaaatgaacatttgggcctaaacctttgtccacatttctgcttaggatagatttcccggagatgaattaagggtcaaaggtcaagggcattcttaagactcttgacccacgttaccaaactgctttcagaaagtttgcacaaattttcataatcaccagcaggagttaagaggtccagcttgactgaatccatgctaatattgacatcagtttgattttcaaaatttcatctttgctgtagtgaagtcaaggaaaaaaatactatctctgaatggttctaatgtgcatttcttttatttttagtcaagccgtatatagttcatgtgtactttttacaaatgaattttcaggccgaactgttcaaccaccaattagaaacagataaaggaatctcattggtgttatatttccagaacacatgcattaactagttagatacctgtgggctgggagtctggccaacacttgtcaaaagctttaaagagaaatcattctgagatccaaacaatggattcaccaacacactttcagaacttacagtagtggttgccagttcctgggttctgatccttgctgcttgccatcttgcaagtcatttatattttgttcatatgtaaaatggggtggttagcctatgtaaccctatacgctcttaaaaaacaaaaagaggtatttgtgccccttggccttgactgttctcacaggggccacgagagcttctgaaggacacgttggggctgtga

SEQ ID NO: 189840 - DNA, 330 bp, Homo sapiens
tttcttcttaacgtttcaccccatttcattcagacctgttttttgtcagagctgtgcctattgttagagaaacttaactcggagaggttttaataatatactgattacaggagcagaaggttttttggaagctactccagaagttaggggtgtttagccccagccccaggtatactaagagcaggacttgatggttggggtttttatctccatctgccccaggatttctgtgaatgcattagcccaaagcagtcagaactttgtggcagtcctgaccagaccacttaaactattctgtgcctcactttctccagctgcgaaatgagtaaa

SEQ ID NO: 189841 - DNA, 692 bp, Homo sapiens
aaaggattatgaaagtaccatggatagacacttaggataggaggtggtgagagtgttggtagttatctgagaaaattttatagaggaaataatatttgagaactgtgagttaggaagaagatacacttattaactagaatagccttatagaagcctataggcataaaagcaaatttgaattgagaggactctaagtagattgttattccacagatatttctatattctaggcactaagctagacactgttgatacactggttaacgttatagagatcctcccctcaaagagctagatgaataacacatacagatacttaagcaatgtgacaagtgctaaaataggaaatgtaaagggcacagcaaacaggattacagaggataagccctaagtgtatttttcttaagttttcaaaattagttttcagataaagtggtcttgaaggtgagtgtggggaacgagaagtggggttatttcctgcaaaggaaacagcttgtgcaatgatgctgaagatgatgtatagcctattcagggactctccagcagttttagtggagctgacatacaaaatgcttctttatgtgtgttggttttggttgttcttttcacgtgcttcgttttacagggagttgacaagagatgaggaagcaggtactacattatgaatgatatcctcagccatactgggggag

SEQ ID NO: 189842 - DNA, 541 bp, Homo sapiens
aacctccacctcccaggttccagcaattctcctgcctcagcctcccaagtagctgggattacaggcacgcaccaccacacctggctaattttggtatttttagtagaaacagggattcgtcatgttggccaggctggtctcgaactcctaacctcaggtgatccatctgtctcggcccaccaaagtgctgggattacaggcatgagccaccgcgcctggccaagttaatggttttgagatgagattatcctggactacctggtaagccatatatgctgtcacaagtgtccttataaattagaggcagagggaggttgcacacagaagaggagaaggcaaaatcactccagaggcagagattggagtgatgcagccacaagccaaggaatgctggcagcctccagaagccaggagaggcaatgaatggctcccccgagcctccagaaggcaggcagtccttccgctcctttgactccagcccagtgaaactgattttagactctggcctccagagcagcaagagaataaatgtgtttgaagg

SEQ ID NO: 189843 - DNA, 468 bp, Homo sapiens
tctcttgaataattagaaatggaatggatgaatcgtatggcatcttcacatttactttgaaagaaactgcccaattgtcttccaaagtagttgatccattacacattcctatcgtcagtgtatgagagttccagatgatcctccattcttgtcaccatgtgactaatcctattcattacaaccattttaactggaataaaagttgtatctcattatagttttgatttgcatttctctgatgatcaacgatattgagcaccttttcatatgcctgcttgccattagtatgccttcttttgagaaatgtctattgaaatcttttgtgaaaggctttatttttttcctgcgcttttgaagttattcactgagggtaacatttaattttggggaggctctgatttctcagcaattgtcatgcatagtctgaaattccaacagaatgagaaaagccagtctacaaataatttc

SEQ ID NO: 189844 - DNA, 333 bp, Homo sapiens
ccaggttcaagtgattctcctgccctagcttcctgagtagctgagactacaggtgtgtgctaccatgcccagctaagttttatatttttagtcacgatggggtttcaccatattggccaagctggtcttgaactcctgacctcaagtgatctgcccaccttggcctcccagagtgctgggattataggtgtgagccactgcacccagctttcaaattcttttatgtcgtctttaatttctttcaatgttgttttgttgttttcagtgtacaggttttgcacatgtatgccatttttcttgctaatgtaaatggtgttttattgtcaatatata

SEQ ID NO: 189845 - DNA, 609 bp, Homo sapiens
  misc_feature (99)..(99): n is a, c, g, or t
  misc_feature (108)..(108): n is a, c, g, or t
ccaagctggtttcaaagtgctgggattacaggcgtgaaccaccgtgcccggcccctgaatcctatttttaagtataaaaagtcttttttcaagttggcncaaaatacnacattttcctgctgagcaatttagtctaggttaagtcatacttgaccatatgccctagtttagcgtccagtttgtgaacattctttacctgagttattgtaattctaatctcttatgtaaaactgcaggtagtcagccctttgtctccttcagttctacatctgcggattccttcaactacagattaagaatatttggggggaaaaacagtaaaaaaaaattacaatacaacaataaagacaacaaatttaaaaactagtataacaactttttatacagcatttgtattgggtattgtaagctagagatggctgaaagtctatgagacgatgtgcatacgttatatgcaagcgctgccattttattgcagagacttgagcatccaaggattttgtatccgtgggagtcctggaaccaatcccccttggatactgagggatgactgtatttacaacatgtctagattttcgacaacttgaattaaaccagaaagaatatgaa

SEQ ID NO: 189846 - DNA, 428 bp, Homo sapiens
gctctagagtatctccgaggagatgtggagaagagagctagtgatggtggcatcatcatagatgtggagaatgtatagtatgttgtttttagattaagagttttgtaggactgtttgtccaagtgttgagtttagatcctgagttatttgtaaattttctgccctattcttcatagccgaatacacaaacattattataataaacaccctctccactacaatcttcctaggaacaacatatgacgcactctcccctgaactctacacaacatatgttgtcaccaagaccctacttctaacctccctgttcttatgaattcgaacagcatacccccgattccgctacgaccaactcatacacctcctatgaaaaaacttcctaccactcaccctagcattacttatatgatatgtctccacagggtacc

SEQ ID NO: 189847 - DNA, 214 bp, Homo sapiens
cccaccacttcgagtttctaataaaatatgcctattctgacctgtcagctttccatggaaaaaactaaaaggtgagggaaggcagaataatctatagagacattctgggcacattttttcacttacactgaagagctggaggaaaatggaaactctccagcaaaggctatacaaagtacgtggttttacacaaagcgttacacaagtacatgga

SEQ ID NO: 189848 - DNA, 407 bp, Homo sapiens
ctgcagagctgtagttggctttaaaaagaaatcaaatatattatttctcttaattattcaattcacttatataagaatttaagaactcagcataatactcactcccagctgttcctaggttgtcccaaatggttgtacactggggaagggactacccaccctgtccaagtcagaggttttatgttaaattctaatggtcttctgaatgcattttgtaatacttcttcaataaactaaaaacaaagaaccatagaactacacaagcaatatagccacatctctgaaaacttacaatactgagaaaaaaaaaatcactcaattcacattccacagttgtgttcccatcctttcagccacctctcttccttccataataaatgaggcctgaagaagcctgtgaacattaa

SEQ ID NO: 189849 - DNA, 133 bp, Homo sapiens
ttatatattctttaatttatttcattagacttttatagttttcctcatatagattttgcacatattttattagatttatacccatgtatttcatttttaattggagctaatgtaaatagtgttgtgttgaaat

SEQ ID NO: 189850 - DNA, 348 bp, Homo sapiens
ctgacagctaacatttttggagctctgagtacctgtcaggtgctgtgcaaaacactgacttaaatgattcctggtctcaatccaatgggagaggagccagcgttatccccattttataaaaaatgataaaactgtgtgccgggtttgaactgttcctggatcacaaagctagaaagtggtagagactgggttggaactccactgattccagagccagaggaggcatctgaataatcagactaagccaacttctcagcagaaaaatcccttcactcagcagccaagtatccctgattccggtgctggccccgcatctcacgggatgtgtggccttgggcaagccccgcc

SEQ ID NO: 189851 - DNA, 551 bp, Homo sapiens
agtgatctgaatcagtattgtgggctccgctcctactcaagtgtggctgcagatcttggcttggcactcccaggctgcagccctggggtgagctaaggctttatgttctctcccagcttggaggcagcaggggaagggaccttggcagtggctatggcagagggcctttcccttgtctctggggtccaccccagtagaaatagcagaactgctgccagtcggtgtgattggctttgagtaggacagctgcgttgtgggctcaagctggggggatcctgggggagacagactgacctcttcttagggccgtggcagcttgctggaggtgtggttaaagcactctgggtctttgctcctttcctagtacaagggtagcaagggcagtaccactgcagtggcagtggcagaggggctttcggttgcctctgggagctccactgcagaaacacagatccgttgctactgggatgttcagccagggggtggggcagctgtgctgctggcctgagccgggagccccaccgggtgaaaggtggggtgccgagggctca

SEQ ID NO: 189852 - DNA, 146 bp, Homo sapiens
gaggtgggagggaacacagctatccttggacacacatggtcttcttgcttcagctctgacctctgatgccccccaacccagcctggattccctgccagggccccccggctctgtcctggtggaatctgccatcttgcccagctctt

SEQ ID NO: 189853 - DNA, 415 bp, Homo sapiens
acctcctaccccacgctgtttggcaaagggccagtagagaacagtgtgttcccccttgcacactttctcacccaccttccacctcacacactccacctttccctgaagctgcctccaaaagcctaggtttatgtctccttcaacagctctgacagagtctggttgacccaagccatgtgggtaattggtgggggcagacagccatgctacccatcccctcaacaccctggaagatgagcaggcagcagacaggtgggggctacactgggctcctcctcccaggcaggcccatgtgagaggtttcacaaagtgacctagaggcacttaggaagcccagggccttcttccacatcactgcccacggggaactgctctgagttgctaggcctaaatctgcttcagaaaaagcatggct

SEQ ID NO: 189854 - DNA, 1050 bp, Homo sapiens
atgctaaggtagagattacatgatgcatagtctcgcttatttttgtagaatcaggaaatcaaggattggcgtggcattgctttgacaagtacttgctgttgtcttcacagaggtctcactgaagaataatctcaaaggaacatttggtctccctatacatctgttaatgcccattagccactagcaaatgcttttaattaccaggaaaacatcaaccactttgggtttggcctgctccagggagcccaatgaaggtttcttccagttgtttccatagctctattgctgaagcacccctcttggttgggtgaatgttcatgaagccatttctggaaccagcttaggaggctaaggcctcctggagcctgtgacatggaagctttggaagtggatgatatcagcccagccttagaagttacggaggaattctttagtactttggatagtaatctagaaaaggctgtgcagcaggcagaggtttatgggatccaggaagtccctgaactggtggggcatgaggtactcagtaacataacagacaatggtgctatgagaaatgtcacctccctgggcaaggggggcatgatttgggaccactgtaagagcaggctcttagaaaccaaagctcaaaatgtcttccctgccaaagaacagtttatggtccagagagggacaaccccagataatctttcctggatggaacaaaaggaagcatcaacctttaatttcttcaatatctgtcagcgtcggagggaccggcctcgttctgtaaatgacttactggatgagacctcaactttcaagccagggcatgctcgatcacgatcagatattacccaagtggactggagggtagtcctcaaaaccacgcctttgcagcagcagcaacagcagcagccattgcttcaaggcccgcatgtcaccaggccatcttttctgttgccctcaccaaataagatagaagatgctcaaggaaatactgaacacaagcagacattcccaaacattctaaagaagggttacctggagattagaaaggaccatgacagt

SEQ ID NO: 189855 - DNA, 808 bp, Homo sapiens
attccatttattaatggaaattctccagttttgtcttctaagtctttgcatatattaatcagctattcattttttccaactttatttcttttaaccttttagaaatacaccttataaagccctactccttaaacttttccacttgtatcttgtaagaacaaggacatttttctaaaataaactaaaatgttgtcactctcaagaaatttgacattgatatgatggtattatcagtctgtattcaaattttcctaattgctctagttatagatttcaagctttctaaaattttattttctctaatctaggatccttcaagggtaatgcttttcttttggttgttatgtctctagttacctgggtatttttttttcttttatgatgatgatattaaaaaacaaatccaagacaggtacggtggtgcacacctgtagccccagctacacaggaggctgaggtgggagggttgcttgagcccaggaggccagactgggcaaccatgtcaagaccctgtccctttaaaacatatacacacagctgggtgcggtggctaacgcctataatcccagcactttgggaggccgaggtgggcggatcatgaggtcaggagttcaagaccagcctggccaatatggtgaaacccccgtctctattaaaaatacaaaaattagccgggtgtggtggcaggcgcctggagtcccagctactcgggaggctgaggcaggagaatcacttgaatccgggaggcggtgattacagtgagctgagatcacaccactgcattcctgcctgggtgacagaaggagat

SEQ ID NO: 189856 - DNA, 765 bp, Homo sapiens
attccatttattaatggaaattctccagttttgtcttctaagtctttgcatatattaatcagctattcattttttccaactttatttcttttaaccttttagaaatacaccttataaagccctactccttaaacttttccacttgtatcttgtaagaacaaggacatttttctaaaataaactaaaatgttgtcactctcaagaaatttgacattgatatgatggtattatcagtctgtattcaaattttcctaattgctctagttatagatttcaagctttctaaaattttattttctctaatctaggatccttcaagggtaatgcttttcttttggttgttatgtctctagttacctgggtatttttttttcttttatgatgatgatattaaaaaacaaatccaagacaggtacggtggtgcacacctgtagccccagctacacaggaggctgaggtgggagggttgcttgagcccaggaggccagactgggcaaccatgtcaagaccctgtccctttaaaacatatacacacagctgggtgcggtggctaacgcctataatcccagcactttgggaggccgaggtgggcggatcatgaggtcaggagttcaagaccagcctggccaatatggtgaaacccccgtctctattaaaatgcaaattgcggtgtgtgggggctgggtccagtggtcggaggtgagaggaaatcatggatcggaggggatacggagtggatgacatgtctgctggtgaaagatttcc

SEQ ID NO: 189857 - DNA, 157 bp, Homo sapiens
gggaaagtcattgacttagcagagaaagagcaggtttcaagaactggggatttttctgtcatcttggttttgaattcgtagcctaaaatgtgtattacctctgggtataatattctccctgttcacgaggaggtgaccaaaggagaatctggagcag

SEQ ID NO: 189858 - DNA, 237 bp, Homo sapiens
gattttcaactgcacgtgggggtggttcccctaatccctactatggtcaaaagtcaactgtgtaagcaaaaaatgttgcatacaattttagggagttaactgtgagtattaaacttacccatgaagatatgtgattaaattgttaattcactccaactgctcttacaagacttccaaggtaatgctgtgtaatgtattcatcacagtaatgaagtacttttcaaagtgactctgact

SEQ ID NO: 189859 - DNA, 690 bp, Homo sapiens
cctaattgtgagattcctaataaatggcaagacatgttctgaaaacgtgaaacataaatgaggctgaagaaattgtgaaaagtttagcagaggaggaatagttcgtcaggttctttaaatacaagtaaaggggaaaggaaggaaccatttttaagtttagatattccaagggttagtggtgaggttgattatggtatgtcttctcgttgatgagggaggagactggtgaatagtggaaaataaagttaaatggctagggtggggccaaattatgggctttaataaaagccaggcatagaaatttagattgggatggtagaaaaaggaaagctttaaaagtttttgagccaatgaatgacatcatacaagttctatgagcaatgatttcaggatgggagagaatggcatcaggaagacccacttgaatgctggtaagtaatgttaccaacagtgccattagtaacattaatgttactagggcctggactgatatgctgatggaagtgagaatgaaagagattaactaagcctgcttgccatggacagcaatggggttgctagaagattagctgtggggaaaaagttatgcatttacctttgggcataattaaatgcaattgactctccatattcatgggttctgcatccactgattcaaacaactgtggaacaaaattgtcagaaaaaaca

SEQ ID NO: 189860 - DNA, 477 bp, Homo sapiens
aatgatccagtaataaaaacgtagtaaagctaaagttgctgcaagtgagagaacatttatgaatgagatttgtctcactgcactaacatcagtaagtgaatcattccacctcccactagccagaaattcctcccgtcagatctgcaggattcaccatccaacagtttttatatccagttgggaaacaggaagacgggtcccctatagtggatgttaaaataaacaaggtctggaagcatgaggaacctcttgtagctctaagaagctgagacagagaaggaagtgcctgagcaccccgtgcagcatttttatacgttgccttgatatataagtcaaactcaatttacaaattatgacatgaatgctaatacccatttctacacaaagatgcaacactcttttctgtttttttttaagagtttatattgctattcactacagatgagaagacaggaaccgagaaaataaaatgtcatg

SEQ ID NO: 189861 - DNA, 404 bp, Homo sapiens
ctggcatactagccccaggaaaattttttcataattttagagacatatcttggccagagaaaatatttaactctttatacttctttctatatacatttcattcattttgacctttaataactaattcactatcaacatttaaaatctagaaaactactattttttaaattgggtacttttcactctaatacacgctaactaacatgtaacaagaaagcaacattttcagatgggtattaatacaattgccttcaatttgtatgtttttaagtgctagttaatcgttaaggctataaactaatggtctaataattgcaacttatcaaaacttacttgtatctgatggctctttttcttaaagctcttttttttttgagacagtattgctctgttgcaaaggctgg

SEQ ID NO: 189862 - DNA, 353 bp, Homo sapiens
ccaggaggcgcaggttgcagtgagtcgagattgtgccgctgcactccagcctgggcaacagggtgagaacttgtctcaaaaaagaaagaaagaaaagtcacttataattatgtgggctttaaaaaacctgactgatagtgctctgtttttagtttcaccaaaagataggtagtacttccatcctctttcatgaaactacagtatgtctattctcaatgtttcaaaaccttgtaagactcagagggaagaaatagtttctcattaagaaaaatttagtcaacagtataattatgtattaagtgcttcaggaaaagcaatgggggaaagtatttcctacagtattaggtctctca

SEQ ID NO: 189863 - DNA, 164 bp, Homo sapiens
ctgtttcaggctgtttgctcagttacaaaatgggaaggaaggacaacagcacccacctcacaggctaagcgtctaagaggctgtgtgtgaaaagcccacagcacagggtctggcacgcgtggacgtgcgggatgggaggaggggatttcccagctcctaatctc

SEQ ID NO: 189864 - DNA, 197 bp, Homo sapiens
ctggtgagctcgcctcgtccatttacattacctgtctgagttttgtaggcatctaagtttgcaacctgttatttagaccatggactctcaaagcccagtctgcacaacaagatttgccctgtccagaccttagaggcctgtcttccagtagacaccagttgcattgacaccattgttgattcctcaaatcctgccct

SEQ ID NO: 189865 - DNA, 341 bp, Homo sapiens
cattacattataaataaattaaccacagatttcattcaaatagatagtgatgagcacaggtatttttaaagcctatttcatctacatgagaatttcttaaaagggtttccttgattagaatccttaaaactgtcaaaagaatatgattaaacttacatttcgctcatgaggcatgttttaagttatatctgtaaatggccacgtttttctccttatcaacaacttgataatgatcaaataaaaatgagagataaagaatgcctttattcattcactgaacaaatctttactgaatgcctactatgtgccaaaaattattctatggggtagctgcaaatttc

SEQ ID NO: 189866 - DNA, 408 bp, Homo sapiens
tcgagctcgcgtaccatatggttggacgaatcccaaaaccctttcggctcttcctgtctctgcttctgacctctgggcggtgttcagccccctgcctttctccctctgtgctggtgaagctggttcttagttagggctcttggtccccctgtcatccgactccaggccctcttaccaacagaggcctcactgaccccagtgacacatcgtggggaggtgcgtcgtcctccgttaggtcaaggttaagaattagccaggcttctcttctgagccttttatgggctggccattcataaatttgcccaaaccctcagtggtcctgccaaggtcaccttctggcgtaatgagtccatgtttgttacctgccgggtgaggccatgcttccttctcagtggcagcctcgtccac

SEQ ID NO: 189867 - DNA, 322 bp, Homo sapiens
tgaaacagtacacccatataatcctttcttatttattagtagttgagaatagactttgaagtacttcagcaaaaacactttctttttagtattactaccacaaagatgtgatctctttgtaaagctgtgttctcttatttttaaaaagtggaaagttgggataactttctaatttccatggagcagaattagataaagtagaaaaatctaaaaataaatacaggaatgtctaaaggtaatctatattcattatctagggagatgctggagaaagcaaagacaaattcaacaaaacattttagcagaaaccttattttagaat

SEQ ID NO: 189868 - DNA, 568 bp, Homo sapiens
ttggcctcaaacagctctcccgcctcaacctctcgagtcactgggattacagatgtgagccaccatgcccagttggatgctctaaacattaaattctaagcaaagagatgatgaggctgggcttggatcaggatttgagcagttcatgtgatcagacttgatacattttgaaggctttggtgatgcattgattgtggaatgtgagaaaaggaaagacagagcaaatgttagactatagttaccatccatttactgccatggtgaagactgcaagaggagagagtttgaaggagtagagatacacgtgctattttcttgctgaaatctgtctcatgctagattttaattcttcagtagttagcaggtaagagagttgcttcctaactctggaaatttgctactgtggaaagaaaattgagttgggatccctaaggtgaaattttaagacctgactctctcactttcagagacttggccagatcacttcacttttttgagcctcttcaggctctgtttctttaatcataaaataaattgcttggcccaggttgtctctaatgtttcttca

SEQ ID NO: 189869 - DNA, 157 bp, Homo sapiens
tgctatttgaggctgctagggacatcagtgagttgactttctcttcaggaaaaagaaaatgagagcgagagaaagagagtgcactacaaaactcttattagcactgaaaccttggaatctttccaagtgacaagagtagggacattccaaatatcaa

SEQ ID NO: 189870 - DNA, 211 bp, Homo sapiens
ctcatgtgatccacccaccttggcctcccaaagtgctgggattacagccaccgtgcccagctgcctgcatcttttaaaagaacaaagaaattatttccagaaggtctccaacagattttgccttaattcttatggttagaacatcatttattatgtgcttatttccaaagcagtcgagggaactggaattacaataataggcttaacaaat

SEQ ID NO: 189871 - DNA, 558 bp, Homo sapiens
gtggaggacggatttgctctaaagctctttagaaggagaaagagaagcattctgcaggaaccctagaaatgaaacgcaaccagcaagctgccatttgtccagagaagctcacactccctgggaaatggaatattgggtctcaacctgaagagtagctggacagagacaggaattcacaaataaaagctttaaaagataatgcggtctacttgcttcctaccttgcccacgggaagtataggtttgccctatcttttgactcctaatgtcaaggctcagtacccctgaaatatctagggcctaattaggctgccatgaagaagttctaaaggaggagctctccaagcagctccagctcctctccaccatccaggaaatagggggctggcagtggcaggagcaagataagccactgcctttagactgaactgtgccaaggataacgtgtttatgagaacctctttaaaactcagaaatcggccaggcacggtggctcacgcctgtaatcccagcactctgggaggccgaggcaggcggatcacggtcaggagatcgagac

SEQ ID NO: 189872 - DNA, 113 bp, Homo sapiens
agaagtcaggaaagacttagagaagataaggatgagtgagaaagtgtgacttccctttctcctgggtaattcctcttttagtgttagggtgcctggagaaggtcttctgtaaa

SEQ ID NO: 189873 - DNA, 519 bp, Homo sapiens
aatttttgtatttttagtagagatggggtttcaccatgttggccgggctggtctcaaacacctgatcttaggtgatccacctgcctctgcctcccaaagtgctgggattacgggcgtgagccaccatgccctgccttggttttgttttgttttgttttgttttgtttttttcaagagatgaggtctcacttgcccaggctggtctcaaagtttcgaactactggattcaagtaattctcccaccctcgcatcccaaagtgctgggatctgtgatctgtggcatgagccatcgtgcctggtcttaccttaccttttagctactatgattcatgttgctgtgaacactaatgtacataatggtctttatgtgtggatgtatattttcccttctcttggccacatacctaggaagggaattgctgggtcatatggtaattctatatttaacattttgaggaactgccaagctactttccaaagcagctgcacccttttacacttccaccggcaatgtggcaa

SEQ ID NO: 189874 - DNA, 325 bp, Homo sapiens
ttgatagattagtccaatgtatgacatgagcaagagagggaagtgaagggaagtgtgtggcacttacttgccatctctggcccagctttttacattgcttagtgtatgttcatttggaaggtgggatgcacgatgggcgagcacactccaaccagaagtgaagggatggatcatagctgcccacactgtgcccttgactagaataatctcaggcaagcaaggatgtaggagccattccagcttcctccccggagctctgccggcagaccatgcctttgttttgggacagcaactcttatcatttgccctcatgtaaaagttctag

SEQ ID NO: 189875 - DNA, 489 bp, Homo sapiens
gtttgaaaagtttttaagcaattagaataaaaatctttgctgtgacaagtaaggtcgactagggcaagtttgtattacaggtcactcctagtgctttgttgcctgcttccgatttgccagtgagaaacagagtatccttcttatgctatttaatagtgatattacaaacagcagcaacatcaaaaaagaatgtgtcaggcacataatgaataataatgctgatagcaggcatgcgttgtgcatattattgttaatcttcacactagcctttcaaagtggttactgtatttctgatgagaaaatgaagccttgttcagtaactctagaatcacttagctgataagtggtcaatctgggattcaaatccatatctatttggcttgaaaagttgggtgttcttgtcactaaatttgggaatgagcaggcaaaaagaaacacatggaaggaatcatctcgtttgagggattcagtactctcttagcagtacag

SEQ ID NO: 189876 - DNA, 331 bp, Homo sapiens
ctgaagggcctggggaagattgcgtcttcgtgcagcttgatttggttcagccttctcttagcaaattccctttctgggtggccgactcacatttctgacaatctgagctgctcatggttgcttaggagatggataatgcattcctttagctaagtcacttgggaaacatttagcaccacttgtacatgggcgatcacatgtctcttagggcattgatacttctgacaagtttcttgaggcttctcctatccctggcttctacaatgcagccaggaacagcaaatgccatttggctcacttaatagcaaggcatctgtaggactgcgcctgt

SEQ ID NO: 189877 - DNA, 454 bp, Homo sapiens
tactggctacaccctaaactctggatgaaggagatgttgtatagttagcatgaacctctctgtttacatccagggtggagaacgtccctacagatgtgggtcataaccagggggataggttgtgagagatcctctttttcattgaaatgtaactgcatacctattatatttggcagtagcattctaaaagtaccaacaaatacagtttcaatagtcaaagtgagaagtggacaagccagttctccttcacactaactttgagccaatctatgtaagaaggtacatacttacaaatacaataagctgtcacttaatgtcattgataagttcttggaagctgtaagcaaaatgatatataatgataacaattttaccataggctaattgatataaaattggcataaataagaattaagttcctatgagatatttctggttgcaaaaacatcaccaa

SEQ ID NO: 189878 - DNA, 648 bp, Homo sapiens
ttaaaatttaacttgtgtctagagtttcaaagcaaactttatgaactgcataaatctgggaaatagagaaaatacagccaaaggctattgaaaactatgctctttgacatttggtggttatggacacctttgagaatatgatgaaaaactgtcaacccttttctaaggaaagggcacattagcttatctacacaaagttttgcatacattttcaatacactttcagagaatccgtgtaccttgctgcttgccccaccttccactgttaagaatacttggctttatttttaaatttttaaatttttttattttattgagacagagtcttgctctgttgcccaggctgtggtcagtggtgtgatcttggctcgttgcaacctccgcttcccaggttcaagcaattctcccacctcagccttccaagtagctgggactacagacatgcaccatcacgcccggctaattttgtatttttagtagagatggggtttcaccatgttggccaggctggtcttgaactcctgacctcaagcagtctgccaaccttggcctcctcaagtgctgggattataggcatgagctaccactcccggccaagaatacttggctttaggtataaaaaatataaatatgtaagtgtgtgtgagt

SEQ ID NO: 189879 - DNA, 395 bp, Homo sapiens
agactggtcttcctgtaacagtaactttcctttcttttctatacacaatctgagaacttagtgtatgatataaagtcataattacagatgtcctcttaaaggatgacatttaaagccaggtgtggtagctcatgcctgtaaacccataattttgggaggccaaggttacccaccttgggtaaccttgggtagatcacttgaggctaggcatttgagaccaagctggccaacatggcaaaaccccatctgtagtaaaaaatacaaaaattagccgggtgtggtggcgtgtgcctgtggtccaagctactcaggaggctgaggtgggaggatcacttaaagatgggaggcagaggttgcagttatcgtgccactgcactctagcctgggtgacaaag

SEQ ID NO: 189880 - DNA, 322 bp, Homo sapiens
aagacctgacgggtgttcagggccttctactgcagcagacacgcctgtgctgtggtggtcggtgatgagcaagagccctgctcccctcctccgggcagtgagaagaaccaagccagcacccaccctgcccagcagtgtggctggggctatcccgctgcggagagtgggactgttgttctgggttggtgagagtggtgctggtgggccctgagccttgccccactgcttccctctgaccaacaccacatgttactacgcactagcaggatgtcctggggccatctgtagctaggcagtagtgaaagaggggtacccttcccag

SEQ ID NO: 189881 - DNA, 833 bp, Homo sapiens
acagtcaaactgcaagaatgctgcttgaaacatcaacaatctcaatttctctggcttcgtaagagaccagcatcctttccatcatatcccaccccacaagatactctaatttctacaggtcattgttctaggaacaccaacagtatggcccagtgagtatgcagatggaggacaaattaccctttgttattcactttgtacaactatctaaatgtccctggatagagcaaataccctctagaaaggaggaaaacaatggtccaactccttttccttctgtaaaataaaatctccacctaccacatctccagttttacaacttaaccacagttacaggatccaggagaaccctacctagggacaagggttctatcccaccctctaataaagagctatgtgccctgagtcttcttgtccataaaatagatacagctagattacctctaagttccttctaacaataaaaaaaaattcaggttagctatgattactgacagcagcaaaagttgagagcagtcgaaatccgagattagagaaacaaaatgggatgactgtcttcttcagaagcgccctccatcttcagaagctttccttgctagagctaaatcccctcttaactgccaaagccacccatccttttgtaacccccttttgggggtactagaagcagtctgaggtttcttggaattgtcctgtttcttattcctccctagttatcttggcttaatctctgctacttcatcaggatccagtttttgtggtttgatattcagagattctggacttcaaagctgaagggatgaaagcctcaactcaatgttgggactcaggat

SEQ ID NO: 189882 - DNA, 542 bp, Homo sapiens
actgcagagaaactttgagtgtaaggaatgtgggaaagccttctgttatcacagttcccttcaaagacatgaaaggactcacaacggagaaaagttgtgtggatataaaaaatgtaaagccggctgggtgcggtggctgacgcctgtaatcccagcactttgggaggccaaggcgggcggatcatgaggtcaagagattgagaccatcatggccaacatggtaaaaccccatctctactaaaaatacaaaaattagctgggcgtggtggcatgtgcctgtagtaccacctcccaaccagctgggattacaggtgcccgccaccacacccggctaatttttgtatttttagaagagatggggtttcaccatgttggccaggctggtcttgaactcctgacgtcgtgatctgcccaccttgacctcccaaagtgctgggactacaggaatgagccaccctgcccggccagaattttctttcaggacatcaggaggatcctctgctggaagaaccaacatctgattgcagatgttgcctctttgg

SEQ ID NO: 189883 - DNA, 570 bp, Homo sapiens
atttcatctagtttgagttacatctggtatgtaaatacgagagaaccagattttagaaaagcattttacataagtaaatctgtaatacaataggtattaccttatatgtaccaatctcccttcgcccattatttctcctctgagctagttctaaatgctgctgcaataaacctcctccctgcagacatgctgaggaaccatgtcattcgaaattctttccttgctcttttagaagtctggcctcagttccctactaacgggccctcctcacctccaacttccctaccacttcctactacagagcaactggatggccactcaaggtccccacacagagactgctgtttgtcagtctcctgccacgactttgttgaaactgaaggaggcagagaggaggctcagcaacatgccacacgatggaacattttggttaccatcacagtaaacgagtacagggaatggtctcagcagggcatggtggctcacacctgtaatcccagcaatttgggaggccgaggcaggaggatcgcttgaagtcaagggttcaaagaccagcctggccaacatggc

SEQ ID NO: 189884 - DNA, 221 bp, Homo sapiens
tgttgggattagaagtgtgagccaccatgcccagccagcaacatttcacaaagtgaaatacagaaactggacagtgagagaataaggaaaggaaactcgaaacaaatgaaaggttatgcttcactttgtaaggccaagattttagcaaagaagggtaaaacaagccagaggtgtgaagatgaactaatcaaagggcagtgcaacactgaagataagaccgt

SEQ ID NO: 189885 - DNA, 671 bp, Homo sapiens
  misc_feature (655)..(655): n is a, c, g, or t
caggtggctgaccctaaaaggttgtgcttgggccaggcatggtggctcacgcctgtaatcccagcactttcggaggccaaggcgggtggatcacctgaggtcaggagttccaggccagcctcctggccaacatggtgaaaccctgtctctactaaaatgacaaaaattagccaggcatggtggtgcacgcctgtggtcctagctactcgggaggctgaggcaggataatcacttgaacctgggaggcagaggttgcagtgagctgagattgtaccactgcacactccagactgggtgacagaatgagactctgtcttaaaaaaaaaaaaaaaaaaaaaaaaagaggttgtgcttggcccttgcttcctccatttaggtgggctgagttactctcagaatcaagggaagctccctatcttggaatcatgtgagtgagctggcaaagatcttaccaggcatttaggtgtgtatggaatagtggggagggcatgctctcggaagcctctttttcctgcgcccactctgtcccttcgtactgcttctttcaacctagacaggtctcagtttaacccctgcccatctggatggcatgaactcccaggatgagtgccctctcagtcagcatgaaagcatgaaaatgtgacagaatgagacnttgcttaaaaaaaaaa

SEQ ID NO: 189886 - DNA, 209 bp, Homo sapiens
atgctgctatattttactctatgagacttacaaaaatgaaaaatagatcttgctctgatatagtatatagattagtaagggagagtgtgtatatagtaactaaaacataagaaaggcataagtgccacaggagaggtataaatgatgtgtggaagtttagagaaaggagagatgacttttagccagattgtttagtgagagttttatag

SEQ ID NO: 189887 - DNA, 438 bp, Homo sapiens
tgtactcaagaggcttggaattcagtggaagacagggctcacagccatgagcacatggagtcaaatgcagagggttctgccaagggagtgggcagcactgcagacaggccatcctagaagagccttgaaaccaaagcattctagattatttttgtttttctgagacggagtcttgttctgtcacccaagctgtagtgccatggtgtgatctcgggtcactgcaacctccgcctcccaggttcaagcgattctccagcctcccaagtagctgggattacaggtgcatgccaccatgaccagctaattttttgttctttctttttttttagtagagacagggtttcaccatgttggccaggctggtctcaaactcctaacctcaagtcatccacccgcctcggcttcccaaagtgctgggattacaggcatgagccaccg

SEQ ID NO: 189888 - DNA, 245 bp, Homo sapiens
aacaaacaaacaaaacactccaatatgcaatacaacttcacagctagctcagaactagttctctgcaggtctcataatttttaataattcctgcttggaagccagaaggcctgttcctctattgtcaccatagccaaaaagcataatcttcaaggcctgattcatccttacctcctccaggaagtcttctctgcctgttccagcctatttttctgtccccttattgtacttcctgccagtgcttg

SEQ ID NO: 189889 - DNA, 734 bp, Homo sapiens
atgctccataattagccataaatattattctttctggagtgagtttgtagctccaagtaagagaatgaaaatgtctatagtgaagaaatggcagtctgcatgtggagagaacatctgttaccaggctgcaaaactgactcattctgaatttaaagagaacctctgattttattttctaattatctttagttttggaatatctttatggtttattcccagctatgtatgcctcacaccccttcttctttgtgttatggctacagtcttctcactgttctctttttgccatgtaatttcatacagactttctatgttctgattagaagtttgaaatttttcagtgtggtaaattgtttttaactggagtgtttgaggttatttatagcttatcaatgcaatgtttagatcacttaattgagataagtactttactgtctgcaggggcattggtggaacatgaagtgaaacaccaggacctggttctggagttatggagggcaactccaatccccagtgtgggccccagcctctggcacactggtgcatgccaaaaagtactcctcaggccaccactactctaatcagtgcccttgctaccatcactgttgtcatctgtgcttgcattcccctggtgcctggaagttctgttctccaggtggcagatgactgctcccggcattcacacgtttttattccatctgtggaggagtactttataattctgactgtcttct

SEQ ID NO: 189890 - DNA, 601 bp, Homo sapiens
tctcaaagtgctgggattacaggcatgagccactgtacccggctgtactgtgtctttaaaaaagaaaaaaaaaagtacattacattcaattttttaatccttttttacttaaaattgttttattgtggcaaatatacataatataaaatgtaccatcttaaccattttaagtatatagttcagcagcatgaggtacattcacatcgttatgcaaccatcaccatcagccatctgcagaatgttttcctcttcccaaattgaagctctgtgctcattaaacactaacttccccttccctccttcctccccaccctcaacccctagaaaccaccattttactttctctccctgtgaactgattactctaggtgcctcctattagtggaatcatacagtacatgtccttttgtgataaacctaatttttataagcaatctcttttttcccttttttatgtttttctttctttttttttactgtcagtgatcatatttaaatgtaagcagtttcttttaatatgttaggagtacttgtgtaaagaaatctaccaggtaccttgtatgaattaactaattctgctataatgggaatattcctctcc

SEQ ID NO: 189891 - DNA, 364 bp, Homo sapiens
tggaaactgcagagaaagaaaccaatcttaccactcaagtgagctctcttttaaggccgaaatcatcctgttgataaagggattaaaatttatttgagtttaatgaaattatcctagtgctaacactattgggatctgtgcagaatgatagttctttgtgggtaaccaggacagaagtactgtattgtgcagtattttgaaaagaaggaaagaggaatgttaggtcttttaagacagatgtttagtcttgtattgaaggagagtgaacacctagatgtatcctacgtattagacaatactgtcttgtcctttgacttttactagtctcttgagaagttaatattttaaataggctactggtact

SEQ ID NO: 189892 - DNA, 740 bp, Homo sapiens
gagatcattcatttgtttattcaataaatgtgaatttatatacctacgttgggttagatactctactgagtgctaggtctatagaagtagtaaaacattgccctagtccttaaggtgttcacattctaatagggaaaataaacataataaacataattataatgcaaagtgtattgttagagatggtaccaccttcacttggttgctcagactgaaacctagaggctttattttctttttacttttattattatggaaaatttcaaacatacaaaaggagacaataacatcatgaacccccttgtacttgtcactcagtttcagcagttaccaactcatggacaattttgttccatttctctttccaccaacttccttccaatattattttaaagcaagatgtcatatcatttcatctgtaaacatttcagtgtgtagatctgtaagataatgtctgttttaaaaaaccattctcacaatactgtcatcactcctaaaacaattcacaaaaattcctaaatgtcaccaagtaatgggagtcattttaaactcttgtttctctcttctcaagtcttgtctattccatcagcaagtcctattggtcaacttccaggcaggtcactttaccacccctgctattaccaccctacttctgcagtcacatctctgtagatactagagtttaaaccaacagtttacttctgctcttggttttccaaagctagttttattaataactg

SEQ ID NO: 189893 - DNA, 494 bp, Homo sapiens
tctctccaggttgaaatttctcatgattactcaggtttgatttgttcctgaaggcttttttccactgactgcatttctatggcttcagtatgtgtttaacaataatgaatgacatttgaactctggttgaaagaccatccacaaagtcaactgaatgtgaaaagaaaaaaaaaaaaagaaagaaagaccatccatgatcactacattcatagagtttatctctgctaatgaattatttgatgttaataagatctgaagcttggccaaaggctcttcaatgctcttcacacattttctcaccatcatggccttttcgtgctgatttatagtctctgaaattggtctgaagctatggtcatgtgacccacactatgggtgtgggtgtgggtttgtcctatgtatggtttcatcctcccgtaggatgtctgagattagagcacaattactctaacacttactatagtcttggaagccccctggctgggaaccaatcc

SEQ ID NO: 189894 - DNA, 622 bp, Homo sapiens
gtgaataccaggaggctgggatcattgaggccatcttggaggccagctacaataatactcacttaaatttagcgaactcagaaaaaattagaatcctaatagagcggaaacaaaaagctctatattctctattatttgaaatacagttttatgatttaagaaaatgggctcatagaaattagtccttttattcattctgttgcttatgtggctatagaatattttcaaatcaagggcttctataaggaaggtctgttaacgggtgactgattataagtatataccttacatatgaccaagtcagagcacagaattttataatccttcaaatatatttgaaacttttatacccaggtacctggtgagctgtctacattggctcttaataaggatctttctcagaaatgatttaaactaataacagtataatagaaagagctctagatttgagtcaagacagtcataactattttccttaacatgtaaatgaggatcagaatgtctgccctattcatgtgcctcatgtgagaattaaatgtagtaccagaatatgtgaaaatgccttttaaattgtaaacccctgtctacagttaggcaatttgatggttctgtagggtgagat

SEQ ID NO: 189895 - DNA, 390 bp, Homo sapiens
tgtttgttagtctgtcacttatatgtgttttccaaagtgtctcctctttcctgcctccttcctcagagtcattttcctcacacgtccgtttctgagaagcaacctgctatggtagttagatacctgagctctggagtcacacaactggattcagagctggcttagcccgtccttactgtgtgactagagaaaatgatgtggcattcccgtgcctcagtttctatgtaaaatagagtttcaaagtcatacttgctttatagggttgttgttaagaataaatgacagtgtcagaaagaagagcctttggcacatgagaattaggcaaatcagagtgtaaataggaattcaccaggtagtcaaggtgggatggggccaggagccaaaagagga

SEQ ID NO: 189896 - DNA, 656 bp, Homo sapiens
cttttgattgccctaatttcctaaggtaactttcttcacgtcttttcttcccagacctcaggtcatgtgttgcatgtctcatttgtactctttgaccccaggtgtctggatagtttttgggcaatgccaaccacttccagcctggatgagttttgagttttaagcatgaaccttgtcaagtatccctgacaggttggaatggagtcactaaaaatttatgaatgcgttctacttgttcctattggaaccagggaccagggtcccattcttggaatatgggctgccatcacactgggaggagatagggcaaaggcaaataagaatgccgtaaagctttcctatcctttgaagttcttgattcagtgttcagttggttgctgtaagcatttcactgttttccagagttctgacaaagttagttctgacagttggtgcttgttttttgatggtttaggtgcagggaggtgtatgggcacttggaattgtctactctgacattttttcgacatctcccagtcagccttgttctcttgcagtagtccatttaaaaacccacagaagcctttccttctaccaccgccacacacgctgcaggccacagatgccaccttacttgtcataccctcttcctgtatctccctggcaatcacctcaat

SEQ ID NO: 189897 - DNA, 302 bp, Homo sapiens
agtattgtcaagctgctttccaaagggtaaaggaaaccagtttacaccatcaccagcagtcgttctggtcatatatttcccaatatttttccctgaaaaatcatttacattttaatttcagttataatacattttcatgtgcaaaatctaatcaaattatgaaaattgacagcaagcttaaaaatatcatttctatattagtatcatacaatttttaagtagttgaatactgactatagcacctaacagttcaatggcattttagcctttttaaaaagttttatccaatccctacaattatg

SEQ ID NO: 189898 - DNA, 424 bp, Homo sapiens
ggcttggaatacttatggtgaataaaactgcccaggttcttggtctcatagagcttacattgaacggaatataggaaacaacgtgaaatgcacaaataaacaaagaatcaaaataattcagatagtgataaaaattatgaagaaaacaaaacctctgtaatgggataacatgatgggagatttcgcgagagaaggagatcagtcatgtgtgtctgctctagttagggtagacaggcaggtctctccaggaggtgatatttgagctgaatcctgtacgacaagaataatgcagccaagcaaaatgctagggaatccaacccgtgtgggttgctgatggggaaataaagaagcaaaggagggatgactggccccgaggtcatcctgttagttaaagcctggacccgaatgggggtctcctgtcact

SEQ ID NO: 189899 - DNA, 187 bp, Homo sapiens
ggaagctttctaacaagtttttgcctgctcagcttttgctcatctttcaattcctgcttaaatgtcttttcaagggaaataattctccttgatcctctgagattaggttaggcttccgtttatacataaaagacaacaccctgaatcttttattgcacttatcacaattgtaattaaacattattta

SEQ ID NO: 189900 - DNA, 147 bp, Homo sapiens
ctatgctgggtgtcttcggccaatcacagggcatctctgtaatgagtccattccaagtctaccagtgagaaagtaggcggtaggaatgatgctggagaggcaccaccaattgactgctaccctttgcccttcattaactctaatcct

SEQ ID NO: 189901 - DNA, 301 bp, Homo sapiens
attttagagaagcaggaatatgtcatccattgaacaagaaagaaggaaaatatgagacgtcagaggaaatagttattagcgatggtaaaattcagagtgtgatcatatgaggtagtagtaggaggtaaaaggaagaagatatatcctttccccctttctctcacctctacagcctgtcataatacagcaattgccttcccaacaggttagggagagatcaaaggaacaatctatttttcacagataccaattacccacttgtgacatcagttatttctgactcagtcgtccgtcttactta

SEQ ID NO: 189902 - DNA, 215 bp, Homo sapiens
ctgtgcgggcaccgtgcgggctgtgagggcaccgtgtgtgctgtgtgtgctgtgtgggcaccgtgcgggctgtgagggcaccgtgtgggctgtgcgggcaccgtgtgtgctgtgtgggctgtgcgggcaccgtgtgtgctgtgcaggctgtgagggtaaaggatgagggcaatttcatgttaagtgtattttaccaccacttaactgatttttga

SEQ ID NO: 189903 - DNA, 144 bp, Homo sapiens
gagaagacaaatcaagacattctctgatctgaggagataagagctagaaaggaggcacagggtgtcctattactatggagaaagatcagctgccctcttatcaaaatggcccctgtgactccacctccacccccagattacaat

SEQ ID NO: 189904 - DNA, 515 bp, Homo sapiens
gcagcaagaaggccctggccagatgctgacaccttagtattagactttccaaccttcagaactataagccaataaatttctgttaattataaattatctagtcccaggtattctgttataccagcacaaaacagactaagacaccatcttaccctacagccagtaccaggattttgaatgacagaatgatgacctcatcatcctttgtttttgctggccagttccatattttgaatgaaaatcacctggctcctgtgagttcttttgtatcctctctaacttatccttcagtatcaaatttgaaggattgttttgagggggtctgaaattctcagtttttgctctatcttgtttctcctttttccatttgctcccattgacacacatggagtctcaattgtactttcatcccagtcagcagctgccctaaacaagaagacatgccccatcattagtggtgccaggtgctggctttagcagaacatattctaaatgtaactgatcaatggcttata

SEQ ID NO: 189905 - DNA, 500 bp, Homo sapiens
ataattgctggagttgttaccagacagagggaaccagaaaggtgaaatgtcatggctggaaaatgagatgctcaacattgtgactttggagggggacattgacagcagaatcatcctttacaggtatgtgaacccaagatatcccaacagacaatttgcctgtagggtaagcactgctatacttaccataaacaagccccctgaggacagagatcatttccatcttttcagccccatatatttagcatagcgcttagtattaacaattaatacatacttgtttgtataatttttgaagtgtatttctgttccagaagaggttaaaggacattgttcacattctgtgcaatgcgaaatcttagagaagagtataatgtgtgagcagaccacatcctcggaaatgaatgcttattgtgaagaaggagaggcaagaaagacggctaaccagtttaaacagtttcattagacggtttcattatgaaacaaaatactcaacacgc

SEQ ID NO: 189906 - DNA, 225 bp, Homo sapiens
agaacctggatgggggagcacagacagaccaccagagagaaagccagaaggataactcgatgccaagatctccatgggtaacagggacatcagcacacacagaagtgagagaaggtacacacctggtggtgtcaggtataggactagccaactactttacccttggtgctggaagagtaacagatgtccaaattcaaagcacccaggtgctcacaaaagcagaat

SEQ ID NO: 189907 - DNA, 122 bp, Homo sapiens
gacgacagcccacacgtgcatgtctgtggcgggtagacttcaaaaggacatgtccagtcacttcatgcctcagaatactacacccccttctacaaagctttggcctatgccaccgagctcag

SEQ ID NO: 189908 - DNA, 1196 bp, Homo sapiens
tcaatattcccatgagggaggcagtctttgactttttatttatgataaagattattaaagtgcttaaagttttttattgtatagcgtgttttatcatcaaacaggttttagttttttaagttaaactgatcaaaaataataaaagctgatggctctatgacacttgcatttgagagaacaagaatagggagcaatatttcaagaaaatcattcttactgtttttcaaaactgtttagtgtcagagatgccccaagaccactcctaggtttattgtttcgatagaaggacttacaggattagtatatagttgcactcctgactaagatttattatagcaaaagaatacacagcaagattagcaaaggaaaaaggtgcatgggaccaagtctggaggaaatgagtctcgaactcctgacctcaggtgatctgccagccttggcctcccaaagtgctgggattacaggcatgtgccactgcacccagcctgaaagtattacttttaagaattgttattatactttacttgaaagaaataaccactgctatagtattatatcataccaaagcatatattttataatttgggctacctagaattattattttttttttggaaatgatgttatatgtagttataaatcacaaatgacttggtaataaaggccatatgatcttcaaaaccaaactggaactagcatagataagacctgctgtttaaacaggtaactcttggttgagagaagataatggcagtcttgtctcttttttccctttattatgaatgcataacactgggtgttctgttaggcaagggttgtttcttgtttattgttttgtggccagtgcatagcacaaccaacgtttggcatatagtaggtgcttaaatatttatgaatgagtgagtatgtgagtagaaggagtaactgggctgggaatgatggctcacacctgtaatcccagtgctttcggaaactgaagttggatgattgcttgaggccaggagttcaagaccagcctgaggagcatagtgagacccctgtgtctacaaaaaaaaaaaaaaaaaaaaagtagaagaagaaaaagagtaactggtaagggctgaggtgtcagggagacttttatcatttaaaatgattaactgtgtaaattttcagtagcctaatttctcatggtagaccttttagaaagaattttc

SEQ ID NO: 189909 - DNA, 328 bp, Homo sapiens
ctagatatctgaaaataaagggtatgctcttacagcattcattcactaactttttattttaatttttttaaaaattagagacagagtttcatcatgtcgcacaggctcgtctcaaactcctgggctctagcgatccactcactttgacctcccaaagtgctgggattacagatgtgaagacatggtacctggccacattccctaactttcttcctgtatttgtatttattctccaaagccccatcttttgtaaaatgctagttgtttaaacaaattaaaaccaatcaaagcactcattttacattctaatatctgtggaaaaaagaat

SEQ ID NO: 189910 - DNA, 398 bp, Homo sapiens
tcttcagcgacaccattcacatgctgatcccttggtacacgttcccttgaggctgagcacaagcttatgagacttacggaatcttccctctgtatttgggatcctgataacgtttgtccgaatctcagtggcgtgaggtccttgttttctcaggggtggacgaatctgcctctggagacatcatactgggttgaaggcttgttcttggttccagctccacgaggcctctgcctttgctccacttcactcacctgacttctttcttgacccctttgaccatcagtgcccagccttttcctcacatcagactcctgctgaatctattgactcctgtctctctgctcctgcttgagcctccgtctgagctccgtccatctcgccttgtgtaaagttggctg

SEQ ID NO: 189911 - DNA, 302 bp, Homo sapiens
ctagtgattccgatgcatgctggcattagagagccattgctaaaggaaagacccaccaaatacaatcgtcagcagccacttgaaataaatgcagtgacggctgctctgatagaaaatgaggcttccaggccaggcgcggtggctcacgcctgtaatctcagcactttgggaggccgaggtgggcggatcacgaggtcaggagatcaagaccatcctggctaactcagtgaaacctcttctctactaaaaataaaaaaaaaattggaccatcctggctaactcagtgaaacctcttctctact

SEQ ID NO: 189912 - DNA, 383 bp, Homo sapiens
atggttacagttgctgttatggtcattttgcactcaaccctactgtgatatgcattttccccgttatggattttgaccatcaaaattaatgttttctttagctttttccacttcaaaagtctttattgccaagatggaggttatgctcaaggtatattttacccccagtattaaatttaaagccacattttaaggtggaaattggtaaaatgaggaaggtaggaaaactctatctaggaagttctcgacctttttgagtaggagggccttttaacagcagagctttctgagcacaccctcatggttgtagctactgagtgagaaaacagtgtatagattgggaagcccttgtaatatctcttggttgaaactcaccagtatgt

SEQ ID NO: 189913 - DNA, 278 bp, Homo sapiens
tcaactgaggaagctgataagggaatcagttgggaataaagattctcaagtttccatgaggcatatacgtagctaaaggacaaactgagcactttttaaagattttcatgatttatctcatgtagaaatgtaaggaactatgaaaaaaagaacatctttaccctgtattttcccaaatcaagtccaaggaggcaaaggtttcagggcacagtatcactaacaagacagactggaactgttaattagtatcagcagattccatataacatttttttttc

SEQ ID NO: 189914 - DNA, 621 bp, Homo sapiens
aaacaaaaaggcagagtatcaccttggtcagcctcagttggcaacatgcatattggatgactcaaatttttcacagctctgtgcatgtctgcaaaggcctgcaaaagcaccataagtattgggattacacataaattttagtgaataggcaaatttgcaaatgtggaatatgcaaataatgaatgactataattcacatatacaattgacctattaaagtatacagtatttttagtattcacagggttgtgcaaaaatcacaggttgtgtttgtggcattaaccacaatcaatctgagaacattttcatcaccccccaaaagtcctgtaccacgccacttttccctttagccccacctccagtcctatgcaaccactaagctattttctgtctttacagatttgcctattctgggtagtctatgtaaaggagaccatgaaagatgtggcctttcgtgactggcttctttcacttagcatgtgttttcaaaatccattgatgtagcatatagcagtactttgttcctattcattgctgaaaaatattccattttgtgcatatagcacattttatttatcaattcatctattgatggaagtttggcttatttcttcttggctg

SEQ ID NO: 189915 - DNA, 530 bp, Homo sapiens
tgaggatccccctgcatcccggggagccatcagagcagtggctgtgacctgaaatcacgggggtaaacataggccaaaaagaaacagacctcacccacctggaaactataaaggaacaaaagggagcaggtgcacagcttgggctaaggagatgaagtagatgcaaaatcaagacatcaacagcagaaccaacatatgacaatttgtttgcctccttgtccccacatgtattagttcattctcacgctgctgataaagacatacctgagactgggcaatttacaaaagaaagaggtctaatggactcacacttccacatggcttagggagaggcctcacaatcatggcagaaggcaaggagcagcaagtcacatcttacatggatggaagcaggcaaagagagagagagcatttgcaggggaactcctctttttaaaacctagatctcatgagacttattcactatcatgagaacagcatgggaaagacttgcctccatcattcaattacctccccgggatccctcccac

SEQ ID NO: 189916 - DNA, 420 bp, Homo sapiens
cggaccctaccctgagccagtaggatgattttaaataatctgccatgtttctgttatcctcacaactgtacccttacacaatctatctctacctagaaaacgtatttcagatggctataagagtacagtctgagccggtcacggtggctgacgcctgtaatcccagcactctgggagggcggggcagatggatcacgaggtcaggagattgagaccattgtggctaatatggtgaaaccccttctctactaaaaatacaaaaaattagccaggcgtggtggcaggcacctgtaatcccagctactcgggaggctgaggcaggggaatcacttgaacctgggaggcggaggttgcagtgagccaagatcacgtcattgcactccagcctgggtgacacagcgagactccatctcagaaaaa

SEQ ID NO: 189917 - DNA, 384 bp, Homo sapiens
gtggtcccagctcctcagaaggctgaggtgggaggattgcttgagcgtgggaggcagaggttgcagtgagctgagattgtgccactgtactccaaactgggcaacagagggagaccctatctcaaaaaacaaaacaaaacaaaacaaaaaaacaaaaaagattttcatgctctggtaaaataagtattaaaattaggaaactatggatgaattgaatgttttggtctggtcgaagtactgtgcattaaatttttggttacattttactttgataagcagtgacggttcagtaattttgatgatagtctatacatcatgtaacttgacttatttagttgtcaacaaatatcttttttttttgagacctgagtcttgctctgttgc

SEQ ID NO: 189918 - DNA, 640 bp, Homo sapiens
cataccattgctggtttgtgggaagggttggtattgggaagggctcttctgggcctcctagttaattctacctggttcccgccccccaacccctgaggactttgacccgtatgttgatagtggttgtgtggaaaagaatcacaggccgaacgggcagcccgttgtggactctggatgggaaattctaaactcagttcacttggcctggagaccgtcaccgcacctgcggttcttctccaggctgcctttgtaatccagtgtggcttaaacactcaagcaaagcgtgaggcgtttggaagcatgatgttctttaaaggcatctagaatgcggccacgtggctgttattagcagtttatgttaattacagaagaatggcatgtgccactgtttacgattctggccttcatctctatctctctatagaacttgtggaaaacatgagaattaatcctatcagatcaaacccatgcatttaggagccagtgtggcaagggagggagtggctgtgcccttcccgaagacagctttgtggccggttgtgggccggtgtccctggccacctgggtggggagaggcagaggcccctttgcagccttcacgattttacgtgcattcaacctcaaatctccatgcagtctg

SEQ ID NO: 189919 - DNA, 474 bp, Homo sapiens
caggtgatctgcccacctcgaccttccaaagtgctgggattataggtgtgagccactgtgcccggcctcttcctccttctggagccctgagagagcaggcaatgaggagcggaccccactgcagagtccatccttcccccgcctcccgggctgatgataactgcccttccttgggccaggggacaccttcaagcgtcaataagtgctggccggagcaatgctgcttgtctctgtcttggcagcctgggtgccttgacaaggggtaacgtcctgtcctcatgctccccacttcgagcttcagtgaccagagaggagtggagaaggggacttccccagcctgcctggagctccctcagcctctcaggtgccttccacacagggtcctgggtacaggagaccccagacatgctcagcacttagcagaggcatcaaccccacatccttctggggggctccgcaagacacccaatgctt

SEQ ID NO: 189920 - DNA, 374 bp, Homo sapiens
caggtcttgctagaaatacagcttccctgatccgacattagctcttcttatcttgttaccctgcttggaaaagagacaacactgcccgataagaaaaaatttctggtaatcactgtaaggcgttcctcactccctcacccttctctgttgggttgctcacaggctgtatggatttcactgcttaaagcagctgatgtaacttaggatttcttggaggaagttgtgtggtttaggttcccttgtgaatattcttaaaaatcttctgtcagtgattctccagctgtgtagaaatatttgtctacaggactgaatacactgtagaaagatgctatgcaattttttttttttaagcacacaagtgacttcttaaactt

SEQ ID NO: 189921 - DNA, 333 bp, Homo sapiens
ctcagcaaatgccattgcggccacctctcaggatctggcttcagagcttggggccgtgggagcgcccagtgggtctgtggcatcggaggggttggagtgtcttccccagctgctgcctgctgaccaccgcagccccttgtagccatttcattttacaagcacgttcccccgtgccctctgcatgggccctcagccctcagcagccccgtgagaggggctgaggctcaggtgggagatggcggctgtgtccctgttctgcggcttggaggcattctgtccggtgtgcgtctgtacaatttagactgatgacaataaacatgttccaaagcatcg

SEQ ID NO: 189922 - DNA, 444 bp, Homo sapiens
cccaggcccagcactttcccagcttgcccacttcctgcactcccttagggcttcatcccttaaggcccagggaagccaacactttcagctcccttccttggcaggctcccaggcggatccagattttgtgggtcctgaagcttatatacttttggaggtcttctttaagaaagagttaaaaaagaaatcccagcactttgggaggccaaggtgggaggatcatgtgacccaggagttggcgaccagcccaaacaatacagggagacctcctctctgtgaaaaaaaaaaaaaaaaatagccaggcatggtggcatgcatttgtggtccctgccacttgagaggctgaggtgggaggattgcttgagcctaggaagtcaaggctacagtgagctgagattgtgccagcgcactccagcctgagcaacagagcaagaacctattaaa

SEQ ID NO: 189923 - DNA, 486 bp, Homo sapiens
tttgtacctcaacttggggtatatgaaggcttttggtctctctgagagtggctggaggcagccagggcttacctgtactctgactcgaggagagttggataaaagtgcacaccttaaaaaaaattgaatgaggaagcacagtatttcagtacagtggacagcttagcatgttgacaactgagaataaaatgctcagttctgaactggacagtgtaagacacaacgaggaaacactggaaatggaaattcaattacgtcattgtagactggctactgctctacatgattgtgaccaaagtcagatagctgaaagagacttctttccagagaacaagacatgagcaggtttatttacagaagacaatgaattctcatttatctcacctaaaatataacagattccttctcaacaagtctaatgaagacagtaaaatcaacaggctaaaaattaagctccatgaaacaagataaaactctgagagaaaa

SEQ ID NO: 189924 - DNA, 184 bp, Homo sapiens
tatccacctgagacctggctgcaaggctctgaccacttctgattactgacatagaatttactctaaagataatcctaacctgactgcctcatttatatttctagcttgtgcttcctcctggcaaaccagacaaatgatgcatgtggtaaggggctggctcatctggtctctctctattcagcag

SEQ ID NO: 189925 - DNA, 311 bp, Homo sapiens
taaaataagcatgtagagcctatcatctctaaggttctttccagcttgagaaatctttatatttgcatataagctattggttagccttgtaaacttcatcttcaaatctgaaagtgttaatattttgaacagttaaatgagagggcttggtaaattttgtaaatatttgttaaagtctttgtgttaaatcattgatattttaatagaattcaaatgatgatcagcaagccaattgaattcttcactgtcactgggttgattttcctgttgggtaacgaatctcattttgtaaacaaagttaattctttcaa

SEQ ID NO: 189926 - DNA, 421 bp, Homo sapiens
ctggccatcttgcccagaaagaaggcactggaacaaggtcctaaagtttgagataaggcagctaccagaaattaattagggagtgccccatgttgacagaggatcatatttttaaattgaaactcttttcctgctgagactgttctgtgttacaattcacgtgtgaccatgaggttcacagaacaggcagtggcatctagtaaactaagcttcagggtaaatagaatgttggcgccagccacttcaacttgcactagtgaatatgtcaagacttgtcctccatttattaaccattagctagaatggaagcgtgtgcctatctgagcctgtgtggctgacatttaagctgtggctcatcatgggattccatagctgatcctgacatcagctagagtttcatggacatctggaaagtcggagt

SEQ ID NO: 189927 - DNA, 345 bp, Homo sapiens
tccctcccctgacacttggggattacaacttgacatgagatttgggtggggacacagagccaaaccataacaaatggcatctaaaaaattcaacagcaaacttcattttctttttcggccctactgggagtcaagcaaacatcatgtttagtagtaaaatattaggctccttccttttaatattattaacaagataagaatgcccactattatggctttttttaaacagatggtagaagtcctagacagattttacaagaaagaaaaaagacataagataggacaggcaaaaacaacaccttaattttgatatcatcttaatgatgagactgtctacatagaaaa

SEQ ID NO: 189928 - DNA, 578 bp, Homo sapiens
acataaaccacctttcttctataactgaagtgagatgtgtccctaagggaagctacttggagagttacgggaatgaccaggtatctattccatctagttgaccccagagagagaaactatttaaagcctatgttgtgtgtgcagcttcactctgcactgacgtctaccaacattgccccgtggccactagatgttagtctagggccactggtaaagaaactgaacttcataaaaagtagaaccaatccagtggttgtcagaatagaaaaccaagtatcacacgttctcacttacaagtgggagctaaatgaagggaactcatgaacacaaagaagggaacaacagacactggggcctacttgagggtggagggagggaagggggagaggagcagaaaaaacaactattgggtactaggcttagtacctgggtgatgaaataatctgtacaacaaattcccatgacccgagtttacctaaataacaaacctgcatatgtacccccgaaccttaaataaaagttgttttaaaaagtagaaccaggccaggcacggtggctcacgtctgtaatcccagcac

SEQ ID NO: 189929 - DNA, 163 bp, Homo sapiens
cttaacttgttcttgctttcagtggtttgcttgcagtccttgtcacggccgatcccagaccatatgacaacatggtatgtgatttccctccacacatctcctgcccacactaacatacctttctacatggcattcactggtttcccttcagccccagaggaag

SEQ ID NO: 189930 - DNA, 259 bp, Homo sapiens
ctggcgacctaacctttagaaaaattcaattcttcatatgttctttggtggattctgctcctggatactgtgcgtataggaatgaagtatttactgttacttttgatctgcttagttacagaagttatttaaatttggaaaaaaaaaaactgattctggtatttgccatgacttgcttaccaggtttacaaaaataattacaaaacaaaaacagtatgtttcagtttttagtcgttagtcattcttttttttttttttt

SEQ ID NO: 189931 - DNA, 394 bp, Homo sapiens
cttcggaaggcagaaaacaaatgcttttgggtgtgcacccatctctcccctttaagaccaagtcttctccccagccacaatctgctgtagctttggccccagccagaaactgggccatctctttctttaacttaatcttgtggtgccctttctggtgctgggtccagtccctaactgaaggcaggcccacatagcagtccctgattctcaccacttgaggagttagtgggtcccaggctgattgggtgacagaagggggcggcaaagagcagtggcccttggactctcctagggagggagcaagaacttctaggtaggctgatgccaaggatctctaaacttgggatcagactggaggagccaaaagttggggtatgaactgtaggaaaggtcg

SEQ ID NO: 189932 - DNA, 269 bp, Homo sapiens
agggaaactgcctgctatggcgtgccctgccccagccaaatactgggaacactgggaacctgtgtggtgcgccggagtcctgaggagaagccttgtgttcagtaggatcacgggtgccagccccgacaatcatggggcctgcatttacactctttcccacaaacctcacagagttaaacttcctttctttaactctttgctgtcaccttctgctaagctctggggattctacttgtgtcctaggaaaaagtcttccttactcctttcct

SEQ ID NO: 189933 - DNA, 566 bp, Homo sapiens
ctggaactagataattaatttcactgcaaattagaatcattctagaaaggaaaaaaacaagaaatgtaaattaagatttacctcatttcagagatataatcctgcaaaactgtacatataactttctaaagcccttgattttcactcttttcaattttgctgatccacttatttgagaccaatgaaacgcctgcttcccactttagaccttggaattgcctgtcggttaatttctggtagttcctgcagtttgccttactgacaggccagtgccatctaatggtaaaaaaggacagtctgaagctcttggttttcttaaactgcccagtgaaaagaaatcattttcttcattttacttttcagttcaggaatatattgcagcaaaagagtggagacaacctataatttttgtttatcaaattttgtgaagtctgttatacagctttatttatattttgcctaattccaaaagcatttgtggccattacagaaaacacctaccaataaaagagtaaaatattttttacatgtctagtcatttaataaatgctattttgaattgaaat

SEQ ID NO: 189934 - DNA, 286 bp, Homo sapiens
atattctgtttcaaaaatagtatgttcacagtattattaatagaactgtcccctgtctggtttcagcatgtctgagtggagtaacatgctatagagtttgtcattagcacatatttacttgtttgtggcattctgccttttgtcatcttttgttaaaatatgagataatgatggtagcataagcaggttagaatcacagcaaatgtctgagcatgtattacaatgtgtagttcactgtgataggactggaggttcagatggggaataaggtaaccatccttctcaa

SEQ ID NO: 189935 - DNA, 105 bp, Homo sapiens
gtgtgggatgaggggcaggaggttcgggggaacagagatggagctagggctgcagccaggaggtagagtccccctctacccccagtcccagcctcacgtcaattc

SEQ ID NO: 189936 - DNA, 291 bp, Homo sapiens
atgaagatatctgaggctcagggaggctaaatatcctgcccaaaatcacgcagctaaaaagtgacatggctgaggttagaacacagtttttgttcctgtaagtagagcatactgcctcttgctgtcaagtggaaacttccattttactttctttagctgccagaaatgggggtatgttagggtagcttatttctgtgtttcagtaaactgcagaagaattcatgttagaaggaagaactaggttgatctgtgggcttggaagaatcatttgacaagggctttaatttattc

SEQ ID NO: 189937 - DNA, 475 bp, Homo sapiens
gcgaacagccgagcggtgggtgttccccagctacttaagagggacaacgtacattgttactgagctactagatctcgagattccgcttagtcagggtcatatcctcgtcaacttgttggaaaggagagacatgtccagggtatcgaggcatcataatacgtgtcatgtgtcaatatcttgccccctcgtgtgccagtggactgttcagagatgcagtagcttcacatagttacatgaagatgtcccacaagaccaagcaatcatcctctcatgaagctatagtcaacttataagcaatctcttgttatgttctccctccttccctttctccccattcctgcttccctgggatgactcttgcaaatgaagtgtacgcttttgcctctccctctaatttatattttcaaggactctagactaagacacctaccttgtgacaggtactgttctggatgttgggtagacagtcccgtcc

SEQ ID NO: 189938 - DNA, 672 bp, Homo sapiens
atggccttgttcaaagactggaagaggaagagccatacttcttattgtgtctgttttgacagagtagaagatccttcaccaaagtccctaacaacccacttttggtgtcattggttcctacctggtgattcctttagatggggggatggaattgtcacaattggctaaaacaaatcaacattcactctgggccaaggtggggtcagcttccgtaggcacataatcacaccagggctctgccactgagacaggcaaggggagagtgagggaactgatggacaccaacaatgactggcacagctttatggctactttcaattctttatgcaacaaagacatttcatgagactcacaaattataccaaaggaattcatttttgtgtaaatgactgtaatttcaacgtcaagtaaaagtcttaagactatgataatactacattgtctctctctctctctttttctttctttctttattttattttatttttttgactgagtctcactctgttgcctaggctggagtgcagtggtatgatgtcagctcactgaaacctccgcctcccaggttcaactgattctcctgcctcagcctcccaagtagcttaatcactctaagcctcagtttccacatctttaaaatagggagaaaaagtatctacctttaagggatgt

SEQ ID NO: 189939 - DNA, 654 bp, Homo sapiens
agagtgagaagtgaaggaaagcaaagatagctgaaatggagagaggggagggtgaagcccagaaaggcaggcagggaaatgacccttgatggatacaataaggcatgtttgcactttatactaaggcaatggaaactatgaaaatatcttggggagactattagaacaatgcaggaattgtgagcaacattgtgttatggcaagaatgaaggcagaaagagcagttaggaggctatcaacatagcccagatagaaaacggtggtgacatggtccatggaactggcaatgatggggaacagcgaacagatcctttgtagatgaaggcatctttcatgggatgcaaacactggaggatgagcaggctgggcgaaggaagagaagaggatatgcttagctgtagacaggccgagtctgaagtgcttcctaggaaactggatcatgggtttagagcccagtgaaagttatggactaaagacaaatacttggtatttgtgagcctcagacatacaggttcccactgtggtagccactagccacatgttgtctatggtgcacctgggatacagctagggcaaagtgaaatgtactataaataagatacatgctacatttccaagacagtatgaaaagggaatgtaagatctcaattttta

SEQ ID NO: 189940 - DNA, 189 bp, Homo sapiens
ctcagcaactactgtctttccagattttacagaggaactggctgggggataaatcagatgatgatggagatcatgacaatcttactgcagcttgaacaggttttacaaataagcagaaaggaacctaatcttctttatcccgcccaggtgatattataaaccagcgcacacacacacacacacacacac

SEQ ID NO: 189941 - DNA, 832 bp, Homo sapiens
ctgcctcagcctcccaagtagctggaactacaggcgctcaccaccatgcctggctaatttttgtattttttaataaagacagagtttcaccatgttggcaaggctggtcttgaactcccaaagtgttgggattacagacatgcaccacagcgcccagcattaattgcatttagtaacttaaagtttgatatacaatgtagactactctgcattttcttacgttattaaaaatgagcatttttacttcccatggcaccccttctaccttaaactttctacataatacatcatctactttatttcctaatcagatgagttttcccttcaactacatttatgttaagtaaaaaagaaataaaaagctttttaagtaaatgattggcatatcacaggtaaaagaaaaccactaggtgtcattatagaccagatactatctaggtatcattttactgtgacattttggtttcctgaaagatagatgctaaataaatttgtttaataaaatgaaactttcaaaatatttaggaagctgactccttttgttgcaacagagtctcactctgttgcccaggctgtagtgcagtggcatgatctcagttcactgtaacctctgcctcccgggttcaagcaatttttgtgcctcagcctcccgagtagctgggattacaggcatgcaccaccatgtctggctaatttttgttttttttagtagagacggggtttcaccatgtcggccaggctggtctcaaactccaggcttcaagtgatctgtctgccttccaaagtgctgggattacaggcgggagccagtgcattctgcctgctgactttg

SEQ ID NO: 189942 - DNA, 257 bp, Homo sapiens
gttcaaacagctagcaggaagatattaaatttcccaatacaaagaaatgataaatgtttaagatgatgaaatgctaattatcctgacctgatcactatacattatatgtattaaaacatcactatgtagcccatgaatatgtacagttatctgtcaatcataaaataaattttaaaaacatatcattatatatcaatgtgactacatagaaaaatatataagtagcagcagcaactactgtcattataaaaacactg

SEQ ID NO: 189943 - DNA, 757 bp, Homo sapiens
actccctgtcccctcctcgagccatcgggaaggcctgcgtcctggcaggctccagtctctgcggctgcccctccggcaggccgccgagaatcagcgcggcattgggccaggcacggtttccacgagcttcctccttctgatcctcccctccgccccccccaccaagctccccaaaatctctcactcacaccccaaatcacctgggccccccacctcaaaccagaggccatcggggcagaacccagcaattgtcaccgccctctcacgaagcgtcccgtgccccccggagcacatgtccacagcgaggcccttcacggctctcagatcagctccccgcctgcaggtcccagccggccctgctgtcgctgcaggttgagcttctcatgagtgaaggccccggtcactctgacgccgccaaatagtggagacaacaccaagctctaaagattttcaaagggagagagacaaaaaaaaatgaaggccaggtgtggtggctcacacctttaatcccagcactttgggaggctgcgtggggagcctcgagctcaggagttcgggaccagcctgggcaacaaagtgtctctacaaaacaatatgaaaattaaccgggtgtggtggtgtatgtctgtggtcccagctagggaggtagagctaggctgaggcaagaggactgcttgagcccgggaggcagaggttgcagtcagcccagatcacgcctctgcactccatcctgggcagcagagcaagactccatctc

SEQ ID NO: 189944 - DNA, 437 bp, Homo sapiens
atggagtgcagtggcaatcgtagctcactgcagcctcaaactcctgggatcaagtgatcctccacctcagcctccctaatagttgggactacaggcatgtaccaacacaccttgctatttaaaaaatgtttctgtagacatgtattctcactatcttgcctggctggttttggccatttttgaactcttttgattctcacacgttttatagagttttccctaaagtgcatagctctttattccttagggggatcttaaaatagggagatccctattttattgtgatgaggtcagtgttcctgtgactaatcactgagttacatatgtcactgaggaaaactgttcctctaagctacagagattcctgacattgggaaggagacatatagagttagccttaagcctgttagaataaagagtgtaagccttctgtattg

SEQ ID NO: 189945 - DNA, 220 bp, Homo sapiens
gtctagagtacccggtcactgctacaccccatccctcccctttcctcctttgtctggattattagaagaggttgaattcagaaatgtgactaatttttacagattgtgtttttacagactagtttttagaaatgtgacagtttttacagattgactcccttcactgaagaaggaactttctttgtagtctagatttttttagttttatgatacatgtcta

SEQ ID NO: 189946 - DNA, 315 bp, Homo sapiens
ggattatggaactttatggaaaagccgtagctgagtgctatttgtgttgtacttaactagttttctaccaggatgactgtgcagtctggagaaaccactgtgtaacataaaagaaaaaagtgctattctgtttaaaagtgttttgaaatgttcagaaaggaagaggccagaatctcttagaagacagacttggaaggagttgggcccttcaaaaggtggtaaatatgtgattctcatcatttaatatatgttaacttatttgaaactcaaatttgtacaaaaagctgaccagcttctttttctactaaatttgtc

SEQ ID NO: 189947 - DNA, 164 bp, Homo sapiens
tttagaaactacaccttcaaaactggattgcttctgatcaagtcaaattaataaatagcgatgaaaagggcctcagctgtaaagagcttctagaaatccctcccacccaggagaactctctgctctctacctccccggtagccagccgagaggaacttccagtt

SEQ ID NO: 189948 - DNA, 934 bp, Homo sapiens
ataatctttatgtttgacatgggagctattccatattaagggtactgtgtaacattttcttctatcatattaaacataatggaaaaagtaggcacattttcttcgtttgaatggtgcttataagaaattccaaattctgtttcttttcattccatctgctactttgcatttatacttttgcttcatattgggattctcagatgatactaagggagtgaaaaggcaacctacagggtgggagaaaatatttgcaacacataaagctgacaaagggttcatatgcagaatacagacaacaccttcaaataaagaaggacaatctattagaaagctggatgagagttgaactgtacaaaaaagtctttttaaatgaccagtaaatatatgaaaagggactcaactgcaatgagatgccagtaggcacctatcagaatggctaaaaaaatctttaagatggacaatagctaagcattggccaaggcgtgaaacaattggaattctcatacattgctgataaaagtgtaaattgataaaagaacttcagaaaactgatgcccatttaaattcagcctgcacatacccttatgaccacaaattccacccaactgaaatgaatgtaagtgtggatatgacaactctagttacaaagaatcaggccgggcgcagtggctcatgcctgtaaatccagcactttgggaggccaaggctggcggattacgaggtcaggagatcgagaccgttctggctaacatggtgaaaccctgtctctactaaaacaaaaaatcagctgggtgtgatggcatgcaccctgtagtcccagctacttgggaggctgaggcaggagaatcgcttgaacccaggaggtggaggttgcagtgagccaagattgtgccactgcactccagcctgggtgacagagcaagactccatctca

SEQ ID NO: 189949 - DNA, 550 bp, Homo sapiens
aaccaaacaagaataaacataatatagaatccaagaggagaatagtgcaagggagttaaagcccagaatgaaatgaaactgaagaggaaacgtcaaaagagactggtaggttcaaaggaagataataaacagggaatgcaagggaagggctcagtgctgcaatggatcggatgatgttaaaaatcccctagggttcctaagctccataaggcagaacctgtatcatcgttacctttgtacaccctgcagccagcacagcaagtgacacaggtaagacatcccatcaaacttacttaaaccaagttaacagaggaagaagtcaattctttaactcatgcttgtcttttctgtagggataaaatattttcacaatggaaaacgcgcaatcaacagcataaatgaagaaactgaaatgactacacttaatgacaaaattaaaagggaaaatttttagtataagaaagtacttgctaatgatagatgcagaaggccaataagggggagggtcctcagagaatctccaaccagcttgtgcactgggagaactggg

SEQ ID NO: 189950 - DNA, 151 bp, Homo sapiens
aagtgtattcctaattttaaattttggttttttttgcagctgttgtgaaaggggttgagttctttatttgattctcagcttggtcagcagctgaagcatttgaataagtgtgtacagatcactgctttgagcagatgggtggaggagcagg

SEQ ID NO: 189951 - DNA, 328 bp, Homo sapiens
tttttctgaaagttcttctagagtgaagttggaatttagtttgagcaagttgcgatgtggcgagtgcggagttagaactgagcaagttagtgtcaccctgtgatctgatctgtgcaccctctggaagtgtggcgtctagagtcaggccagactaggccaatgctccagtccaatattgctgaccagtcagcctcttatggccccttggtggtccttgcgtacatgtccccttctggtctctggctggaggcctgagctcctgtgggggcagcgttgctgcccttgctatgagcttatgtctttgtactgccacctgcatggccaaaac

SEQ ID NO: 189952 - DNA, 418 bp, Homo sapiens
ctcctgtttcagttcagcatgtacaaagcatcatattttggggtatcggtttctgagccccaacacaggcatcgcagtcttcactgaagaaggaggagcagaggctactgtgcacagttcgtcccagggaatgagaagttgagcccaactctgcctccaaggcccctcagcccctccagctttcatcttctgctctattctcaatgtgctggaccacattctaggtgccgtcttagtctggagagcaaaggagaaacagaccctgactttgacaaagttaacatcaatacagaccgaaaaatgtaactaatctcataaatgaatatttgcaaactactatgagttgatttcatctgagttttgaatgtagccttgagttgaaatctgaaggacaattaggaatttcagcaaagagtga

SEQ ID NO: 189953 - DNA, 524 bp, Homo sapiens
ctcccaagtccaggcaacaaactaaaagaagtaatgccctatgcgctggaggggaaagaggtcatggctcctcccatttccgtgcccaccactccctcctctttcaaccccaagccaaaggcaggaacagaagggacacagttgaggaggggcatcacctggaattacaaagtacattacaaagtgactcaagcacaaggatgtagcgcattctctcccaccttgacacccaggagcagcacaggtccttgtggctggtgagaggaaccacttccgcctcttcctgcctaggtcaccagagcctgcggcacccaagtctgggagccaagccagctttccccaaactctgttcccatgaacatatatccacctcggggaccgggggtggggtgagggaagatgcgagttatttccaggtttcctggccataattagcatctcactagtacttaatcccaaaatcatttttagtaagaaaatcagatttttttttcaggtaatatcttgctctaattccactttca

SEQ ID NO: 189954 - DNA, 478 bp, Homo sapiens
agcttggctgaatgatagtagtttgaattagaaatgaggaggtagtataattcctgtgttgacactcttgctttgtagtttaggtcaagtcactattaaaaatgaaaccataatctacttgaacttgctggaaatcttgttaaacggtgcctcagatgttagtactgtgcaaatattttaataaaacatctatatacaggccgggcgtggtggcaggcacctgtaatcccagctacttgggaggctgaggcagaagaatcgcttgaacccgggagacagaagttgcagtgagtcgagatcataccattgcacaccagactgggtgacagagtgagattccatctcaaaaaaaaaaaaaaaaagagaatgtttacataaaacccagtgtgctatgattatgttctaggttcacgattctgtcatgaggataaacagatggcattaggatagagttacaccttacgatcctgaccaaata

SEQ ID NO: 189955 - DNA, 435 bp, Homo sapiens
ctttgagccttggtttcctcactgggaaaaatacacctgtcctgaattttagcctctagcagttggcttagctactcgtagcacctctcctcttctctgcaatataattctgcgaatttatttcctcctgaataaaatataattttttaatgctttactgggattacaggaaattgggaaagtctccaaagccaccttccccaccaaaaaaagggaaacaaacattgagtcaaaactagctaggagaggcaaacagtaagcaagcaggaagaacaggcttttgtccttagtgcaagtgttgctagcgtaggttggaccatataaaattgtggatattcaactggtttgaccccaaaaaagcaacattttcacatagatcaacctaatagtagttccattcaggatgccaaccctgagtctctaccttaaggcaga

SEQ ID NO: 189956 - DNA, 300 bp, Homo sapiens
tttcaagaccctgggacataacctcaggacaccagcccctgagaggctgctgggaagagctggagcgcagtgctgctgtgtgaccccaaatctgctcctctccatcaccttggttttagaaatttcccgttgctgtggttgtaaggatacatgattctggcacacggcctcttagcacagttttgatggacagtagcagcttctggctagtctccctgtttcagttctctgtcctctccaatctagtctctttgtaatagccagtgagctgcggacaagatctgatcattttatttcttt

SEQ ID NO: 189957 - DNA, 538 bp, Homo sapiens
tatgtgcatgcgtggacatgtgtatgtgtttgcatgtgtatgtgtgcacacatgcctgtgtatgcacatgtgtgtatatgtgtgcatttgtgcatatgtgcatgtgtgttcatgtgtgcatgtgtatgggcgtgtggtggtgatgatggttgaacagtcctgcagccctggtcccatatggcctattcccagcttggactggcttcctggggtggacatggacaggaaaagatgccagactcatagagaaccccttcttcctccacaccagattgggcagggggtggggaggctttcaccttagcaataggcaatggttgaaatatcatttccagggtgacatgacatgatgtttgggatttacttcgaaagaacaggggtggagcgggagatacagatgaaacaagactggctcagttgataattgttgaagctggctgttgggtaccaggggttccactaaactattttctctacttctgtgtatgtttgaaatgtcctggaacaacaataaaacacttatgtcatctccagtgat

SEQ ID NO: 189958 - DNA, 408 bp, Homo sapiens
cccggctaattttttgtatttttagtagagacggggtttcaccgttttagccgggatggtctcgatctcctgacctcgtgatccgcccgcctcggcctcccaaagtgctgggattacaggcgtgagccaccgcgcccggccgatttgtgactttttaaaattgtagccttctgaaactaagcgaaaaaaaaatatgacccaaaaaagggaaagtaaaaatagacaagcaagcaaaacaaaggctgtacatgtacataggaaatataacacaaatcaagtagtactggtggaattactggttggggggaataatttttaacaaactggtagcagacaaggcaagtggttagacagagtaatttttgtcataattttaaaacatttcataatgagcgaagtttaaggaat

SEQ ID NO: 189959 - DNA, 334 bp, Homo sapiens
cccggctaattttttgtatttttagtagagacggggtttcaccgttttagccgggatggtctcgatctcctgacctcgtgatccgcccgcctcggcctcccaaagtgctgggattacaggcgtgagccaccgcgcccggccgatttgtgactttttaaaattgtagccttctgaaactaagcgaaaaaaaaatatgaggtgaatttttgaaaggcctaaacgaagaaaaatgagatcccaacttgtctctcatgtaagggaggtaaagaaaagtaagtgttgaatgccaggtgtagtagtctgctctttatttgagtcgagactaagaagcaat

SEQ ID NO: 189960 - DNA, 604 bp, Homo sapiens
gccctagaggttcccgcgttatccgtaccatcagagaatgttataaacacctctacgcaaataaactagaaaatctaggagaaatgggtaaattcctggacatatacatcccccacaagactaaacaaggaagaagttgaatctctgaatagaccaataacaggttctgaaattgaggcaataattaatagcctaccaaccaaaacaagtcgaggaccagacggattcacagctacattctaccagaggtacaaaggggagctggtaccaacccttctgaaactattccaatcaatggaaaaagagggaatcctctctaactcattttatgagaccagcatcatcctgataccaaagtctgggaaagacacaacaaaaagagaaaattttaagccaatatttctcatgaacatcgatgcgaacattctcaataaaatactggggaaacgaatcagggaggacttcaaaaagcttaaccaccaagatcaagtgtgcttaatccctgggatgccggttcaacatatgcatatcagtaaacataatccatcacataaacagaacaaattgacgaaaaccacatgattatctcaatagatgcggaaaa

SEQ ID NO: 189961 - DNA, 338 bp, Homo sapiens
ttgtttaatatctctaactctgaacttccacaacctttctatcagatattcaggtaagtgctgagaagcagaaattctaaaaataatttctactgaatcttttggagaccccggagcaaactatttgaatccattccccttctttttgcatagtttttctttgtctatttgaacagtgctctcatgggtcagaaagattgagtttctagtcccataccttaaattgctttataattgccttactttataagggagacatatcctggcacagtgaagcctgcaaatattccagagaaattaatctgaacctattagaagtgggaggagggaaagaaact

SEQ ID NO: 189962 - DNA, 385 bp, Homo sapiens
tcccccaaatttccaccaaccgtgattgctcctgagcgactccaaactcctggaatatcctggttttgacccataaatagtgaactgattttctatctgacatagtttggaaatttgtccccacccaaatctcatgttgaaatgtaatccccaatgttggaggtgggccctggtgggaggtgctttggtccttggggtgcatccctcatggcttggtgctgtccttgcaatagtgagtacttgtgatatctggttaagtgtttgatccaccccccatccctcttgcttctgcttttgccatgtgacatgcaagctcctgcttcaccttctgccctgagtaaaagctccctgaggcctccccagaagcagagcaaatgccagtgtt

SEQ ID NO: 189963 - DNA, 658 bp, Homo sapiens
aacaggaacatgcggcattgttgctggtaatgataaatgtgcagccactgggcaaacaattttgtggttcctctctaagttaaaaataatggctgggcgtggtggctcacacctgtaatcccagcactttgggaggctgaggtggatggatcacctgaggtcaggaattcgagactagcctgaccaacatggtgaaaccccatctctactaaaaaatataaaaaattagcccagctactcaggaggctgacgcaggagaatcccttgaacctgggaggcagaggttgcagtgagccgagatcccaccactgcactccagcctgggcatgacagagcaagactccatctcaaaaaaaagaaaaaaaaaaaaccctcggagggcgactcataatggacggggggcggggaaacaaagagggtaactggaacaggtgggcccgaggggctcaatagcgcgggttctccgtgacccgagcattttcgtggttaccacaggggggggtagaaactcgtggcggggatctactcacctttatatagagagcgaagcctccgcctatatataaattttctgcggcgatatagagccgcgacgagagtgtattaacccgcgtggggaatattataaaggaagatacatgcgggggcgggatacgat

SEQ ID NO: 189964 - DNA, 353 bp, Homo sapiens
cacgcctatcactgacagcccaaaaaaagtgtactttaattacagggagcatccagggagggggagctgtgcagctccttctttgttgacaggaaaaaattcagctagcattaaaggcaggtcagtagtgtcaacctgttttcctgcccacacctcccaaggccatccagtctcctggctttactgggtggagaggtgctcagcagcttctgtcactagctctgaatggcctgtctcctggacaaagaagctttcacggactactctgcagggaggtgacattggaccagagctgactccacctgggggaaagagtaattctctggttctttataggtgcctgtgtagaaaga

SEQ ID NO: 189965 - DNA, 200 bp, Homo sapiens
  misc_feature (180)..(180): n is a, c, g, or t
  misc_feature (194)..(194): n is a, c, g, or t
gagtaagtacaagagagagagataagaggatgttgagactaagatggatttttggaggatgggaaagatgagtctttaatgctaaaaaaatttccaatgactcttaatttcttctttgagcacctactatatgccaggcattgtaccagatagaccctggaacgattgctatggtggggnggatccttctagcnagtcga

SEQ ID NO: 189966 - DNA, 260 bp, Homo sapiens
ggaggctgaggcaggaggattgcttgagcacaggactttgagggctgtagtgagctgtgattgtgcctgtgaatagccattgtgctccagcctgggcaacatagcaagaccctgataccttgggtttttaaaaaacaaaacaagatacatgctgacatttctggtttggcaggcagagcttgttctgctccccaccctcccttttcccatagtaaccatttataggacatctcactgttgtctactctgtgttgcctctg

SEQ ID NO: 189967 - DNA, 336 bp, Homo sapiens
taattttgtccagtgcaatccaatacatgtgcattgatttgagtcaacattgttgaaaacggttctgtttttcaaaatgaaaagttacacatacattttcacatctcaattacactagaatgtcatacgttgatattgtgatgtaacaaattttaaaatgaaggttataggctgggcgcagtggctcaatcctataatcccagcactttgggaggccaaggcaggcggaatcacttgaggtcaggagttggagaccaggctggcccaacatggtgaaaccccatctctactaaaaatacaaaagtcagccaggtgtggtggcatgcgcctgtagtc

SEQ ID NO: 189968 - DNA, 265 bp, Homo sapiens
attcagaaaatgttagctcttttttgattagtatttgttattatttatctgaatattaatcatttgaatatccttccctctctcaccccctagaaatacaagaagaaaataacagattctagtccatctgaggggaggagaggggctaggaaggatggctgtttctgcttgtttagaagagataagcagtggatgtgacattaactgaaagtaaatggaaaattattagggaaaattgtacttgactttgagtccccagatacac

SEQ ID NO: 189969 - DNA, 367 bp, Homo sapiens
gtttagctctatacacaaatagagtccaaaggcatgcacttggtgtgattaaatgatgacaaactcatttgatacacattttctcaaatagcccatgttctacagaaaagctctttttcttgattaattttggaagaaagaacaggtcaaaatgcaaatgtgttattctattagcatggaggagcttcttagattataaacttgatctcatcttatacctgatatcagggtcttgagagatacaattaagtctcaactcaggagagcaagtatgaaaagtcaacagcaggtgagtattgccaaaggagggttaatgtgcttgggacatgaaggtcatagtcctgggcagttggaaatccttgagtat

SEQ ID NO: 189970 - DNA, 419 bp, Homo sapiens
ggtccttcctacaacatgtgggaattatgggagtacaattcaagatgagatttgggtgagggcacagccaaaccatatcaccattttaaacagatgaggaaatgaaggcactgagaagttaaataacttgcccatggccccacagcaagtgacagcagagattcagatgtaggtaggctaattgcaaaaccattgttcttaactgttgtgttatgctacctctggaatatcaaatgtatagctttacttgttcagtcattgctggattcagggcccaaacaaggttattgggattctctctcatgttgtattttggctcagtttttctctgggttgattttatcctcaggcaggcattgccggtgaagtgacagtatagctgctgggatgagaactgcatattcataatttagcaattt

SEQ ID NO: 189971 - DNA, 662 bp, Homo sapiens
atactgatatttccctttctctcctcaaaatacctttggcatttatttattcaacaattatttattgtttattgtgggccaggcaatctactaagtgtcagggttaccaagaccaatagcacagtcctaaagaacttgacagtataaataagagattaaaaatactgagaatactttccgaataccctcaaaggtaccacagcattgcctaaaatataactgtaaagactgggaacttcactttagggtcaatagattctcagagattgggagtgtaagtccacaacaatggaccctccttcaacctggagactttttcttattttctattgtattctgagccagaacagagactcacaagagatatttattggctattagtgagcaaggagctggagccatctagaataatgacttagccatgcatgaatcttctctatttttatttccagcgctagcttatttagcttttctttgacagcattacttcacagagtagcccattccatttttgaccagctctgtcaggaaattcttcctcattttgtgcagaaatatatccccctccaagttccacccacagaggtgcattctgtcctccctctgggactcccaggaacacacacaacagttctctccactgtgtccttctattttgaaat

SEQ ID NO: 189972 - DNA, 458 bp, Homo sapiens
aatatagtgaaactctgtctccactaaaaattagctgggcctggtggcgggtgcctgtagtcccaggtgctcaggaggctgaggcaggagaattgcttgaacatgggaggcggaggctgcagtgagttgagatggtgccactgcacttcagcctgggcaacagagtgagactccatctcaaaaacaaacaaactaacaaaaaaatgtaattgacaagaaaaatagctgtttagatataaggagaaataaaagatactatagtagcagaacctgatctagctgggtcacgggtggggtctagaagcattcctgaggaagttacacttaagctgagacaggtagaaattatctagttaacaaagggctgtcctaattactctagttggataaccgctcccaaaacttagtggcataaaacaattattttattatgctcatggattctgagagtcagaggt

SEQ ID NO: 189973 - DNA, 410 bp, Homo sapiens
tgccacatcccatcttgccctacaattcaacttgcttactcctacaccttcaagattcccccactttcagtcaatcaatcatgtgaagagccatgctgtaattttgtgcttttcacatcctcaacttatgttacaatgagatttcgaggtgctttttgctggctcaagctgataagagaaaatatgtaagagtgttggcttcttgagctaacatcagtgttgtgagttatataatgaaacctgtctggatcggaatcctaaagctattatctttctagaactgagataggacacttaaggagccatttagaatctcttagccacttataggttgggaaatcaggttcttttcctcttaaaaaaggtttgttgagggtagcttaccatattgtcagcattttgccttatca

SEQ ID NO: 189974 - DNA, 611 bp, Homo sapiens
tgagagcaaggagaagtcctctttggttaggtaaggcccctgagaaaatgagcagaggatgagaaggcaccagctgtgtaaggggaaagaacatcccaggccaaaggtatatgtgcaaaggtgtctgaatttagaaagagtctggcatgctttaggaactgaaagaaggccaggtactatatgatagtttgtgcttccctcatttcttcatattatactgtctccttcactagaataattgttcttcaagggtggtgatgacatctgacttcttcccagctgttttcctcatacctgtcacaggttggcacagaattagtatttattagatgcttgataaaaaattaagcgcctgttgcttgctcaacaactactatgtaagttctaagatatcataattttatttttgggcttatatcagtgagtttcatgaaatacaaaattcacgcttaaaaaatttaacatatttaactgttttatatctctaactgtaccattaagttcaaactactttgatgggctgggttaaatgctacataggatgatcctggtttatgcctgttgtcctgtgtccaatcctatttcacaatggtctcctttcactctaagtg

SEQ ID NO: 189975 - DNA, 191 bp, Homo sapiens
gattgacgatttatgagactgggtgacagagcaagacctgtctcaaaaatcgatcaatcaataaatacataggtacatacagaaggatattcttcagttttcctgatccgcttaaggaggtggctaagaattccaaggccagccagttatctcagaagcaatttgactgacagcgaagacacgataaataa

SEQ ID NO: 189976 - DNA, 461 bp, Homo sapiens
ttagtacagacagggtttctccattttggtcgggctgatctcaaactcccgacctcaggtgatctgcccgcctcggcctcccaaagtgctgcgattacaggcgtgagccaccgtgcctggccatctttaattgccttaatgaagtcacgggttggaaaatataagttttaaaatgtcaggcacctatgggggctacgtaatattatatttttgcctaaggatgtctctctcagaagcctgggcactatagttcctaaatatcccccaacaaccctgaaatgacttagtatcatcaatataataataaagcaaccatgaataacattaataacaagcatttgttcctcatttttttatttagggtctgacatttttactgtattttctcacctgtagttaccaacaacctacaccatagagaaaatagcaaaggctttggctcctaacacatctgatgcttc

SEQ ID NO: 189977 - DNA, 356 bp, Homo sapiens
ggagaagctgaaagccattcccatctaagaactcagaggtgtcagttgtttgcctgccgacgctctcatgtgaactaagagaatggaaccggacattcgtgaagtgctcagagacctaagttgcctaggctcgtctcaaactcctggcctcaagtgatccttctatctcagcctctcaaaattctgggattacagtagcataccttggaagtttcaggcctcttgaatgcagaatcatagaatttttagccctggaaggagccttaaagtcattgaatccagtcctttaagtttgcaagtggagacacagagactaaggtgacagtgccatgctgggccactccgtttggggtgag

SEQ ID NO: 189978 - DNA, 198 bp, Homo sapiens
acttttccccataagtagaagtaacttgagtgtgcacaaagtaactcttttgtgattttggagaaatgtatttccagtccaaagtggagtttctgttcaatgaatttcctaaatttagtatctctgtttctcactctttcactctcttctctcttgatgaaactacatttctactgggaatcataaacaatcatcttt

SEQ ID NO: 189979 - DNA, 553 bp, Homo sapiens
ttaaaccatttattccatatcctactcaaatcccccagtcaagcagatgagagacctaaccctcttcccacatttccattatttaagacaaaaggaaactagatttaagcctattagtcattcacgaaatctagctattactacatgtattaactggtgacaacttggtgtaaagggcaaagagaaatgtctcaatctgctgaaaatcacttctgactagggtcaatcatgaatattaactataataccaagcaacagccagcatctacttttccagctgtttgtaattttaatgaagtctcatacgccctctgttggttctctagcatatcttacaaccagaataggcaaagggttttcactgatctattttaacatggaaggtcagaatgttatcttgcaaccagtgcactacgttccttgcataatggaaaataaggcatatttaattttgcatatgcaaaaatcaccacagacacgattataaatgttttataagaaatttttgaaaaaattcataccacgaaccaggcaagtatattaaaccaaaaca

SEQ ID NO: 189980 - DNA, 366 bp, Homo sapiens
ctatgactgcaacgctgtactccaaccctgggcacagagactctgtctcaacaaacaaaaccaaaccagtagaataaattgtagtgtactcataacatgcaatagtatgcaattatgaaaatgaacaaactactgctacacataatgtggataaactttataaacatgttgaacaaaagaaaccagatgtaaaggaatacatactatatgatttcattaacataaattcaaaaataggcaaaaccaacctatagtgtcaggaaggagtttgctgccgggacaaaaggagaggatagtgattagaaaaggggctgctgagagagtgttagtaattcatctgatggtggttacacaaatgtgttcact

SEQ ID NO: 189981 - DNA, 799 bp, Homo sapiens
ggggggaggagccaagatggccgaataggaacagctccggtctacagctcccagcgtgagcgacgcaaagacgggtgatttctgcatttccatctgaggatgattaacagcattcaaggtggtggctacacatcacatcagcctggattctcaagtaggaagatacgcaacagagcatccagctgaccttcactggatatgttgtatgaacaagaacatgcagcaatatggtggggacgcatactacagctgagctctggacaggaagttttccattttatgagaaactcaaaccaccaagaaaaccagcttatctcacaaaatatttttatacttctctagaactcagtaagaggccctcaacggattggatgatgcctctccacggtccacatcggtgagggtgattgtctttactcagcctattgattcaaacactaatctcttctggaaacactctcagactcacccagaagtaatgtttggccagccatcggagcatcctctggcttagtcaagttaacacatagaattaaccatcacagaaggcaacagaaaaacctttaaagaatcaatagaaaatatgtgcatcagaaaatattgctggttacccaaaagctatttcccttttgttccttactaacaactcttactttgtttatatttggaggaagtaatgtacttaaggaagttttgtctctaacccagcattcaagaatgcgaagacaatcacgttaatcccatttcctctaccagtgattggtgtggaggtgggcatatcactcacttataaccaaaa

SEQ ID NO: 189982 - DNA, 681 bp, Homo sapiens
ggggggaggagccaagatggccgaataggaacagctccggtctacagctcccagcgtgagcgacgcaaagacgggtgatttctgcatttccatctgagcatgcagcaatatggtggggacgcatactacagctgagctctggacaggaagttttccattttatgagaaactcaaaccaccaagaaaaccagcttatctcacaaaatatttttatacttctctagaactcagtaagaggccctcaacggattggatgatgcctctccacggtccacatcggtgagggtgattgtctttactcagcctattgattcaaacactaatctcttctggaaacactctcagactcacccagaagtaatgtttggccagccatcggagcatcctctggcttagtcaagttaacacatagaattaaccatcacagaaggcaacagaaaaacctttaaagaatcaatagaaaatatgtgcatcagaaaatattgctggttacccaaaagctatttcccttttgttccttactaacaactcttactttgtttatatttggaggaagtaatgtacttaaggaagttttgtctctaacccagcattcaagaatgcgaagacaatcacgttaatcccatttcctctaccagtgattggtgtggaggtgggcatatcactcacttataaccaaaa

SEQ ID NO: 189983 - DNA, 344 bp, Homo sapiens
tgctaggattacaggcatgagccaccgcgccgcatttgggtttctacatcaaaacctgacaccaccagagcctgtgagagtttcttagggtcagagctagatatggcaattacggttataacattcattaccttcctaagcccactgatcatctgttgtacagcctcatagtctctgggaaataagtccataaatcaaggagggcaatgaagaagtagaaataaggactgaactaaaagtcccttaataactgaatattgaatgcttctggtgaaaagaatgtattttaagaaaattttatgggaatcaccattgagatgtatataggacttggactgtatatt

SEQ ID NO: 189984 - DNA, 452 bp, Homo sapiens
ggaaaaaccattccagtccttctgagagaagctggcgcagtccgtctcagagaaatcactgcagtccccccgagaggagctgtcacagtctctctgaaaggggccttcacagtccctctcagaggagccatcgcgtccctctcagagaagacatcacagtccagcccctcagagagaagccatcacagtccctcagagagaagccatcgcagttcctctgagagaagacatcgcagtccctcccagaggagccatcgcgctccctcagagagaagccattgcagtccctctgagagaagacatcgcagtccctctcagaggagccatcgtggtccctctgagagaagacatcacagtccctctaagagaagccatcgcagtcccgctcggaggagccctcgcagtccctcagagaaaagccatcacagtccctctgagagaagccatcacag

SEQ ID NO: 189985 - DNA, 523 bp, Homo sapiens
ccccgtccctaccaaaaaacgtacaaaaaaaatcagctgggcgtggtggcgggttcctgtagtcccagctacttgggaggctgaggcaggagaattgcttgaaagaaactgcggaggttgcagtgtgctgagatcgtgccactgcactccagcctgggcaacacagcaagactctgtctcaaaaaaagaaaaaaatgtaatggttaagatttaaattctaaagttttgaaatttaattctggagttgtgctgaggttaaaatcctgggaaccaatcctaacaagttttgagacttcaggctcattacttaaccttcttgtgcagttcattttcctcatctgaaaaatggagataaaatttctaccccatttgcaggtttattatgatggttaatatatgttaatatatgtaaagtacttaaaaccgtgcttgacacattctgttctggtggttgttagtggctgagggtataccatctgacttagggtctcagtctaggaggggccgtgcacaagtcaacagg

SEQ ID NO: 189986 - DNA, 483 bp, Homo sapiens
ggcgatgaacactacatgccgtgtagtcacagctactagggaggctgaggtgggaggctgacttgagccccagagataagaggctgcagaagctatgctcactgcactccagcctgggcaacacagcaagactctgtctcaaaaaaagaaaaaaatgtaatggttaagatttaaattctaaagttttgaaatttaattctggagttgtgctgaggttaaaatcctgggaaccaatcctaacaagttttgagacttcaggctcattacttaaccttcttgtgcagttcattttcctcatctgaaaaatggagataaaatttctaccccatttgcaggtttattatgatggttaatatatgttaatatatgtaaagtacttaaaaccgtgcttgacacattctgttctggtggttgttagtggctgagggtataccatctgacttagggtctcagtctaggaggggccgtgcacaagtcaacagg

SEQ ID NO: 189987 - DNA, 430 bp, Homo sapiens
atcgtggacatgtatcatcatcttgctaagcttctgttacatcatctgtaagatgaggatagtaacactgatcccacagacggttttaaggattgagtgagaaggtatatgatagtctcagcaccggtctaatgctcaggaatggctcagaaacgggggcgtttttaatgaaaatattaacaaggctttgtttcccaatcccattcaatttgtcttggaactgctaagtcgattcattctgatttctaaatcctaatcctgaaatgtctgaggcaaagatcaccctgtgttttaattgggcacttgtctcatatttctcctctgctgcatgagtgtttatgctcatgtacccaggaagcacctggggaacacagccaggtctgtgtgattctctacagagagcaagcagcagagttgcaatcaattaggt

SEQ ID NO: 189988 - DNA, 554 bp, Homo sapiens
gttgcagtgagccgagatcacaccactgcacctgtaagctgattgtggctgatttaatcctctatctggaccactaaatcttttgatgcagggaaggcaaactccagaattggggcttagccctggagggttcttggctccacacaggaaataattcaagggtgagccagtggtgttagacagcaacttttattgaagtggaagtatgcagcagcagaggtactgctccttgtggagcagggatacttgaaaacaggtgcccagagtagcagctcagaggcagttttgcagtcatatttatacccacttttaattatacatatacttagggtcagattatgcagcagtttctaaaacaagggtggtaacttccaggtgattgggttgttgctatagaaaggagtgataacttttttttttttttttttttttgacacagagtcttgctctgtcacccaggctggagtgcagtgacaccatcttggctcactgcaacctctgcctcccaggctcaagcattcttgtgcctcagccctgcaagtaggtgggattac

SEQ ID NO: 189989 - DNA, 525 bp, Homo sapiens
cggggcaatgagaaactgagttttggccaaaatggaaggtatttttatcccgctcagtgcgcgggctactttgatttcacgtggaggtgttaatcggggtcccctgcagctccggttcttttaattctcaatgcctttctgcggggggtcgagagctgttggctgcggggcactctggaatgaactcgttttccgtcgttttggggattggcgattgtcctgaggcgtgttactggaagtcgagagctgtgatgaatggttccacaaggatgggacatcttttgggcctgacacctgggggccctttccctggctcctggtgtagctacttaagtataaaggagggattggccctggaaaggtttctttgtgagtagtctgttgttggggcgggtgacatttcagagccaggccgatctaggcaagttgtgttcaccaagcatgtgtctttgtgcctagcacagttcgcaatgttttgcgtagttcagttaaccatattcctgaggcagttactggtatccttgt

SEQ ID NO: 189990 - DNA, 328 bp, Homo sapiens
ccaattccagcaactcagaactcctggggagtgaccgacttggcgaataacgtcctctcacacaaacctgctcttcttcaattattaaaagatacccgctgtggtaggcttgaaagtgcccccccccccaaatatattaatatcttaatcaccagaacctgtgaatgttaccttatatggcaaaagggactttgtagggcatgactgacttaaggattttgaggtgggggagttattctggattatctgggtaggttctaaatgcaatcacagggtctaagaggaagacaaggtcaaagaagaaagaggctgatgccacagtcccact

SEQ ID NO: 189991 - DNA, 298 bp, Homo sapiens
cttctccctgagacctactctgacctattgaaactgtgactgtacccctgtcttccctagcattcccaatcccccttactctgctgggtttttttaatagcagttacctcctaatatgttgtaaaatgtagatatttagtatgcatttctttaattgtctgcctgtctcctgcccccaactagaatttaagatccacaagtgaggagatttttgtctgttttgtttactaacgtacatcaagcaccaataacagtgattgtcacatagtaaagcactgaaaaaatatttaggattact

SEQ ID NO: 189992 - DNA, 219 bp, Homo sapiens
ctaaaataaaataacaaaaggagatgacttattgttcatggtaatttgtactgtatttattactagctagagaatatacattcctaatataagcatccctatacattttcagagaataatgcatattcctaaggtgccatgaagattgacccatcgttctacttacttgaatgtgtctctgggccacaacttgattcatctgatcttttcaatactatg

SEQ ID NO: 189993 - DNA, 683 bp, Homo sapiens
tgattgtcacactgatgcttttttaaaaagggtatacagtaaaaataagtcttcattttctatccccagatgcaacctctgttacattgcttagatctcattcttgggataatctgtgaatatataagcatatatttcacatatgttcaacaaatagtcttttgatgaattaattcatgaatcactcttattacaaacccattgtgacagtttttcatgggggcaattagatgagagcttctcattctgttcataaaactgtgttgagtaagccttacctaggcaacaacaacaaaaaacccataatttagccagctcaggaaaaataaaacacaaaaacaaaccttttcatattgaatctttttgtctttgtttatagctctggatcagaaaatcaacaatgattatagaatgtcacccaactcctacaaagaaaggagaattctttaatgaggtaaccaaaaagattttctttccacagaagagataattctgttcttagactttattttagcaacagaagctacctggtgaaataggaacctttcaggtttggttttgttttgttttcccgagacagagtctccctctgttgcccaggttggagtgcaatggcacaatctcggctcactgcaccctgcgcctctggggctcaagcgattctcctgcctcagcctcccaag

SEQ ID NO: 189994 - DNA, 505 bp, Homo sapiens
ggtctctttttcacagcatttcacttgacctcccctaaggcatcactgtgctgttttgtgtacttcaatcacttgtatttttaagtcccctgctaaactataagctttctgaagacaggatgcatctcataattcttagctctagcccactcactgccaaacttagtgccttacccacagcggatagagaagctatgtcttttttatgttctttgttaagagggaaggaggacagagaggtttagactattttagagagaatggtaagcaaaaaatgaaaaactaggccaaagatgactagcaaactcctcacaagtgattacttttctacctcctttggtatttctcattgtacacagtattttatgatgcttaataaatactgaatgaatgaatacaagcaaaatgtgaactaaattcaggtctccttcttcaggtccctggacataagggaggcaggcagcagagtttattctgatgaacaccaagaaaggttatatacact

SEQ ID NO: 189995 - DNA, 323 bp, Homo sapiens
acctcaggtgatccacctgcctcagcctcccaaagtgctgggattacaggcgtgagccaacatgcctggcctttatttggtatttcttaaaaaggcatttgtattttgttccatagtactgtatggtgttaggtctctagattacaggcgtgagccaccacgtctggcctttatttggtatttcttaaagaggcatttgtattttgttccatagtactgtatagtgttaagtctccagatgtttttgacttaggtagagacaaagcttaaggttaagggttgaaaacaatacaggtggtaaagactattgagggaatccagga

SEQ ID NO: 189996 - DNA, 246 bp, Homo sapiens
aaggccatgggaaatgtgtgcacaaaagtcgatcatcactctgcattaagagaaggattctgtaagtttcggttaaaactgaatcacagggacagttctcacaatgacagcactagaacaccaagctaataaagaatcccaatctaaggaagattttgaaactgtccagtatttatgtgcttgaggcttatttctccttcacagtaaaatctaaaactcccctggaagtatttataatgcactgtg

SEQ ID NO: 189997 - DNA, 554 bp, Homo sapiens
aattatattagcatagtcagaggttttcttcaacataaatttgttcatttaacaaatatttatgagtacccaagtatcagactctgttcttaggtactggagatacagcagggaacaaaggaagcagagtccattctctcaaggaacttacattctagtgggaggagacgtttcatagtggtgttataaagaaaaacaagcaaaatggggtaggaatgggttctattttacacaaggcaacctgagacatcctctcttctgacattcaatcagaaacccaaagaaggtaaaggagaaagaaggtcatgagagaatagtagtacagggcacaagcaaaggcccttcggcaggacaaggttaggggagttccaggaatagctagcaggccagtgtggttgaagctaaaccaggaaagaaagaaaaaaagaaaggtagaaaataagatcaaaggtagcaaggagcagatcatgggtctgatgaacagttatatgctttctacagagagcttacagttctacaaacttagggcatgagtcaaatgatgctaatgacac

SEQ ID NO: 189998 - DNA, 381 bp, Homo sapiens
tgcaggggctgcctccttttccttcattcccttctgctttcttctgcctgctcagattgccaactgtgtgccccactccagtttttaaaaacagtttttcttttgaagtattaggtattcagttattgactgaaggaaaaggagacgtgaatcctgaaaggaaagtataatcatttgaaaagacaagtattatgtgcatgaaataattgccaaaactgctattgccccacatataccagtctcctatccctctggccattgaagtcccttcttcgctcacagatatttactaaacatctcctctgtgctggcccaggatatacaaagagcccaagaacctgcaacttaacagtctctgtgggaaattcttaagtcatagga

SEQ ID NO: 189999 - DNA, 304 bp, Homo sapiens
gtctttggctccagccaaacttcaaagtccagctcacattcatcctctgtaccctccttgactctggcattccccacaaacactgaatacaaacgctgacctaaggcattacttcatctaggaaattatccctatcctttaggctaatttagatacctgctctagatgctcacataaaatctcttctatatcaatcacactcatttataggtctctccagcggactattaagtctccagagaaacagtacttagtagtccctgcaccagacaaagagcattcaacaactgcagtttcagggaat

SEQ ID NO: 190000 - DNA, 417 bp, Homo sapiens
cagtgagactatgactcacattctccagcccctctgcctcttgggctctggctttctcacatacttttcctctaaactacaaggagccacctcttcaagttccatgtcaaaacttaaacaggccttcatgagtaaacaccagttcagcaacttccagatttcagggcttttctatatctttgaagtcttgatctctacctcaagcttcttatcaaagtacgttcccaataaagatcattctcccctgattgcaggttgtgctatttaacataaaaagtgttctcctaccttttcacacatccacgatgtgtatcctcagatcagattcctaagcagaaatgaaattactatataagtacagttgatctttgaataactcaggggttaggtggattgaccttcccaccccagcaggca

SEQ ID NO: 190001 - DNA, 384 bp, Homo sapiens
tatgccaccctgacaccatccggtctatcaccaatgcctcaggtacccatgcagagcttgtggtggtgggtgccagaccaagcttctgtgtggtctctgcagtacccaggtccctccttgagtactcgtgcccctcattgagacttccatctcaatgtcttctccctccattgccatctgctccctgtcttggtgttctgggcaccactggggctccaagaggcctcaattcagggccctttctggaaggaacccccatgcttaaggacacgggtctagacagagacatttccagcctcatagggtcaggaatgggcaagagagatatgggtatgacaacacagagaactgggtgtctgctggggcaggctggaatgtttcctg

SEQ ID NO: 190002 - DNA, 473 bp, Homo sapiens
ggttaatgatcaatcgttaaaatgttccaataaaaccagcagctattgatacacatggtttatgtgttctgggttttgatgtatattgtgaatgtcatatagtcgtaagtaatttgtgctgtagctctgatcgttattacttcactatgaggcccaaggagattgctgtgtgtcaaatgtattctgtggtattaaaataaatcataagactaaataataacaaaagtttaaaatctgagacaggtaagtacatagagacagcactaaggttctttgaattactttgactaattctgagtctgaacagctccttctccacagaggtgtaagtgcacactactataatctttgtgaagttggtaagataggttggggttaccaaaataccagaaacgagatgtctcaaatttttaaaaggcacagatttttaaaaagctgtatcagcaaattagatgtgatcgcccagcggaagt

SEQ ID NO: 190003 - DNA, 1246 bp, Homo sapiens
tatggtggctcatgcctgtaatcctagcagtttgggaggtggaggcgggcagattacttgagctcaggagttcagaccagcatgggcaacatggtgagaccccgtctctacaaaaaatacaaaaattagctgggcatggtggcatgcgcctgtaggcccagctacttggggagctgaggctggagaatggcttgaatctgggaggttgaagctgcagtgagccaagtttgtgccactgcactccagcctgggtgacagagtgaggctgtcaaaaaaaaaaatagtacattactgtattattttatggtttatgaaacattcatgagtaatactgcatttgatcctcaacaactctaacaacagtatgtcatcattctcactgaggaggcaaggaggttggaaagcttcagaaggaaagtacacattttgctttaaaaaagtcattgtagtgatggcattacggatgatactcattttcttctttatacttttctatattttaaacattggtaagaacgtcaaaaagacatatttgaactcagccaatcttataaatacaaatcagtacactatctcaagtttgttaatttcaagagcagtaggagaaaacaacagataacatatgttatatatctcatcctatccctcaattcaagattccagaggaattcctgcattttgctattgtattgagaagcttgtggataacttagaagcatcagccacaaatatgttggcacaatgtagtaataggattccacattctaactgcaactttaaaacacaaggtaacaaacagctggatgcaacatacataccttttggcgcataaaaactaagtaaaaatagattatatatatagtccttattttattgataccctttcagttctattaactgagaacttagaaagtccctgaatttagtataaagtaactttgaaaaatatattctaatgtgaggataaattttagaatacacagataattataatttcattttacccagcattttccatttcctttccagaagctttcaccaaaaattgctactaaatagacaaaacatgtttcctttcatctttttcccttcctacaaggcaaagaaaaaggaaacaggtagaggcaatccaccacttcggcaatcagttcactgtatatttttaaaataaagttacttagtgaaatgctgggccaggcacagtggctcatgcctataatcccagcacttgggaggccaagatggg

SEQ ID NO: 190004 - DNA, 659 bp, Homo sapiens
tgaaacttgatatctatctgggatggccatttgatttctaagaggaattttgtatactccacagaactcctgtctatagtaaaattgattttcagttttaaatgtgggcaaaaagacattttctccaagatttcaaaactaattcttatttttaaatggtttaccaaaatttgtcagtacattttacatgtagaagcattttaaaaataatttctagcaagcacttgacaagctcccctctttgaataaaataatttctcataattaagcagcagaagatctatctttacaaagtatgagggatgccagatgttgataaacttactctttcttaatctggacaaagtaaacttaacagatttttctgatgagcatgttttatgaatcttccattgtgctccattctatcacatgtgcatttttcatgttaaactgcaattacttaatctcttcccctatccttctaaattaattttctgaagttggagtgtagtcttttcccccttaggctacgcattaatcaaagctttcttttcaccatgattttataacgtctagtacataatatttctacttcccacatctttgctttacacagtcaccttgcccttcctcccaccacctaacaaaaaaagatgtgggaagtataaagcgtggag

SEQ ID NO: 190005 - DNA, 246 bp, Homo sapiens
caacgctttatacttcctcaacgctttatacttctcaacgctttatccttctaaattaattttctgaagttggagtgtagtcttttcccccttaggctacgcattaatcaaagctttcttttcaccatgattttataacgtctagtacataatatttctacttcccacatctttgctttacacagtcaccttgcccttcctcccaccacctaacaaaaaaagatgtgggaagtataaagcgtggag

SEQ ID NO: 190006 - DNA, 510 bp, Homo sapiens
aaccatataatttattatttgaaacatcaatatttatgataatttaataatcaactgttcacacagtttgattcaaaatggaaagagtctaaaactagccatgtagcacaatgtggtcaggacaaatcttctaagaaatggctttggtaaatgtggtgaacttcttatcatagcctataattaaacgactctcaaagccagtctggaaaatgtattcagaaactgcagtaacatgctgtgaaggactctcctctttccccctcctcactctttctttctgctttattaccacgtttcccttcctctctttaaaaagagtgtaaccagataatctcaacaatgttcaaaacctgataaaggtgaaaagtatttatcacttaatccctttttggatctgacttttttcccttttttttttgtagatacagagttttgctatgttgcccaggctggcattgaagtcctgggctcaagcaatccttccacctcaacctcccgaagtgttgggat

SEQ ID NO: 190007 - DNA, 575 bp, Homo sapiens
tcacctgtaacaggaaccctactaaaatggcttaaccaaataaggatttgtttttcttttaaggggaggcatgtgagggctagttcagcagccccacaattctatcagagacctaattttctctctcttgttcatcatccttaccatgtagcttttttccttatagtcataagatggatgctttacctccatgcatttttctgcattctaagcagaaagaataaagaaggggcaaaggtgtgtgtgatctgagtttgtccctttttataggaaaataatagcttgcccagggcctcacctggtaaggttttgcatacaaattattgggtaaactacgtcacacagccttaactgtaaaagaatctggggaagtgagaaattttaactgggcacgtagttgtcccagacaaatccaggtaaggaaaaaaggggaaacggatattggtaaagaaccagtgtttattcagtttgtgtttccagttcttataagtatcccctgagacaaactagtgtgtacaactaccttgtatttaaattccatgtactactgttgtaaaataaagattctaaataat

SEQ ID NO: 190008 - DNA, 776 bp, Homo sapiens
ggttgccgctggtactgtggggattgtgaggccagtgctctgcagcatgtatagctgggctgacccaggttcctaaagtcccacgccagacgccctggagcagcattattcatcccctgtgcctctgggaggttgcccacagtgacctccgtcaatcctctactagaccacaagtgcccatgacgatttgtggaagccggggtcctgctgccaccatggcatgatgcacacttgggcttggacccagcaggggactaatgcactgagcagcaggaggccatgataatgtcttcctggccaacggaagtacacgcagtcagcgccttggaggctgaactggtggggcaaggccctgggtgccagcagccatcttgaagcattcttgcctcaagccaaaagtgcttctgggaatgtggtggccggcactgacggcgaatgagctggagcatttgtttgcaagttcctcggccttggcttccgggatggtcgtcctgttcaactctctttttcacttttctattgagcttccagcagtccccctctatcacagtttcgctttcggaggtttcagttacttgcagtcaaccccggtgtgacaactagtgattccataaatggtcattatagacgaaactgcgaatgaacaaagctgccatcataattacggccaggttgcactgatcacatctaagtgtcttaggctgatactgacccacattgtctggtctctctgggtattgcgacgactcaacccgctggggggcaaggcactaccg

SEQ ID NO: 190009 - DNA, 166 bp, Homo sapiens
cttccgggagccgcaagtccaggctcccccgcagcgggacccgagcctgaggcgcagggctgaggcagcgcacgtgtgagcgccgctgaggaagctgcgagaggtcgggcgggtgtcgctccgggggcagcccaggctcgcgcggacgagaggaaggtccgggacg

SEQ ID NO: 190010 - DNA, 643 bp, Homo sapiens
agggaaaatgcctgctcatgcaacttatcccaagggaaggtttagaagcaggggtaactgcagagaaaaatttcacaaactgtggcatttttgccattggcaaaataagccacccaactcaacgatttaaatgattagaataagcacaattgaggcttcaatgtgggaccatttgtcttcctgccagaaaatgaacaaatggcagattcagttactaccattttaatgacagccatattgtttccttttatttgaagcgtttgaatgtttggagtcccaagcttaaattaccctaatcatgatagagcaaataagcacattttagtgatattgacacttcccacaaccatagccctcagcaatttcaatagccagatctgaagagtgagagccaaactttaaaaacttcattaactacagagcacaatcaagttgaaattcctaagtgttaaggcttgatatctttacttccttgagagatcatttgattatttcaactggcttcttggtgtgtccgatgagatcatattttacttgcctttatggaagtggctgagggattcaaggttatagcattccaaatgaaacctggaagggaattcaccagctgctgaattataaggagagtgataggatttgggat

SEQ ID NO: 190011 - DNA, 408 bp, Homo sapiens
agtattcttaaataaacttaaattttaatcatttttgtgtatacttaagatgatttcaaaataaaggttttatgatttaatgtgctattacatttcaaagagttaaagacttacgccattctacaatattcattttaactggtatacttgaggtttatgaactgtgaggttttgtgtgtctttctaatccctgttaatccatttggcttttcaaactggaacaagattcttcaatattctaaatcctattttaagattccttagccagttcagctcatgtaaagaaatcatccaaaaggaatattaacaatgtaatatttatattgtgtttgtttttacacactgtgcttttgtggttttactttatatgcttagggtgtgctttcagcaggggatactctagagctg

SEQ ID NO: 190012 - DNA, 500 bp, Homo sapiens
tgttcacttcacaacttctgtgaataagacacttgtacaaaaaatatcattttcaaaaggaccccttattaagtacaatcagtattaaaggtgacttagtccacctgcagtctgattcggatgctttctacactacttatctgtgctctcatcttcatttaaaggaaaaagacaagatctggggatgatgttcaagccacaatgactgttaagccacacagcattactttttatttttctaaaagtaaaacaagtagacattattccaaccttttagagaactcagattgacaactacatctcgttgacaaaaggaaaatctcaactccattaatttcccagaaccctggacaaccagtgacatcatttttaatgttttcattataatattcttttctatacaatattgtaccaatgaacctcattctgtctttagtctccagccttatccagcaatcaatgcaggtatataagcagagttgcttcatcaatctgaagtg

SEQ ID NO: 190013 - DNA, 396 bp, Homo sapiens
ttatgaatgaagcctaacctccttcaagctatagggaactttttagatacttttccctggatttggagtgagcatggactgaacaaacttatttcaagacagcaccatattttcggtaccagctgagggcagcaaggagacatagtccttatttttacaaattttagttagggctttagtaagaaagaaataacagagtacctttcttgtcattctgctaagcacaagttttcctaaatctagtgttgccatgagtgccgttttgtttgtgaggacagccaagtgaagctcatctcccactgggaactggagaaggcagatcactgacagaatctaaggaaattagattatgggatgattggaaataaaacgtaataaaggaatgcctgtgtaaac

SEQ ID NO: 190014 - DNA, 394 bp, Homo sapiens
acaatggaactctcaaaggatccaatccttcctgccagacatcaggtctcttgtcacaatggatgcactccacttccagtcatgaaggccataagcagcacagatcacaaactttacctataattcgaggcaaaaatgcactttctaaccccaaactcttacagatgttagacaataccatgaccagcaactccaatgaaatagacatcgtgcatcatgtagacactgaggccaatatagctacggaggtttgcctcactattctggacctgttatccctcttcacacagactcatcagagacaactccaacaatgtgactgtcaaaattcattgatgaaaagggtctttgatacctacatgctctttttccaagtcaatcagtcagccacagc

SEQ ID NO: 190015 - DNA, 113 bp, Homo sapiens
aaaaagaatacagtacattatttttttctatttggtctatgaattaagggaaaggtgatgtgttaaaacataagaaatgttattaactatactctacccatgggagaagcaaa

SEQ ID NO: 190016 - DNA, 357 bp, Homo sapiens
ataattttaaaaaaaagatggctattacaaaaaagacaacagatgacaagtattggcaaggatatggggaaaagggaatccttgtatactgttagtgagaatgtatattggtacagctattatggaaaatatggaattttctgaaaaaattaaaaaatagaactgccatatgacccagccatctcacttctgagtatatctaaaggaaatgaaaccagtgtccaagagatatttgcacttccgtcttcattgcagcatgattcacaatagtcaagatgtggaaacaatttaaatgtccaacagatgcatagataaattatgacatataaatacaatgtagtatttttcagccttaac

SEQ ID NO: 190017 - DNA, 386 bp, Homo sapiens
  misc_feature (264)..(264): n is a, c, g, or t
gggggccctgcggagtaatctctgtgggtgggggcctggcccagactggcttcctgagactggctagatagcagttctagagatggagaatgaagagaagccagagttgagttgtgtttagggagtaaagggggcctcagtgctggctgggaagtttggatttgactccctgggagcctgcaaatcatgtggcctggaaagctagaaaaatgcccatgatggggccctaccccagaccaatcaagggggagccagtaatttttnagaagtgcccccagttaattctcatagtctgtgtgggttgagaagctgagctgtgtgcttggaggagcctctgggagtgtcagggattggaaggggaaaattgaagccagaagaagcctttg

SEQ ID NO: 190018 - DNA, 157 bp, Homo sapiens
ttgacggggccatcgaatgcacagatatttcgttgaaaattatttctggttccaacacagagatgagaaatgtttgagatgatcgatatgctaattactctgatccggtcactgtatattatatgtactgatatatcactatgtaccccatgaatat

SEQ ID NO: 190019 - DNA, 297 bp, Homo sapiens
taagatcccagacctctgaagaggacacaggtttccactaaagcaaggttgatactttcaaggaatatttttcctaacagctaaaacggtttaacacatagcatcttgtatcaattacacaaacaccattaaagccactctggttccctgggaaaggaccgcaactgaaatcccttctggcttcagctgtcccctcctgccgagtttgacagcacatccaaggcgcccaaacaccagccactaggctcccccccagcgccctcctctcgcagcaaaccgccaaggctcccgggccaa

SEQ ID NO: 190020 - DNA, 317 bp, Homo sapiens
gctctcttcctctgtgagcctcaggccctaccagggctgtgcagcatcaagggccccagacttgggagtgacaagaccagggcccaaatcctggatccgcattcactcactcggttcccctatctgtaagacagagacgctgggtcttttaccttctcccagaacccagtcaaggataaacaggggaactaactaaaggcacttgctgaactacacaatttcttgcttttcctttttttagagacagggtctcaccccatcacccaggctggagtgtagtggtgcgatcatggctcactgcagcctccaactcctca

SEQ ID NO: 190021 - DNA, 256 bp, Homo sapiens
tgaatgtacaaagactattaaatttacactttaaagtggagaatattatggtacgtgaattatctctcaataaaaagaggggggatgttccaaagcaaaatattcattaccagagacacagtcacgacctcagagatagaataaagaggcgacgggtgaggggtggggtgcaataggggtgaagggtggggtgcgatagaggtgaggggtggggtgctgtggcccagggcctccccttcccactccatgtacccag

SEQ ID NO: 190022 - DNA, 520 bp, Homo sapiens
tgttcctgctctgcattccaccatgattggaagcttcctgaggcacccccaagaagcagaagccactatgcttcctgtacagcctgctgaactatgaaccaattaaacctcttttctttataaattacccagtctcaggtgtttgtttatagcaatgcaaggatgaactaatacaccagacatcatagtatagagtggagtgtcgatgccacatatgctttgtcaggtgctaattcaatcttcagactattaaacaaataaatgcatgcagtagagtgtgactctttgaaaagaatatggcatatggcaagttatggaatatatcactttactttttcctccttttccaggctcagcagggagctgctggaggtagtagagcctgaagtcttgcaggactcactggatagatgttattcaactccttccagttgtcttgaacagcctgactcctgccagccctatggaagttccttttatgcattggaggaaaaacatgttggcttttctcttgacgtgg

SEQ ID NO: 190023 - DNA, 183 bp, Homo sapiens
tttaaaaggatatagaagttagcttgaaggagctttttttcctgttgagatagggccgcactctattgcccaggctggagtacactggcaaaatcagggcccactacagccttgacctcccgggctcaagcgatcctcccacctcagtctccagagtagctgtgactacaggtgaatgccacc

SEQ ID NO: 190024 - DNA, 309 bp, Homo sapiens
gccttgataagggacatttatccaatgttatccaaattaaagataactatagggaatctctttctaaattgtagaatagtctcatcaagatgtgtgataaaatgttaaggacatgctatttataaccagtacctcacaagggttttgatgtggatcataattaaaattcacttggggttgcatgaacctaagtaatatgctcattatttgtacagagaataacactattgtccaacaccaaaggaagacaaaatattgtcagataatatcaattttcatgacaacagcacttgtatctgatcatcacat

SEQ ID NO: 190025 - DNA, 563 bp, Homo sapiens
ttgagcaatttaattgtctttaaaattacagctttcaaagccccatctgaagccaaataagaatctgccaggaataaagcccaggaatctgatttttttttaaagactagtcttttagagcagtttaagattcacagcaaaattgagtggaagatacagagattttgcacataccccttagcctaacacatgcatagcctcctccattatcaaggtcccccacagagtggtatattggttacaatcagtgaatctacattgacacgttatcatcaccaagagtccatagttcacattagggttcagtcttggtgttgtacattctctaggaattctacatatataataacatgtatccaccattatagtatcataaagaatattttcacagccctgaacatcctgcttgttccatctgtaagaacttgattttaatacagctctcaggtcatgtcgatgagtagccaagtttggaaatcactggtctagacacagccccagctatgttggcagtgagatacaaaaggggtagtgttgatgaaacaaggctttttggcataagt

SEQ ID NO: 190026 - DNA, 385 bp, Homo sapiens
tgcagtaggtttcaagcatgaattaggggaaggggccaacagggtaacgtggtaatgaaggagatggcaaagtgaaaagcaagttgctttaaccctgaaagaaagtatttctctagcaaacagcaatgctttgaaagcaattgacagaaagctggcttaatccttgttctggagatacttacagctgcccgtggtttttaattaatacactgggctccctaacaaaggggaggaggttggagagcattaacagatttactcacccaagccaaggaaagtgctttggaagaaatgccctggccgcccatgggccgggatcttcctagccctcccttccctgcatggcaaggcacgaaggtggtctgatgtggattccagggtgaag

SEQ ID NO: 190027 - DNA, 207 bp, Homo sapiens
aatatggtgaacagattggaagagagtgaaactggatatatcggtagatgaaacaagtagctaagtaatgtaacttcctagaaactccaaaggctggggaaacagaaggtactcatggtgaggatgcaggagtagctgaaaaacttctttctataaatgttcagtataagaaaagaacaaataatgcatggtgttatatgcactgcg

SEQ ID NO: 190028 - DNA, 213 bp, Homo sapiens
gaaaatgcaaatcaaaacaataacatgacagttttcatatatcatattggcaaatatctaaaaaatgagaatgcccaatattggcatgggcacagggaacccaatattctcttccattactggtggaatttttaataacatgggaaaacagttgtgatatgtttttggtttttggttttttttttttttttgagacagtctcactctgtcacc

SEQ ID NO: 190029 - DNA, 1108 bp, Homo sapiens
ctggagtggtaagatggcggacgagcagctgcagcagctccgtgcggtgctacagggggaggggaaggtggtttctcctgacacaagctggaggccggagcctgtggcaccctggcttgcctcactgaagctggtggctgtgacagggactgcacggctgctggagtggtagaaaggcagcccaggtaggaagccatcattctgtagaaggcagtgacggaacagtaccagcagaaattgaaggaccagcagaagggatcatggccaaagttgcagtgtccccccgctcgttgaagatgaggagttctcagagagcgggatgtttgtgacattcctcatgtcagctctcgagtccatgactctcactcggtcgtccaggctggagtgcagtggcaccatcttggctcattgcaacatctggctcccaggttcaatcgattcttctgcctcagccttctgagtagctggaattaacaggtgtatgccaacttatctggctaattttgttgtgtatttttctttcagtacagactgggtttcaccatgttggccatgctggtcttgagctcctcacctcaggtgatccacatgcctcagcctcctaaagtgctgggattataggcgtcagccaccgcttctggcctagatcattaacatatcactatgatactaaaattccctctgccaaagaaaatcttgccattttgtgacatgagttgtataaagatgtatgtttatatgcactgaacctgtgcacctagagttccaccctgctcatgctaacgttgttctccctccccgtacctagttcttaaaaactccatgccttccatttttcagggaaagggtgtctttagagcaagaactcttttcttctccatcccaggcagggaaaaaacccacttggccttgtttctgattgggttttcttgctttgcgactaatacaaagcaggaaaaaactccctttatcagtgataaaaacaagtaagattattatttacccacctattctagctaggggtcatgggtggccggagtctctcctagcaactcagggcgctaggcagaaccagccctggatctggaatagggtgccatcatatggc

SEQ ID NO: 190030 - DNA, 335 bp, Homo sapiens
tctgaattataacaactggcctcatgcagaattctatccttacctacaacaaagttgtcttctaaaaatcaggtaaccatgtaatttattgacccattcaaatcacaacttagcaagaaaggggaagctattacacgtggtcaacccatctgaaatggaagtcagatcatgtccttcttttgctcaaaacctgccaatggcttctgagctcgagtaaaagccaaggtcttctgatggctcccaagacctgccagatctgtgaaggcatacctacctcacctcttgtcactttccccttagtgggtctgtctcagctcttctatacttgctatgct

SEQ ID NO: 190031 - DNA, 480 bp, Homo sapiens
cggccaggaggttacacttttcctttaccaatggtcagatatttaaatatttcacacatactttattcttacttaaaacctcattctatggcctggcacagtggctcttagctaattttctatgtcattttaaatgagaagcattcagacagtatcttcttaccactaaatctaatgttctataataagtaaatgattaaatgaaccctaatttttttaaagttctcctttgacccctcatctccctccagctacctgctatttccctgctcaccacttcagggtaaattatcttgaaaaagttgttgtctatatctgtctcaatttcttcacttctcattttcttcaatctactcaaaacaaagtttccaagccctccactccattaaatcaacttatcaaggtctactacttccacatttatctgacctcttagcaggattcaacaaagctgacaatcttcttaaaacattctcttct

SEQ ID NO: 190032 - DNA, 869 bp, Homo sapiens
ccggtggttctcaaccctggatccagtctaggaggggcttttcaacgttacaggcgcgcggttcccattccagaccaacagaatcagaatatctattagtggggctgggcctccgtgtcttttccgcagcgtcccaggtgattgcgaagtggagttcaggttaagaatcgcggctcgccgggcgtggtggctcacgcctgtaatcccagcactttgggattacaccgaggcgggtggatcacttgaggtcaggtgttcgagaccagccttactaacatggcgaaaccccgtctctactaaaaatataaaaaattagccaggcgcggtggcaggtgcctgtagtcccagctacctgggaggctgaggcatgagaattgctttaacccgggggcagaggttgcagtagccaagattgtgccactgcactccagtctgggccaacagagcgagagactctgtcttaaaaaaaaagaaagaaagaaagaaccgcggctggattatatcaccgagcatttcccatacattcctgggggacacgaaggcaaagggtagatggactacaagccccaggatccactgggctccgcctccgcgagaaagttcaaagacaacgcccaggcgtgtctgggggccatttcaaaatgaagaaattcagatctcaagcctttcttggacacctttagaggcaataattccttggggcccactcagagaggaacataagactcttaggggacccccgggatgctaacggctacggctggagagtccctggaagagcgatcggcctcacctgcggtccatcccgcggctccctccgcgcttccggccgctctgctccttcacccaacaggccccgcgcgcatctc

SEQ ID NO: 190033 - DNA, 996 bp, Homo sapiens
ccggtggttctcaaccctggatccagtctaggaggggcttttcaacgttacaggcgcgcggttcccattccagaccaacagaatcagaatatctattagtggggctgggcctccgtgtcttttccgcagcgtcccaggtgattgcgaagtggagttcaggttaagaatcgcggctcgccgggcgtggtggctcacgcctgtaatcccagcactttgggattacaccgaggcgggtggatcacttgaggtcaggtgttcgagaccagccttactaacatggcgaaaccccgtctctactaaaaatataaaaaattagccaggcgcggtggcaggtgcctgtagtcccagctacctgggaggctgaggcatgagaattgctttaacccgggggcagaggttgcagtagccaagattgtgccactgcactccagtctgggccaacagagcgagagactctgtcttaaaaaaaaagaaagaaagaaagaaccgcggctggattatatcaccgagcatttcccatacattcctgggggacacgaaggcaaagggtagatggactacaagccccaggatccactgggctccgcctccgcgagaaagttcaaagacaacgcccaggcgtgtctgggggccatttcaaaatgaagaaattcagatctcaagcctttcttggacacctttagaggcaataattccttggggcccactcagagaggaacataagactcttaggggacccccgggatgctaacggctacggctggagaggccaacggctgtggagcatgttgggaattgtagttccagtgcggtggagccctagcgactccagaccgtatccagcccgtcctaggctgtgctgctctcgccgttggtcctccccagcctcctgtagtccctggaagagcgatcggcctcacctgcggtccatcccgcggctccctccgcgcttccggccgctctgctccttcacccaacaggccccgcgcgcatctc

SEQ ID NO: 190034 - DNA, 421 bp, Homo sapiens
ggggagggggtggacattttcatttatatatagtacttgtgctttcaagaaaatcacaaagttgcatagtaggcagttgtgaaattcagtccctgaagtaaaatatcacacatagtccaaagaagcctagaaaagtcctactgaagcaaccagaaagtacacacatgtaatgaatatgagtgtgtgtgtgtgtgtgtgtataaaatttatattccaactttggaaatgataaccatttctcagctgaacactggatactattgtcagttcatatggaaggatgacactgtgaaaaacatgtctctctaaaccctagatgcactcagtgtgacatgcccgcatgacgagggccactcaggaactgaatcttcacactgtgctcatgtcagggctgtggatgcaacagtctgcattattgcaa

SEQ ID NO: 190035 - DNA, 285 bp, Homo sapiens
gcatgttaagaggaggatgaagtgaccactgaatttaacaatgtggaaaatatctggtgaacttgactagaaagtttctgtagagcagtgaaataaaaaggcacctggcttaagaaccgtggagccagaaattaagacttttaaattaaactgatcactgaattcaaaagggtaactgagccacttttactacatgttgcttcaaatcttaaagcgtgggcattaaactctctgtgcctgagtccccatctgtaagaagggggttatatcgctacctgtctacct

SEQ ID NO: 190036 - DNA, 518 bp, Homo sapiens
gtctcgatcttttgaccttgtgatccgcccgccttggccttccaaagtgctgggattacaggtgtgagccactgcgcctggccagaagagtcatcttatatatctttgtaatattttaatttgtttttgtaatatttaaaggttgttctcgaattgagttttttctttgttatgtttttatttcttttttttttcattttattagccaggagatattctcatctgataatctagttttttattgtgtatatgcagttcaattatctcttaatttagggattcttagatcttaaaagcataaatgttataaatctttttttaaattatggaaagaggatctattaaagaggcccttttctatctgctaggaataataataagaataatataaaaaggtgactagtaaggtctaataggttaaacagccctataaataagcaccgtaactacaacacaacaaatatagaatggagcaaaatatgctgcaggagcagagggaaacacttgtgtagtgtgga

SEQ ID NO: 190037 - DNA, 236 bp, Homo sapiens
tctggctgtcttatgtataaccagaaggggtttcttctcaaagccacaggcaagcagaaggcactgtgcagagggctcagaggtacacggcacagggcggctccgtgagccccggaggccaggaccactgtcctgacagcaagggagggagagacgccacagggcgggcctcaggggctttgcagggtgggcttgtgccagagtagggtatgctcagggagggtgctgagggattt

SEQ ID NO: 190038 - DNA, 319 bp, Homo sapiens
tgttagggggagcccagcagaggggagttgaggaaaggctttaggaacccacatctgtcctgagcagagaggaaggaccctcaggcagatgccgggccaggagaacattgacccagggacccaggaaagggactgaggacccaaggaaggaaacagaccacgagggtttgcctgagaggaagggtcaagtccccagaggcaaagcagggccacgtgtgcaggacacggaggggaccgcaagtgtcttggattctcctggaactcagtgtccctgctgtggccagaccctgcactcagggctggtgatgctgaaatagga

SEQ ID NO: 190039 - DNA, 273 bp, Homo sapiens
agcacaatcattatcaagtgttgctttagtgcctcactgtgaaggcaaatgtacctaccaaagatgaattgggtgttaaatgtaagttcagagattaaaggactgagttcagttttcacagtgacacagaagttgctttacttttaggagcaaatgtgacataagagttatcatcacaagcaaatctgggtctgaagagggtgacaaagtagaatctagttattgaacaaaaaaaccagttaatgatgcccatgaaaaccactgtctgttgga

SEQ ID NO: 190040 - DNA, 560 bp, Homo sapiens
atataaaaagctgagtgctgatagctttttctttttatttgatacagagtctcgctctgtcgcccaggctggagtgcagtggcgtgatcttggctcactgcaggctccgcctcccaggttcatgccattctcctgcctcaacctccggagtagctgggactacaggcacccgccaccacacctggctaattttttgtatttttagtagagacagggtttcaccgtgttagccaggatggtctcgatctcctgaccttgtgatccgcctgccttggcctcccaggctgatagctttttctactccttcgtggcatagctggtttcattaattcctaggaaagggcttcagaaaataagtagggaagagattgttgagagatgggaaatgcatcattttcttgtctatacttgggggcatggtggctattaatgagccaaagggtaacgacgctctgaggtgactcagcactgacgggaagagaaaatcatctgagagtcatcttggcccagagtcagactctagttcccatattatacattttagaaagaaatgaaaagag

SEQ ID NO: 190041 - DNA, 204 bp, Homo sapiens
caggagaatggcgtgaacctgggaggcagagcttgcagtgagccgagatcacgctactgcactccagcctgggtgacagagcgagactccatctcaacaacaacaacaacaaaaaaaaggaattttaaaaaagacaaacagtttaaaaaatatgaaacaaaacaaacaaaacaaatgtatttacaaaaacaggcagctgaccca

SEQ ID NO: 190042 - DNA, 394 bp, Homo sapiens
ctgcccccctccttctccctttcacacacgtctccccaatagcaagacctccacaaagttggggaagggaatgggtgacctttctatgataggagaagagttctgatttcttcatttttgagacaaaaaaagtgttgaattaagtcaaggaaatactcaagagaagcaaattcatcatcaaattggaacatcactggaacacgggagagaagttgggtggagggagggggtctgggcaggaggtgggaaagagcatctctgagcaggggtgacagactggggactccagtccaaagacctaactctgaattttagtcctgctacaacccttagtgttgttacgaataagaattctaaagtcagagccctaggttttgttcctggccctgccacc

SEQ ID NO: 190043 - DNA, 361 bp, Homo sapiens
caatagtcccttaaactattgtcttgtatccctttgcttactgcatttgccaaattattggccagaaaacactagctcctcaagatattactaagtattgtgtgaaaaatcagtggtttagtaagttgggcaaatgcaggcttaaacagaggaaaatggggctctttcctgtgattaatctccaggaaggactgtactaggcagtgtttccccaaaagatagagcgtgggagccttatttgagaaacctatgtcaacatccaggttgggaaatgttggagtacttgctgctgcttcaaatcacttctctttcactagcccgaaaggaagcgtgcatctgcttttcagtgtggtagtgtggc

SEQ ID NO: 190044 - DNA, 915 bp, Homo sapiens
  misc_feature (705)..(705): n is a, c, g, or t
  misc_feature (755)..(755): n is a, c, g, or t
  misc_feature (769)..(769): n is a, c, g, or t
  misc_feature (802)..(802): n is a, c, g, or t
  misc_feature (806)..(806): n is a, c, g, or t
  misc_feature (850)..(850): n is a, c, g, or t
ttgcctatgctggtcttgaactcctggcctcaagcaatccttctgcttggccttccagagtgctgaaattacagaattcatcctctgaatcctttatcagaaccacttcccacagacttggtgttatggtaaactgaggaacagagatactgatatgggaacacaggaagatattcattttaagaatcagtgccgcggtcccttgcttccctcacctactcttatcccaagtggcggtggcggcagcgcagagcagcttctgaaggtccaggagctcttttgttcctcctctgcaaagcaaaggtgccacagggcgcggctttccgagaaagcgtactccgcacggtgcacctctccgtctgcaggcgctgagcccccggaggaggagggggcaggctcgcggagcccctaccctggggcggggccaaggcgtcctcccagcccggctttgcagagcagagatctggtgtctccagtttacggaggcactttcagaactgatcagaagccaccccgcttatcagcagatctcaggagagtgttcagtggaggccctgccggtctgcacagctcacctccctgggaactgctcgcctgagcgtcggagccggccctggccccctgcagccagaaagttgcagccgcaggagccccggaggcccaggacgcagggggaggaaccggagagaagagtgtggctcctangaaatctagcacggagaaagactgtcttgaactcctgacctcggataccnagcattggaggcgnggcaagcggatatgagtcggacctcgaacatcnggtnaccgggaacccgtctctataaatacaaaaaaaaaaccgggcctnccgcgggaaaggagagggcggcatgggcgagcacttggaaagggaagcggccaagggaacaacgc

SEQ ID NO: 190045 - DNA, 768 bp, Homo sapiens
  misc_feature (558)..(558): n is a, c, g, or t
  misc_feature (608)..(608): n is a, c, g, or t
  misc_feature (622)..(622): n is a, c, g, or t
  misc_feature (655)..(655): n is a, c, g, or t
  misc_feature (659)..(659): n is a, c, g, or t
  misc_feature (703)..(703): n is a, c, g, or t
atgatggtcaggcttcgctcgaactcccaatgctcagaatcagtgccgcggtcccttgcttccctcacctactcttatcccaagtggcggtggcggcagcgcagagcagcttctgaaggtccaggagctcttttgttcctcctctgcaaagcaaaggtgccacagggcgcggctttccgagaaagcgtactccgcacggtgcacctctccgtctgcaggcgctgagcccccggaggaggagggggcaggctcgcggagcccctaccctggggcggggccaaggcgtcctcccagcccggctttgcagagcagagatctggtgtctccagtttacggaggcactttcagaactgatcagaagccaccccgcttatcagcagatctcaggagagtgttcagtggaggccctgccggtctgcacagctcacctccctgggaactgctcgcctgagcgtcggagccggccctggccccctgcagccagaaagttgcagccgcaggagccccggaggcccaggacgcagggggaggaaccggagagaagagtgtggctcctangaaatctagcacggagaaagactgtcttgaactcctgacctcggataccnagcattggaggcgnggcaagcggatatgagtcggacctcgaacatcnggtnaccgggaacccgtctctataaatacaaaaaaaaaaccgggcctnccgcgggaaaggagagggcggcatgggcgagcacttggaaagggaagcggccaagggaacaacgc

SEQ ID NO: 190046 - DNA, 362 bp, Homo sapiens
taacaattactgttagaagagcctccaaaaagtaaacagacacatgacatctgccaacatatggaaaattttcactaaaatggcttaaaaaatcaatttacttgattgtgaaagctctactgggaaggcaaaagtcactgtattttattctggtatgatttaaatgaaaatggatgaagttttcagactgtaatactgtaatactaatgtttcaaatcaaagagattgtatagtggaaaaggctccaaaataatccaagacttaggccaagttcaaactttgcccaaagccagctgggtgaccttggctagttcctttcactctgaggctctatttcctgacaaaaaaaatgtatagtttcc

SEQ ID NO: 190047 - DNA, 330 bp, Homo sapiens
tttttttttgggagccaaagatttatttcttcatttcttgcatttgaaatactcttcgatgacatccttggcctgagactccttgccatagtccttaactactacacaactgtaaccaaccactttatggggtttcccctctctgtcaattttacagaggctacccattctcctagtttcttgttggcatcaaccttaattaggttgatttggtgttcagcacaaagggcctccaccaacttgacatacataggctcatcacagttggatgcaagcacacaaagatgggcttggcgcttgtctaagactttggcagcttcgcgaattcca

SEQ ID NO: 190048 - DNA, 773 bp, Homo sapiens
catcacattgcactccagaaatacaggcaattattatttgccgattaaaaaaaaactaaacaaagaatgccctgaatacatatacaagtcacagtgcacttattttatctgggaagggagtgaatgaggtgttaagctacaggtaagggcttttgggaataaggcgttaatgatggctattagccaacagaaaactacacagcaggaggatgttggcgtggcaggagcacagtgatgaacaccaaacaaaataattatcgtgtatttcagcatggctagaaaagagacttgaaatgttcccaacacaaagaaatgatgaatgaggatggataccctgaacgccctgatgtggtcattgcacatcgcctgcatgtatcagaatatcacaggtactccgtaaatgtgaaccatcattatgtatccataaaaaagagatggaaacaaggtaagtaacatttagaaaccaagtaaaaagtaccaacgcgttccggtacctgtggtacaaagactcatcagaaattcctggacggtgctaactaaaatagttagtttcagttaaattgttcggttaattagaaagctgattgcaatttgggctgagataaaagctcctttaacagccattcctttcccttggctcatcctcctatcagaggaactaaattaattaggctcctggaacttggacttctagaaattcacaaagaagtattgatgagtgagcactgaagctttgcagaaagagggttcagaagagggggcgtgaatcttct

SEQ ID NO: 190049 - DNA, 121 bp, Homo sapiens
tactttgagaaattgctgcagacaatcaagaagtttgtaacttgcacattagaatcacctgaggatcttttaaaatgaccagtactcaagccagactccagatcgattaaaccagaacctc

SEQ ID NO: 190050 - DNA, 169 bp, Homo sapiens
ctgtcactggaaatgagttagttctgcccccaacatctctactacccccaacatgcctccactcccagctcagtctccttcaaaaaattcaatggtaatggtttccagttaggacgacaggctatttattatcgtacttattatacttaaaacattggtcatctatcat

SEQ ID NO: 190051 - DNA, 658 bp, Homo sapiens
  misc_feature (20)..(20): n is a, c, g, or t
cggccctacttaccacaggnggtgtgtgaatatcctgatggaaccaagtctttgaaactgggagactttgggcttgcgactgtggtagaaggccctttatacacagtctgtggcacacccacttatgtggctccagaaatcattgctgaaactggctatggcctgaaggtggacatttgggcagctggtgtgatcacatacatacttctctgtggattcccaccattccgaagtgagaacaatctccaggaagatctcttcgaccagatcttggctgggaagctggagtttccggccccctactgggataacatcacggactctgccaaggaattaatcagtcaaatgcttcaggtaaatgttgaagctcggtgtaccgcgggacaaatcctgagtcacccctgggtgtcagatgatgcctcccaggagaataacatgcaagctgaggtgacaggtaaactaaaacagcactttaataatgcgctccccaaacagaacagcactaccaccggggtctccgtcatcatgaacacggctctagataaggaggggcagattttctgcagcaagcactgtcaagacagcggcaggcctgggatggagcccatctctccagttcctccctcagtggaggagatcctgtgcctggggaagcagt

SEQ ID NO: 190052 - DNA, 357 bp, Homo sapiens
tgtgtatacagtgcctcctgtgaaggtggagaatggaaagaagtgagagtctgttgcctgcaccatgattttgacctcaggaagcagattttatgcttacctggccagagccctggcctggacttgtgttctaaggccactcttgagagtatggcagtagtcaccaagactgtggttaggttggcagaaacagatgcctttttctaaagtgtgattcattcatctctatgtgaaatgaaatgaataatttaacactaaaataatccttttcctaacaaataaaggcaatactccagtaccatggaagggtcttgggagccatcagttctctccccctcacccactttgttttcctag

SEQ ID NO: 190053 - DNA, 287 bp, Homo sapiens
cccggtgggttcccgaaaccattactctcctgtgaggcttctgttagaagcttggcgttatttctcctcttctgtttctgaggcccgtgcatgctctgttgtgctctctgctcgtggcagctgggacccgagcctgggcccgggtaatgtgttgtctctgctgtttcctcctcagaacacggctctagataaggaggggcagattttctgcagcaagcactgtcaagacagcggcaggcctgggatggagcccatctctccagttcctccctcagtggaggagatcc

SEQ ID NO: 190054 - DNA, 162 bp, Homo sapiens
catcatatctaggtgttcttcaggtttttaagcctctgccatctgaatgaaaggctgaaataaaaactttggccattgatcttcactgtctcacccactggataagagtggccaccactgttctcatcctgaaaattacttatatgtacaaagaatcctgta

SEQ ID NO: 190055 - DNA, 486 bp, Homo sapiens
  misc_feature (444)..(444): n is a, c, g, or t
ctgaccagggaaaaagctatgacaatgctgagcggccatctgctatacagctttctgcctctgaggtgttcttagagtgggaagtgttgtagggaggtgtttgggggttcccaagactaccctcaacttcactgattcactggaaggatgcacagaactgttacacgtatggtgatggtttcttacaatgaaaagatgctgattaaaaccatcaaatgaaaaaagtgcatagggcagcgtccaggggaaaccaggcacaagcttccagttgtcctctccccatggagtcatgtggacaacacttctccaagcagtgcgtgacaacacacacagagtattgtcaaccaaggaccctcacttaagcctgggtgtccagagttttttggggagtctgtcacataggcatggctgagtatagtctccaaccccaccagagtcataagngtgtttccggggggaactctagaatcactatagatatcacga

SEQ ID NO: 190056 - DNA, 515 bp, Homo sapiens
ccaggcaaggtggcgcatgcctgtagtctaagctacttgggaggctgaggcaggagaatcacttgaacccgggaggcggaggttgcagggagccgagattgtgccattgcactccagcctgggtgacaagagtgaaactccatctaaaaaaaaaaacagagaatacatgttccaaaacttcaccaagcactttatgggtattatctaatacccccaactgtacattaaaccatcttatatatggaaaaaacaaggcttggagaggtaaggtaaattgccacaggtcacacagctaatgttagatggagttggaattaaaatcaagatctgaaacagactaaatcataccactgcattcaactttcattgcttcttttttgggttctagcataaatcttctatctgctgtctctgtgtccactgcctgtctccctccactccgtcttctacactgctgccataaagatctttttctaaacacctgatcttgtaactctcatgatttcacatcacct

SEQ ID NO: 190057 - DNA, 556 bp, Homo sapiens
aggatgggtcagctttggccatgctgattgtgagtctgtggttcccagggagcagctgagtaggctgttgggtgagtggttctcaagctcagagctgagctgggggcatccatttgaaggttatgggaagatggaaagcacgccctggaggtgggtgggtgagctcacccaggaccacggtgtggcctgagaagtcggcctgcgatagaacccggggaatcccagtgtttccagggtgggcagaggaagaggaggctgggaagggaatttgtttctctggccagagctgttgctcagcgactgttggctggtgaggatgaggctcatgaacagatgtggaaacatcgtgggatgatctcatggtgggtgggacttgtcgccgtcatgcactcagcactctctggcctttattggtcaagctgcctgctgtgtttctggtgcccaaatgttctgggcacactgttgtttggggaagaatcgcagggactctccttcactcttagatagtggcagcgcttgcctcgctgcatctcgtgttctcaaaatcagcacatgc

SEQ ID NO: 190058 - DNA, 540 bp, Homo sapiens
tgtcggagaagtagaagagactgaatcaaatgtttagagaacatagcttgattaattcaaaactgaagccctggcctctctagtctcatgttccacagcaataatttctccttggccagaagcctaagcatctgtgtccaaatctcatactctttcctaaatggattcatcaagtcagaccttgagttgcttggttttttctgaaccaccccctaatttaagttaaacttaaaaatgggagccattaaatagcaaaacaaacaaatacaacaataataacaggacattatgtcctggccctcagaggtcaatttaatgtgattagcagcataaaacttcacaacgcctttcactggaagattaccagaagcaacatcattcagtatgttgccatgcactgccattctttcactttggcattatttattgattgtagcagaaacacaatatttgtacctcttaagcattttagtttcctttaggcttttctctagtaaatgtggaactgcatcattttgttaaactgttctgaagtctaaa

SEQ ID NO: 190059 - DNA, 204 bp, Homo sapiens
ctagttttggacattactatttgcacagtattttttaaagtcattgatcgcttcctttttcccttgggtaaaaatctgactttaaatttcttgtgtatatatcagatcttcttccaaatagactatattcagaaatgttgtattctttcacatggcatccaaatagtagtatttctagataggggatttttaaaaggagagtgc

SEQ ID NO: 190060 - DNA, 407 bp, Homo sapiens
atgagacattcaagacaatgaataattctgtatgagcactttctcagcccctctatctttgaatttgtcatttcatagtgaaaggactttattgtgcactctttgctttgctggcaggagcaagagagcctaactgaacccttcagtcagtcagccagcaagaccatacagagggtctattaggccatcagcactgtgggagacggagcagcagcagaagaaatggcccttgtcctcgaggagtttacaaggggttttagaagacagacacacaagaacctttcaaagacaatatgcttaatttagtgagaattgtgtggtatacagcagatgtgctgtaggagttcagggaaggggggcaggagtcgtcatggagacatgggaatttgtgttggatctgagatggc

SEQ ID NO: 190061 - DNA, 197 bp, Homo sapiens
cgtcagaataagagacttgtatgaaataattgactttggtatatgtcatggatactaacatatgggtataatataatacagtaattcaacctgctttggcaagtgggattgtaaacttgccgatggaagatgtgcagggctaattgtagttaaagacatgtattttagtctgcgtggatatactttggagccttgtg

SEQ ID NO: 190062 - DNA, 197 bp, Homo sapiens
tctttcccaaaggtgcagaatttcagaaccacagaggtctctcagaactttgtaaacaggcaaacttaaaaaaaaagaaaaaagaaaaaaaatctctggaccaaatattcttagacatatatttaatctctgatgaaaggatccacaagttcaaataatttggggtattaagtggggcttggataaaatcttcaagg

SEQ ID NO: 190063 - DNA, 253 bp, Homo sapiens
gtgttcttgcgttagctccaccacatctgccacacccgctgttgaaagggatctgttttgggagtggagggaagccttgccttatatttaacgctatctcatatacttactcaagatcattgaaaaaacaaaaaccatttactatggaaaatgacaaacacgcatctatctaagaaggcagagtgtaatgaaccccgtgtgctcacctagggtgccacctggggtgcccacctgggcctcattaccagcttcc

SEQ ID NO: 190064 - DNA, 458 bp, Homo sapiens
aatttgacttcatcaaaatttaaaacttctgcttatcaaatggctgttaagaaaatgagtagacaagtcacagatttggggaaaacatctgcaaaacatgcatctgacaaagaacttatgtccagaatatataaagatcttctataactcaacagtaaaaaaaatccaatgccaaaaatgagcaaaagatctgaacagacacttcacaatggaagttatacaaatagccaataagcatattaaaaagtgctcaacatcatcaggcataagggaaacaggttaaaatgtaaatgacgtgccggagtgtctaaaattaaaatggctgacaaaaatgttggcaaggatataaacaaatgaaacagctataaagtgggggtataaattttatactccaaaaggaacgtttagaacaaggtttagtggtttcttatcagggtaaacatgctcgtgttctatga

SEQ ID NO: 190065 - DNA, 172 bp, Homo sapiens
ctcaatttcccaaagaaaagactctaataaggacgtgctcactttgaataatgtctaaaacacaaataaattattttaaattagatgaacaggatatgatttatatcacaggcttttaggaattacgatattccaaccatgtgatgtctttaattctgatactcattatatg

SEQ ID NO: 190066 - DNA, 315 bp, Homo sapiens
atctaaggcagacatcaggccccaggtggacatacaggtctgaggtggaattcaccctgagggggacattcggccccaggtacgcatcaggcctcagctgaataaccagtccccaggtggacattaacccacaggtcaaccacagtccccaggttgatacctggtccccaggtggctactcaatctgcagggtaacattagtcccctgtaggatcccaggccccaagtggattcctaggcccctggtgaacatcaggtgcaggtgtccaagtaggccctgggtggacataactgtgtacaggtaaggagttgacc

SEQ ID NO: 190067 - DNA, 281 bp, Homo sapiens
ttgggcaaaatgtctaaggagttagtttaacagggacccaggtgaggtcatggtggggtggccaaggccagccatgctacttctacacacatgcaaatctacacccatgcatatgtgaagccagcctggtcattcaactgctcgaggtcctggggttgtgatcctcagcagagagatgagaagcccattggccacagtgtgggctgagatcacagaaactactgagcggctctaagaaattggacgcttgagctagagcctggcttgggggtgccagcagc

SEQ ID NO: 190068 - DNA, 540 bp, Homo sapiens
accatctatgcacccatccatttaactgcctacctgtccatccacctaactgcctacctgtccatccacctacctgcctgtccatgcacctatcttcctgtctgtttattcatctacccagtccatccatccatccatccacccacctacctgcctgcctgtctacccacccataggaagtttatctatatgtctgtctgtccatccattcattcatccatccacttgcctaccggtccattcacctgcttgtcctgtcatgcatccatctgtttgtccttcaatccatcttcctgttctgtttattgatccacccaatttacccatacacttgcctgcccatccacccacctgctcatccacccatcccctacccacacgcctgttcccccattccctgagggcctgtttagtgccaggccctgaactgcatgggatgttaagttgatccaacatagctcttgctttcagggagctctcagtctgtgcccactgttctcctagtgacgtgtggtcttgcagggccacagtgaaacgtgt

SEQ ID NO: 190069 - DNA, 362 bp, Homo sapiens
aggccacccacatcatgaaaaggtgtgtgtcatcggaaacccacagccattatgcggcattactcaaatactaaatgacaagctcaaattagaactacatcttgtcttttacctactcttcatttttacccaagtgcctggctcaaaatggaaactgtattttacatgatggctattgtattagtctgttctcacactgctataaaaaaatacctggccgggcgcaatggctcagacctgtaatcccgacactttgggaggtaggggacagacaagctagaaggaaatatttattgatcacctatcatgtgccagacactttcacaaatatgagcttgtaatcttcgcaactttctgaacta

SEQ ID NO: 190070 - DNA, 254 bp, Homo sapiens
gatatttttttcatattttttgtgtttataatttattaagtattcattatgtgagttgctcaggtattctaagaatttttataaaatttactaatgcacgcaaaataatttttcaatgttatttcacaatgagtgtattaacttatatttcttttgttgctttcttttttcttttttttttttttgagatggtgtctcactctgtcactcaggctagagtgcagtggtgggatctcagctcactacaaccccca

SEQ ID NO: 190071 - DNA, 544 bp, Homo sapiens
aattggagatgtcacacacagtaaaaacacagcttttccaggacccagtaagcttgccattaccaaggaattaaggtattctcctctggtaggaaaagaatttgactccttggcccagcacagtttcaaagctgcatgaagtcacgtttgcctcattacaattcctttggttaaagatgcttttctaagtacttcagaaaatgtatgcaaaaatattttttggtgcggaggccaccaaacctgctggactcacgttcctgcttttggcaagcaaagcaaaagaaccttctgggttcccttcctgcctttcctactgagatcaagctgaaggtggaatttttctatatatccagtccagcctttgtgacctctgcctttaacacaaacaccttgtttaaaaagtagacttgagggagggcacttgagttcagaagccaaaagaaatgggtattgctctttccgcgctaagcagttctgaacctagaccatatccttgggagaccagagcagctgtaagcagcaaactgcctcttttctgcctccc

SEQ ID NO: 190072 - DNA, 393 bp, Homo sapiens
cagtaagatgggagtgaagccctgtaaacgctgacttagatattcatggaatatgggtctatcatttttggtcaacaattcagaatgtgatagctatcctggacatcactaagagacttccattccagcaatagtttattgcaatgtatttagtcaaatgaattatcaattcacaacataatgaatacacagaaagtatccaagcacaagtgaaatttatgttttaaaacagaaaaaagtttgttatttcttttatcacattatagtttaaacagtagaaaatgtatagttgtgcatctcttaggttggtgcacaagtaattgcagttttggcgatggtgttacactatttactgtggggtgaaacactggtgaaacactatttactatgggg

SEQ ID NO: 190073 - DNA, 543 bp, Homo sapiens
tttttaagggttattcctttattctctctataagttcttttgaagtgtggtgttagggaaccatgcctcagtttccttattaactcttccggtgtttattagatcattttttccctatgctatgtcatcttaaacatcttaagcaattcattgacattttctgtttcttttgtattttcattgactatatttccagttctagattagctgattaatgtacaaattgaattattttgcatatccttggtgatataggctgttgatgccaaaggaggaaaaacaaatagacttgaaaactggtcgaatgcgtcagaaagccatttttggagatgattctgtgcgaacgtcttctctcctttcttgatctcttaatttttttttcttatccaaatatataccagctgattttgtctttctagaagatccaagatctttggtttagagatatattctcttaatgttaactggtattagaatactcttttctgtattttatttcaatgcattttaaaaatagaaatgattgtattttcttttaacttg

SEQ ID NO: 190074 - DNA, 344 bp, Homo sapiens
tagatcttctggaaagctgattaatttctaagctaaaaacgcatgatccttaagagaaatggctgagtccaggaggaaaaacaaatagacttgaaaactggtcgaatgcgtcagaaagccatttttggagatgattctgtgcgaacgtcttctctcctttcttgatctcttaatttttttttcttatccaaatatataccagctgattttgtctttctagaagatccaagatctttggtttagagatatattctcttaatgttaactggtattagaatactcttttctgtattttatttcaatgcattttaaaaatagaaatgattgtattttcttttaacttg

SEQ ID NO: 190075 - DNA, 483 bp, Homo sapiens
agtaggattccttggccaccttataaagtataaatgtatgtgcttcctttgtatcctagagctgttgagatgcgaactgtctcataaggtagcagaaagcactgtgatggaagcttctgtttcatcggtgtcctggaatctgctccatccccttctctaggcagcaatatggtcctgcttccttctgggtttaggtcctgggagcctgtcacaattctgtcacacaaaaagagaattccgtaatgaccagcacagctgtatcatttcaaggttctatgctaaaaatgtgcagatcaccaaatagttggccactgagagagcctgtaccacagagggtttcctaatgcgaatgcctgccccaaacactgcagacagcactttctggacttcatcctccatgttcattaactttccactgatttaacagttctaaccagagttattcttgatctttgatgaagtagatttttgaacctcgggtgt

SEQ ID NO: 190076 - DNA, 443 bp, Homo sapiens
ttttcatttagtctaatgccataatctaacaaggagtgtatttaaatgaagaaggatcacatcgcttattagttacagaatatgtaccagaaaattaacagattattgattgtttaatacatataagctattattatgattatgtactctgtgccaggcactacagagataactgtgttgtaaagaaaagttgagaaccactgctatcaaatacattgctttcccattataggtataaaaatgtattaataaagacatttatttcttggtggatgtggggaaaggagaaattctagtgttgtgtggagatacttaaaaacttgcttggtgctataaaggctttccttgactcactttcactattttctcttctacaatgaactttaagagttaaagataaatctgcgatagtaagagatacagaaataaaaattacaaagaaa

SEQ ID NO: 190077 - DNA, 526 bp, Homo sapiens
taaaaagcagcttcttcagggcctccacaaacgcaaaggactaaaaagacatctaagtcaagttattttacacaggcacctaatctcttttgggaagccttccaaaaaagtcaaaggaaagaatagtttaattttgaaattttaggggatcctctagagtcaaactttagccatgtgtaaaatctggtacagtagactctccttatccaaggggacttcgttccaagacctccagtggatgcctgaaaccgcaggtagtacctaacctgattaccgtaaatcagaacgtttctgttcacgttaagatgccttttccatgactaagacttatcatgcactgtggccatttgcagtttgaagtacaacagcaaatcaagcatacatttatttttcattcttcacaatttcatggacagaagattcattcataccatagatttagcaacctcagcatatgtttttttttcttgccttaagtcaagcactttcaccttttctcttaaagggagcagtttgcagcttcttt

SEQ ID NO: 190078 - DNA, 196 bp, Homo sapiens
agaaaagtggaggtctagaggagggggtggtcaactcaccactgggcaggggcaggttaggaaggatttgcgagaggaaaagctcaaatggtgtttgatggatgatgacagtttgggggtgtgtggttgtggaacttgctggcagagggaatgactaagcaaaggtatgggagggtgaatggtgtggcctgttcag

SEQ ID NO: 190079 - DNA, 525 bp, Homo sapiens
accctgtgttctggagccttcattcccctcaccaggcacacggccatgcaattaggcacttgacacatgatgccaatgttgacagccgagaatagaacccaagagtgggaggttagtctgctcagccgtgctgtgggatgaagaggtttgtggttgccacctcagcttgaggctgagcagagaccagagctcagagtggacgaagcatcagacaggagccccaggtgtgggctgtaaagccatgggagagagtccaggggtgcttgaccttcaaagcccattcaggtctaaagtcctcagaacccaagacctagacccagacaacagggagctgtagagtgggttcaggccaggccaatctgggcaggaccaataggcttggctgcccccaccccaactagtgccattggccgttctgggagggagcagtctttggagacttctggtgatcatcactggtgtcagcagatcttgtccaaattgattcctgtgggcttcttgaggttgggactaaaatgtgtctga

SEQ ID NO: 190080 - DNA, 478 bp, Homo sapiens
tttttttttttcctgagatggagtctcactctgtcgcccaggctggagtgcagtggcatgatctcggctcaccgcaacctccacctcccgggttcaagcgattcccctgcctcagcttcccaaatagctgggattacaggcatgagctaccacacccagccaagatttccaatttctgtacgtcctcaccaacacttgttttctgcatttcaggataaatatttatcaagtgatgtctctataccaagcacttgggtggtatgttgagagagttaaaaatcagagccttctcatttcaaaataatatgacgttttataaaaatacctagaaataagaaatccaccagatatatgcaaagaaacattaataaaatgcaactaagggacataaaagaaggcttgaatttggaaagcttacctaggaaaactcagtatttaaaggcttgtaatcttcccattctgtatatttaccacaatg

SEQ ID NO: 190081 - DNA, 351 bp, Homo sapiens
aaatttccctatccttagactgcctgaagccagacaagagtttctcccattagaatcgctggagcttgccaggagtctctcacattagaatgtctggggtcactcaggtgtctctatcattaaaatgattggggtggcccacttgtccccatcattagattgtcagggtttggccaggagtctgattaaaatgccttgggtcgcctgggagtctcttttattagaaagcgtggggtcgcttaggtgtctcttatttagactgcctggggtttcccaggtgtctctatcattagactgcctggggttgcacaggtatccctatcactagaatgcctgcggtggtctgagagt

SEQ ID NO: 190082 - DNA, 370 bp, Homo sapiens
ctctgagctggggaggatgggaggaggatggagctttcagaactcttgcccgtcaagctgttttcctttgtgggtcccttcatgaagatggcaatgaacatgcctcgcaggtcatgaaagaagtgctgaggctaaactccctgtcccaccccatccctcctggactgtcagtcccccatcaccaccatgaccatcagcctggaggggcttggcctccaactgcagcctagaatgcagtccaccccttaccggtgagccttgtcctgggccaggtgtgggactgagggagccagctggaagtcagatgggcaagaccagctggtggggtcacagatagcccatggaggtccggcaggacacagccaggccg

SEQ ID NO: 190083 - DNA, 242 bp, Homo sapiens
tatattttggctgaacagtggcaaatgctttgggccctaatcaagggcctagtcttatataaaacttttgtgtggcaattactaaaaacacaagatcttaattactgtagcacaacaattatcctactcattgtatcttataagaaggattgtgatagcaatgttgccaggttaatatatttccctatgcaaagaattaatctgcaaatatattgttaggaactttcttgtatattaggaag

SEQ ID NO: 190084 - DNA, 255 bp, Homo sapiens
ttcgtcacttttttttttgatctgcactcacctgctccaggtgagaacttgttctaatggcatgtctggatcagggccagcaatgaaaaggttagaccctgggcttggcaccagcttatgcagcagagacattaattgtcatgtccagtcagattatgctttttccttccattctgaatgttgcgtcttctctgacattgtatatccacaccttcattctcccatgtgaacagagcctcccacaaataaataaag

SEQ ID NO: 190085 - DNA, 510 bp, Homo sapiens
tgtgtgtgtgtgtgttgagaaaggaggggaatatagtgaatgtgggaccactagctctagggctagtggggaggaggagtgctgccaaaggcacagagtccagtcttttggtagcatgggattaagaactggcaaggatggagaagacaaagacaaaacataaccagcatttcctacgttaacaattttactcaagacaaatcttacattcatttgtttttcttccattagctgatatagatttcactttaggatcaacattagatttgtatcaataccccattatgtactttgaaataacttcttattagtgtcttaaactttttcatgctatccactgagtctagacaaaagatttcatgttcattgtatcactatgtctcatattccaatggaaaataaattaatgatgagtaacacagtgcacgttcaagttatgagtgtacgtatctatttagcaataaagatatggctgatttgtgtcaaaaggcagagcaaactggttgaagt

SEQ ID NO: 190086 - DNA, 707 bp, Homo sapiens
ccatacctgtgattaaactgttccctacccatagggctcatctcagtaccaacctcaacccagaacaacagtgaatatccacatatgactcacccttctatacccattttaatgaccagctcctccttatgagacactttgcagttacaatctctccatccctgaatgcttacaatacattgtctaatatcgctctgctggcatttacccacttcctaccctgtataattattttcaatgtgcacatcttgtctgacctattagaatgttccttgagggcagtttctaggtctgattcatctttattatcacttccactacttctaaggcactcctattagaatggcaaaactccaatgacaacataaaatgctggtgcagatctggagcaacagggactctcattccttgctggtgggaatgtgaaatggtatagccactttggaagacagcttcctagtttctaacaaaactaaacatactctatcatataatctggcaatcaagcacctaggtatttatccaaatgaattgaaaacacatgttcacacaaaacccacacatgaatggtaccagcagctttattaatcattgccaaaacttggaagcaccaagacatccttcagcagatttaaaaaaatgtaatattattcagcactaaaaagaaatcagctataaagccaagacacagaggagctttaaatgca

SEQ ID NO: 190087 - DNA, 149 bp, Homo sapiens
gtgataatatatctctccatagacatatctatataaaatatatacaattaatatagatatctatagagagacaaagtataaaaaattcacaaagctgcgtatggtatgacactcagataagtgtcaaagaaaccaagcttattaaactt

SEQ ID NO: 190088 - DNA, 499 bp, Homo sapiens
aaagatgtggggtaaatatactgacccaagtaaattttaaaattaaaggcattaaggaactgtgcataagcactatattctaattgggaaggcaatagagaaagttaaatgagtagtatataaaatctttatataacctctttgcaacttttttgtaaatttaaaaatgctctaaaataaaatatttattaaaaatgaagaaaacattatgccaagtgaatgaagcttataattaaaggtttcatgctgaagtgcaggtgtatccaaaaggatctttgcattgaaacaggattcaccatctaatctgtcaaagaaactctagtgctagacatttaaaaaataacatcctgaagaatgaagagagcgcttccaaaatggccgaataggatcagctacagtctgcggctcccagtaagacggatgcagaagacgagtgattcctgcatttccaactgaaatacctggttcatctcattgggactggttggatagtaggtgc

SEQ ID NO: 190089 - DNA, 177 bp, Homo sapiens
cctgagtttgcctttggccttaccctaaatttggctacaattaaagtatgtaatgagaaataatcttcttcaaacaagcagataaaacttcatgtaggccattgaaacacagtgattttggaatctctactgagatgcttcaaggaaaatgtaaaataatcagtattgtgttttggg

SEQ ID NO: 190090 - DNA, 465 bp, Homo sapiens
cctgaccttcatctcctcccacctccccagccattactagaattccagtcacactgaactcgtcatggtctttcagctgtccggttctccaggtccttgcacctgtagtagtctctgcctggaaatcccttttccggattccctatgtagctaaataaatatttcaagagttagcctcccatttcctcctggaaccctgggcacctggctcaggtatttctccactgtgctcttgtagccctgtgctatgcactatgacactgtaagccatccctcatttacttgtctatttcctctcccactgtaaactccagaagaactgtattctttgccacaaaggctatctcattaaaatgtgcctcatacatattaaggtcttaataaacgtctggtggggccgggcacggtggatcatgcccgtaatcccagcactttgggaggccgaggtgggaggagaggaagagg

SEQ ID NO: 190091 - DNA, 454 bp, Homo sapiens
ttacagttgtgagccaccgtgcccccctttggtacctcattcttgcataacatgagacccacctcttctctgtgtggtgtcagaaacctccttccgatgcttgcaacagaatctgtgccttcagcttctgccacaccccagcaagcaattctgctgaagccccaccaataagccttgtccacagctaaccaggcgaggtcaagccgtagtccaggatatgggccagctcctggggctggctggctgaaaccagtagtggtgctggtaggtgtctgcaagagctccattagattcccttggaatgatcccctgttcaaggatcgtgctgaactggcacatctcaccaccttatgtatgggacaggagctccatcagactacagcgcaatctctgaaacatcctgacatgttcatgaaacctaggatatactaaccccccaataagagtgggaatt

SEQ ID NO: 190092 - DNA, 561 bp, Homo sapiens
ccccccatttcctcacgtcagtgccatttccacttgccctttagccagtcccctggaacccaggacactctaactctcctctcttattctaattttcaattctcaatttccccttcaaaatctctcttgggttcttacctttctatccctactccacgatcttggctgaagccattttccatccataacagaagaactctaacagtctatgtggtgtccatacctccaatctcccttcatccagtcatcatacacacaaatctgcaacagcaataccacccaaaccatgtagatcactccacaacccgctatggctccctactgctgcttggataaagtgcactctgttctagtattcccagactgcaggagtctcacccctagctgcagctgtcccagctcactctgcacagatccctgctttggctcagtccaccccctctctgttgcctgcccgagttgggctcatttccacctccgcgtggctccacatacagtcccctggcctggactgccctcatcctccgaggatccagaaattctcgagtagtactactagta

SEQ ID NO: 190093 - DNA, 709 bp, Homo sapiens
ccccccatttcctcacgtcagtgccatttccacttgccctttagccagtcccctggaacccaggacactctaactctcctctcttattctaattttcaattctcaatttccccttcaaaatctctcttgggttcttacctttctatccctactccacgatcttggctgaagccattttccatccataacagaagaactctaacagtctatgtggtgtccatacctccaatctcccttcatccagtcatcatacacacaaatctgcaacagcaataccacccaaaccatgtagatcactccacaacccgctatggctccctactgctgcttggataaagtgcactctgttctagtattcccagactgcaggagtctcacccctagctgcagctgtcccagctcactctgcacagatccctgctttggctcagtccaccccctctctgttgcctgcccgagttgggctcatttccacctccgcgtggctccacatacagtcccctggcctggactgccctcatcctccttccctttccatctgggtgacaacaggccttccagaatggtcccaaggccagccacagaatctgtggatcgttctaaactgcacagattgagaatgtacatgctgccattgtttctctgcagatgccatcaaacaacaggcctctcttggtagctggtgtctcttgctcaccaacaggatgcc

SEQ ID NO: 190094 - DNA, 704 bp, Homo sapiens
cttaaggactcaacatggattttacatcatttggatgcaccttcctcaatgccacttccattctagaaaagaaaaggcatgtttctcttagaggcagatgatgaggttttcgtatcttacataatattaattttgtgaatgccaacaaaaagttcatgttcctagaaaggaacacagacacggagctggtcacaaatggtttgtctgcgtaatcagggctgatgaggctgcctgaccccccaggccctccttgcagcaggacgtctgtcctgtagctgaacaaacttttggttggtgactacaaagagaattccccattttttctctcaaggaacacagacttttcaaacatttacgtggctattttttatcgtaggatatcccagacatgtaatgaaaaatgttcctggatagctgtttacttagaaaattaatcattatcagttaatccatcttaggcatggtattgtcttaggtgctatagaagaatcaaaagaattccagctggagggctagcacgcacagtgcaacccctgatagcttcttttttttaaacagagcagcatcaacaaggacagattattgtaatgcagggtttacagcccctgccctgttgccagataattccttgttgtgggccccgcacccccacccctgtgtattgcagggtattgagcagcatccccaccttctacccactagaa

SEQ ID NO: 190095 - DNA, 158 bp, Homo sapiens
caattgaattcactgagcctgaatccaaatcagggaaactggtggttcacggactacatttcatttgtgcattggaaaccagggaatacaacacaaacatccggattgctgatttttcttgagagttggtagttctaccaacactgggacctgatctt

SEQ ID NO: 190096 - DNA, 481 bp, Homo sapiens
tacaggtgtgagccaccgtgcctggccgccatttctatttttaagaaggtaagattcagagcaaaaatactcactgcttataaaaagagttatttagtcaggattataagaagaaacctatttttgccttcatttaactgcaaaaaaatgtaagctgtaactcattatctttcttgagttcttttttttctttagtaaatcttgtcacattttagcattgtttcttatttcagccgtgtattctttgtataagccttgctcagtctgcatgccattagtgttttcagcctgctttgtattgatagcttcttacatttcagtgtttataattgacagcgctctttaattaactagttcagatcaaattgaatggtgttatttctataacataattagaaatcttttcagaggttccttccatgatttctagttttagtttatgaaacatttacagtataaaatatttgtttttcttttttct

SEQ ID NO: 190097 - DNA, 304 bp, Homo sapiens
ggaagggacctcagctttccttaggacttctcttctgcggtcctgcggctactctcctgcgtcctcctgcccgcccccagttggactgtgaagccagcgagagcatgggggcctggctgtcctgccccagccttcctcggggtgtcctggctctgtcccgtgagctgcgtgacacaggcccacccacaagtggcgtgacgcaggcccagagccacaggctggacagctccactccccaggactcacgccgtggatgtcacgaagcttcacttgtctccacagaataaaatccagcccgaaaaaa

SEQ ID NO: 190098 - DNA, 249 bp, Homo sapiens
taatggcagaatggaaagaatcccagctttggagttaaaatatctcacttaaaacttgtcttcgctgcaggctacttggttgtacttgagtaatttactcaagattctcttcagcccagtttccttatctgtaaaatccttccactgttgttaggaggataagaaagccagtattggtaaaaacatatatcagagtccttttgactgtttagaaagtgttaatttactccacgattatccattcaacat

SEQ ID NO: 190099 - DNA, 490 bp, Homo sapiens
caccgcacctggccagtccattctttttcaatgtaaccttattgcataatacacatgtattaggccattcttccactgctataaacaaatgcctgagggggtgcagccaagatggccaaataggaaccgctccaatctacagctcccagtgtgggcgacgcagaagacgggtgatttctgcatttccaactgaggtacaaggctcatctcactggggagtgtcggaaagtgggtgcaggacagtaggtgcagtgcacccagcaggagccgaagctgggtgaggcattgcctcacacgggaaccgcaaggagtcagggaattcccttttctagtcaaacaaaggggtgacagatggcacctggaacatcaggtccctcccaccctaatactgtgcttttctaacggtcttagcaaatggcacaccaggagattatatcccgcacctggctcggagggtcctccgcccacagagcctcgctcattgctagca

SEQ ID NO: 190100 - DNA, 591 bp, Homo sapiens
aaaatggcatcagatggacaatgacaagggcaacttaaagacagtgcaattggttgatgtctgcaaagcagcccgggaccaggcccctgggcattcctttacttaaattattcctttgctcattcatttgttccctccttcattcctatctttatttgttcattcatttattcattcattcttctgctgagtgacatcgtagcataacgatggatagcatggactctgaagccagtttgcctgggtttgaagcccagctctgccatttagttctgtgaccctgacaagtaccttgacttctccgtgcctctgtttcctgatctgtaatcagtgtctggcatttggaaagtgctacatacatgtttgcaattattgtttgtttattctttcaccatttgctagaagatggctatgtgacaggcactgggctgggtggccaccagcgaatcaggggaagtcacaaagggttaaataggtaattactaagtcatgtggtcagcgttgtggtgcgggtaagcacagggtgctatggaaatgcagaggaagggcacctaacctggatgggttgggctagagaggaggagtgttcca

SEQ ID NO: 190101 - DNA, 156 bp, Homo sapiens
cagagggtgtgatgagggcaaaggccagggtggctagagcagagtccactaggacagggtactatcagataaagtcagaaaggtcacaggccaaatcacaccctctgccttccccatagatctgcatgatttgctcctcgtggacacgaatgttca

SEQ ID NO: 190102 - DNA, 489 bp, Homo sapiens
cctgctccgagtgtcagtgtgttgtaaagcatggtttaaaaatcttggttacagaagatttaactcatgatagaaacaaatgtctgcgggtcagtgatgttaagccactagtaagaggagggctatggtggggaatgtggctgaatgtcctatcacaagagcatattcagttgcttttatctctgacctgttactgatgtgcagaagcttacccagacttgaaaaatcgattttttccctcagattttatgttcaaattgtcaagtatcttaaattttaccagctaatttggatgcttttaagacattgcctgcgctaaacaaaatctaacttagggcattactactagtttaggattctaatactagaccaatctccccattttaaagatgggtaaattgaaccctcaacccccatgattagttgcttatccaagggagcacttttacaagtgctattgtcccaacctgaatctaaattgcttttagt

SEQ ID NO: 190103 - DNA, 685 bp, Homo sapiens
agggtgggagagtgggaaggatagcttgaacccaggagtttgagacctgcctggggaatatagtgaggcactgttctccacaaaaaggaaaaagaagagaagagaagaggagaagggaggggaggggaggggaaaagaaaagaaaagaaaatcaccatcggcataccatagtaatcattgttgcaggcaagatccaccgatggatgctaaaattaatgtgaaaaagcttggggagaaacaggatatttgcagagtttcaaagtatctctctcaaggtatttattaattacaaaagaaaaacattttacagggaagaaggttggcagacaccactttcacctactggtcaacattaacatcaccagtgttgagtcatatagaagtctctgtggaaataagcactcgttcctcttgggtgtatatatctaggagtgtcattcttggaacacggggtagctgtatgcttactttattaaaaactgccaggctgttttccaaagtgaacgtacaatttcatatttgcaccagtagtgtacaaggagttccagtggctccattctaacatgtaatatttcttaattttagtaatttacgtgggtgtgttatgatatctcattgggatttgcatttccctgatgactaatgatgcagagcacttttcactggctatttagatatcttcttt

SEQ ID NO: 190104 - DNA, 317 bp, Homo sapiens
aactggcaggaggatgcccatggctcttcccaaaggtctgaggatagaaaatctgtttcttcctctttcctcctccttgcaacgagtatggctcagggaactgagcctcaacccattgaatactgcactgattatccggaagcagaacagagagggttggggtgtgactgcactcatgaagaggcaggaggaagccagggacactggcatcctctgctgcctgactcttgtcctgcgtgtaacagttttctacaatcagctctggcctgtggcctgtgctcacacactcttgctcacaacaacctcaatgacttgga

SEQ ID NO: 190105 - DNA, 621 bp, Homo sapiens
gtgttgtggggtgcatactaggaagaagtgctctcgacttgtatcagtggagtgtctgcggtgaaggggtagggaggttgctactaaggagactccaggcttagacccgaatgtccatccacctgtcactgtccccaagctgcagtcagtctcctttgggtccgaccctgtcgtctccctggtagcccagcaagcacagtgcgaatcagtttcccctggacgctgatcctggtcgccatatgtggggaggcgacagcctgtacacctccacagacaggactaagtcagggctgtctggtggcaagggacagaaatcccaactccaacaagctttagaaaaaaattgtttaaaatgagttgctcttaggccgggcgcggtggctcacgcctgtaatcccagcacttcgggaggccaaggtgggcagatcacgaggtcaggagattgagaccatcctggctaacacagtgaaaccccgtctctactaaaaatacaaaaaattagccaggcatggtggcgggcgcctgtagtcccagctacttgggaggctgaggcaggagaatggtgtgaactcgagaggcggagcttgcagtgagctgatatcgcgccactgcactccagcc

SEQ ID NO: 190106 - DNA, 286 bp, Homo sapiens
cgaaggcatttttatgcccagccttgttcccttatttgagtgagttggaggtttgtgcaagattttatccaagtggaggtttttccatctgtgtagccacgggcatgtctccaggcacaacgccacgtgctagttcccttactggttcctgcagcctgatttccccccaccccaggctgctttctattttatgtggggataaggctctgaccttgggccgggggctctccagggactcttcccttgctgtctacctaaggcaagctaactcctttcagtccccccg

SEQ ID NO: 190107 - DNA, 198 bp, Homo sapiens
attacaataataaaatcagctgtatttttaagtaattctcttttagaattagaaacgcggttatagaaaaaaatggtataaatcacttatttttattggttggttgtttttaatttaaaaccattagcgttgagatgactattaaagggattacattagcacataaactacaatagattaatttgtgaaaagcattta

SEQ ID NO: 190108 - DNA, 496 bp, Homo sapiens
cagaagtggtgtcctttattactaaagtgtcaaattagtaggttcattgggtctggttgtctctcctcctgtaagcttgaaattgatcactgtatttcagtgttgtcaccctgatccatccattataaaatttccagtagcatttcatcataagatgtttgaacctctgaagtagacacccaaaacctatttaataaactaattagatgtagacataggagtatgcaaggaaacaaaactatgtatatgacctgtccatctttttgtaaacatgaatttttcaaagagagttgtggtcatgctgtacttattgtttcattatctactttgaggaaaattttgtttctgtttatacaaattatgccttttcattggaagaaatacagaatgctctcacctggtgcccagagtcagaattgcagaaattaaagtcaaccaagagcttggaaaggggtaggagatttgagtggagtaagggaggcacatgtattctatt

SEQ ID NO: 190109 - DNA, 676 bp, Homo sapiens
tagctttgcccaacctcccccactcaattagatctttttgtgtcaagatgaccaaagacccccagtactcccagccaattatcaggcttcattttacttgacctatccagagcatttgatattgtctttcaacccatcccttacacaatttattcacttgtttcttgggatgtggctattttgttggcatccctgctacctcactaaaactcctcagcatctttggtaggtgcctgctcatcttctaacctctaactattggcattttctaggaattcttcaacttcttctctcttctatctagagtcaccccatggaggatccttgagccttagagaaaggagagtttctgcccagggtgctctgagcactggagtcatctaagaattatagctggaataataatgtaaaagtaaaaacaaatagatgtaaaataagtaaaacagctttcacttttcaaaactaggtatttatattctcaaactttatttccacaggaaagcagatgatttcagaacatactttgagtgaagaaatataaaattcctattaatttttatttttattttctggctaaacataaagcaccatgtccttctttagtagggtgtcttatgtgtagaatagagagatgggccaattgtaaaccccaccttcacccatggcaatcaatata

SEQ ID NO: 190110 - DNA, 463 bp, Homo sapiens
tagctttgcccaacctcccccactcaattagatctttttgtgtcaagatgaccaaagacccccagtactcccagccaattatcaggcttcattttacttgacctatccagagcatttgatattgtctttcaacccatcccttacacaatttattcacttgtttcttgggatgtggctattttgttggcatccctgctacctcactaaaactcctcagcatctttggtaggtgcctgctcatcttctaacctctaactattggcattttctaggaattcttcaacttcttctctcaaagtatgttctgaaatcatctgctttcctgtggaaataaagtttgagaatataaatacctagttttgaaaagtgaaagctgttttacttatttacatctatttgtttattactttacacttagttaattccatgctataattcttagatgactccagttgctcaggca

SEQ ID NO: 190111 - DNA, 177 bp, Homo sapiens
agtgctgggattacaggcgtgagccactgcgctcggagtccttggcctttagatgatttatagatcaaaactgtgaggctgcgtgaattgatcaagagaacaggcgagggcggggaagaggtgtgaaacctgagccctagggcttccagtcctcagaggtgggtgaggaatgggcca

SEQ ID NO: 190112 - DNA, 100 bp, Homo sapiens
ccacaaaaatgttacgtctgtattgtaagaaaactagaatacgctgataaacatgaggaagaaaataagaatcactttaattacactacccagagctgcc

SEQ ID NO: 190113 - DNA, 171 bp, Homo sapiens
gatagaatgttaaatggtgaaagaaactttataagctagtagttcctttttttggtagtagaaccccagtatatagtacaaaaataaaaaatgtggatggttgcagtggctcatacctgtattcctggcactttgggaggccaaggcaggcagatcacttgaggtcaagag

SEQ ID NO: 190114 - DNA, 400 bp, Homo sapiens
atgggcagggttcctcatattggctcagaatatatctcttcatatattttagagagtttggttcttttcatcgacatgagaagagctggagcaaaattacctgctactttatagtttctgcagtaagatgaaatttacagaatacatatattctccacctatgcattcattcattctttcattctaccattcatttattcatcaaacatgaatggtcattataataaagggacttggccaggtgcagtggctcacacctgttatcccaacaactcaagagactaaggcaggaggattgatgaggccagaagttcaagaccagcccaggcaacacagcaagaccccaactctacaaaaatgataataaataataaagggatttggggaatgccaagagaac

SEQ ID NO: 190115 - DNA, 129 bp, Homo sapiens
tttaaattggacacacagattaactgaggtgggttcccaagggaaggagggatgtcaacactggacttccttgaaaaacctccagcttcccttttgatccgaatctttctcctcttctgctgactacct

SEQ ID NO: 190116 - DNA, 462 bp, Homo sapiens
atcagggatattggcttctagttttttgtagttgttgcatccttgtctggttttggtctcaaggtaatgctggcctcttagaatgagctagggagaatcccttctcttcaatttttgggaatagtttgagaattggtgttagttcttcgaaagtttggtagaatttgcagtgaagcaccaagtcctggactttttctttgttgggagacttttaattactgattcaatatatttgaatcattattggtcttacacattattggtctgttcaggttttgtatttctccctgatttaatctgagtaaattatatgtatccaggaatttatccatttcccctaggttttccagtttgttagtgtatagttattcactgtagtctctgatgatctttggtatttctgtggtatcagttataatacacttctggttttgtttatttggttcttttattttttcttgg

SEQ ID NO: 190117 - DNA, 679 bp, Homo sapiens
cttcaggcctatggagaaaatggcattttctttcatgtattctttgtttgacaccagttctaaaacctcaacacactgactagaaacttgattacagattctagaaaaactcctagagtcagaaaacaggttttagtctttattctgccataattcaagtgtcttatcctggatgaacaccttaggctctgtgtaaaattcagatgttttatccataaaatgagagctatattagaatattttccagctctataactactttatttttgagacaagggtctcattccgtctcaaaaataaataaataaataaaataaaggatttggatagacaagaaaatatacaaatggacaacaggcacatgaaaagatgctcaacaccattagtcaatagggaaatgcaaatcaaaattataatgaatataacttaatacccagtaggatggctattattttaaaaatggaaaataacatgtgttggcaagggtataaagaaactgaaagccttatacattgtaaatgtaaaatggtgtggctgctgtaggattaaaaaaaatagtggttcctcaaaaagttgaacatggaggctgggcttggtggctcacgcctgcaatcccagcactttctatttccaaaagttttcatcaccaaaataaactctattaagtatactatcattc

SEQ ID NO: 190118 - DNA, 658 bp, Homo sapiens
caatattgaagctcttatcttttctttattggtgctttgaaacttcatgctgctttgtctagggaatggtcttttcattcattttccagatacctggtggacccttctcatctgaagactgttgtcttaggctaggtgtcctagtacgcagcacctgaggtaaaaatttattattaggaagtttaataaccaagaagcaggaatgagagaaaatcagagtgaggcactgaaagagggagaaaaatactgaggccacagctttgtgaaaagctgacgactgctgagtggacaaggcagcttcagaaaggaagtttaaagatatgcttctccacacagtccttctaaaaagaagaaagtgtgatttgcccagtctcatctccttctgggcaaagattgcaccatggaataattcctatacacttacaggttgcatagttattggtgtcaagagagtcctcagcaacaatgagtccccagggtagaaagcaaaagatcctgcaggggcaggaggcaagatattgtcaggtcatgtccttaggtgacacgagggaccaaaggcagctgccacagcaggcccctttcagcagcagcggcagaagcagtgacctgacttcatcaccatgggaacagcagctgtcactgctagattcagtcactg

SEQ ID NO: 190119 - DNA, 1000 bp, Homo sapiens
aaataaatctacttaaaaagaagtgagatcgtaccactcctttgctcaaagtctcctgtggcttcccaacacaagtaaaaaccaaagtcctaacgatggctttaaaatcctcccctcattacctctttgaccccacagactgtttacccagctttgtattcccagaaagctctccacaagctgccaacctcatagtctttgcagttgtggtttcctctgcttagaacactcttccccatcatgctccctccatatgtgctcagatgtccaactcttcagtcagtccctctacttgtcagcatattttaagtcatgatgtttccattcccaatatttcatatttcctcctttactttttaatacttatcacagtgtaatggataatttattttacttactaatcttcatcatatttctcatcacattaggacgcaagacacaggaggccaggaatgtgtgttctgttttgtatctcaactgccaggaatagtgcctgacacacttaaagaggttctctgtaaatatgtgttacatgaatgagtaaatgaatgaatgaatgaatgaatacacacatggccgggcagtagctcacgcctgtaatcccaggactttaggaggccgaagtgggcggatcacgaggtcagtagatcaagaccaccgtggctaacacagtgaaaccctgtctctactaaaaacacaaaaaaattagctgggcatggtggcacgcgcctgtaatcccagctactcgggaggctgaggcaggagaatcgcttgaacctgggaggcggaagttgcccgagatcgtgtcactgcactccagcctgcactgcaacagagcaagactccgtctcaaaaaaaccccaaaaaccacatttgtgtatgtgagtgtgtatatatatccccatttatatatatatatgaatatatatatatctccatttatatatatatatgaatatatccccatttgtatatatatatgaataaaagtgaacttctc

SEQ ID NO: 190120 - DNA, 320 bp, Homo sapiens
ttttgtatttttagtagagacagggtttcaccatgttggtcaggctggtctcaaactcctgacctcatgatctgcccacctcggtctcccaaagtgctgggattacaggcgtgagccaccgcaccaggccatggagacaatctttatagtcaaagatacaatgaggctgaaagttaaagaatagaaaaagtacaccatgtaaacagtagccataagagaccccaggtgatccccatagggtcctggaaacaggacttgtcctaaacctagtttagcagcatggatgcaggcaccaccagacattcacagagctctagtca

SEQ ID NO: 190121 - DNA, 300 bp, Homo sapiens
ttttgtatttttagtagagacagggtttcaccatgttggtcaggctggtctcaaactcctgacctcatgatctgcccacctcggtctcccaaagtgctgggattacaggcgtgagccaccgcaccaggccatggagacaatctttatagtcaaagatacaatgaggctgaaagttaaagaatagaaaaagtacaccatgtaaacagtagccataagtgaaaacaggacaatgcaccacatctctggcgatttgtccaccctggtgagctgcctgtctcttggtcctggctttctgcacct

SEQ ID NO: 190122 - DNA, 260 bp, Homo sapiens
ttaaatagttttcttttaaaaatcatctaataagatttttaaaacacttttcttatgtgaactgtaatttttaaatgtggtaataacaaatggatgatgaaaaacacttcctctattccatccagtgtttctacctggctatagaaaatgctcagtcacagcttgcaatcatactgtagctgaggcacatgaaagatggtcttggttatgacacctcaaagtcagaccacaaaagtgttgccaggaagcacagaggcagc

SEQ ID NO: 190123 - DNA, 348 bp, Homo sapiens
catccctgcaggtttccttagcacttggtacctatccctgtagtggcacatgtttgcattgttactgcatatttacttgctttttctcctccactaaattgcattccttgagagttggcatgtgttgcatatgtgtgtagagaagaggcatttaatattggttgaatttctgactgaacaagtaggtgaagaaatggagaggttgggggaggaatggataaatgtctgggccttgagtcagcaggcagggacactttgaccagcttatgagatggggagacttaggcaagggcctgaggtctgtcgtcctcccctgcaacccatgagccctatagcattgacccccgt

SEQ ID NO: 190124 - DNA, 320 bp, Homo sapiens
agtgagttatgattgccccactgccctccagcctggatgacacagcgagactctgtctcaaaaataataataataagtaaaccaataaataaaaagaagtgtgggggcttcaaccacattggcctctgggttttcaaaaacctgtcaccccaagccttggccttatggtgagcagggcagatttacaggcccgagctgcctcagagggcacaaggagctaaaggctgaactcctcacgaaagcaactcagacaatggagggttagctcccctgcaacctggcaaatccacactgtaaattaggtcaagtttattgaggta

SEQ ID NO: 190125 - DNA, 200 bp, Homo sapiens
tggtgtcttgagacgctgagctagggagcatggtgggctcaccagcactgtaatactaccattatccccaacttacaatccccaagtgagagacctgcaggagatctgcttgtggcctgagtgaacaagtagcttgccaaaagtctcatggccgataagagatacgaagtccatcatactctcagaaacactcccctcaa

SEQ ID NO: 190126 - DNA, 463 bp, Homo sapiens
cagacattcaaatgagagcttccctagccttcaaggggctcacaatcaaatgggtatagctgacataaaaacaactataagacaagtaagcaattataacataaactctaaaaaatggttatgaactagtgaccacaatcctagttctcggtattctgtttatatacataaatatacttatctttattagtgtaacaccattatttttattagtgtcacacatggatcagcagcccaatccttcactttactccaattcttaacactggcatagcaaacccatctagttcctcttttatcactcagctcgctgagacttcgcgagctagatagcctccccatcctgaataagcaaagtaaaaccatggactgagtccttcctcttaggatatctggaggaggaaaagaatcagaactgctgcccaaaatagtgaagctgcccagaagtagtgatcctgaaagc

SEQ ID NO: 190127 - DNA, 219 bp, Homo sapiens
gacaaggacactgggtccctcctgggagagcacggaggggtcatctcccttaggagccaccctcacagcttcccggggctggggctggggcccgattcagaggagctcctgaatcagccctgtcacttgtggttcctctgccccatctttcttcctggaggtggaaacctacatggaaacctccacacagcactcaggaacactccccggctgcagaca

SEQ ID NO: 190128 - DNA, 472 bp, Homo sapiens
cagtctcttgctactcccagggtcggccacacatgacagcatcagcttcccaaaggggcttgctagaaacgcagagcctcagacctcaccccagaccagctgaatcagaatctccatttcatccagggacttgtaaagatgcccaggtgatttgtaggcatctcaaaatttgagaagccatgagctggttcagtcttccctccatcctgtccatgagaaacagctggccacttctctgactgctcctttcctatctggcaaagaagttcttgtagcaatagtgaccatttgtttctaaatagaatatgagtagcaaggggagggagaattctcccacagaaaacacttatttctcagtatggatggtaggagacacaggaatggacaggaagtacttgagtaaatgtgggctgcagctattgatcagacctgctgttcatcccttgattctgtggcagccccatgtggtgtg

SEQ ID NO: 190129 - DNA, 234 bp, Homo sapiens
aaaaattcacacaagtgattgtgactttgactagtgatacaattattggtattaacaacaatggaaatcgtgagcttcttcctgcatacattttcactttctcaatgtttaaatgaaaatttgttcagaatacaaaacaaaatagcacattgtaagaactaagaatttccctttggctagaatggacaagtagaaaaacaaatataaaagtatactttgttttatgtattcaat

SEQ ID NO: 190130 - DNA, 436 bp, Homo sapiens
tggaggcggcggatgcagtgagcagagatcgagtctactgcactccagtgctgtgatgacacagtgagactccgtttcaagaagaagcatgtcagctggatgcggaggctcacgcctgtaatcctagcactttgggaggccaaggtcaggtggatcacctgcggccaggctggtctcaaacttctggcctcaagtgatctgcccgcctcggcctcccaaagtgctgggattttgggtgtgaaccaccgcactcacagagtttttttctttttttaataaatttttatttgaaattatttagatttgcagaaaaagtgcaaactaatacaaagagttcctatatattgccatacccaatttaccctaatgctaacatcttacactagcatatttgtcaaaatcatcagtgtaccaattcatatactgtacattacta

SEQ ID NO: 190131 - DNA, 497 bp, Homo sapiens
aaaccattaattgaggccctgcagtgcgcccagggctgcctaggaccgtgagaggctataggagaggaacaggtctgcacctgacccatgtgggacccctgatcctccacctcccgccctcctgcgtggcacacagtaggtgcctgggcagtgccgtgacgctgccatccctgattcagggcaggtgaaggcctcccaggtaccagaaagaagctagggagccccagctcatcccacccatagctgagcccctgatatgtgcttcactgggtgctcaactctgggaggggggccacctgccccacagccccgatgggggagaaaaccagctggccattctgttattccgcaaatatttgttgagcacctgctaggtgacaggtcctgtgtggtagtaaacaagacggagagatggatacaatccttgtcctcacagagcttctggtgtctgggggagggggcagacactaaatggcaaaatccagcatgccgttatt

SEQ ID NO: 190132 - DNA, 367 bp, Homo sapiens
atgcccgctgagaggcttagggaatgaatccatgtactgtgaacagttatgtccaagatgtgacttggtccacatcacagatagggttcgattgctttatccttaccctttcctgcatctggggagctgttttgtttgcaagaatgatggcacatcttgtggaatccactgtgaggacagttaatagtcatatggtgggctaacagtgctctactatgaatagagaaaagaggagtcaccgtatcggggtgaggcagaggtcacagagccaaaaggactatgggaaaaggattttcagttagaaaaacaaagtggggagctccagatgggattcctggctgtggtccttccagacagttgctttctc

SEQ ID NO: 190133 - DNA, 314 bp, Homo sapiens
tcatttttccccttttgactctggccttacgggaggagagagttcctgggagggctgcaatttgacagtaagatgtccattcctgtgtcagctgggcagtgtagtgtagtctcgagacaagagccctggccctgccacctcctcaccagtgacttttggaaagccactttccctttctggttttggtttcatcatctctgaaatatcccaagttagaataggtgatctctgaggtctcttcacagctctgatatcctacacttctgtgatattttgtatatagctgtgatacacaccataggtgatgaagattc

SEQ ID NO: 190134 - DNA, 330 bp, Homo sapiens
ctgccgcgccccctccctctccagggccgcgcaggtgggggagccgggccgcccttatggccggaggcggggagccgccctctgctccgagcgcccgctcggtcctaggcacggccagttaagcagattgtgtgcggagcgacggggaaggggggggtcccaccagactctggaggctgcgtccaggtccctggatcggttcacaccagcctcctccacaggaagacctaagtgacccccaaaatccaggggattaagaagtacccccgaagttatggagcgcggtcccacttggggagactttttccagcaccaagtaaacgggggacc

SEQ ID NO: 190135 - DNA, 280 bp, Homo sapiens
tcatctattaatacatagggaaaaccaaagtgctatgtcctcaagtgccacattgataaatcaagtaatattagcctatttggggatttctgtgtaatcagatttgcccagagtccttttcatggtttattgttacttcttatgtatagtttatattttatgtatcaaaacagcacaatcacaagtgtgtagttaaggattaatatatgtagccactttaccataaaactcttacgtgtttactgtaaagaaatatcatttcatttcaactttatatgtt

SEQ ID NO: 190136 - DNA, 296 bp, Homo sapiens
caaccctaacattaagcaagaggatctttgtggagaatttactgttaatattgtttgcatatttacccaaacagcttgatataagggtttgtttttttgttgttgttgttcttaaattaccattttgagatctagaaatttttcccagcccaaataacaacaaaatcgtttactcattttaaaactttattgtttaaaaaaaccccactaacaaccctaaaatgaatgactccgtagttatttttaccttctttttatgaattccctcagctgaaattaggataatgttagtgttt

SEQ ID NO: 190137 - DNA, 700 bp, Homo sapiens
tgtggctttgcaggcttcagcccccatggctgctcccatgggctgggctggtgtggagtgcctgtagcctttccatactgagggtgcgagctgttggtgggcttatgaatctggggtctggaggatggtggcctcctgtgtgggggctccaagcccatattttccttctgcactgccatagtggaagtttcccaagaggctctgcctctgcaggaggcttctgcctggcaacagtgggtggtggtatgggcggtggttccttcaccaatggttaatcttcttgatgctgatctcctgatagtgggttctcttgagatctggttgtataacaggatgtagcacctccttcctctctctgtcttgctcctactcctgccatatgaaatatctcattgtcgcttggtcttctggtatagttaggagggccctgatcagtgtgggcctcgtcagtggacctagtcagttgggacttggtcagtgaggcctatttattgggggcgtggtcagcaggggtctgcttagagagggtctcattagggggatctagtagtggggtcttggtgagtggggacctagtggcagccacttgtttggtgtctggtcagtgtaaaactaggctgcaggactttgtcagtggagacctggtcagctggggcttagtggtggccttgtcagcatgagctgggtcactggtgaccag

SEQ ID NO: 190138 - DNA, 184 bp, Homo sapiens
tgtctgaatctttcacctagaccttgttccttgtgatgagtggggaggggcgtgtgtggggctcacaggctgctctgatgaggaatgatgccagcgcgttcttgatggcaagtggtgtccatgaatcagacttgcagatgtgcaagccacctggcttcaagcagtcagctctcttaagacattt

SEQ ID NO: 190139 - DNA, 309 bp, Homo sapiens
taaaggagccatcataaaaacatgatctcacccttacagatttgcagtttagttgggaagatgagatgtactcatatgaaatgtggaatactgagataggaaccctgagcttctggaaagcttgtgcatgggactagatttctctcctcccacactactacaaggacagcagagagagccatcgagacacttggtgccaatggaagtcccaggaggcttacttcccattgtcttctttttttcccgttaagggactctgagcacacgccccaatccacatgtccttcacacttccatagctcatatcag

SEQ ID NO: 190140 - DNA, 572 bp, Homo sapiens
ttctgtgagcgcccgcgggcgatcagcttcattgatccaaactccagaaggaagggaggagaacagaacacacataagtcccagataagcccaaacctcaccatggctgtgtgttccggctccttttctctttcctctccttccaaccacaaacagccaaaggcaggaaatagaagggcgggaaaggaaggaggcacagtcagccagtctagagaacagaagcaacgacaggattctcatagctatctgggacttggaaaacctcaatgacttgttctacatcaccctgtgctggattctgaacgtggagttaggaagtcacacaaacggaaatcaaaatcaatgcaaggagaggatatcctttcagcttctcggtacctgctcagcccgttacttctaagccttccaagcatttcaagcctcaggttacgaccatttttacaaggccactccctccctgaaggtttcatgaagaacacctgagggctctgtgggctaaaataggcccaatcacttctgacgggtctacaagagcgggccaggctctccttgatcgccagcggctttctctt

SEQ ID NO: 190141 - DNA, 172 bp, Homo sapiens
catccaatattatatctgacagacctactagggtaactataatttatcatccaaaccagaacagttttgagagtgaaacggggctctattcataattatgccagaacagcaaacataaactaggactatcccagaaaaattggaaagtatagacaacctaattatataaggg

SEQ ID NO: 190142 - DNA, 647 bp, Homo sapiens
gacaagcaaatgctgagagattttgtcaccaccaggcctgcgctgcaagagctcctgaaggaagcactaaacatggaaaggaacaactggtaccaaccactggcccaatttgggacaatttgagcaccaacatgcataaggaatgacactaatgaattataatgcattgaataaaaaaatgaatcccaggagtctacagtgataatttaaagaagtgtgtggtgggagtttctcttcagagaagcatgtcaagctacaaatggagaatggaagatagaactgtaaaatctcccttaattatgaagagtaagatatatctttaaaatggaaaaactgtagagacatcaagcggacaacttaggacagcaatactgggacaagctggcaccatgaacctctggaaccgatgcaacgggaaggccaccacctctcccatgtggtacttttgccaaaaatgtttgaccttaatctaataatgagtgaacaattgcacaaacctcacactgagggacattctacaaagtgactggcctgtactcttaacggatgataatgtcaagaaaaacaaagcaacagtaacaacaaaaaggccgggggctggtcattaaaagagataaaagagccaatgtccccagtaattaattttt

SEQ ID NO: 190143 - DNA, 326 bp, Homo sapiens
cttgtgttccctagagcacccagcacctcacctggtgctgagcagaaagtcactataggtctgctcactgagctaaactagtccactggtgcaaacaattcatccctttgggataatgtttttctgaaagttgtcaagcggaccaatgctaagggcagaaaattacttctctgggccgggcacggtggctcacgtctataatcccagcactttgacaaaatcaatttaaaaataccaaagcccagctaggcacaatggctcatacctacaatcccagcactttgggaggctgagtcaggagaatagcttacacccaggagaacgcg

SEQ ID NO: 190144 - DNA, 478 bp, Homo sapiens
tgataaattaatcttcaaaaagctttagttctctgttctttgtttcttatgaccaacttccttgtacttccttgtctcctagctacctgttctgtaaacaaccttctcgcctttgcggtgcttagatagacaagtccttctggcctagtaaaggacagtccctcttccttcccatctaatagaccctattcagtttaaaccttagcttagattgtgaagtccaacctcagccaatggggaaaggacacagaagtgctaggaactgcgttagggataaaacccctgccctcccccgctcagtgtgctcttgcagtcatgactggtgcaagctgcacctttctgcagaagtaaatttggcttgctgagaaatcttttgtttgagtgctcattttctttatgactctgagctcttatttctaacaccacctttccaggccaaaccaatgtacatcgtacacatattgattgatgtctcata

SEQ ID NO: 190145 - DNA, 168 bp, Homo sapiens
gcctgaagttagataaagcctttacagccattgatttatagaacatacagaagaatgggctaaacaataccataggaattcagtcagcaaaattcagcctgggaaactaccaggacaaaaattcaggacaaacaacctggctttttcaacataaaaattgcagttaaa

SEQ ID NO: 190146 - DNA, 364 bp, Homo sapiens
tgttttaaatcacagatggctgtttactgtataacctgtcctgcaccttgctttttcacttaatttgtcaagaatcatcccatatctgcacaccattcctaaagcaacacaattttccattatgatcattagctagttcccactgacgaggacctgcgctcctcccgaacctggccatcacaaatgcggctgcaagcagtgtccttgtttttaggtgtttctgcatatgtgtaattgtagccgtcagattgctgacatagatttgctggtcacagggtagtgcatctgtttgaaatgttggtggctgttgtcacactaccctttaaggtgatgtcaggctgtgctctgactagccatacatggg

SEQ ID NO: 190147 - DNA, 460 bp, Homo sapiens
ctcggtacccctccataatgtgtgcccactgcttcacgaccatgtgaaattacacacaaggatggttccaacaactttagctggaaaccagtctcgtacatcacggtttcattttttaacctttttttcttaaatttttagagatggcatctcattatttttcccaagctggactcgaactcctgggctcaaggaatctcctacctcagcctccccagtagctggcattacaggggtacaccaccatgcctggcttagtatgtgatgtttttatgtgtatttaaaaagactccttaacttcttctaagtgacctgtgtgtaggtgtgcctgtgtatgaactctgtccaaagtaatcaaagaacactcattacaaacaaactgctgtagcgccgtgtaatgatagtgggtccaggtcaccagcacacaccgatccaatctgctgtgccactcccatgcctg

SEQ ID NO: 190148 - DNA, 700 bp, Homo sapiens
  misc_feature (3)..(3): n is a, c, g, or t
  misc_feature (5)..(5): n is a, c, g, or t
  misc_feature (7)..(7): n is a, c, g, or t
  misc_feature (10)..(11): n is a, c, g, or t
ccnangngtnngcttctatcttgttggtattctgtctccctggtgcttctcatgtgctgagcttgatagagaaggtgacctggcaaggaactgaaggacatctggcaatgtactgagtgaggaactgaggcccacagtccagcagtctccaaggaatcaaatcccacaacagccatgtgagtgagcatggaagtagatcttccccggtcaagcccccagaaggacccagccctgcggacaccttgaccgaaacctgtgagagctccggaaatagaggaaccagcattccctctggaatacatcagcactgttgcctttgaggctggcctgcttgaatgcacacctgagctccggattcacagtggaggaagccagatgccatgtcatgagggtgctcaagcaactttttggagatgtatgtatggagagaaactgaggcctcctgccaacagccagcactaacttggcaagcatgtttgagagccacctgggaagtggagccttcagccccagttaagccttcagatgagactgcagtcctggccaccatctggactgcaacttcacaagagctcctaagccagagccatgcagatggattcttggcccccagaaattgtgccactacattttgggaaatttattatgcagccatagattaccaatacactcactatttcttttttctgatgccatacta

SEQ ID NO: 190149 - DNA, 623 bp, Homo sapiens
tgtgatttcatctggaattactggaatcacactgtctcctgtcagctttctctccctcccccggccctcctgctgatgagagacaggagcgatggatggtctgagttagcggggtcccggcaccacccagcgcaaaggcactgcactcacgcacgccatgcacatgctggctcacctcctccatcccatgcctcccctgtctccagcattccctctggaatacatcagcactgttgcctttgaggctggcctgcttgaatgcacacctgagctccggattcacagtggaggaagccagatgccatgtcatgagggtgctcaagcaactttttggagatgtatgtatggagagaaactgaggcctcctgccaacagccagcactaacttggcaagcatgtttgagagccacctgggaagtggagccttcagccccagttaagccttcagatgagactgcagtcctggccaccatctggactgcaacttcacaagagctcctaagccagagccatgcagatggattcttggcccccagaaattgtgccactacattttgggaaatttattatgcagccatagattaccaatacactcactatttcttttttctgatgccatacta

SEQ ID NO: 190150 - DNA, 627 bp, Homo sapiens
tgtgatttcatctggaattactggaatcacactgtctcctgtcagctttctctccctcccccggccctcctgctgatgagagacaggagcgatggatggtctgagttagcggggtcccggcaccacccagcgcaaaggcactgcactcacgcacgccatgcacatgctggctcacctcctccatcccatgcctcccctgtctccagcattccctctggaatacatcagcactgttgcctttgaggctggcctgcttgaatgcacacctgagctccggattcacagagtctcactctatcgccaggctggagtggtgcagtggcaagatctcggctcactacagtctccacctccagggttcaagccattctcttgcctcagcctcccaagtagctgggactacagttacacaccaccacatccagctaatttttgtatttttagtagagatggggtttcaccatgttgcccaggatggtctcgatctcctgacctcatgatctgcccaccttggcctcccaaagtgctgggattacaggcgtgagccaccgcacccagctgataaaaccatcttgaatgaccttcatcactgtgaacagtgatgcagtggctttataaactctagaa

SEQ ID NO: 190151 - DNA, 688 bp, Homo sapiens
ccacaccttcttgtttccaaacatgacaagctcactcccacctctaggcctttgtccttgcagatcttctccctgggaggctctttccaaagactttgacagcatctacttgtcacatcattctggccttctggcactctttgtggtggttttaaaatatgtcattacattctttgacactcctcccttcaaaaggcaatgattcattcccctctccttgagtgtgggctggactttttgacttgctcttggagaatagaatgtggtggagagggatggtgtgtgacctctgagattaggtcataagtgaaatttcggcctcccccagcaatttcttggatgattcacagtggaggaagccagatgccatgtcatgagggtgctcaagcaactttttggagatgtatgtatggagagaaactgaggcctcctgccaacagccagcactaacttggcaagcatgtttgagagccacctgggaagtggagccttcagccccagttaagccttcagatgagactgcagtcctggccaccatctggactgcaacttcacaagagctcctaagccagagccatgcagatggattcttggcccccagaaattgtgccactacattttgggaaatttattatgcagccatagattaccaatacactcactatttcttttttctgatgccatacta

SEQ ID NO: 190152 - DNA, 570 bp, Homo sapiens
ctagaattaaatatgaaaagactctccaaatcatagaactcagttgagtcacacagtcacatacggaagagtttttcaatcttggcactattactgttttggaatggctgactctttgttgtggggagctatcctgtgcatttaaagatgctttgcacaatcattggcctctgcacaccagataccagtagcatctcacaacccaaggttatggcaaccaaaatatcttccagacattgctaaatgtcccctcaaggcaaaatcactccctgttgaggaccatggatatacagtatattaaaattactggtctagtgtgtggcttatgcctgtaattccaacactttgagaagccaagggcaggaggatcacttgagcccaggagttcaagaccagcataagtaacgtagtgagaccccatctccacaaaaaagttttaaaaaaattagccaggcatggtggcacacgcccgcaatcccaaccacttgggaagctgaggcaggaggatcgcttgagcctgggaggtcaagactgcaatgagtgccactgcatcccagcctgggttacaaa

SEQ ID NO: 190153 - DNA, 148 bp, Homo sapiens
ctagcagggagaaaacacctgacataaaccagtaaagcaagtgagctagataatttcagagaggatgacattcaagaaggaaagacaccatgtaaaataacagagaggttgggagtttgtgacatcatgtttttatcttctcaccact

SEQ ID NO: 190154 - DNA, 370 bp, Homo sapiens
aggagagaccccagggacacagaaaaacctcctgtctgtcccaggggggattgcgaaagccatctttctggaaggaaggtggctttaaggactggatgaacttctttagagaatttggctgaagccctcataaggcccctctggagaccctcccagtttcccccttgcatggcgagggctgtctgaggagctggtggacctgttcctctttcagcttggtggttgggaaagggctgccactaagcaagagggttggctttgattggtccccttaaataaatccccaggttaaagctggcagcaagataggaaggttcacctacccaggtgggaggcctgacagggtcctcagtagcaggcagcgtgaggc

SEQ ID NO: 190155 - DNA, 227 bp, Homo sapiens
gttggacctagataaactgggacagctgggctgagcttgttctcattcaatctggaaaaggtgaagttgattgagctctaacttgccattccttttagatgggaaagggggaagagagggcatctggaaatcccaggagtcttgggctgaaggcagccattctgttctcacctttagaggagacagaggcttagaagcaggtagggggctggggtggggggcaggag

SEQ ID NO: 190156 - DNA, 232 bp, Homo sapiens
gtgaagttttactgatagttattacaatgttaactagactccacatactttttaaatcaaagcatatttttaaaattgttaatttaatggtgggttgatgttctttcttaataccttttcattttctttttggcaacattttactttccagacgtggattagtcgctatcaaaattttattcctaaaatgtttggaaagtggaaatagctgtggaaactgtgaatagtcagt

SEQ ID NO: 190157 - DNA, 240 bp, Homo sapiens
gggtacaaacgagtcctggccttgtctgtggagacggattacaccttcccactcttgctgaaaaggtcaaggccttcttggctgatccatctgcctttgtggctgctgcccctgtggctgctgccaccacagctgctcctgctgctgctgcagccccagctaaggttgaagccaaggaagagtcggaggagtcggacgaggatatgggatttggtctctttgactaatcaccaaaaagca

SEQ ID NO: 190158 - DNA, 438 bp, Homo sapiens
gtatcatagaatcttaaaaattatttgattcaagtgtatacataattttcatatccctgatagatattgccaaatatttaccagaagtgaatcaagtagtttttctaccaacattatctaagagggcttgtctttttacatctttgtcagcactaagtattatctcccttacttttttttttttttggtaatctttgttactttgttaggattaaagtagcttctcattttaattttcactcctttaattgagaagcagaacgtattcttttttggtgacttgtttcagagtctctttagtttgaagatacaatagatgtagcatctgctatatccggtaacaggataacagtgcattgctgggatgatgaggctgcagtgggctgtgattgtgccactgcattttcagcctgggtgacagaggaagaccctattaca

SEQ ID NO: 190159 - DNA, 305 bp, Homo sapiens
gtccctctacataggctattctataacaaattattttgctgtcttgatttttcagagacctcatgctagtagtagagagccaggagaaagtgagatgtcctatataaaaggcctgctagaaaaagaaatcagcactgagttctaaggatactgaacaactttttaaaaaataaagcaagccatattaaacacattagttacaaccaaattagataaaacaatgaaaattatccaagaagaaaaagtacatcaactgtctaggtttaaaattgtttaaggctgccatccaaggaccatctatgata

SEQ ID NO: 190160 - DNA, 424 bp, Homo sapiens
cccagggtactgtaaaagggaagacagggttggaagacaccagaagggccagacagggagagattgctggccttatggagttaaccgaacagagttcatacgaagatgagtaagaagcagagcctctgctgcattttgtgactccacagggacaaagagtaaggagaccagagtggaaaaaaaaagtgagggaaaggaaaaaggacattacagagaacatgataaggctgagtataggaatctgggatgaaatgaaaataattctaagggataggagggaactacaaaaaagggcaaaagcacagaaaaggtaagtggtcacctgatgcagtcaagtgcatatatttcatatatgtatgttcagtctaaaactgggaaaccaaccaatgcccaaccaactagtcagccaaccacacacatttct

SEQ ID NO: 190161 - DNA, 737 bp, Homo sapiens
gtaaaaatgggccgggcacggtggtgcagtggctcatgcctgtaatcccagcactttgggaggccgagtcgggcagatcacctgaggtcaggcgttcgagaccagcctggccaacatggtgaaaccccatctctactaaaaatacaaaaattagctgggtgtggtggcaggtgcctgtagtcccagctattcgggaggctgaggcaggagaattgctcgaacccgggaggtggaggttgcagtgagccgagatggcgccactgcactccagcctgggcaacaagagcaaaactccgtctcaaaaaaacaaacaaacaaacaaacaaacagaaacatataaaaacgtttgcgtcagcacagaaagcaggcgtggcccaacctagagtgagtggcatacgctgggagagccagagactctattctagcaaaatgcttcggttttccttccattacttcccttctcctgcccagcagtgcctggaaactgaggctcagggagctttcctactggccaggagttgtctggcctgtcctatacttgtaatggggtgagttggggaatgagttttggacccaggaccagagggcctcctgggcagacaggcctaccctggagtttgattgatggttctctgtgcctccctgaccactgatttgattaggtctctgggtctcggccttgctgacctatgcctcttgggagctcagacgccatggtctgggtgtctaaccaaggc

SEQ ID NO: 190162 - DNA, 699 bp, Homo sapiens
ctgggagtcatactgaggtgcctgcacatcaaacaccagcgtctaagctatagacaaatgcagagccatgtgcaggcctgaatgtcattcaccaccgcaaacctcaaacggacacacagcactgcctgagcctcccactgcttttctctgctgtgtcactctcccttagagtagtaataatgtccaccttctctgtctttgaaacctacctaccttgtcagctggccttgtgcttcatagagaatacagaagtaatcttgcagaaacccgtctttcccctcagtacccacatctccaacacatcatccatctctctgtgcttgctggatcattccctccggctcagaacatgcaccatcatccgtaccatttttgtttttgttttttaaagagacaaggtctggctttgttgcccaggctggagtgcaatgacacaatcatggctcaatgcagccttgacctcctgggctcaagtaatcttcccacttcagcctccaaagtagttggaattacaggtgcataccaccatgcccagctaattttattttctactgtggtccatcaggttatacagaggtctcactatgttgcccaggctgatcttgaactcatggactcaagtgagtccacctgcctcagccttccaaggtgttgggattgcaggtgtgagccaccgtgcctgccaggaagagtgttttg

SEQ ID NO: 190163 - DNA, 489 bp, Homo sapiens
gtgtccatcccccttcgtgtgtccatcccccttcgtgtgtccatcccccttcgtgtgtccatcccccttcgtgtgtccatcccccttcgtgtgtccatcccccttcgggcttgctggatcattccctccggctcagaacatgcaccatcatccgtaccatttttgtttttgttttttaaagagacaaggtctggctttgttgcccaggctggagtgcaatgacacaatcatggctcaatgcagccttgacctcctgggctcaagtaatcttcccacttcagcctccaaagtagttggaattacaggtgcataccaccatgcccagctaattttattttctactgtggtccatcaggttatacagaggtctcactatgttgcccaggctgatcttgaactcatggactcaagtgagtccacctgcctcagccttccaaggtgttgggattgcaggtgtgagccaccgtgcctgccaggaagagtgttttg

SEQ ID NO: 190164 - DNA, 403 bp, Homo sapiens
acgggaatactgatcatgggtgattgctatacccggtttattgatagttgtgtgtgagtgtgaatgacttgtggtagtagcctaggatgtttgttgagccaatgaatataattagagatataagtattagtgatcaggtttggcctttttggttgtgaatagctattatttgtttggatgttagttggattaatcattgttggatcgagattggaaatactggtttttatgttttctaagaatcgatgtgggaaatgtgtatcagttttcttgtttcttttcctgtgtaaaaattgtgatttagtgtctcaagtatattttttatttatttggtttttgaggtggaacatagatgaaactgaaggaagcttatagctctatttatagagtcactctaagatta

SEQ ID NO: 190165 - DNA, 678 bp, Homo sapiens
ttatgagtgcctaggaacaccaaaaggaacatgtttatataataacactcagtacaaagtatgtaatccagaaagtgatcagcctgatgtgtgttatgacccctctgatcctcccatgatcacggtatttgaaataagactaaggactggcccttttctaggtgacacaagtaaagtaatagctagaacagaagaaagaggggtccccaaacatgtaaccctaaaattcgacacttgtgccactattaatagtaatcagcaaggaataagatgcggttctctagattgggaaaagagttacacagcagaaaataagtatatctgccatgaatcatattcatgtacaaatgtgtgtcaatactggtcttgtgtcatctgggctacttggaaaaaagatgaataagatcttgtttggctccaaaaaggaaaaagcagcccctcctgcacaagtggaagctgcaaccctttagaattaataattacaaatccttcagacccaaagtgggaaaaaggagagcacgtatctctaggcattgatggaaaaggacaagatcctagaataaatatcttaataaaaggagaggttcgaaaacgctctctagagccagtatttcagactttctatgatgaactaaatgtgccagtacctgagattccaggaaaaactagaaatttgtt

SEQ ID NO: 190166 - DNA, 573 bp, Homo sapiens
ctatagttaacatttatataccaaaaacttcaaattccttcagctatgagctgttactatcttgtgcttagcgtcaggcctgggatgctggagagttttctccttgttgctgctccactcagtcccagcaggccccaacaggaggtttctctccatgctcttccccaccacctgccgaccgttggtgctctttccacagcgtaaggcttggcagaagtagggaggcattcgctccatgatttttaaaaatacgcacacataaaatatctctgttctagacccacatttcattgttaacttgacctagacccacatttcattgttaacttgactggctaaaaagactccaggttagggataattttgactcagaattttcaaggcattattccttttttccccgagggttgctattgagaagtctgatgccgttaagattcttcagattttttatgagaccccttttctccgtggacacttgtagaatctttcctttatccccagcattatgacatttcaagataatgtggcttggtatggctttcttttgctatcctttttgctgaagactca

SEQ ID NO: 190167 - DNA, 645 bp, Homo sapiens
ctgtttattacatatatacacactattttgggagtttgattcctcccataagatcagggtgaaacattctgcccttggtttatatgcagagcagtttacaaaagtggggtgaatgcactgctggctgctcctgctgcgggccggagacagagtgaggctggctggggaggaagtgtcgtttagggtgaaagtgagaaaagctgggaagaagcaaaatttcttttttttttcaaaaccatatgactgtcaccagtgttgtaaaaaaaaggtcaaatacacagttttaaagattcagtaaacattgcacacagcaagtattcagtgtaaaaaaaaaaaaaaaagcacgcaccaacatttaagtttgtctgaaggtttaaattacatgtatcatacatataagcctgttgttgaaccaggagaccagaggctcaaaagcattgcattctttcttgtttgggacattggtacaagagaaatgaaaaatcccaactgcatagaaatctaggaaatgtatagacaaagaaacaaaatacctttcctttcctcccctccacaccccatgactccccacacttgagtgtattaagtaggcaagctttactcgtttcagtctgcagaatccaacgtatcattagaaggggggag

SEQ ID NO: 190168 - DNA, 317 bp, Homo sapiens
tattacctgaatgttctttttagcatttaaataatccatttttagtaggcatttgtattgcttttttccatttcaggtagcatctaaagtgaatgtcccttgcatgtatactattcatatgtgacttaataagtagagcttgctaaatgggtaggaacttacaggaaaaggggaaactctagtttgagaaaattgtctgggctaagtttaggatgtgttcaacaaacaggaaagtcaagtttggctaaagcatggttgagtaatagtgggaaatatggtcagaaagtaggtatgttaggactctttctactgaaatg

SEQ ID NO: 190169 - DNA, 333 bp, Homo sapiens
tacatagtgaagtgactgaaatgctaaatcagaaatacaagtaacattaacttcaaatggaaatgataatgattctaatccttctaagagtaatctcaaattctacctgttccttagactattaataagatgagatgggctaaattgtttttctgaaacactgaaagtaattatctccttgatttcttttgagttacaggaagattttaaaaacatttttcttgactgggtgcagtggcttatacctgtaatcccagcactttgagaggctgaggcaggagtattgcttgagcccaggagtttgagactggcctcggcaacatagactcagtc

SEQ ID NO: 190170 - DNA, 417 bp, Homo sapiens
acaagaatagctaaaattaaaagaagtcagtcaccactgaatgttggtgaaaataggaagcagctgaaactctcttacatggctggtggaagtgtaaaatggtaccattcctgtggaaaactaattgacagtttcttagaaaaaacactcaccctatgagcaagcactcctagttatttacccaggagaaatgtccacaaataggctggcacaagaatgcttatagcagctttattcagaatgaccaaaaactgaaaacaactccccaacattcatcaagagaagtgataaataaattgaggtatattcatacaatagaaagtacacagggacagaaaagaatggatttctgatacatgcgacaacacgaatatcaaaaacagtatgctgaattaaggaaaaagacaacaaaagtaa

SEQ ID NO: 190171 - DNA, 208 bp, Homo sapiens
ctcggtatgtcatctccagctctaaccattttgtcccgacactggctctccctctaccttctgtccttgtctgccactggtctcccgtgctctggggtctctgcactgctggctgcctcccgcttctctcccctctccctctgccgtcctgtctcctttgcccagtctctccttgtttctcttctcctccttccttctctccacctcc

SEQ ID NO: 190172 - DNA, 322 bp, Homo sapiens
ctttcaggacctaactaactaggaataaaccatcctaaccatgagagatcagatgaaacttgagaccagagattcattttcttctaaaatgctttctccaaatgattttaaaaaagaaaagtggggaaatgtgaaaggaaaatatcttgggctccttctagctgggaactgttcagggcaaacctgcctcccattctattcaaagtcatccctctgctcacagagatagatgcatattccgattgcctcctttggaagtctcatcagaaactcaaaagaatgcaaccatttgtctctcacctatctgtgacctggaagcccc

SEQ ID NO: 190173 - DNA, 382 bp, Homo sapiens
ggtcccaagtttacagaaactgacagtgaatgtgtgtccttagacaagggcagactctttgtgtttccctgtgtgcccctccggtcatgctgcctcccagcacttctgtgggggaaaagccagccctcatttctctgatgaaatggttttacctagaaccttcttcttagctggtgggtttcaggacggaaaccccagtgaatgttgatgaggatgccagagaatgacgactgtcacctgcggtgaatggttgttgctttatgggacactcgccgagaatgcatcacattcttaacacggagttcatgggaaaatggaaagtgcaagcaaaagttactggcatttctcctggggtagaggctgcattaggattcctggggag

SEQ ID NO: 190174 - DNA, 472 bp, Homo sapiens
catttttgcttggtcatggcatactggcagacttacatggaaggtccctaacttataaaggtttgactcaggatttttccactttctgatggtgagaaagcaatatgcattcagtagaaactgtactttgaattttcatctttcccccggctagcaatatgctatatcaatactctctcaagatggtggcactctctctcaatagtggcaatgagccataggtcccagacagccacatgatcatgaagttaaaacaaactggtactcaacagtatactgtgtggccagatgatttttgcccaactaatgtaaatgttctgaatacttaaatattaagtgctaagttcaatgtttggtaggttaggtattttgaatgtatttcaatgtacgatattttcagcttatgatggttttattgggatgtaactccatcacaagtcgaggagcatctgtactctactgaccaaagctt

SEQ ID NO: 190175 - DNA, 301 bp, Homo sapiens
agcatgtttcgtatgctcgctcatctgatcagcgtagtaactctgcagtacaagcaccgttatccccagtgtacagaagaggagactgaggtcaagagagcttgaccaacctgcccaaagtcacagagacggctgttctggatctggactcccagtttcgggatctttgatttcaacatcaaagactagagtaggattcctagttgaagatatccatgttgtacccaaacaccacgtttcttcccagaggagaggcctgcagggagactccgagattcagagagtggtgggtggccttgga

SEQ ID NO: 190176 - DNA, 689 bp, Homo sapiens
ccctctcaggggaagaagccttggaaaaggcagcaacaaataaacatcaggcctctgtacataaggctttctaaaagttgttccaaatggttttgtttgctaccccactgtttccagggcaaccacctaagccaggacagaagtagaaggagacatgaggctagaatgggaccacccactgcaattctcatttttatcctgatggcaagaacctttatatcgactcaaagtgtttgtcaggcctctggctgtgaatcactggaataacattttgccctgatggaagtgtgtcacaggctgctgctcccacatcccccccatactgaggtgtttttaaatggaaccaaatatcccaggggaattttctctgcactactagcattgctttgttgcacatttttagattacacactgtaaattatagctgaagaaaatacagtatgctaatttcctcctgcatgtctttgagttatttttaggaaaagtgtctttggaattcagcttctcaggtaaatgtttaaaatgaagagaataataagactaaggcagagggatgctccaggctcagaccacagctgtatcacagtctggcagtttgtaatgagcacaacttgcacgtccagcatggatttcagctgccaatagtggaagaagctctggactgggcatcagtagatttgggtgtgcat

SEQ ID NO: 190177 - DNA, 723 bp, Homo sapiens
ctgggagctgtagaccggagctgttcctattcggccatcttggctcctccctcagcttaccttcactaatcttggctacattcactaatgcgtcgttggtcacctgtggactggcttaggctaattcctttatgacatctgcctttgagaaagctgaagcatctgtggcctctctccatatgatcactcatacttcaacaagctagcccagacttgctcacgtaatgcttgctgagttccaagatcaagaatattagaatacaaagcttcttatggcccatgttcagtactcacaaatgtttgttgcagtctacttgtgaaagcgaatcacaagaccaacacagatacaacggaaggggaaacacaccattcttcttgatgagaagggctgcaaataaactcactcacttttacagttttgacactcagaacttagtgtgattacgacataatttaacacagggacaacaataatcagagatgactgtgtagttatacaaagtcattatgggttttgttgcctttaagaatgtttcactttatcaacaggatggcaccaagagattagtaatatgtatgctttcattaaataataattgtgttatctcgttaatttatcctatgatcagaagatcatcatttaaccttaaaattggtatgggtagtccaggagctgatgatagccttttcatgtttgatccaccaagctaaatgtcgggatta

SEQ ID NO: 190178 - DNA, 1152 bp, Homo sapiens
tgctgggattataggcgtaagccactgcacccggcctaaaaaccgttttctagggttcttttaatgtgttttttagatattcactgcctccttttctaatcagtgggcagaaataagtgggttgaggtatcaaaagaaaggtattccaggtgtagaggacagaggaaataaagccttgaggtggaaatggaatgaagaaatcagaacacttgtctgaataagaagaaaacaaacaggaagtgagttagctgttttggtgatgaattccgaagtcaaaggtaagaaacttgggctgtacctttctcaagtcacttggtaaatagggccttactctaaggacagtgcagataaagaataggggacggtaagacagcacatagcctcatgtggaaactcactgatattcaggatacagcagtccttgtttcactcagctctacttcagtgccttggtgtctgattctttctctctgctttttgttctgactctgctaccatctgactgccctctttgccatcctggccccctcctggcctctgcatattcccatgagcagtggtgtgggattctctactcttctgttctttcatcattcccttgctctcacttcaccagtggcttctcatgtcactgagaatgaaattcagagtccttactgaggcctagtagcttctgcaggacctggcccctgctccctttctttctggtctcagttcatacacctttccacctttgctcacagtgtcccagccacattgaccggcctgttcttcctcacacccacctaacactcagaacctttgtactcgctgtttactcgaccgcaccttctctccttttttagtccttgcttccctcctctgtttaggcctctatcaaatgtcacctcctcagagaaccttccctgaccaccctaaggtgggatttcccatcctgatactcttatctgcttctcttattttattatcaggctttcttgtacatgacattattataatatgaatttattttgcatttggttattgtctgtcttccactgcaatgtaaactacttgaagcccagcttgatttgttatatttactgtagtgtcctccatgcctggaatggtacctggtacatggtgggcacttaatactgttgaatgcacgta

SEQ ID NO: 190179 - DNA, 703 bp, Homo sapiens
ctgaattataattaggcaacatttccacttttatatcaaaaactacactaaagtgtgattctaaaacgtgactttttaaactctctttagtgaatctgctcataatgaaagtgtaaattattttttatttaaaaatttagttatcatttgagaattggttaatttgtttttatttttctaatagtaaatatatgaggaagacatatatatttttaccaggttgatatgggtagaattatctcactttttgcaaaatattacaaaatactgtgtatgtgctgtatttttataaatagaatcatgttggatgaaatattggtcataatatagtttattgttcgagtttgaaggcaaataaacaaaaagtaagtattgagtttatttaaaatgcccattaataatgtagttcttattttttaactttttaaaatgttcaaggattatttttaattgtatttttatttattttccaaactcctaatatgtacggttatacatttttttcttttttaaacaaatgcttggtttgatcagtaggaaaaacagatcttcattctttatatttggaaaagttatttttcatttattttagcttttaaatagtgagtgtagtagtcacaggtcaaacatgaaagagggggcaccctcaaattagaacaatttgagtaaggttgaattaagtgactatttaaaatgtaggtaa

SEQ ID NO: 190180 - DNA, 362 bp, Homo sapiens
tgaaaagatggaaaacttctagtagacaggtacacacaaacataactagtacttgtgaaggcatgaaaaaaaaatttatataccgccaatggggtatagatacgcagattttgtcagtggtaaaatttcacataatctactaaaattgaaaatgaatctacccattgaaccagcaattctactccaattttaaacctacctactagaatctagcaaaatatttagaggattgacatttaattttaaaagtttggtataaattttaaacacatttctatgtatgatacataatatttggtgacttgctgtttttttttgtttttgttttttgttttgaaacagtctcgctttgtcacccaggc

SEQ ID NO: 190181 - DNA, 166 bp, Homo sapiens
cttcgttcctggctgatcctacaagccaatatcccccaccaatgtatccctcccagccttctcctcaccccacgggagggaagaagcatggccccctctgagaagctgatgcaagttatgagcaatttctgcaggaaaatacaacgtcagaaagttcacagacccc

SEQ ID NO: 190182 - DNA, 242 bp, Homo sapiens
acacacgccctttttactcagggacttcacttaaatattcgttttatgggaagaaactttttaaagccacagacaattacttaagagtttgggacaacagcagtatccgtggctggggctgggagggggcaggattttagtctttctgaccttgtacatgatttatctaaataatccattcatttcatcctggttcctgcctccggcttgtatttactcagagcagtgtagaagaatctatt

SEQ ID NO: 190183 - DNA, 310 bp, Homo sapiens
agtatagactcaattcatgaattcattcaacaaatattgtttgagaatctgttctatgcctggcagtattctaggactggggatccagcaatgaagactaaagactatcattacagagcttatagtctaatgagagagagagacacagtaaaacaaaatagataatgtccatgtgttaagctttaaagagtaataaagctgggtaaatagataaggagcaacagagaatgactagggaaagaagtggaggcaggattttttttcttttgtgtgtgtgtgtgtgtgtgtgtgtgtgtgtgtgtgtgtgtgt

SEQ ID NO: 190184 - DNA, 415 bp, Homo sapiens
aggtaagtcactcaacagatctagaacaagactggatacagaacttttctccagtctgagaaaaaaatgaactggggtagccacctcacagtaggtttggtttcttagaagccaaatgtgatgaacctagtgaaccatttcaatgatgttttggtgatggcctgcaaaacaattaatcattgaagtatataagtaaactgctaaaatcataatctagtatgcatatattgtaaacttttagaaaaaaatgaaatttacagtttgaagattttcagctttcttgctcccatccaaaacttctttcccaatagcggttttatgaaatttttgtgtcaatacagagagctagcaccttattttttagagtggcattgacccaagtccacccaaatataaaataatactcccttctcaa

SEQ ID NO: 190185 - DNA, 341 bp, Homo sapiens
tgatgtaggatgaaaagtggataatcactagagccatgtccttgagtagatgagaagagaaagaatctacaagagaagagactggatttggtgaagaatggtactatctttaataacagatggaaaggcagagcatgtgggtttacatgctggtaattgtggtgatgggagtctgtgcacatttttggaaaatcaagaagccaggatatcagctgagagtattgttgggggagagaattttggatgtttaagaagtgaaggattcaattcaaggcttcagcatccttctctgtctatatcagtatattgtagaaataacatgattttctatctgtatcatg

SEQ ID NO: 190186 - DNA, 539 bp, Homo sapiens
tatgggcatttttgaaaacaataggccaatcagcttgctactggtggtgcctaacaactgaatgtgataccagtagagttagccagtgtaatggagaggtcaggaaaagagacaaagaaaggtctgctaaatctattgccatctcaggggaataatgcacatggccaaagttatgcctctgaagaatggcatcagagttgtataaagcaggggaaatgagtaaacaataatcacaagcttcaagacaagctgggggtcattattcaaagttgttacaatctattactttaaatgtccagttttcaaccaaaattatgagacatgctaaaaaataagaaagtgtcactcttatacaggaagaaaagtaggcaacaagaactgcctttggaaggctgagatagcaaacctaaaaaacaaagacttcaaggcaggtattgtaagtatgctcaaaaaactaaaagaaagcatgtttagagaagtgaagaaaggtatgatgacaatgtctcaccaaacagattataccaataaaaagttatttc

SEQ ID NO: 190187 - DNA, 359 bp, Homo sapiens
ctagtcttctggaattatcttactgcgcaattatatggcttcctacattaaggagtgtttgcagtccagcacactctgcaggggaaaaaaggtgtggtgtggcagaaagaacacaagttttgcagttaagatagttgttaaattcagatccaaggtttgtcacctttctcgctggtggccttgggagagtggcaatctgaacctcagtctcctcttctgaggaataaggctgccacacagggatgttgggagatcagtgatagcccacataaagcacctagcccagtaaaatggtctctacttttcacgccaagctgcctatacctcctctcacccaacatatccacatgctgaccaca

SEQ ID NO: 190188 - DNA, 201 bp, Homo sapiens
aatctgagtgcccaagagccactctaggtcatctaaggcctctctcctcatggagggtttgctgtcacagcccagggcaggcagggccattgcgctgtgcccggagcttcctgaggagcaggcaactactgtgtaaatggagaagcactgaggctctcgcaggggcccttgggccagacaggctcggccccagatcctccc

SEQ ID NO: 190189 - DNA, 317 bp, Homo sapiens
aaaaaaggagagagaggtggaaagtccgcaggtgaagcccagggagaaacttactgaagggggtgattggttgcaccagcctctgctgggaggtcagtcctaatgcctgagagtagacggaggtgctaagcaacaggttgcagtgggatggttcagagcaattttgggggaagtggtggggaccagagtggaatagtgggctcaagagacaatgagaaaggcaagtgattgaatctgccaaggaccaagcaccaaagtgccagctcactgccaccctcagtaaagactaacttgccctttcccccaactcccctccc

SEQ ID NO: 190190 - DNA, 422 bp, Homo sapiens
tctgtatctcagatccctcatttgtaaacatgcaaaataactatctctcatgagataaggcttaattaagtaaaaatagttcatgtaacgcatttagggcattatctggtttacgcttagtaaatgttgattcttaattatcatgattattaaaagaggtcctgataaaggaattaaggttatttctgaggaagacactacttcagtgaacaggagaacatgggcataatcggtaagatttcttcggaaaaggtaaggcttgacttatgccttgaaaagtaaacatgcagtcacataaagagaaaattataagcaaaggcaccaatatcagggaaatataaagaacttaaaaagaaagcaaaagaaaatagggttgaaaagtcagccaggatcataccatacaataggatcttgaatgaccc

SEQ ID NO: 190191 - DNA, 345 bp, Homo sapiens
aaagatacacaacagaacaacagattcctcccaactctgtacaaataccagacattcatctctggggcaaaaaaatgcaggttaattctagaaataaactggccacgaaataaagacttccactcttctattagtggtatctggagcctctccaggaaaataatcacatctctacctgattactctaagtggaatctaatgagcaatccccactgcagagaaagcatccactaagcattttatttaatgcttcactgtgaaagactaaacaaccaacaagattaagaaatatctacataatgaaagaccaaaccaaaaaataaaagaacttggagggaaaagaga

SEQ ID NO: 190192 - DNA, 625 bp, Homo sapiens
tagattatcccgttaatcccgtacactggaatattattcagccttacaacggagggggaatcctgacacatgctccaacaggatgaaccttgataacattacactgggtgaaataagccagataccaaatgacaaatactgtaagattccacttatacgaggttcctagagtagtcagatccagagacaaagcagaatgatggttgttaggggctggggacagcagggaaggatggagagttactgtttaatgggtatagagtttaagtttgagaagataaaaacattctggagatggatggtgctgatggttgcacaagaatgtgagtatcactgaactctacacttaagagtttttagtttttagttttagctgggtttggggtcccaggcctcaggcttcacctgctgcctcaggatctccagggccctcccagatcacagacctaacagatcttaggacaattggcccagggtcatcagcgcaattgatgcagctccctccctctcttgtaggacattttcatggatgttggcatttggtatcagagcagctgaagttattatgcatttacagggtatgtatcaatgtagataggggtagggattaacgcgggtcccgggc

SEQ ID NO: 190193 - DNA, 150 bp, Homo sapiens
ggtacccgtcctctgatccagtcatgatcataatgttaaataaataaagcaaataagtgaccccgtattgtgatttttctagggtgagcccatttcctctattcaaaaaaaaatggctgggtgcggtggctcatgcctgtaatcccagca

SEQ ID NO: 190194 - DNA, 170 bp, Homo sapiens
tcaaaattggacgtctgtctgtccccctcccaagatgaaggggtcagaaaccggctgggaaggggggattctccaaagggtgagccgggctggcccatccatctctcatttctatggaaagaggctgcacattagccccacaacgtgaccctcctttttaacactgagtg

SEQ ID NO: 190195 - DNA, 625 bp, Homo sapiens
tgctattatcctcacactggaggttaggctttcaacacatgaatctgaggctaagggaacacttttagtccacagcgcttggggatctcaaccagtctgtggtttaaataccatccatatgtctttcctttacttcccatgtaatcctttaatcctatttattccacctccaaaacatattctagctctatttgctttcatcttccctagtaaacactagtccaagccactgttaccaaggtctgtctcctgtctgtcctcatcaatttcacttttcttacagcactcaaagtgatctttcatgatgtaaatcagatcctgccactcccttgcttaaaatcctctcagggaggctgggtgcgctggctcatacctgtaatcccagcactttgggaggccgaggcaggcggatcacgaggtcaggagatcgagaccatcctggctaacatggtgaaaccccgtctctactaaaaaaatacaaaaaattagccgggcgtggtggccagcgcctgtagtcccagctacttgggaggctgaggcaggagaatgacatgaacccgggaggcggagcttgcagagagccgagatcataccactgcacttcagcctgggccacagagtgaga

SEQ ID NO: 190196 - DNA, 408 bp, Homo sapiens
gacttcaaagtcaggttcccattgagcaggaacactgcatggggtagggcaggagaaacctcaggtcccagctccacactgctcactgactgagcttgagcgagtcacactacccctttgggcttcctgtctattttaaagtgaggagcttggaatagatttttgtgggtctacctgatacaattatcatatcacacccacggtttggtggctcactgctggggatacagcctcaggaggctttaaaagtgaatggcaaccgcctgcagtggttcctacccttaatcccagcaatttgggagttcaaagcaggaggatcgcttaagcctaggagttggaggctacagtgagttatgattacaacactgcactccagcctgggagacagaccctgtctcttaaggttcc

SEQ ID NO: 190197 - DNA, 563 bp, Homo sapiens
agggggagatgtaatcggtatgaagggcaggaggaagatgatgagctcagtttggggcatgcatttgggatgccagggggccttcaggtacagatgtctaccacctgctgtgatggggacttgggaaaatgctaacaattggaatcaccactatgagaaatgagactgaaagtgattagaagcatgaagaaagaggctgtgaggcccatgggtggtgaaagccattacaactgatggcagcatagacagggaacctcctttatgacgagactgtcactggcactttattaaagaccatcattctatagtcagaagttcagaccatgttcacaaaacacatgaagccaggatgattatttttggaatgcaatgaaaagattaaatgaaaacataaaactattttatgagcataatatactactttgtttagaaaaatatatactgcttgtttgttactagtatgaaggttgctaaatagagactagacactatctagactctaggtgttaatttttttccattccaaaacaaagtaattcacaaaaacgtgcactattcattca

SEQ ID NO: 190198 - DNA, 312 bp, Homo sapiens
tccaccccagtcctacaaattagagttgctctgacttgtacaatgatggaaataaatctgtctgcaagcagggcactatttactcttcagattctttaatcacatctggctcctgcaagttcaattccacttgtcaatttctagatatgtagggaaatagggaagatgtagataatctgataatgacagcattgaactgtgttatattatcagttacttttcctagccttttgttgacatctggtagactccacacatatagcacttttcaaatgttgcaacatgtcaaattcctaacatcaaaatttatat

SEQ ID NO: 190199 - DNA, 168 bp, Homo sapiens
gcaaatcaaccatactgctacttcccagattaaatatctattatgatgttgcctttttagcttccatattcttaaaagatataaaacatcggttatagttgaagttctttttaaacactgtccttattcccattctcttcttctcccacaaccccaatcagaaacaag

SEQ ID NO: 190200 - DNA, 462 bp, Homo sapiens
catcattatcttttctacaaaaaagaaagacgaggcactgggtgcataattaacctgccccagacacgcagccagttagtggtgaagctggagccccccccggagccttcacatcactgccctgctctccagccaaccgtggaacgaaacaagaaggcagacaacgtccacggacggctcgccctgtgtttattatagtgtttgcaaatctgaataactgagcacattcctgacaaccctgactactgaaatgaaggcaaagagatgggatgaaaaatgggtactttggatcaaaacaacccccgatttatgtaaatgtaactctaacttttggacaggtggcaggtttgagactgggaagctggattccctctggactgggggtgcctctggcgacaacactcctgaggaaggctcaagcagaggaattttttaaaatgaatgaataaatgagctcttctc

SEQ ID NO: 190201 - DNA, 145 bp, Homo sapiens
ctagccctactagtctcaatctccaacacgtatggcctagactacgtacataacctaagcctactccaatgctaaaactaattgtcccaacaattatattactaccactgacatgactctccaaaaaacacataatttgaatcaa

SEQ ID NO: 190202 - DNA, 223 bp, Homo sapiens
  misc_feature (190)..(191): n is a, c, g, or t
  misc_feature (207)..(207): n is a, c, g, or t
gcttagggaggcagagaggagtttggagacaagggagatcatgattcctcttccctgtgttccgagttaaccaggataaccctgcctcgttttaatgcatctgtaggatttgattgataaaatatttcatttcttgcaaatgttgcatggtgaaatcaagagattgaaggcttttatttgagaaagggtnnccgagctcgaattcgntaaatccatgggtcat

SEQ ID NO: 190203 - DNA, 242 bp, Homo sapiens
tctagtaattcctttagttttattctatcttctttatgaagacacgggtttctatttttactggttttgtccttttaaaaacttgggcaacagagggagactctgtctcaaaaaaaaatttttttcataaagcttattttaaatctaataagcccgtttcaacttttaactactctttgaagtactataattgcaaatcagtatttgtttttatgtatttgctttatgtacctctttagata

SEQ ID NO: 190204 - DNA, 260 bp, Homo sapiens
attgcaggatgttgagcagcagcccggccacggccccactagctgccaggagcgtcccctacttctaagttgtggcaatcaaaaatgtctctaaatgttgctaaatgtccgctgggggcaaacttgcccccactgaaaaccgctgtttcattttttaatgtttttaagacttagatgcatttataaatcattttgatgaaaacaccttcttaagtttactaccaatgtaataccaagtcggtagagaaggcaaccgggtt

SEQ ID NO: 190205 - DNA, 374 bp, Homo sapiens
taaaaagtgaatgttaacatggaaaaagaccagaaggtgaatatacaaatgaaagcatttatttaattttgggataagatctaaggtaatatttgtttggttcagaaaattatttttaaagaagggtgttgtgagcatcagtgatagagtgaggaatcctcatttctttcagatcctggtaggggaccctgagaactttggggagtgaagatagtgaagtaaaggttgctaagcattctgctagaacactatggagacagcgatataaaataagagccaataataacaaagtagcacatagtgaatgtttaccatatgccagacattctattaatttataatgattgtaacattcctatgagccaacatcctta

SEQ ID NO: 190206 - DNA, 602 bp, Homo sapiens
tcactaagtgtagatcatactgtttccctaactcgttctgcctgccacactaaacagaaaagtctgaagttatcctgtaagaggactgtgtacatgaaagagttccccagaaataagaaacgtggtagaaaaatgagaggtctcatttattgagcaattatgtcctaaacacagtggtgagtgtattttgtctgtgtaatccttcatctcctaatgaccttgtgcagtgtaggtacttttttatgcccatttcatagatgagcaaatggaggctcagagggcttaagtaactcaaggacacttaaggtagtcaccatggaaataagtagtgaagtcaagagtaaagcaagatgcttctgggcatcagagcctaccttcttcatcatggtattaggccttcccaggtcagttgtttgtgatttgccttctctcaaacttagtttcaggatgagtacggtggctcacgcctgtgatcccagcactttgggaggccaaggcgggtggatcacttgaggttgggagttcaacaccagcctggccaacatagggaaaccttgtctctactaaaaatacaaaaattgggacgcgccatcgtgacgctt

SEQ ID NO: 190207 - DNA, 708 bp, Homo sapiens
acaagtggtgctgggagaactggatatttacatgccaaagaatgaatttggatccttttcacagaaagtatactagtataactcaaaatggatcacagacctaaatgttagagctaaaactataaaattcttagaatataggagtaaatctttgtgatatcgtatatggcaccaaaagctcaagcaataaaagaaaagatggataaactggacctcacccaaattaaatttttttgtacttcaaaggacatcatcaagatagtgaaaagatacccatggagtgggagactatatttgcaaagtacatatcagataaggaaagaactcttacaactcaaaaatgaaaagacataaccctacttaaaaaaaaataggcagaggacctaaatagatgtttctccagagaagatatgcaaatggccaattagtacatgaaaagatcctcattattactcattagataaatgtaacttaagactacaatgagataccacttcctacctactgggacagttataatcaaaaagaataacaaatgtgggtatggatgtgaagaaattggatccctcatatatggaaatgtgaaatgttacagccacttggaaaatggtcttgtaattccttaaatgattaaatggagaattatatcacccagttgtttcaccccttagtatataccccacaaatgaaaatacatgttcctcaaaa

SEQ ID NO: 190208 - DNA, 186 bp, Homo sapiens
ggatccacatctggtaggactggtatccaggattaagaaattccacgattcagtaataaaatgagaaccagttttttccccccaaggataaagatttgggcaggtacttcacaaataaggaaacatgaatggtggccagtggacacctgaaaatgtgctaacaccattaatgatcaggaaatgtat

SEQ ID NO: 190209 - DNA, 607 bp, Homo sapiens
acacactcacacatacacgcctatctgggttcaaacccacatagtcacttggatgctgcactggtttccccgccttcagtcttcattcctttcagtctattctccaaaattgtataagtgggatctttctctacaaaccatgcaatgttgcttcttggcctaaaacccttcactagctccccagagcagtcctgcaaaaacccgtaatgacctgaggctggccctcactcacctctccagttcacccatggtcactgtccttgccctctctgacctggcgttgtgaactctggcagctctctgaatggggcgacctcacaactctgcctttaaactcctttcctgccaatctctaggactcattcagacatcatcaccttctgcagaaagctcacctgaaacctgcatcggctgtgcttcctgcgtgatcctgtagggtcctctgtgcaccacaagttaggctgtgcgcttagccacctggatgctggtgaggccccgtggctgtttctacccctgacttgtcttttatcttctgcttcctacttttagaagaaaaaagataaatttaaacctgaaaagtaggacgcagaagacaacagacaagcta

SEQ ID NO: 190210 - DNA, 778 bp, Homo sapiens
acacactcacacatacacgcctatctgggttcaaacccacatagtcacttggatgctgcactggtttccccgccttcagtcttcattcctttcagtctattctccaaaattgtataagtgggatctttctctacaaaccatgcaatgttgcttcttggcctaaaacccttcactagctccccagagcagtcctgcaaaaacccgtaatgacctgaggctggccctcactcacctctccagttcacccatggtcactgtccttgccctctctgacctggcgttgtgaactctggcagctctctgaatggggcgacctcacaactctgcctttaaactcctttcctgccaatctctaggactcattcagacatcatcaccttctgcagaaagctcacctgaaacctgcatcggctgtgcttcctgcgtgatcctgtagggtcctctgtgcaccacaagttaggctgtgcgcttagccacctggatgctggtgaggccccgtggctgtttctacccctgacttgtctaatcctggaaggtagaaaatgacttggtgtcctccattttcaatttttccttctttcttttttttttttttttttttttttttttggaaaaaaaatttttttttgccccttggggtgaagggggagaaaaaaggccgggcttgttccccgccctttaaaaaaatttaaccttttgggggtaaccaaccgcggtgtcctgcccccaagggccccttggaaaaagtttttttagggggccccctttttaaaaaaaa

SEQ ID NO: 190211 - DNA, 395 bp, Homo sapiens
acactgtgtactgcaatgcaaagcgtggagtcgctctgttaggtgcccaggctctgaactccaagcttctcatcctggctagggactcatctcccctgccgccccccagggccctctcccgcaggaagcccactcagtgggagactcgcctacacctgcaacatgatgcggctgctgacttctgaaaccagaaagcactcagtggagacagtaaagcagctggtcccctcctgacccctctgcatctgatggacagtggcccgcccataccctggcccacaccccatggcctctgcagttctgactccacgtgagcagccaagtgcgaggtcgcaccctgggctcggtggtgggagctgtctcaccactggaaccctcacctctggccgcccatt

SEQ ID NO: 190212 - DNA, 446 bp, Homo sapiens
agagtcataaaagtatatgggaaactgtaataatgattattctttttttacctttggcttaactttagttcttcctcttattttataactaatgaaacttgtccacagatattaagtaccttgaccaaaatcacacaagtaaaagcaacaatgagaagaaccttcggctgggcgcagtggctcacacctgtaatcccagcactttggaaagccgaggtgggcggatcacctgaggtcgggagtttgagaccagcctggccaacatggtgaaaccccatctactaaaaatacaaaaatgagccaggcatggtgctaggcacctgtaatcccagctactcgggaggctgaggcaggagaatcgctcgaaactggaaggcggcagttgcagtgagccaggattgtgccactgcactccagcctgggcaacaagggcgaaactcatctca

SEQ ID NO: 190213 - DNA, 308 bp, Homo sapiens
aaaagaaagagaaagagaaagagaaaagagaggaaggaaggaaggaaaaagaatgaacctgatgacattacttggtacctaagaaatctacaggggaaaagagaaatgaaagtatagtcatccctcggtatccataggggactggttccagaaccacctggaggcaccaaatccaagactgctcaagtctcttatgttaaatcgtgcagttacttgcatgtaacctatgcacatcttcctacttaccttgtttagagaacagtgacaagaaaacaagtctgtacatgttcagtacagatgcaaccatg

SEQ ID NO: 190214 - DNA, 485 bp, Homo sapiens
tgttaacctggggactggtgtcattctggggcctaatgaccacctgggttgtattattcacctggggcctggtgtccacttggggcttgagtgtaaccttggacctggcacccacataggattgggtatcaaactggccccttggtgtccagttaagacatcatgtgaacctggcgcctgagtgtccacttggggccaaatgactactgggggcctgaatgtcaacctagaatctgaggtttactaggggcctaggtatccacctggggcctattgtccacctgagcctgggtgtcaacctggggcctgatgtaaacctctagttcagtgtccaccttgggcttgatgtcaacctggagcctgatgtccacctgagtactgatgttcacctttgacctgatgtccacctgtggactgtttatccacccatggcctgatgttcacctggggctgaatgtccaactgtgacttgttgtgcacctgga

SEQ ID NO: 190215 - DNA, 201 bp, Homo sapiens
tggttcttcatcagggaatcacatataaaagtgaataattaatataatgggggatgagaggctgggaaaagagataacaggtagtagatgagggaatatgagtaagggacaaacataatgcatcttctagaggaagaatcagtgggtttgggtgactcttctgtgttcattgccagacagtgagaagcacattgctgttga

SEQ ID NO: 190216 - DNA, 675 bp, Homo sapiens
gaatcgcttgaacccgggaggcagaggttgcagtgagctgagattgtgccactgcactctagcctgggcgaccgagcaagactccatctcgaaaaataaataaataaataaaatgtggaattggttgatggcataggaaacaagaagctgcttttaacattttagacccagctactatttttcgtggctgactagaaataatgccttacttaagtaccatccttaaccatcagcacagtacagattgggccatttgatacagcggcagaatcctggctgcccaaagggatgattttgaatttacaggattagtgctggatctcattactgcatatagaaagaatgtccaagttcagtggacaatactggttgaaaattactttttatctacattttgctgtgtttaaatggatgaatctctgacaagggtaagcgtgatgaaaaatggctctctgtgcaaagacgatgtttccttcctttttgttgtacggcattcttgcctttgtagccctaccagctgtttgatctttaagtcttcaaatctaactgtaggatgggcacagtggctcacgcctgtaatcccagcactttgggaggccaaggcaggtggatcacctgaggtcaggagtttgagaccagcctggccgacatggtgaaaccctgtctctgctaaaa

SEQ ID NO: 190217 - DNA, 533 bp, Homo sapiens
gtaggctggacccccccttctatatgcacaggcaacaaaagcaataatacaaatgggatgacatcaaactaaaaagcttctgaacagcaaaaaacaaacaaacaggccagacgctgtaatcccagcactttgggaggccgagggggggcggatcacctgcggtcaggagttcaagaccagcctgaccaacatggtgaaaccccatctctactaaacatacaaaaattagccgggcgaggtggtaggtgcctgtaatcccagctacttgggaggctgaggtaggagaatcgcttgaacccaggaggcggaggttgcagtgagctgagatcatgccattgcactccagcctgggcaacaagagcaaaactccgtctcaaaaataaaaaataaataaaataaaataaaatgtctgtggaatcctaagacattgaaattgatatgaggcaggttttcagtacactggattcatgtttatatatagcatgcaatctagatgaataggtttaggttttgtttggtttttaataacaaca

SEQ ID NO: 190218 - DNA, 554 bp, Homo sapiens
tattcttgaaactctcttttatcaggtagtctttttactgtcctgggtttcctcctgcaccaagtgttccttcactttttttttttttttcgagacagagtctcgctgtgtcgcccaggccatgcagtggcgcgatcttggctcactgcaggctccacctcctgggttcacgccattctcctgtctcagtttcctgagtagctgggactacaggtgcctgctaccaggcctggctaatattttgtatgtttagtggagtcggggtttcaccgtgttagccaggatgatctcaatctcctgaccttgtgatccacccgcctcagccttgcaggtatgagccaccgcacccagctgtgttccttcacttctaacttctgctgctcccatgtatagtgtaggcatcttcatagggtttttattgcagcccttttttctacttaatccaccagtcccatcccagggccttcccatttaagaccctggcttcaccaatgcactctctgcaagcaggcaattcgtaaatgtaaatatcttattctgaactctcctctctt

SEQ ID NO: 190219 - DNA, 497 bp, Homo sapiens
taaataagggcagaagctcaaatggaaactgaagtaagcaagaggctctgagctttgttttactgtgccagcagtagatctcagtttagaaagtaatttggtctagtctgtgtttacctattgaggcatcgtataaattcatcttaagcgtgtggcagtaagctctttttatttttaatgacatgtcattcatgctagttttgtccagtcaaacagtgtagatagacttaagaaaaagttaaatatctctactcctccccaccctctagaaactactaatactaatactttagtgttaatattagtagggcatttcccactattcctgtggggccctggggtctctactgtaggggtcatctcaacatattttacgtcaagcagcaggtaccatttaaacaggtcttggcaatatttttttcttctcagtgaatgaaaagatatgctgatgttctaacacccagtatctatgaatgtgatttctgtttctttctttc

SEQ ID NO: 190220 - DNA, 414 bp, Homo sapiens
aataaaagtcttacatgaatctgatgggggatattttgagagtgtcaaatttatgactctgtttatttacataaaatccaaaaacaggaaaaaattatgataatagaaatcaggcaaatgggctattgataggaaaagggctctagggaactttctagaacaaatggaaatgtttcatattttgatctcgtggtggttgcacacgtataaatatagagagatacattaagattggttgaattgtacatgtagtatatatgtgttttactgcatgcaaattataatctattgtttaagtgttgtaaatagtgacagagttcctaacatagcagcaacagacacagtgagaaaaggatttctaagggtgtaaaactaaggtaactcagaagcattggttcattctacattcactca

SEQ ID NO: 190221 - DNA, 101 bp, Homo sapiens
gaatggacatacttggtggaggaggatcaattgttcatgccacacagctggccagggtgatgtgctattcttttctatatgaaaggcctgggtatcacgtt

SEQ ID NO: 190222 - DNA, 473 bp, Homo sapiens
gtagtggcaatgacaacaaaaaggttaaccttccctaaaggggggctccaaaagtctctaagaaaagcaaatgcatagcatgtagaccattttcaaagcattatcatttctgcagatgactaaaacctccctgaattttctgaacatataagcaatgtttcagcactaagaaacaattttttctgttgaaatataaccggacccagtggttcacgcctgtaatcccagaactttgggagggcaaggtaggcaaatcacttgaggtcgggagtttgagaccagcctgaccaacatggtgaaaccccgtctctactggaaatacaaaaattagctgggtgtgatggtacacacctgtggtcccagctactcgggaggctgaggcgggagaatcgcttgaacctggaaggcggaggttgcagtgagctgagatcaccattgtactccagcctggcgacagagcgagactccgtctc

SEQ ID NO: 190223 - DNA, 159 bp, Homo sapiens
taagatgaggggaagtaatggtttgaaaacaagtgtgggtagcaaagaggatctcaaactcctcttgattctgagagggtcaaattttagtcaagagcgaatgagggttggatgaagaaatgagcaaaatgtaggaatggaaccctggaaaacattgac

SEQ ID NO: 190224 - DNA, 171 bp, Homo sapiens
tattacaatagtattacatgattattatacttctgatatgtgaaaggtagaggaagagaatatgttgctgaaatgcagtaactaagcataggtctgcagagagggcactgctacagaaaaggaatagttataccttccttgattgtgagctattcctttaatttctaaaaa

SEQ ID NO: 190225 - DNA, 249 bp, Homo sapiens
aataggtatgcgtaggtaaaatgtttcattaaccccaggtgttggtattacagatgtgagccaccacttttatcatgaaagggcgttacattttatcaaagccttttcctgcatgtattgatatgattatgtgattttaattctttattttgttaatgtatattaattgattttgtatgtcaaaccatctttccatcccaaggataattcctgcttggttatgttgtatgatccttttaatgtgcagtt

SEQ ID NO: 190226 - DNA, 225 bp, Homo sapiens
tcttagttacaacagcaaaggttaattacctagttacctagttcctctgtaaattatttaaagctcagaatattctccaacattacaaagacttaaaaagcaaaggagaattttgagaatgtactccatgcacagatgctattgttgcgccccctgagattttgcttcagtacttgagatgtgtatcagaatgttgaagggcagcaatgatgtgtaacagtttta

SEQ ID NO: 190227 - DNA, 612 bp, Homo sapiens
cttggccatttagatgctgctgctgatgccacctcctccatgcatttcatttgcagtgccagcagggagggagatttgtggggtgagactgagaggctaagggaggagagatgggaggagagagcaggccaaggccacactgtagcacagttcacaccaagaacagcccatccagccctgccccacgttggtctcatgcccccactggagactcatcctgtgcccccacacacccacacagaagtctcatcctgccttccccacaccctccgcccctgcctgcaggcagcaagatcaaagccaccagggatgcagccactgttcttctatgtcttggaacaatagaacccctaagtgtggaaagcagcagaaccagagagctactgggctggcccaccctgggcccagttggagcctaggtttgggctccagtccaggctcagcatcacctctgtccagtcacagagagcgtccataccagtgtccctgcaagctctcttagcaaggcctgctccattttcattggcataccttctgctctgggacttctcaagtcatactgaagacagagaagccaaccctagcatgttcaggatcagtttaacccatttt

SEQ ID NO: 190228 - DNA, 701 bp, Homo sapiens
agcggcgtagcggccgccttttgcatacgggaccctctgccgcctctcctctgctgccctctcctctgccacgtgggatcctctgccatctgctccgcgctttgctttcggggctgcctctgtggctgtctccctcacaccggggctcccgccaaccccatgaggcagcccctgtgtaaggctcctggtcagccaagaggaccccagcgccctggaggctgcacccccatccctcctgctgtggggcccttggtgctccatgcccgagtctctcacaccgcggctcacccgctgccccaaggggctccggcagcatgtccagctcctcccggggcctgtgacagaacagttccagcagggggctctcacgtccccacctgctcccagagaggtgcttctgtgcccagacatggaacagctccacagaaaatgagggcactggccgagcaggcccagactccagaagggaaaccactgagggtggaggcctgacccacgtcacctcggagtctgtcctcgcggagacggtgatgggcctttccctctctgtacagatgaggacacacaaggagctgacttcatgcctggacattaagcccaggaattcccagcctagagctggctctttaggttgcggggtctggtcccagtccagaaacatctcccaagccacagctcaggacacagcagggtgggggtcg

SEQ ID NO: 190229 - DNA, 181 bp, Homo sapiens
tataaactgcttctcactactcaacacaaattctatcctgactactaaggattaactaacttcatcgccattaaccatttccttcaagctccctttatcccattgttcaaacatttattgagcaccttcttgaagtcaaactctacaaggcattgacttcatggcatcctcaaaggactct

SEQ ID NO: 190230 - DNA, 346 bp, Homo sapiens
tccagctgccttggggaaattactcctttgaatgtggcacagcagggcctacacaccacgagagggacatggtgaagtctggtggatgataagatgctgctgatgaagaatacttcactctttatctctcaaagcactagtgagaacttctgagaccaaaaaacctcctactctttgaaagccaccccaattgttttctgaatcagacagagacgagagtggaaaatgggatcccaaagggaaagatcctaacccccagtatattttcaaaaggcaacgcatttttactaaagtctttccattctcaggaaaacagtttctcaattcaaaaaaaccgtttaagtct

SEQ ID NO: 190231 - DNA, 154 bp, Homo sapiens
ttatgtcttgcccttgagaaatgatgggtgggaagaatatcagtaatgcccttagtgaactgggaagacagcaggagtccctagcaggaaacagaaggaaacccagcaaaatactcaaacccatggggaggtgttgccctttggggcagacttt

SEQ ID NO: 190232 - DNA, 265 bp, Homo sapiens
atgctctgctttttccatgaaaactttttgcattaaaacaaaattttaaagcaattttacagttaaaagaatccctgcaggctgggcgtggtggctcaaacctgtaatcctaggactttgggaggccgaggtgggcggatcacaaggtcaagagatggagaccatcttggccaacatggtgaaaccccatctctactaaaaatacaaaaattagccaggcgtggtggcacatgcctgtagtcccagctactggggaggctgaggc

SEQ ID NO: 190233 - DNA, 625 bp, Homo sapiens
gccatgatcacgtcactgcactccagcatgggcaacggagcaggactctatcccccaccaccctcaaaaaagaaggatgtcaaattagtttaaaattcctacatcaagacaaattgcaagtctggtgtacacatgtgcacgaaggtaaggggaggatgcacacatcagcttactgcaagtatgaagagtttgttaatgacagcaatgacacctagaaaaagatattaaaatgagaaaagaataagaagagactgtccaaaaagacagaactcaaagtataaatcagagtataagtagagagcccactaaggtactgatgttaccaaggtgcatttccagagtttaacaaagcatgaaggttccaacaccttacctggtggactggggaggaggcgaagtatcttacagaaaatgaggaaaggcttgtgagagcagacctgaactccattctacgtctgaccactcagcccaacatgatggcagcagcaacaataattactgagaaactgccaaagtttgagcagagaaaggcagtaggcaaaggagctgtagactgaaaaacaagtgatggagcaatgatcttcaggaagtagaccgagcaaaatctaaaacatgaatagagaac

SEQ ID NO: 190234 - DNA, 144 bp, Homo sapiens
aacagacacaggaatagaaaagaaaactaaattgtattttcagtctgcacctaagctcttgtggtcacctcttcacctggattcctccagcttcctcattttgtctgaacacacagcaaacctaaattttagcccttacagcct

SEQ ID NO: 190235 - DNA, 510 bp, Homo sapiens
gatggaggcccttcacatttctgggcctcagccacagctgcagcaggtgcccagaggtcagaaccagagatcccagacctcccggaccagctcgtgccccaaacgaaatgccatctcgagctcctgcagctctacgggagacctcccgggacgaaagcggaagaggcgccagcctcatcccactgccagctgaccctcagttcctcaaacacagtgagtgaggacggacctgaggctgtctcttcgggtcacacccagtgtgaaaagacggcagatacagcaccagggcagacactcggccccaggggtggctcccccagatcccagtcctctaggccccgtagacacaagtttcccctgctgccacgcaggcgaggggagcctttgatgctgccacctcccttagagctggggtactgggtcactgctgaagacctggaccgggagaaggaggcggcattccagcgcatcaacagtgcactgcaggttgaggacaaggccatctcggac

SEQ ID NO: 190236 - DNA, 981 bp, Homo sapiens
caaataggaacagctccggtctacagctcccagcatgagcgacgcagaagacgggtgatttctgcatttccatctgagcttcccactgggcggttaatagaaacattccaaagcaatgagcaccagtcagaagtaaagctcttaaaacaggacaagaagaaatgggtgggaagctggaatgagaacattcatcagcagctcaaagcacagacttctaagggaatctttcctcaccctctgcctctttggaatattactgcttttggggaaactacatgcaacagacatcattccaggcacaggagctaaaactattaagaacatacacctcttgctctcaagttgtgtgcaagctagcaggaagggctgagagaaaaacaggcaatttcagtttatatgctcagcgtcgttgaccatctaactcaccttggcagtcgagacagaacacgagctgagacttgacgttcacgcatcatccaggcgacctggtggctattcctttgagaatccagcatgaccaacacagttcaagcacagaatcaaacagaaatgaaacacattggagcttcgcctggcaacggacacgtgcgacaaagacgatgctatacatgtaacattatgaactaatattacgattcatggatcagccatttccgcattgcaaggccagactcggcacgccatgaatgagacgcgagaccacacaataaagagggacacagtgctcacaggggtacagaagctcacaacaaagacactgactaacacggggacaaaaaaaacaaccaatggccacagaaagcgaccgaagaataaccagacgaaaaataaaacaaagaaccaagaggcacacaaaacaacagaagacgccgagacaccgggacaccacggagagagaacaaccgaagaagaaccgccacgagcacaaccaaccacaagagaacaagacacataagagaacagcaaccaacacaagaaaaa

SEQ ID NO: 190237 - DNA, 489 bp, Homo sapiens
gcgaattcactagtgattcctgagacacagaggtgcacatatgtagcagtaatggatactaaatgatacactcggaggaaacagaaaagacttctgaatagagactggagatacttccttggaccattgatgaatgggcaatgatgcatttttgtcttccattcagaaggctaatatattgctctctatgttctatggataaaggcagtatatgctcaaggatgaatcacataatatgcataataaatccagcaagcattacccttttacttatgtgactgcaagtaggaatacatttcccccactctaaccatgtaagatttctttcccttctcccattttgtaagcaaaagtaagttcctgaaaggttaaatggacctcaggatgggaaaaatccccagagctatctttctgcacagacttcattttttctcccaagtctgactgtcaactgcgatatctgatatgaggctctggtgctgatgtttc

SEQ ID NO: 190238 - DNA, 432 bp, Homo sapiens
tgacaggtggtttctgatcataggaattacccatgctgtgttcaaaaggcttgtgacattactcatcctccctgcctttagtcttatctagagccattcactgaaggcattccttcagcaaaatctaacaagaacatacaccatatcagtatcatattagctatagcttagccccatttctgccccactgtgtgtagctcagagtcaccttgttactctagagccaaattcatcactgtttaggtaccacattagaaaagagtcaagtgttggcaagggaattccaatcaagccacaagcctggaaaaggagctctctattctgagctctctgagttctctattctgtttaattggtctatgcgtctgtcgttgtaccagtaccatgctgttttggttactgtagctttgtagtatagtttgaagtcaggta

SEQ ID NO: 190239 - DNA, 484 bp, Homo sapiens
gttattttttgaattttctataatgaacatgctgagcagttcctcattcaccaagagtaatacatagtttatttccacattccacatatggaattttccaacaaggcatctttgtaaaatgttagaatcaatattaaatgaagcaatgaatactcagtgaaatgtgttaaataaaagctgagttttaaaaatcaaaacaatcttgtcttctgcttataatgaacacattttaacagagaaagggtataaagaaaagtaacattctgtaacataagagaaactacccaattaatgcagtttgtagtttcttagaacacagtctcctaatattctgatttttctggagcagaaaataaacattaggaaggacttactttgaagaaaatattatctgccattgacagctagcaatttatttagagaaataatattttagaagactgtaacaggctaggcacagtggctgtcacatataatcccagtg

SEQ ID NO: 190240 - DNA, 207 bp, Homo sapiens
cttccttcccttgcttgatcaaactccccaagacctgttcctcccctagtcttcctactacagtagaagataccctaattcacgcaagtccctaagctgtaaacctagacaccaccctgcctcctcttttcatttcatttcattcctttttttttttaattcttgccttcctggaatatgagacctgcctcctcttttcatccacct

SEQ ID NO: 190241 - DNA, 408 bp, Homo sapiens
ggaagttactgttagaaagttgccgtcagcgggcgttgttccagctttccatggaaattctgggagctgctcctagtttgcggcggagccttccttccttccctgcattgggcgctggaccttcacggccaggaggctccaaggcccaggcttttcgccaacagcaacaggctactggctgggcccaggcaagggggccttggcaggaaaagttccttgctgtacctccactgcactcagaggccagtgaggggggtaccatacaggactccttcctccctggtgaagtgcccttgcagctccctagtgtccacgccatggatatttcctccacagaagtacaatgctgattatgatctgtcagctcggcaaggggcagacaccctggccttcatgtctctcctggag

SEQ ID NO: 190242 - DNA, 208 bp, Homo sapiens
aaactaggctttgaaaactgaagagactactgagagtcagagatgaatcaagttctggggagaagaaagacatctaaggtgagggaaggccctaggaggttaagacatggaaaaatacaataaatataattacatgagataatttctatatgagtaaaacattgacaacccaatttatccatatccaaggtggcaggcagtttgattt

SEQ ID NO: 190243 - DNA, 120 bp, Homo sapiens
tagggagaggtgcatcaccaagaatatcggagacttctccttagcaggctcatcgtttccaaagagatggagatgcagtcccgagatagcgctccggcttgctggggacactggctccag

SEQ ID NO: 190244 - DNA, 417 bp, Homo sapiens
tccactagtgtaggctcagctctcagagcagcctcagtcactgggaactttttttttttcacggatgctgctttctcagcttctagaattgcctccttagtcctgagttagaatgtcagagacaggttttatgctactttgctggcaaggatcaccatcgcacacgtcatgtagtttatcttgaaattttatgatttgggaatcagattccttcaaataagtttgtgccatctgttttgttgagagagctcgtggctaggatcgcagacgcgaacattgtttcttcctgaattgtgcccttgagttggttggtgtgtatctccagagtccattgtttcttttgcagaatgaaggaattgctctgcagagatctcaaagataattccaacccagcacaccaggactcaaacttaagaa

SEQ ID NO: 190245 - DNA, 411 bp, Homo sapiens
attcaggaactacctcacaaacccttacaagttccacgtttcctctgagctactaagatggaaaggcagcgaagtaccattcactctccaagaaggctctggaattctgatgccaccactgcatttgctgccccagtatatacattgtgagcgactgccatgggtcagggccctgggacctgtggggagtggaacatgagagacagttctgctgagcacttacatctggcttgcagcaaatgagcagataagtaaggagaatttccgggagtaacaatttctatgcaaaacatacactggagagggtgcctcaggagagctcctgcagacatggaggctgggcctctgtggggagacctcaaccacacagagaactgactgactcgaagctccatcatggggctatcacgg

SEQ ID NO: 190246 - DNA, 245 bp, Homo sapiens
agttgcatatgcatagggttatatttcacataatacctaaaacaaagacccaaaaagtggggacggttgcactagagaatgcatctgcagaaaacctaagtaattttatgagcagcactcaagtttactgcttcttttatgattcttaatcccgcctactaaattcacatgtctttacaaatcccaaatctgtaacaaggccaccaaatgctcccaaattagcaaaatacagaatagccttttaa

SEQ ID NO: 190247 - DNA, 592 bp, Homo sapiens
aatgccagcactcagctagcctcaagggaaaatgaattcttcttttccctctacccacactcccgagtcagctattcttctgcctttagacaacactatccacaccaacatccactctcctgtgggtgtaagaaaagccacctgactggcctgcctgcctttttttcctatgataatccaccctccacaggcagccaatgagcttccaccactctggaccttatgcctgatctgggaatgaccaaagttctcttcagcctaaagccttttggatgtgtagaaattgaactggaggggcagagctatgcctgaaaccacagatagtaccgaaccctatagagactgtgatacacagtaagagattaacagtaactcatacgaacatagagcaattataataatatactgtaataaaagatatgtgaatatggtctctcaaactctctactggtgttgtatacacccttattggcgacaatgtgagatggtacactgcgtgtgtagaaactgaacgttcaatttctacacgaaacagaattcaccagcgtaggatagtacacccactaatagggacgtagctggcttacacgtc

SEQ ID NO: 190248 - DNA, 355 bp, Homo sapiens
gaactggagaaatgttttatattttaaaagatttaagacataattcaaccaaaggcaatgtttgaatcctgattggatccttctgttaacaaactgcaagaccatttctgagacaatcagggaaattttaatcttacctggatatttgataatatttattgttaagtttttaggcatagcatctgtgttgtaaagtgacaattgtggccccaggaagagtacctaaaagcagcctctagttgctgagagaaattcctagctgatagccaggaaggaaatgggacctcagttccacaaccacaagggactgaattgtgctaactgtaccactgaacttggaagcagatttttttct

SEQ ID NO: 190249 - DNA, 373 bp, Homo sapiens
accaccacctgccccgccacttcccaacagccaatggctgactcatgaacacggaagtccagtctgcttcaaatcatgataagtctgctgtactacttatgctccagagtcccctattgatcaggccaaggctagacttcattagaggatatcctcgtttggtaatttgcactttcctatgtcacttccctttttctgatataggtttggcctgaagaacacttcctcaataagtcccttgtcctcagtttctgacttaggctctgcttctggataacccaacataaaatgaagaaaatttgagttcctggccatacttctggttatcacacctaatgatttctgatcttcacaatgactcttcgaggtaggg

SEQ ID NO: 190250 - DNA, 395 bp, Homo sapiens
agttctttcatctccggctgaggagaaatcagaagcaggcaagcgtgatcactgtccattagcagcagcatttgctggcagcaagagggggaaggggtcctctgttctcctgagctgctgcagccgtgggcttaaaggacgtgcccacataacttgattgatcatctcagtcacaattttaagattttagcctggaagttcaatgtaggtgccatcatatgaaagatttaacagatgttaatatccataacgttcatgttcattatatgtatttgactcttaactaggttttctaattttcctttttaacgtattctagatattaatctcttggttttttttaacttttaagtttaggggtagaagtgcaagtttgttacataggtaaacttgtg

SEQ ID NO: 190251 - DNA, 476 bp, Homo sapiens
ctgaaaaataatcacccttaatcccacccagacacaactactacttgcatattcgtgtgtttcctttcaggctcatgcccaggtttgttttatgatgtcatcacatacttacaggtttcatttcatgctcaggcctctacacttaacattattccatgaatctttctcgtataattacatagacttcataattagccattaatacccgagaagaacccacagtggggatatactttaatttactcaagcagttctccctttgttgggtatcttactctggtaaataacactgcgttgaacatctccatgctcacagcttggttgggttccttgggagagattcccaaaagtagaattctaggtaaaaagacacgccctcattcatacacgctgctagattgctttgtggatttgatgcaagtgtcgtcaccaagttgtcattctccgaagtcccagcagttgttcatgggcccaca

SEQ ID NO: 190252 - DNA, 217 bp, Homo sapiens
aggcaatctttttaaatgtttagatcctgttatccttgcaggaattccattacatgtgccagatgttgcttgctgtgtctaaacatgtgtatttgagtagctggtattttcaaattgaaggtccttaaaaatgtttatgctttataatcccataatgccactcttgggaattttatcctaacaaaactatttaatagaagaaaataactatatgcac

SEQ ID NO: 190253 - DNA, 391 bp, Homo sapiens
gtcagtgtcttctccccttgatcatgggtgggcttgtgaccactccagtccacagaagcaatgctgtgatttccaagacttaggtcataaaaaagatacagcttccacctgctttctcaggtagctcccccttgggacctggccgccatgttgtgaggaagcccaggtctcatgaggaggccttggtgggtgtcccagcagagcctgggtggaggtcccagcagatagatggctagcaccagccatgccaaagagcgagtgagggagagagagagagagagaaaaagcaagagaatgagcttcaagggctgcagccctagcctttgagcctccccagatgctcctgaggacagcagagaccagctattcttgccaagctctgcccaaaatg

SEQ ID NO: 190254 - DNA, 191 bp, Homo sapiens
aatacatttagagctggactaggtggtgttgctcgcttcatttgtgttctctgagaacagagctggagatgagaatttgaaggcaagtagcttcgggatgttgtcaagaagcaggaatgagggaggagagataaggaagcaatgccagtgtaagggtgctgtgatgggcaacgggaacgtcatttgactga

SEQ ID NO: 190255 - DNA, 378 bp, Homo sapiens
taaaattttgatccctccatattacacatatgaagtagtataaggctagattatgctttggtagcaaataatcccatctaactagcttatgcctaaaacggtgtatgtattgctcacatcacagtctgacataggtcaggtggctccttaaagaattaagtggaaactcaggggttcagagtcctcccagtctgtggcatacccacattaaaaatgtggcctttgttacagcagttgaaagagaagagtgtgagtgattatgcaaggagttttctggtcaggcctgaaaatgttatatatcataccaataggatctgcccataccccattggccagatcatagtcatatgaccctaacctaactgcaaaggaggtaag

SEQ ID NO: 190256 - DNA, 507 bp, Homo sapiens
tctgcatgcctggggaggcctcaggaaacttacaatcatggtggaaggcacctcttcacagggcagcaggagagacaatgagagccagcaggggaaatgccagacacttataaaaccatcagatctcgtgagaactcactatcatgagaacagcatggggaaaccaccccatgattcaattacttcccactgggtccctcccacaacacatggggattatggggattataatccaagatgagatttgggtggggacacagccaaaccatagtacactcaatggaatgtcatgctgccattctatgatggttgtaaaaaacatgttgcaaactcaaaaatgcctatgtattttctcaaaaaacgtacctgtcacgcaccatttcttaagaagctgctggacggtatgtttctggcagaaagaatgacaatagaaaaggccgtcaggactccagacattggagttatgagttacaactttaaaataatgaaagctccctatgttcaaag

SEQ ID NO: 190257 - DNA, 388 bp, Homo sapiens
ggtgaggtgggcgcatcctgtgcatatgattttctcaggtgatgggaatatggttggcttttgactaatgggatatattttctctttgaatgatttggcaagatatcagatgagagaagttgaatgaatgttagaagaacatagaaaaaataggtatacacgttgggtttctgaagaaatgatgtctttggagaaacaaaacttttattgatttctggaaacatttagggccaattttttatgtaagtaatttgaatttatgatgatatctctgaccactttttgatattttttctggttcaggtgagtggtgtcattgagcaaacacaaagtcgggctcatccaaggatgagattttgccagagaaaggacgcgccatcgtgcgctt

SEQ ID NO: 190258 - DNA, 507 bp, Homo sapiens
aagcctcgacatttttctcaatacgtactttataatcatcagaataaagatctgccagcacacacattggctgaatttccctccccacctaaagaatcatcaccaaggttcttcagttataaaatttaacaggtcaaagagcttaaaatttttactctttctgagacaacagttaaatatagttctagtcacagagtgtcctgagcagtgccagcctggctctcttggcacacaatcttctaaaataactgcatactgctgatgcaggaatgaatcacagaagcaatttctctgcacacacaagaggagtcaaattcacaattagcttcaaaagctggattgctaatttaagctagtgttaagagctagtcttctcagaagacatgccttgctattttatgcaaaccatttttcactaggcagaaattaaccttggaagccagacacaccataccattcatactctttattttttgtagtcattcacccactggcactaggatagat

SEQ ID NO: 190259 - DNA, 275 bp, Homo sapiens
caggaagcgttgttaatctcctgggtcgcctgcgtcacccgcccctccaaaagccctttctacagaagctgaagagcagggctcaggctaaatcctcaggtgctcagattgggtcagatccagatcgttcttcatgtctctcccagctcggagactggagagtaagcaggcagaatggggaaggggttggcttggcaatgcccaaagggcaaaagttccagggtctgagtgggtgtgacctccagcataaataagccaatggcaaggctcaatgg

SEQ ID NO: 190260 - DNA, 415 bp, Homo sapiens
cttttgtctgtaaagcaggaataacaactgtaagctcatttgttcaacaatatttacttagtacctaccacactccacaaattgcactatgtggggatacaggctaatagataaggtcccttctctcatagggtatatatttcagaggacagagactataaacaagtgaacaaataaacaagatgatcacagactatagtaactgttataaaggaaataaaggatgacataagagaaaaactaacctggggcaaagcagtagggtggctgcaattttaggtaaggggtcagggaaggtttctgaaaaaagaacctttaagcagagacctaacgaatgagaagccaggagctcaagcacttgagcgcagaattttcaaggcacaaagaaaagtaaagagtcttctaacttcatagg

SEQ ID NO: 190261 - DNA, 561 bp, Homo sapiens
  misc_feature (550)..(550): n is a, c, g, or t
cacagtgaagcccctcagaaccctccccctcggtatttttaaactccattacctcactttccaaccataactgttttatctctctcaagctggcacatagactcatttttccttttgctcttaaatagatctgtagttcgttcttgaactttctgctttcaatacctgctgaccaacttttcttatagtctttttttgctcggcccttatcctccacccatcatttaaatgctaaggttctgagaccttttctttttctttttctttttttttttttaaatagggcacaaggtattttacaggtcctcatcattctgctgggaatcctgtgggtgtaactttggtgtgtgataaattctgctccagagacttatcctctaagctctccaatgtgtcttttaagctggagctaatgtgtaggagggccatttttaaagcaaatcaaaaacattaaagggtttaacttctgtaaaccgggtgtaaatctagaggacttaaaagatttttacaatcctctagcttaccgactaaacgcttccctttatacggnatattcatatg

SEQ ID NO: 190262 - DNA, 215 bp, Homo sapiens
caacattcagtctgtcagccctcccaggtaaagccattcaaatattttaaatacccaggtactttggccgcttgcacagcttccaggactctccagcatgatctggctcttaccaagcactctagcctccccttgtgccactgtctccctctggctctgatctccaaccacagtggccatccctcagctccttcaagcccccaggctccctcccc

SEQ ID NO: 190263 - DNA, 233 bp, Homo sapiens
agacaatcgtgtcatctgcagacaggagtaattttatttctccctttgtagtgcgtgtaactttgatctccttttcttgccaaatggcagcagctgggacttccgacaagtacaagtggagaaaagacactcctgccctgttcctgattttaggaggatggttaaaaatgatattggcttggccaggcagggtggctcatacctgtaatcccagcactttgggaggtcacttg

SEQ ID NO: 190264 - DNA, 180 bp, Homo sapiens
ttgcaaagtatctacacaacgcctcacacatgggtctaatgtgtcactcagaggtgactgtgcttctctggaaatgcggttttctaccatggcatcatgtcttctccatgtcagtcccctggcatggcagcagtgggactggagttgctccccagtgactggggcagctgagaagtcaca

SEQ ID NO: 190265 - DNA, 180 bp, Homo sapiens
tgacacaggagactttaaaaatgtgacaaaggggatgacatcgatcaggataatacaatgaccccgtggcccaaatttgggatgagccttctcttttgatgtatctcacagcccctcctctctcctggacacattctacccatgcttcagctgccgccccacctactccaggaggccctc

SEQ ID NO: 190266 - DNA, 181 bp, Homo sapiens
gaacaacagcaaagacaaaccaaactttgtagctgtatttttggggccacctatatcctcttcttgggactgatcttcacttccactgaggacttggaaatgttcgcttgggtctaggtgtgtctctgtgtgcttctttcctcatgctgcaagacctaccaggttttggaaatctacctca

SEQ ID NO: 190267 - DNA, 125 bp, Homo sapiens
gaacattctccaagatagactataagataggccacaaaacaagtctcgataaatttaagaaaattgagctgggggcggttgtgtaatcccagccactttgggattacattcctgtaatcccagca

SEQ ID NO: 190268 - DNA, 201 bp, Homo sapiens
tgctagcagaatatatctttctccacccctttacttttaatgtatctgtgtatttatatttaaagcatatttattataggcaacatatagttggatttaatttttagatccactctgacaatttctattttgtaatgcatgtgtttagacctccacatttacagttattatttttatagagttggtttatctaccatgtct

SEQ ID NO: 190269 - DNA, 537 bp, Homo sapiens
agaaaacactgatgcttatcataacactttcttttaccacttttgcatcactgttgctgactgattattgtctactatcctttctgcaaggaacaggagtatagaagaaaaaaaatcaacactattgtctccacatttcttactagagtccaaaagactgaacaataaacaaagggatctaaagaaacacctaaagccaacatactgacaatcagagtatcgcctgcttgacatcagtagcagttgcgcaaaagaatagtgcaaaaccttaggcttaatggagcttacagactagggggactggcagtgtccaaacaatattcccagctttaagtggcaattgttaaacttacacttgataagtgtactgtattctggaagcctctgtcacagtattagccattgttcgctaatctcactgtgtgtttactctgctgtcccatccttcaaggcattagagactctacctcagttgggtttagagtagtggttctcaattgagggaaattttgcacccaggtgacatttggtaatatc

SEQ ID NO: 190270 - DNA, 512 bp, Homo sapiens
ataaatctgaccagacaaccgagagtatgtcaactccagaagcctgtccaactacagaggcccgagtttgagctctagtttgccatttactggttatgcaatctcagtaaattattcaaattcatggagcctcaatttccttgtgtaaaagggaaatctcccaggatcatcatgaaaattataataattaacattcatgaaactgccacacatggtgccagatgcctaataatcaatcaatcaatatttaccaaaatatgcaatacagacagctaacagcagtgtaagaggtaacgtagagacagatccttctaagaaattaagacccctacctgactgcattaggagtcatcaattgaatctaccgacaagaattgaacacaatttaatacaaagtaatgcataaaacaaaagtacaggcattcaccttcattaggcctgggctgagtctgagaggaggtaagggggtttgttagaagggggtgtggtgagactggtctgtggggcatctc

SEQ ID NO: 190271 - DNA, 200 bp, Homo sapiens
tagctcttcctctgttccctacctcagtttcatcaccttcatggtgacacaatctttgttcctacattcaagcatttaaatccagccaattagatctctgcagcatttcacctctcattttcttctctgccactgttctctttaagaactcatctttctcttttattattttagtgcccttctatctgaagtgtcaacgt

SEQ ID NO: 190272 - DNA, 425 bp, Homo sapiens
gctgacgctgcagatgcatgagggacctgtgtgaagcttcgtaagatccttggacagagacaaccaaagaatgtcttcagatatgagcccagaatagagaggcggacactgcagattgcaggatctgatttgcagtcttgctgcctctcacatggtgcctctgtttggcttgcttcagcatgagcagcagtaggcgcttatttgtttaatgatgcttagtgccttttttttccaggcacaccactgagaatggcaggctcagtgatgagatgtaattccattttgtgccatgtgctgtcctgggcgctttctgtgaactgtttgattttgtcttcacagccaccctgcaaggtggataccgttgcccccactttaaagatgggagaaggaaagcccgggcagggatgctcattactcaaagtcat

SEQ ID NO: 190273 - DNA, 535 bp, Homo sapiens
agagctatctaatatgactcaacttaaagaacttgatatctcaaataatgcaatcagagagattccaagaaatataggagaattgagaaatttggttagtttacatgcatacaataatcaaataagttatcttccaccatctttgctatctttaaatgatctgcagcaactaaacctgagtggaaataatctgacagctctacctagtgctatctacaatattttttcactgaaggagataaattttgatgacaaccctttgctgagacctccagtggaaatctgtaaaggaaaacagttgtatactattgcacgctatctacagagggcagatgaaagagatgcactgtttcattaagtgagagagcccaccaagcacttgttatatggaaaacacaaagtaacaagttatcactaactgctgctgctttaagagatcaactaattcgagcactaactatgataggagcatatgaaattatggacaaaataacagctttaaatctttttacgcgtgcaattaaattctaaccag

SEQ ID NO: 190274 - DNA, 252 bp, Homo sapiens
aatcgctagtgcaatgttacctatcagcaaaggaatacctggagactctgtgggtttgcctgattgtctttctgatgctccttggctcagctttctcagtggccatccaaatgccttccattcctcaccagacacacccgtcctggacaagcaatctcccagcctcaggagatggactttgccatttccaaacagcttgccagaggagtcgatgttgaagattacattgcaaaagatggagtcatttggttg

SEQ ID NO: 190275 - DNA, 255 bp, Homo sapiens
agtgtaaactgaagcttgggctgtcaacaagttgtcttaaaactgttaccttggtatgcaacaagacctaaacaaaaaagaaaaaaaattgttgtcacacaaggttaaacgtgaagaaatatatactttgttcttccatttcctggtacccaaattcctaaaactctaggaataccagtgtcttttttatgctaatgagatgaatgatgtctgatggcttctggatagcctcaggaagtggtttgatttccaggg

SEQ ID NO: 190276 - DNA, 277 bp, Homo sapiens
cactcaataggtattttttacttccattgtacagaattggagatagacaaaaaagctaagcaacttaaggtcatataactggtaagcagtaaaattgagatttaaatccaaagtacttgttcaggcccactatagcttaagaggtggaaagaaaaggtgaatataattttttcttctttttttttttttttttgagatggagtctctgtcgcccaggctggagggcagtggtgccacttcagctcactgtaacctccgcctcccaggttcaagcgat

SEQ ID NO: 190277 - DNA, 674 bp, Homo sapiens
gtggcagtgtagccctcaagtgaaatgttactcctaaaggcacctgtgagccagagccctgctctggtggctgtgggagacaggggatgatttttctaacctgcctccacccttcccggtgccatgggaggcagtcaccaagttctggggtctccagctgcagtgggtggctgctgattgcttctctctgtccagaacaatgagaacaagagcgtactacagttggagcagcaagtaaaggagctgcaggagaagctaggcaaggtgaaggagacggtaacctccaccccatccaagaaggtctgggaggtgggcaccagcctctggggaggggaggtgccaggccagaggcagctccagcccgggggcaggtgaccccagcaccctccagggcagtcctgtggctgtttcttgcttcctgccctctgattttagaggtgggtagccctgggctcctcccaggtctggacatcatcattccagctagagacatggagcacccccaatcacaggggaagagacagagtggtataacagtcttcttatgccagacgcggtggcttacgcctatagtgccaacactttgggaggctgaggcaggagaatcacttgaggtttggagtttgagatcagcctggccaacatggtaaaacctcatctctactaaaattaca

SEQ ID NO: 190278 - DNA, 236 bp, Homo sapiens
tgtgtgtgtgtgtagatactatataaaaacaggtactatcagtagtctcacttaacataggacagaaaatatctctgtcacgataatacttagcaattgcgaagaggaactagaattcagatccaggcagtctagctctgtaagtcccatttttaacacctccagcatctactgcctgaactcaacttgctttggtgtggatgatgcaggttcgtggcctgcacaagctgatcact

SEQ ID NO: 190279 - DNA, 206 bp, Homo sapiens
tttctaaatgaatgagtgaaggcagcctgggcacatagcgtgagacctcagctctacaaaataaaagtaggccagagggccaggcactttgcctcatgcctgtaatcccagcacattgggaggccaaggagggagggtcacttcaggtcaggtgtttgagagcagcctggctatcatggtgaaacccatctctaccaaaaaataac

SEQ ID NO: 190280 - DNA, 420 bp, Homo sapiens
accagtattgggaatggaagcatagtaaaaaatcttagaatatttttagaaatactgatacagtaacctgtagacagcagtgaataaaataagtaaaactggttccaataaataccacttctatgaaacgggattacgtaagaatttaatatgtgaaatctccaagtagaaattaatcattatcaaaaaatattgctaatttacaatctgataaatttattagccttcccacagtaaactaagaccctcaatattaaaataggaatcattattattagtagtagtattttttgagacaaggtctcaaactctgccacccatcctggagtgcactggtatgatcatagctcactgcagccttggactcctgaattcaagtgatcctcccatgtcagcctcctgagtaactgggactacaga

SEQ ID NO: 190281 - DNA, 596 bp, Homo sapiens
cttcctcctggattagagataatcaaacttattatcaacctaatacatacaatttttcttttgaaaacttcaagtataattctaggtcaaacatctttttttgctttctttttttatgagctggaggaagaagctgctttctttcttgacttgcaatcagtctcagaaatgttgaatcattgcctaggtacatgaactcaattctgagcagctttaatttacagcagccaacatttctataacataagctctctaaaaggggcccacagaagaaccagaaatctgtggttgtgtagaaagtttaatgggaatggaaaatctccacgtttacacgtctattcttgcatattaatatcattacatttaaactgtggtttgatttcaaacattgaattaattaagggaacttccaggtcgagttataatgccaaatcaaatgccaacagctccctctactggctactaggggaaaacatttgatctctatcaatcagaaatttgtttacttatttaaaaaacatcttcaccaaattaaattttgattaaaaaatggctaagctttttggtaaacctgaaagatgttcacttataatgat

SEQ ID NO: 190282 - DNA, 203 bp, Homo sapiens
attttattacttgtgcttcctttttcccttgggaggtggatttgggggagtgcagggaatatgtcttattttgtattttccatagttcctaactaagcacatcataaatattcattgaatggaatgtcagttttctataatggtaaaacagtttgctcctatttccaatcctatggtgatttaattaaaacataatagctttg

SEQ ID NO: 190283 - DNA, 624 bp, Homo sapiens
gtatatattcatagttaagtgtcagtgtgagattaatttcctgagcttaattacttggtgtttgatgtactgcagggaaggagttggagcacgaagttctcaggaaagaaatcgtacacatcaagttttacacccctttcactttgttactttccttttgtgtttgctatcaccttgatactatccataacatttttaagcatatgttttaagtcctgaaaaggtttggtcgtacatacaagatttctcttaaaacatttgtgtgaggttatcttgtttatttatttatttattttattccttctagaatatccgtcatttagtaattcatcttaatttcctagcaagtccttgttagatatttgcttggtgaatgaatgacaccaactgtagaacagacacagtgtttacaaatgaggataccaaaatgaacaaaatatggtccttttgtagtttaatgggtatatgtagagttgtaaggaaactgaccaagttgttgtaataaagggcatagaaagttctttgaaaacccagacgcaaatagttcatttactttgcggagactgggaagatttcactaagatgatagcgtttgagcaggacctgaaggtgagtagatacttg

SEQ ID NO: 190284 - DNA, 481 bp, Homo sapiens
aagtgatccacccaccttggcctcccaaagtggtgggattagaggtgtgagccactgtgcccagctgcagattttttatagtattttggagtcaaaggccaaccatgattctggaggggcaccaggtgggcagtattctgagtatccattcctttggtagcactttctggacacatgcgtgagccaggtactgtgctgatgatcacaagacaaatgttccaagtcacagtttcaggtggaagacaggcccacatttactatatactatgcagtgtaagtactttagtcagtagtcaataaagagctttagtcagtaaggagactgagaaagcagagaagggatcaagaaattctaccttgagaagctgaggtttgacatcacaatgggccccaggacagcaaaggcagtgggaaatactgtcaaagatgaagttttgtctgcattgttggtgcttttgaggaaattgtcactactctgtag

SEQ ID NO: 190285 - DNA, 790 bp, Homo sapiens
ttttttttatttttgagacggagtcttgctctgttgcccaggctggagtgcagtggtgtagtctcagctcactgcaacctccacttcccgggttcaagcaattgtcctgcctcagcttcccaagtaactgggactacaggtgtgcaccaccacacctggctaatttttgtatttttagtagagacagggtttcaccatgctggccaggattcctaacatgtaacctttatcccatagcatggacccatcaaaaggcaactcttcaaatgcctttaatgatgacacaactactcaccatagatgtgtaatatactggcccctttcctcacttccacacattctcagtactagacaatggccaaacttttctgccaaacttcactttatgacccttctccggcaacagtgtagaaagcagacaagtgtgcctttaaagtattgataacattgacaacataactgggtgtgatggcgtgtgcctgtaatcccagcaacctgggagtcttaggccagggttcacttaaacccaggagttcaaggctgcagtgagctgtgatcacgtgactacactccagcctgggcagcatagcaagaccctctctctacaaaaaaaataacaattagctgggcatggtgctatatgcctgtagtaccagctactcaggaggttgacgggagaggaccacttgtgcccaagagttcgaggctgcagtgacctatgatcgtgccactgtactccagcctgggcaatcttgtctcaaaaataataatgatgataataagagtgata

SEQ ID NO: 190286 - DNA, 432 bp, Homo sapiens
agattaagtgtaattaacatcaactggtaaatgtgatgtgaggactaagcttggttagtggaagatagatggtgaaaccagtggcctgggagaaggggagagtagaggcagaatggcaggtagggcctgtagaagtcacacaaaatgtacctgctggcagggtaggggagaatcacggaggacctaacactatgaccagcagaccaaaagcccagagaagggtaatctggcaggtgatgatgggataccatgcttctagacagataggcaactttgagaaagagactcagaaaaagaagaaaggctttgatgataattgttacgaaaacctggcctttcatctgggctactttacaccccatcaagagtatatacaatcccagttaagaatcatagaacactgaccaggggcgggggctcacgcctatatag

SEQ ID NO: 190287 - DNA, 413 bp, Homo sapiens
aaggaagctggctgggcttgaagcccagcctgaataattcaccaagtggagaaaggagaaggaaggatagattatgttaagctgcggcaagagcagaggggccccatagagaggaggatggttgcaaacctatgattgcttttcatttctgattaacatgggacatgctgaaattgaataagtggccagtaaggaggcacatttagcatcatctctaataacagccttggcagatgaactcattaggtgtatgcatgcttgtgtccccccccaggaattccctttaatagagtattaattaaagtttgattgctgctcaggaaaaaaaaaatagccctacttaattaagttgaattttaatattgggaatgcattaagaatcttggttgttactgcttcacagccttttctga

SEQ ID NO: 190288 - DNA, 623 bp, Homo sapiens
agtgtgagaccagtgttgcaggggaaatcttggccgccctggcatatggcctggctccgcagatgatggtcgtgctgcgttaatctctctgaagcctctcctcgacatattttagagtgctttgctagcacctggaatcagtgtcagacgggccctccctcccctgaagatcacagttggctgtggtgcattttgcccgttaaccaagcaagggttacttgaggagcttggccagggagcgctgccgggacccagagggcagagggcagagggcagggccggagctgtcaggaaggcccttgaggaggctggacccggttcccatggaagcagaggacggggagaagctggcccgctttgtcccgctgtctggtgattcagctcagctcctctgtccttgacttggctgctgtcttttcattgtcacttggcaaacttttctgtgaaaggccagataataaatatgttagactttgcgggccagatggtctctgctgcagccacaccactatgctgttgtagcgtgaacaccaccagagacgttgtataaatggatgagcgtggcttgttccaataaaactttatttacagaaacaagccactggcccgcttcagcctacaca

SEQ ID NO: 190289 - DNA, 764 bp, Homo sapiens
attcctgcttcctcctcacgctgcccccacatcctccccaactcaccttcatgctacatctcggcaaatacagctcatatccaggcacggtgcagcccttgacagctgggtccgcaaaggcagatcgggtatatctttaaagaaaagttatcttaaccattgagaagccttccttcctcagaggagagcacctccccagcagacctccgaggagaccaagggcaggacaggaagggtgaaaggaagtttcaggactgcaggaaataagagcttggaggtcaagggagagatcagataaaacatgaatctgatcagcatcctagtggtctagagtggagacaatctgcggagtcaacctcagtaaggacacacatagagaagaaccaaagcctctaaagacgaagctgagaagtgtacggtcgtagaagactcgtgtctgttattcttaaaagctcaaggagatgttctgccaattgaatggaaactgtccatagtggggagcagagagcctcatcttttctggaactgaacatccatccttaaggccagatttctcccatcaccaactttaactcctgccctagccctctctcttccttttcaaaaccctctccacccaggaagggagattctggagccaagactgtaccagccacacctccccagagttgttaaggaaggaactcgaagccaggggtgtctctacgtctattaaacgtcatgactgggatcacggattagcaggatactcaagaacagctatg

SEQ ID NO: 190290 - DNA, 733 bp, Homo sapiens
attcctgcttcctcctcacgctgcccccacatcctccccaactcaccttcatgctacatctcggcaaatacagctcatatccaggcacggtgcagcccttgacagctgggtccgcaaaggcagatcgggtatatctttaaagaaaagttatcttaaccattgagaagccttccttcctcagaggagagcacctccccagcagacctccgaggagaccaagggcaggacaggaagggtgaaaggaagtttcaggactgcaggaaataagagcttggaggtcaagggagagatcagataaaacatgaatctgatcagcatcctagtggtctagagtggagacaatctgcggagtcaacctcagtaaggacacacatagagaagaaccaaagcctctaaagacgaagctgagaagtgtacggtcgtagaagactcgtgtctgttattcttaaaagctcaaggagatgttctgccaattgaatggaaactgtccatagtggggagcagagagcctcatcttttctggaactgaacatccatccttaaggccagatttctcccatcaccaactttaactcctgccctagccctctctcttccttttcaaaaccctctccacccaggaagggagattctggagccaagactgtaccagccacacctccccagagttgttaaggaaggaactcgaagccaggggtggtcttctggcaagcacccccactaccagtagcag

SEQ ID NO: 190291 - DNA, 400 bp, Homo sapiens
attcctgcttcctcctcacgctgcccccacatcctccccaactcaccttcatgctacatctcggcaaatacagctcatatccaggcacggtgcagcccttgacagctgggtccgcaaaggcagatcggatgttctgccaattgaatggaaactgtccatagtggggagcagagagcctcatcttttctggaactgaacatccatccttaaggccagatttctcccatcaccaactttaactcctgccctagccctctctcttccttttcaaaaccctctccacccaggaagggagattctggagccaagactgtaccagccacacctccccagagttgttaaggaaggaactcgaagccaggggtggtcttctggcaagcacccccactaccagtagcag

SEQ ID NO: 190292 - DNA, 435 bp, Homo sapiens
cttctcagattccaaactataaaacattagcttgtattttaacttttaggctttttcccctctgggaaaaaatagagtagactggccattggagagctcaaaataaggtatctgctttgtaacgcggtgccttaggatgtggattgtcatagcctaggtgtccaccttccagccgagggcaggggaagcagccaagctctgctgccaccaggaggcccgaggaggcctgcctctgtgatcctcacccccgtgcacactgtggtgtcctctctctctccttcttccctcctgtgctgctatcgtcttcctttctttcctgattcttggccctgctggtggcacttaggactaaagagactgctcagccctgggttagacaacaccgtggtagagaacaatttgtatattgccttgaggcgccctccccgcaccccg

SEQ ID NO: 190293 - DNA, 697 bp, Homo sapiens
tgggcagcgtaaggacggaactgctataacaaagttggagaagacttcaaaaggaggttagggtaaaatcaaggcaggaaaggagaggcgcataatttgaatggtcttcagtttcttcaacttataaaatgaaagtaatacctactttgttaaggttgttttaggatgacaaattagcatagtgaagtgtataacacaatgcctaatacatgatagacacttaagaatgttagttccctctctacaaatatgaatttcattcatatccattatgccctctgggagtgaaacagactcattcttttgaggaaataagtcttgctaaaggtaaaggggctgtctccttctcccattcttgccatatgacactgtctgctctctctttgtcttccaccatgaagacaggcatggtagctcatgtggaagcttcccgaggccctcacccagaagcagatgctggagccatgcttgtacagcttgcagaactgtaagccaattaaaactcttttctttataaattaaaatagataaataaaaataaaggataagcagatgtggtggtacgggcctatagtcccaactgcttaggaggctgaggcagaaggatcaattgagcccaggaggtcgaggttgcagtgagctttgagtgccactgcacgcccacctgggcaacagagtgagaccctgtctcttctta

SEQ ID NO: 190294 - DNA, 339 bp, Homo sapiens
atataaggagctcacaggttatgaagggagacaagaggaaattctgtaaccaggtaattagacagcaaaatgatagcaaatagtaataatttaaaatgtgaagaacttcagacaagtaagtttgagaataattcctgactcaaggtaagaaaccatgggaccatctctatttttatttttcagcttgaaacatgaagagaatgttcaattgtgttatcttttaaaatgaatggaggcgtgtgtgtgtgtttaaaaaacctgtggttacaaaaccattattttgctgcttaaagtgaaaaacttaagctacttggaaaatgttccctatgtgtaaataca

SEQ ID NO: 190295 - DNA, 601 bp, Homo sapiens
tggggcatatactttgtaaatatcttcactcactttgcggtttattttttatcctacagttcttttgaggaactgaagttcttttcatcaaatttatcagtttttcttcatgactggatttttgtatcttgtttatgaaatcatttcttattccaagtgactttttctatattatacgctgaacactttataaatttgtctttcatatttgagtgtttaatccaacttggatttattacttatatagttccaatttctccttgttccatatgatctcccaattattcaagcactatttattaaaatgcctgtccttactcaccaatctgcgatacccactcttccatatatcaaatgcctttaaatgtacatttctgctctgggctctactctattgcagttatctatttgtctattgctatgctaatatcatagtgtctttttacattagctttataatacagcaacaattgatagtgcaaatcctcctttttcaagaataccttgactgtatttggccctttgcatttctgaataacttttaaatcagctcatcaaagtcaacaaaaaatacgttggaattttgactggtagagcattg

SEQ ID NO: 190296 - DNA, 283 bp, Homo sapiens
tgggggcgggggagcaggggttgactgaggagaattgcttgaacgaggaggtggaggttgcagtaagccgagatgacgccgctgtactccagcctgggcaacagaaagagactccatctcaaaaaataaataaaataacaaacctacatttagctaataggagcacttaaagctcttttgatctagattatcagtcccggaggtggggatatatggccttccggttactgggagtgtcttaagtcctggctaaacttacttgaaatgtgtgtgagaaactgtc

SEQ ID NO: 190297 - DNA, 264 bp, Homo sapiens
gctggaggcggcaggaagggccccgtagggagaccccgagggaggtggagaaggaacaagaccccggctgggggctgcaggtcggatggagcgtggggcctgaagacccggtgggagggtcaccccagccccactcgtgggacttggggtctggaagccattgatcttcctgactgctgtgagtgggaccgaagggccgcatggaggtgagagtggtggtctgggggctgctgtggggatggggagggtcgtagaggctggtgg

SEQ ID NO: 190298 - DNA, 1237 bp, Homo sapiens
cataggactaccgcaaatatgcagagtactgagtcggggaacaaagacaccaaaaatgcagatgaggtcctctggggacatcccctgccccacagcggcccccggctcaccgccgctctctgtccctaagttactcaccgtgttttgacaactgcttattttctgaaattgcccggacacgtagtctagggcatgcttgtataattcagttattccaagaaactaaagtgcctttcctaggaaaaggttccaggaatagtcatgagtgccctcgatacaattttttaggtctgctgccccttctctccaaagctctacttttcccaaagctcttcagactgccttgctgaggtaggagagagagcctcaatcacttaggtgtcctcatcagccctctccccagactccactggctggctggaaaagaaatcgggcatgaattgtagaggattcttccaccttaaggcagctgttagtctgatgtagacctgcatagaggaactgatggaactgagcaggatgtttggacccgatgttttttcttcatactcttctgtcgcctcctcccatttctgcacagttctcacccactactctaccccgtcatgcttccccttgctacgttgctgacgagctgtgacttaactaagaaataaatacaaggtatcagtctttttttttttttttcaaaattcctaatgtcgtggatacaaataacaccaagcaaacaagcaaaactgcacatggtgcaatccattcctgatttaagaactaggaagaaccaagagctagagaaaaccagtattctagacaaaatttaaatctgcaaaataacgacgtgggaaagctggactcttgagaaataatgaccacaaaagaaaactcatcgtagcaaagtgagtaaaatttgatacgtacataaagtacgttgatgaatcgaatctttacgtatgagttaaaacaggaaaaaaggtatgaaacatacacaagagaataatatcacggtaaaatgaatggaaaacatttgggaaaatgttactgcattgtttagaaagttgatcaaggaattaacttggcgtaaagaaacttattccagaaacactttttaaataaagatccattaacgtcttaacatatttgattaagatattggcttcaagtatatgggaatcagaatgacagtcacaacttgtcagaaatgtagcagggtcgtaatgatccttcaccaagatgagca

SEQ ID NO: 190299 - DNA, 238 bp, Homo sapiens
cctctgtggcctcccaaagtactgagattgcaggtgtgagccactgtgcccagtcctatttttttgaagtgcaattacttgtctaatacacacacacacacacacacacacacccacacaccctacctgagtttttaatatattcttgatcttaatggtgtctttgaagacagttgcacatattgataggtaaacttttaagtaaaccagccttaattgttaaaattataaatccaag

SEQ ID NO: 190300 - DNA, 144 bp, Homo sapiens
tcgcctgttcaggacatttcatatgaatggaattatgcaacgtgtgctatttagtgattagttatgtcactctgcataattttatatttagagttacctgtgttgtagcatgtatcagtattccattcctttttatatctaata

SEQ ID NO: 190301 - DNA, 622 bp, Homo sapiens
ctcgcctgttgcccaggctggagtgcagtggtgtgatcttggctcactacaatctctgcttcccgggttcaagtgattctcatgcctcagcctcccaagaagttaggattactggtgcatgccaccaggctcagctaagttttgtatttttagaggagacgggtttcaccatgctggccaggctggtctcaaacttctgatctcaggtgacccaccgccttgacctcccaaagtgctggcattataggggcattataggtgtgagccaccgctcccagcctatatataaaagtgtgtgcttctaatggctatatttctattaactactatcagtgtaacattgtaaaaggcactgaattaaaacctcttggaattctaatcctggttatgatcttgcatgaatatgtaatctcaggatgataacttttcttgtacaaattattgtccataaagtgaagtgtttgtgcaatgtccatctctcaggtatctatgatcaaattgtgacattcacagtggcttgttgaaagcttacaagtttacgtgatcttattccctgctttactattttcaaaatctctgtgactactaatgtctaatcactttaattaactagtccttatga

SEQ ID NO: 190302 - DNA, 346 bp, Homo sapiens
tccacatatttccttgtaggtatcttgtttccatcctcttcctgaggtggtatcacagaaaactctaaaagtgatattgtcagaaataaacgccaacaggtggcccatgtgtagttctgtgcctgcccctgggcaagtcatttatttatcatccctttcgcttttcacatttccagctctgagtggtaatttggagccattgggatctaatgagaaaatgaaaggcattgttaccattattgctctggtgccatgaggtctctggtgggaacatttgagagaggaagacaataataaagaaaaaagaaacctccctagaattcagctgtactgtctggggcctcct

SEQ ID NO: 190303 - DNA, 355 bp, Homo sapiens
aacccatcctatctatcacaaactggatgattcttttaaaaataattctgcttttgactttcaacttcttaaaatatattaagtggtcacacagtatcaaacccaagtcaacatgatttattaccctctctaaatatggctcctatctatttttcctagccttatgtgcagcttctccttcaaggaacatatatgcctgagccaaaactactcaatattacccaaacatgctatccatttctacttcaatggatgacggcttttcccctcatatcttcattcctgcctcactgaaacaagtgtcacttctttgtgaacttcaaactccctgaaaaaggtattgcagttcatctgt

SEQ ID NO: 190304 - DNA, 311 bp, Homo sapiens
agaatatatcaagggtagcttcttttttatgggagaaacttgaaaatgaaggaagctgaggggaggatccagttgagagaaaattgatgatgtaagcaagagaagagataatgacaatggagagaccttgagtaattgggagaagaatagatggagggaccagtcttaggtaatagtttctttctgcaggacatgaggaaaaaatggagcagttatagacacatctgtctgtgtggggaaaggagtgtgagaaagtcctctcctaaaagacaccatttttttccctatgaaatatgagaaatatcatctgc

SEQ ID NO: 190305 - DNA, 498 bp, Homo sapiens
ttgctgagtcgatctaaggatccccctggtacgggcagtggcaactacgataaaagagtaactgcaagatgtaaggaaacatgtggtgtccttgggctgaggggagtgcatgaggaaggatggacctggaaggggaccctccgaagctggggttcagacctcttgagagcaggtgtggttttgcccacaggaatgcagagacgttcactggcttccccgggctgcggttggtttgtggtcactgggtaagcaggaggcgaccctcctgggtgcagcaggcccaggctgtgagcaggcagtggcgtggtcctgccgagggaattcggtgccagtgtgggcaggtggcctttgggcactggtttccacattgaggactgtgggaagctgggaaattttcaggaggtcaggctgtggctgtaggtcgcctggggactatgtgtctcggacagagcgtgtccagatgtgcttaacaccacactccgatccaccccgtagcat

SEQ ID NO: 190306 - DNA, 331 bp, Homo sapiens
ttatatacgagtaagctgagattaactctatctttcccattatttggcaactgaagatatgttatagtgtggcataaaacagcctaattttgctaagggaaattgataacctgcagtgggtgttgagaggagcctgagggtgctggtaatgtgctgtttcttattctgggtgctgtttatatgagtgtgttcagtttttaaaaattcattgagatatatccttatcacagtcatgtgtcacatgacattttttggtcaatgacagatggcatataggacgatggtcccataagattatgctggagctgaaaaattcctatcacctcatgat

SEQ ID NO: 190307 - DNA, 436 bp, Homo sapiens
aacatgctgttgctggtttggaaagaaaaagttttcaaattgagtactatctaccagattaaagggaaatttctcagtctttctgactttccaaactgtaggtctactatccatcactcttgacaaaaccaattatccactgcggtaaaatactcccatcccattcacccaccagcctcccctctctcttctatcaaaataataatcaccatattatttaatgtttcacttcccatggtgaacctctcatccctctttctgtgaggcttagcaattattacacatctttcaagatgtaaaccgtacttcatctcattgatgaaagttttactaactactctgcttcctctagattccctttttctgatgtcctataagctgtaaagtgctacatcaaagcttttaccaaaaatactatttttactattctttcact

SEQ ID NO: 190308 - DNA, 378 bp, Homo sapiens
agtcgggctgatttactgatggagatcaccttgggaagcctgtgaggagagttcagacccctggaattcctacactcccacccaggagaacctgttataagcattcaaccacagccccggctaatgaccatagtggtgataccaccagctcttgatcgtaggaggtatagggtgactatgaataaagtaaatcactcaaacaccccctctgactcagttaagaagtccagtgccacatctccagtcctctcttgtacctgcatcagaatcattaagagcagattggagctagactgtctgctttcaaatcttggctccgctacttcctgtatactgtttttgtgagttaaagaatttaataagtgtaaagcagttcct

SEQ ID NO: 190309 - DNA, 252 bp, Homo sapiens
aggctaaggttgtttggatgttattttaagaacaatgggaagacactggaggttgccttaaagacatgtgtctctaggcaagcccttcagattaaaggctgcattattattttgcttatacaagatttcatgctatacccagatgcttacatttagggtgctgaattaggggatcacaataaataatactaataccagaatttattctggaatattccctgtagcatctgtacagaatctggcacaaggtgg

SEQ ID NO: 190310 - DNA, 459 bp, Homo sapiens
gtgttcttcagtatatggagatattctaaaatgggataatactggtacccacttcagaggtctgttgagaagattaagcacattaatacagcgaagcatttggaacagtgcctattttagcatggggggttttatttgtgaataagtctgttgaatgaacaacatagttgaaatggggtgttttatttatgaattagtctgttgaatgaacaacatagttgaaagaacacaaccacaaaccaaacctcagttaacaagtcaaggggaaaaacttgtgactctactggcagcagcagatgatgggtgtcccagacacaagctggttccatgtggtggatctgtgtctaggctattaccatacaatgaagggaaacttacttggaactaaagagacttaactatgtttaattaacttgtgaggagtatgtttttcagagtggcgattttaatcacccaccc

SEQ ID NO: 190311 - DNA, 644 bp, Homo sapiens
acagcaatcgcaggctgatgctcagcttttcggatgctaaaatgaaacctatgctgccagctgggagacacccttccttcctgtcagtgtcttagaaatgggggtgagcaatcagcagcaacaggtggcaaggagagtccagtaggtagtgtgggagccaaaggatgaacagggctgaagtctcatttccagaacaagaaggtcaaggaacagatcctggattctcctgccaccatgaatgctgactgagaaggccattcctgcttcttcctctcagtgatcaattagagacatcagttactgaattacaacctggtcagatcctgccccctcctctctcctcccaaccttgttccctaattgggatttggcagttgtttcaggccaggttttcttttcactttatttctaagggctccttcaaggctgaaaacgagatggcaataagatagctgaaagtcctcatctccccaaaataaagcacagggaaggacatgggttcaggggccagttgtagcaccatgtttgagcccaatctttgaagctgctggctgtgttggaatcctggatcccgtttatgagcctggtgattgtgggaaatcaggtcccctctttgtgcctcattttcttcatctgccaatggg

SEQ ID NO: 190312 - DNA, 337 bp, Homo sapiens
atgtgcaaggtaaggatacaagaaaaccctgaaaatgacagacacggagacagatggagacagacacttctggaatggaagccgcgaaggagaggctcattaattcagacttatttatctcaggctcaaaccagaatggaagcggcatgagataaacatctgcccagtgaatgaaccagtcacatggcaagacagagacagagagatggggacagtatctctaggtcaaaggtgagggagggagagaatattggaagcccaggggctgggaggaactgggacagaaagtgaagatgttgacagatgcaccgaggcaaagacatggtgaaattgaaag

SEQ ID NO: 190313 - DNA, 292 bp, Homo sapiens
tgtagaaacatttggtacacagaaggcagtgttcatcttcgacaggctaaagaacaagggtggcccgagcatttccctaggcagaggaaaaagccaataggaaaaaggaaatcactgagtcattcaacaaatagttattgtatgcctaactgctgggcagtcattcaccagggaacaaagtcctgacactaatggaatgaaacagacaataaaaagtacatgctatgaagaagaaccaagggtaaggggatagactgcaaaggggaggggtggctattttatacagggtagg

SEQ ID NO: 190314 - DNA, 674 bp, Homo sapiens
tacaaaattagctgggcatggtggcgcatgccagtaatcccagcaacttgggaggctgaggcacgagaattgcttgaatttgggaggcagaggttgcaatgaaccgagattgcaccactgcactccagcctgggcaacagggtgagactctgtctccaaaataaacctaacagaaaaaacttacactcaaacattaaaacagagtgctggaactttgtcctagcatataattagttacttgtgatttgttttcttcttttaagtcttgctattaagttttgttaggaaaagcccaggttggcctctactccagagatattaataatttagccccactaagtctctatccttctgaagactctacccaatacctgtgtgttatgaggtctctttactctggttgatggaaacacaaactatgcctagccctgtgtaaactccaacacttgttcggcctcctgctttctggttttactttttccaaccttctggaatttcaccccacacctgtgtagatcagtccccaaagacttgagggaatctctaatggtctatgaggctttgtcgctttctctctctctctccccatgcagctcttgcttctccagcactctctcccacaaattctagctgatattcatggccttgaactcgaacccagtgtgaagatcctt

SEQ ID NO: 190315 - DNA, 326 bp, Homo sapiens
tacaaaattagctgggcatggtggcgcatgccagtaatcccagcaacttgggaggctgaggcacgagaattgcttgaatttgggaggcagaggttgcaatgaaccgagattgcaccactgcactccagcctgggcaacagggtgagactctgtctccaaaataataataatgataagaataataatgccagggtactctcctcccttaatgccagggtactctcctcccttgcaccagtagggaaattcaaaccacaaaaccctggcctgtgcatcagaactctcaccccagctttactccctaacagtaaaacccagggccactt

SEQ ID NO: 190316 - DNA, 453 bp, Homo sapiens
ttggccctttttgttcagagacagagtcttgccctgtcacccagactggagtactctttaaaataccacagtaacagaaacccttcatatttttcacaccaagataatacattttttctcaagtctccaacttcaagaattgtacaaatatgactgtgacatcgcttaaaaatacaggaaaattaaaaaaattgtacaaataaaatgaatcatgtctatgacttattaatggaacttcagtggcaactcagaggtatgtgacccttcgggaggtgacaacactccagatctgtgagtggcccatgggcctgggaagagcgggagcctagcctggaaagcagcaagtcctgcttctctttacttacagccccctgctgtcccaaagccttggaaatcacacacagagaacacaggtgttcccaaggattaaaaggaaataaatgctaagtggca

SEQ ID NO: 190317 - DNA, 184 bp, Homo sapiens
tttttgtctttacgtaaatttgaggaggcttggcattggtggttattgatagccacataggagtttttcagtagaaaatagattgtctcttgctcttttaagagaaggtatgggagagaaatttaagtttttacatatgtgaggtattttttacttaagtttaatatagttgtgaagaaaggga

SEQ ID NO: 190318 - DNA, 315 bp, Homo sapiens
cacctcccctgccactgccctcagtgccttacacagaagagttgctcaataaactattctaattcatttctatcattcctgtgggcatttggaatggtacagaaacctacttactagccacatgttgatggtaatatttgtgtacccagaattttttggtgagtgccaacataggtactagctggatttttgagacttgaaaacgctgaagtgaaaataaactaactacttgctcacattttgtgctaagttgctgaagcatagcatactacttaatgttgcttaattctccaataaaataattctcattttctg

SEQ ID NO: 190319 - DNA, 623 bp, Homo sapiens
cgcaatggccgggaagaacttcctcttccttggctctccccacttacttcctgataacctgagttgaagtcggtgaagacattcatgatttaaacaccagatcctgaaaggcattaaatctactttgaaatgaatctgcaatcagtatttcaaagcttttctgacgttgctgaatttgaattgggatcacatgtgtttcctcatctaggacctggtgaacttccaacactatgttgaataggagtggtgagagagggcatccctgacatgggtgcaggctatgaagatgggaaaaggccgttgatcactctggcttcttcctgctgacagcggacatagtgggaatgggagtgaaccccaaggtgagagagtggaaccactttgcaactgtctgagcgtactcatgcagccctggcttttcagtaggcctacacagaaaatgtgagactgaaaacccctgcatccttgagctcatggacgatgtgctctatgaggcagtagaggagctccgcctggtactcgacactccacaaagcaactctccctttggggctgcagttggtgaacaaaaagaaactctcaaggatccaagatgatgctgatagtaagaagtcattttttgt

SEQ ID NO: 190320 - DNA, 447 bp, Homo sapiens
gtgcagtggcacaatctcggctcactgcaacctctgcttcctgggttcaagctattctcatgcctcagcctcccaagtagttgggactataggcgtgtgccaccatgcctggctaatttttgtatttttagtagagacggggttttgccatcttggccaggctgctctcgaactcctggcctcaagtgatccgctgacctcagcctcccaaagtgctgggattacaggtatgagacaccgcacccagcctacttatttttgatgcttagtgattttagagagtaagtaggttttgcaagtccattggtcctttaaaataatttctagattgttggcattattaaaaccctaaatccttttaggaactattgcgaagaaagaatatgatattcgtaagagctcagtgctaatattagcattggttatggtagtgaaagaccagataaa

SEQ ID NO: 190321 - DNA, 687 bp, Homo sapiens
aaaaattcccatttggctgccagcctcgattcatagttccctcttccagctcccaagcaaatatttttcaaatagccgtgctaagccttttccaggcatgatttgcgggcttacttgctgtcattctatttttcagcaaaactctgggtaggaatgtcggaaattataccttttgaaatccctccttgaaaacatggagatttgtaggtatgcagaggcaattgtaacaatataaagtattgtatctcttccactagagtaggagggcctgactgtcggcccctggggtctgtctttcattacttgtcttgacttccgctgtaaaagcattaagtgggaaggtagcagttctgctgaacaagcagacattgccttctgtaagagaagttatttaaaacatcgaaaatatgtttgaaagatattggtgtagtttcctctgacctcaatttcatacactagtaactctccggtgtctagagttagtactgatggactccctgccgggtggccagaaccatgtgtccatgccagatagaagattctacttcacttgattgaggacgctaagaagttgtgctttgccatacatgttgcccctaaggagaagctgggcattttaaagaatagacttaaaactaacacacatactctgtttttctcacacacacattccgtactctccccttc

SEQ ID NO: 190322 - DNA, 214 bp, Homo sapiens
atctctagaacttcttcatcctgcataattgaaactttatacccatgtttcataccttcttgccggaacctgattttccctctccctggtacatatttgctcattctacaacatgccctcaaggcatccctctctgtcaagccatccctcctctctctgtctcaatctctgtctctctttcactctcccctttccctactcttagcttactttg

SEQ ID NO: 190323 - DNA, 522 bp, Homo sapiens
aaacaagcaaactcactttagtagcatttctaccaaagaaataatagaaatgaaacactttcacctagaaggtaccacatgacaatgacaattaacctctctcttagcaggctccaagaatttataaaatatcagtgaatatatggtttttaaatagcttgctttatgcagatgttaatttaaggtttaggtttcctgaccttgcaacccattctcagtgctatgcatgatggatatcattttctaagtcttcaccatggattattttactaaaatctattcattcctgaacacatgaaagtacttatttgtgttgcatagaaattgatttgaaaacaaaacagaaacaaaacaggtgctcaacttgaaaagaaaggttaatgttattctgacatccttcctgagcattgacaagggtcagtgcacgttttcacatttctttttccagcagttcaaaaccgccactcagcaccacaaaaaataagaaggcatatgcaatcgggagacaagatcgtctccaag

SEQ ID NO: 190324 - DNA, 346 bp, Homo sapiens
gatcagacttttcacaagaggatggcactaattaaggtccaggcagtgggacaggatgggatagggagtaggaagagacaagcaagtctttttaacatgactcagatctcacaagtggttttatctgcccaagatcatcaagaataaatgaaggaaggggaaatggggaaaaattgtgtgtatggggaattggggtgggaagggacaatattggaaagggataatgctggaaggaaattttaggctgtggttggagtttcttgcttcctttgagagaaaattgttcaaccatttcctttaaaagtgtaaagcatacaattaatctacaaatctagatctggtgtgg

SEQ ID NO: 190325 - DNA, 326 bp, Homo sapiens
agctattgtgaaaggaaaagtagaaaagcagaattggcagaccataattggaatatcatttggactcttttaggaaagactgtacaggaaacctcaaaatttggaagttgtttccttgaaaacttaatttgtatatcatctccagcaccaagttataaagctatataaaactataacttggtggtagagatgatatatagctgagaagcaagtgctcagaagtgaggagagtaagtgatgggggtgccaggtgggtgtaccaatatgtaaatggcattcaattatagaaatcaccaaaaaccaaataactgaatccagaatggctg

SEQ ID NO: 190326 - DNA, 482 bp, Homo sapiens
agaattagacaccaaagctccaggatttgaccctatccgctgcctggttgtaaagggaagtgacagctgtcccggaagctccttggcactggacgttcctcacctggcctcccacggagccaagggcgcacctgccctgaaacccccatgcgtgagtgtatgcagcatgtgcacacctgctggggacctggggccaggaatgcctagtgcagggagaacacccagcatcacctttaaatgtaacctttgccacgtggagggcaaaaacaccttcctagactctttcccacgcctccacctccttcaacctgtttctgactttaagcagccgtaagtcactcttgtctccacagatgtccagcaggaacaaggcactggctgctcagttacgttccatggggtggccacgggtcaggacccggagcactttgcaggggtgggtcccctggtctcctgcccctccctcgggacccaccctggag

SEQ ID NO: 190327 - DNA, 420 bp, Homo sapiens
gtcaggagttcgagaccagcctggccaacatggtgaaaccctgtctctactaaaaatacaaaaattagccgtgcatggtggcgtatgcctgtattcccagctactcgggaggctgaggcaggagaatcgcttgaacctgggaggtggaggttgtggtgagccaagatcatgccactgcactccagcctgggcaacagcgtgagactgtctaaaaaaaaagaaagaaagaaaaagaacatgtttctgatatatttttctatctaaagccatagcatctttaatgagttggtgttctttctgcttttttatatcttaggggaatagaccctttggctcagtattcacttgtgaattcttatgaagagtagagataattatatatgcaacctcaatcctctctctctttccgccatatctaat

SEQ ID NO: 190328 - DNA, 261 bp, Homo sapiens
gaggatttcaaataattcaccttaagtcaagaaacatgaacttgggttaaaaggaagttttttacacagatttacacacattccctaaaagcacataggttaaacaatgtgggcaatttacttatggaacctaatatgtatgacaaaattaaaagcaagctcatctacttttaggcaaagagacagtacctgggggtggggaaattctgacaattcactaaaattcactaatctttctgttaagatttcactctaagcttc

SEQ ID NO: 190329 - DNA, 346 bp, Homo sapiens
agcccccactcctccatgcagtctctcaaacaggaatgtttcaattaactcttgccatgctgtttgtcttttcacctcatatttaagaaaaatttaaatgcttagattgcttctaatatattttgctagattctgacctataactgcatcctatgagttgaatttaactacagtggtagacattctacaaaaagagttatatttttgaagaacaaaggaggaaaatagtagcctcagagtgaatacagttatgtcctttattcagttctcctaatctaataaagatagtgattctaactcatattttatagtattctaatatgtcttaccagctatcataggggtt

SEQ ID NO: 190330 - DNA, 251 bp, Homo sapiens
aggaggaagagaaagaggatgaggagaaggaggaagaggaggaggatgagtaggaagaggaggagaaggaggaggaggatgaagaggaggaggagaaggaggatgacgaggaggaggagaaggaggatgacaaggaggaggacaaggaggagaaggaggaggagaaggaggagaatagtgaaagctacagaaactaagaactcctagagaaagagggtcagatgcagagaggacagcaagctccctactga

SEQ ID NO: 190331 - DNA, 327 bp, Homo sapiens
aacactaaaaaatcttttgaaaagtggcattattttcttctctactgaactactgtgaagtttggacaatgtcaaaatttcacatcctaatcttaccttattaatttctaaattcagatttcataatcttgggccgggcatggtggctcatacctgtaatcccagcactttgggaggccgaggcgggtgaatcacttgaggccaggagttcaacaccagcctggccaacatggcaaaaccccatctctactaaaaatacaaaaattagcagggcttggtggtagagtcggggtttcaccgtgttaaccaggatgggcaatcaagctt

SEQ ID NO: 190332 - DNA, 496 bp, Homo sapiens
taaatcagctcggtccctggtagctggttttctcggggagcgagccagggtgtgcgtggaggttatgcttcgtggctgtggcgactatgcagctccttctgtagacagctaacggagctgatcgggatacagcgctgtcagaacaggacattccctcctcttttctttttgcagcataatgggtggagtggttttgagccatgaagtttttttcctccaacatttctcaacttaacaagtttagcaatttttaacaacttaacaagcctgtggccccaacatatcacaattgtgaggtgatgtggcgacagacgatgaagaggcaaagtggttgttaggtggattccaggtgagacagttgaggcctgcctgggtccatgacctcatgctttctgacattgctctgttattgccagtgctgggggtccctctgcaatgcagaaggtgttcacacctcatgcaggtctcctctgcagtggcactgggagaactggaa

SEQ ID NO: 190333 - DNA, 137 bp, Homo sapiens
gtatacccaaaatatcattttactctcaatatcaaaaatactaagatattctacttcctctttttcatagtaagactttgaaatctggtgtgctttttacactaacagcacatctccgttcaattcagccacatttc

SEQ ID NO: 190334 - DNA, 220 bp, Homo sapiens
gtccttggtgagatgcccttcctgggaaactccgtggcgtggttgcttcacatcaaccggaattgcagatctggttctaaattaagactccttgtggggtggagggtggaggatcttacactcctagctttccccatgtcctgtgcatattccttctctctactgcagccaagagtggctgttgcagcctcatgactcagtgcgacccattgcacaactc

SEQ ID NO: 190335 - DNA, 398 bp, Homo sapiens
gatgggtgtggctataaagggtaagcactgtatcttgatcatggttggttacataaatctactcacatgataaaacggtatagagctatacataaacacataaatgaatgcacggataaataactgtgttagtccattttgcatggctataaaggaataccggagcctgagtaatttataaagaaaagaggtttaatttgttcatggttcttcaagctgtataagaagcatggtgttagcaactgctcagcttctggtaaggcctcaggaagcttacaatcattgcagaaggtgaaggaggagccagcatgttacaaggcaagagaagaagcaagagagagaaaggaaagagatgccacactcttttaaacaactagatcttgtgtgaacaaactgag

SEQ ID NO: 190336 - DNA, 350 bp, Homo sapiens
tttctctccctttagatctcataatatttgctttatatatttactttatatattgggtgttctggtgttgtgtgctcatatactgacaactgtcctaaccttctgctgaactgatttccttatctttctttatataatgaccttcttttctcttttgacagttttttacttaaagcctattttgtctgatgtaagtattactacccctgctttgttttggtttccattttcacagaatttcattttctcttctttcacttcagtctatgtgtggccttataggtgaagtgcctatctggtaggcagcatgttgctgaatcttgtttttttttttttttaatttaatccat

SEQ ID NO: 190337 - DNA, 291 bp, Homo sapiens
aaacagagcccaagctcttccagccaattcatccttatctcaggttgttgcattccctgcacattctacaattattcttgagaacaagtgagaaaggggaaggtttgaggccacccagagagctgtcctgcaagtgtttagtgtgcctgtggatatgtgactactttgaaaattccatgtgttagtggcccattgaatgctgtgttttctgcatttaatcttgctttttttttttttttttttttttttgagaagaagtctcgccctgttgccaggttggagtgcagtggc

SEQ ID NO: 190338 - DNA, 763 bp, Homo sapiens
gaaagaatttattgttggaaaacggggcggcaagatggacaacattctctgggaccaacgggatgtgcagcctcctgggctcaggcctcaccagctcctgcacagtggtgggggtgaggactgagggacacatcacatctcctgggagcagaagacgatgtctgcgaacccagctcaatatgcatggccttgtccccaggcaggggcggcctcagctggccaggtgtccccgtcactgcagagttctggtcttagactggctgcacacggagactccagggcagcaaaacatcttctttcctcaccctcaggctctctgagccagcacctcctgatccagatccatttctgaactcctggatccaagaccaaggtcattctcatcaacccttaagccagtgaaagactcttcctggggcctcgtgtgctggtgcggcttccagataatgatagccaaggtcacacttgccgagagccctggtgattcaggcactcttcttagtactttatgcaaattatctcattgaatccttacaacaaacctctgagggagctggaattaccatattctttccatggaggaggaagcgaagggcagagaggtggagccacttgccctgctcacagagctaggaggaggcaattcgcaatgtgaactgggtggctgcgtctccctccacgctcttcactgctctgcccacctgttctcagtccactggccaaccagaatactgtcccagatagcaagtgtgacactgttgcc

SEQ ID NO: 190339 - DNA, 391 bp, Homo sapiens
aggggcaaacaggctcccttggacctcatttataaaggcacttatcccactcatgagcactccacccttgtcatctaatcacctcccaacgatctcttaatatcatcaccttgggagtgaggatttcagcatataagcttgaggagagaaacacattcaaaccatagcaactacacttttctgaagctaggataatcccaatactaaaacctaacaaagattgtgggggtgggaggagctcaatcatttgtaaatgtagttgtaaataatacagcaaaccaaattctatacagttttaaaagttgtccagcattgtcatgttagttacattttagaaagtaaatttgattaaatatatcattccagtaaaaccaataaaagatattttttc

SEQ ID NO: 190340 - DNA, 375 bp, Homo sapiens
gtggttactcacttggtggggggatttctgctccctcccacccaactattggttatgagagtcttttgtgtttatgattgttgtggtgtgagaggagaggaaatgtggttagtgtttttcccaaaccatgggagagtgagatgacttttttagattcagctgagagagaaaggaaaagatgagaagaagctgctaaaagaaatggagaaatataaaaagaaatgttaagaagtgctgctgtgtgatctacttgttgacactaattcagaaaaacttcagtaaataactacattatttttcaatactattgagagtaagatttctacttcttttggatgcatctccaaaagctgagaaggcccttaaaataggagc

SEQ ID NO: 190341 - DNA, 674 bp, Homo sapiens
cagggcaattaagaacaaaggaaaaagggcaggcagcttactgtggtgagcatagctctacaagattgagagaaggcacagagcctgatgcttcttccactgtgataggagagaaatggaacatgttcccaacaatctggcctcagtgaaccaccagggtcgggctggattctgtcctgcctcagaagacattagcatggctctatgaattgtgctaggggtaaatccatctaattaggaatcctcccacacaaatccagagaagacacattcatagaaaaggtttgagaggctcctagaatctctagcctagtgaattggttaagctctttccatgtctaaacaagtccagaaagaatgggaagggtggctgcttcctcaaatgtgcagacaccagtgcaaaagtataagaaacaagaaaaatcagtgaaacattacactaaaggaacaaattaaatcgtaatacacaactctaaagaaatggagatctatgaataggctaacaaagatttcaaaataatcatcttaaggaagctcagtgagttacaagagaatatagacaactgaacaacattaagaaaataattcagcaacaaaatgagaatgtcaacagaggtagaaattatgtatgtatttatttatttattgagacagagtctcgctctgttgcccag

SEQ ID NO: 190342 - DNA, 170 bp, Homo sapiens
gggtcagatggggcatgggggaggacgggctggaaaagctgtcattggtgttggaaccttgccttgcaagggaagtcgcagagaggctttgaatcttgacctctcctaatcaaaaggaaagtgcactgcctgccattcctgtgtgaagaccactcctctcctggctgtta

SEQ ID NO: 190343 - DNA, 332 bp, Homo sapiens
ccgtctcaaaaaaacaaacaacaacaacaacaaaaacaagtaaagaagtgctaacacttgggctaggctacactgtgggaatgaattcatgaactgaatggaatctgcacatacttaatcaaactgtgtattctgaattatgctcacgagatgctaagatggaaaagaacatgagtggtagtgcagctggttcctcccgctgtgtcaactctctgcaggtcctctgatgtctgctaagctcctcccaaatgtacccatcatgagaaagactctgagcaggacttccacagcactaatctccccccaatgccaccagactcttaattctgctt

SEQ ID NO: 190344 - DNA, 431 bp, Homo sapiens
catatcctgtctaaaacacacacccatactttaatacacagacacccacaccctaacacacataccacaccctaaaacacaaacacaccctaacacacacgcatacagaccatacacacccgtctaaaacacacatacacacatcttaacacacatcctgtctagaacacacacccatacttttaacacatagtctaggacacacacaccctgtttaaaacacacatacataccttaacacacatcctgtccaaaacacacacacacacctgtctaaaacacacatacacaccttaacacacacacactctgtctaaaacacacacccatatcttaatacagtctaaaacacacacactgtctaaaacacacaccctaacacacacataccctaacacacacgctctaaaacacaccctgacacacacacc

SEQ ID NO: 190345 - DNA, 370 bp, Homo sapiens
gcagctagcttcctttttttataatcacagggaaagctctctccattgtccatcaaatcagctctagaaggtttttcttttttttctacaagtgcacaaaggggaaacactgattttaagaacctccttttcccaaagttttggccacaatttcccttttcatcttcctagtttgttaaattggctcttctccacatctcctcgaggagatgtggagaaagaagagggtggcagctctggtgcagggcccagagcagggagccaggtgaagagtggctggacttggctgccaccctctctgtctgaatcatccaaatcaaaattggccagggatgagggtatagtgctgggaccagacagagccaccacc

SEQ ID NO: 190346 - DNA, 106 bp, Homo sapiens
actatttgttgaatgaaatgatgctaacttgtactgagtgctggctatgccagatacttttatagtacattacacattattaggtcattttctcagcagcctctga

SEQ ID NO: 190347 - DNA, 328 bp, Homo sapiens
ttactgcaagatttcttcaagaatagctagttacttccttttccttgccatctttaatcctctacaatcttgtttcaaacagttacaacccatgacttcttttattgccacatctacatcttggttgttacctttcctctcttgcttggcccctttactgtttttagctgtaggtgaggaccactcttcaggttggctcctgctgtttctctgactgcttcctttttctttttaggttcttgattttcccttccatttctaattgagcagtccccaagattttgtccttatgtctccttccatgttctttttccatcttgagaagact

SEQ ID NO: 190348 - DNA, 101 bp, Homo sapiens
ggatcatgtctaaagggggcaataatagagttctttgatggggaagggccagtaagtcatgttgtgtcacttatagagaacagtagaagaaaaaatggaaa

SEQ ID NO: 190349 - DNA, 240 bp, Homo sapiens
tgattagggtgtctctatgcttaggaaagactcaggaattatcagcccctatggctgctcaacaggttttacttccctgctctttgtttgtaagaacaaagcccagaggagaggcctgcctgaatgctgaattcttctaggtgccaaggggcagagcccaggaggtaaagtccaggaacactttgttatcaaggagtggttttagtgctggtgtgatggcttctggaagccttctcactg

SEQ ID NO: 190350 - DNA, 363 bp, Homo sapiens
cttaaattgcaaaatgacaaaatatattaaaatactagagtacaaaagaaaagatacagaaaaattctacaaaggtatatatgaatggccaaactgtccaacatacataatccttgcataagcacccagtatgtcctaacagagaaagaaaccagttccagaaaaattaagtcaaaataatcacatataagagcttctctcttttagcccttcagtgacagctgaacgttggtcattaaatgggcatggaagaaacagagagaacaccatcttctgtttgaacaaaatcctgatctccaccaagaactgaaattgggtcttctccacttggaagactcctctctctatagagaaagagagaga

SEQ ID NO: 190351 - DNA, 769 bp, Homo sapiens
ccccacagcctcaccacctgtttctttgtttgagcacaaataaatagcctgggctccctgtgtacccattgttctcacttaatacatgagaacatgcaatatttggctgtttctgtcgttaattcacgtaggataatgaccttcagctgcatctgtgttgctgcaaaggacatgattttgttcttttttatgactgcctagtactttgtggtgtatatgcaccacattttctttatttaatgaaccgttggtggatacttaccttggttccatgaccttgctgttgtaagttatgctgcgataaacatgggagtgcagtgcctttttatgtaatgatttctttccctttgggtagatacccagtagtgggattgctgggtcgaaaggtagttgtacttttagttctttgagatacctccctactttttccatagaagttgaactaattgacacctaccaccgcttgctggaggttgaggacgcccagtgagtgtgcacccgggctggagaaggcaggaggtatggcccggaaaagagacacagaaaggtaatccaagagggctttctggaggaggtggcagctgagcctagaggtgaatttcgttggggaagagggagtgaggcctaggcagcttaggccatgacccccatggtgggagacggctgcataagggtctctctcctggcatccgtctttacccatgcctgggcatcctacccccatcaccctttaacccccgagggccttggctgggtcccagaaattccc

SEQ ID NO: 190352 - DNA, 620 bp, Homo sapiens
ccccacagcctcaccacctgtttctttgtttgagcacaaataaatagcctgggctccctgtgtacccattgttctcacttaatacatgagaacatgcaatatttggctgtttctgtcgttaattcacgtaggataatgaccttcagctgcatctgtgttgctgcaaaggacatgattttgttcttttttatgactgcctagtactttgtggtgtatatgcaccacattttctttatttaatgaaccgttggtggatacttaccttggttccatgaccttgctgttaagttgaactaattgacacctaccaccgcttgctggaggttgaggacgcccagtgagtgtgcacccgggctggagaaggcaggaggtatggcccggaaaagagacacagaaaggtaatccaagagggctttctggaggaggtggcagctgagcctagaggtgaatttcgttggggaagagggagtgaggcctaggcagcttaggccatgacccccatggtgggagacggctgcataagggtctctctcctggcatccgtctttacccatgcctgggcatcctacccccatcaccctttaacccccgagggccttggctgggtcccagaaattccc

SEQ ID NO: 190353 - DNA, 381 bp, Homo sapiens
ggctaacaacagaactttcagcagaaacactacaagccagaagagatttggggcttatattcagcatccttaaagaaaagaaattccaaccaagaatttcatatgcagccaaactaagcttcataagtgaaggaaaaattaaatccttttcagacaagcaaatgctaagggcatttgttaccaccaggtctgccttacaagaggtccataagacagtactaaatatgaaaatgaaagaccattactgatcaccacaaaaacacactcaagtacacactctattaacactataaagcaaatataataatacaatcaagtctacataacaatcagctaataacatgatgacaggataaattccacacataacaatattaatct

SEQ ID NO: 190354 - DNA, 358 bp, Homo sapiens
gcaggacacagcagaaggcaggggctgggggctcctgcagaaggaacctttcatcaaggacttgaaggggtgagtagaagcccatcctggttttctcaccaggcagtgatctcctccggggcaggggtgcttctctgtatctctaacccttatcccaacaccaacagggttggcaaatctgaaatactaactaaatgaatgccttgttaaggcttcacatgactgatattgcacatggagacagaccacccgaaacacccagcacgcagggggcttgtcccagagtgcaccaaggactccctctgccacccttggcactggccttttgttctgtccttctatgctgtcttcagtcttc

SEQ ID NO: 190355 - DNA, 350 bp, Homo sapiens
agctgttctagagtaccccggtatccgctacaccagacacagatcagctctttgaagatgaatttctcagcactgctgtcacaattaaagaaagacatgcaggggtgaaagggaatttgtgtgtttcttagattggaaggatgtgttgagtcaaatgaacattctctcaaggttaaattatctatttaaaacccacccaattacagtgccaggtacaatctttgatgagattcagggaaaacaaattaatctgtgtgggagagattctctttgtatgaaggcaagctatgaaatcagaatgaactgggcattgtttgttaagggggaaatggttatataaattgaagatg

SEQ ID NO: 190356 - DNA, 335 bp, Homo sapiens
tctagaggatcccgttcattttctacactcagctctttgaagatgaatttctcagcactgctgtcacaattaaagaaagacatgcaggggtgaaagggaatttgtgtgtttcttagattggaaggatgtgttgagtcaaatgaacattctctcaaggttaaattatctatttaaaacccacccaattacagtgccaggtacaatctttgatgagattcagggaaaacaaattaatctgtgtgggagagattctctttgtatgaaggcaagctatgaaatcagaatgaactgggcattgtttgttaagggggaaatggttatataaattgaagatg

SEQ ID NO: 190357 - DNA, 517 bp, Homo sapiens
gagtgatggcgctcctagaggatcccgtgacacttcaggttacctgttactcctgcttatggatctgatgttcagagcagcaagtttattactttcacggagggtcagttttcgtgcttgctatattagtcactgaaatgcttcttttgataggtcagatgatattgaaacaaactagaattctgtttcctgtctgacttgtggaattgcagtatcagtgttcagaaaacttaccagacttttgaacgtaagatcgactagcattcaagtagaattacaaagtccaaacgatatgactcagctgggataaaaagtgctgttttatcttttttctgttccagtgactcagcaaaaacagtgctttggacatacggaaatgtaggcaaacgaatatttctgcataaagggaaaatgtagacctttacttttaggacgactgtttgttagtggaccagcccaaaattcttttcagagttttgcaaatccacctgagtctccacaagtgcaatttcatctg

SEQ ID NO: 190358 - DNA, 368 bp, Homo sapiens
aaaaactgcgtattttacctagacctacattttataaatgaagaaccatttgtttgagaaaagtttcattaagtaattgggacataaatggagtttcagagaaaggatgccgttcaatgatagtctaattatcatgaagatgattgctgcctggatattcctttgaatgctacagatatttgctctttcaaatttaattaaattgggttagaaccccatctcatgtacctagcaaatccaagtttctctccaaaatctctgaggattagtcaccatttcaaccaatattccctgtttctcaggcacttgttgcctctattacttttacatgcctgctacatatccttcccaaagaattcttcccaaag

SEQ ID NO: 190359 - DNA, 287 bp, Homo sapiens
ccttgaatccctccccttctctttcccatccaaatgatcaccaagtcttggtaacactgcaccatcatgcactgagcacacaggcccttgctaaacacccaatattcagcattttagaaacctgacatccttcccatcctgatggagcttagagtctggtgatgagctgtggttggtgctctgtaagaagaagttatagtgcaatcttgaggtggggagtggaaggaagtgagttggacaggaagcaaggccagctctatgtgtttgcccaggaagaaaaagacatg

SEQ ID NO: 190360 - DNA, 294 bp, Homo sapiens
accagctgagcaaataaacaaaaattggccaggcatggtgttgtgtgcccgtagtcctaggtactcaggaggctgaggcgggatgatcccctgagcccaggagttagaggttacagtgaactgtgatcgtgcaactgcattccagcctgggtgacagagtgagaccttgtctcaaaaacaaacaaacatacaaacaacgaaaagttagcaaagcaaaaaaggcacagcagactagtatgaatatggctgagaagcatgacatagcatgatgttttccaaacaatacagatagct

SEQ ID NO: 190361 - DNA, 797 bp, Homo sapiens
tgaaaggtcccaaattcaaaatgcctgagatgaacatcaaagcccccaagatctccatgcctgacattgatcttaacctgaaaggtcccaaagtgaagggtgacatggatgtgtctctgccaaaagtggaaggtgacatgaaagttcctgacgtggatattaaaggccccaaagtggatattaatgccccagatgtggatgttcaaggcccagactggcacctgaagatgcctaaaataaaaatgcccaagatcagcatgcctggcttcaaaggagaaggtccagaagtggacgtgaacctgcccaaggctgaccttgacgtctcaggacccaaggtggacgttgatgttccagatgtgaatattgaaggtccagatgcgaaactgaagggccctaaattcaagatgccagagatgaacatcaaagctcctaaaatatcaatgcctgatttggacctcaatcttaaaggccctaaaatgaaaggagaggtggatgtttcacttgcaaatgtagaaggtgatttgaaaggacctgctcttgacataaaaggcccaaagatagatgtagatgctccagatattgacattcatggcccagatgccaaattaaaaggtccaaaactgaagatgcctgacatgcatgtaaacatgcccaagatctccatgccagaaattgacttgaatttgaaaggctcaaagcttaagggagatgttgatgtctctgggcccaagttggaaggtgacattaaagctcccagtttggatataaagggcccagaagtggacgtttccggtcct

SEQ ID NO: 190362 - DNA, 1366 bp, Homo sapiens
ggaaaagttgaggcttgctaagggttgagatctgttggtagccctggatcacatggggtcagcaccaggcagtgcctctgaaagcggagagaggtcctggacttcccttgtgtataacagttcctagtgtccaacaatgaggaaatggtgaagcatggttacaaaactgtgacaaaaatatttacatctagcactgttaccactcacatgccaaacattggctgcacacgtgcagccttatttgtaattaacatcaaaagactagatctgaagccttccataaatgagaggccattcatatggcattcctggaacaaaacactgcacaggtaccagcctctccactcctgaccgggttggtgctgaacagtcagggattgttcttgaactagacttctgatgcttcttgcaatcttctttcatctttccctgaaatacacaaaataaacaaatacaataacaaatagtaattaaatgactttcaggataacatctagttgttcagacttcacccttcacaggtgtgtgtgtatgtgtgtttatgtctgtatattgaagcaatttgaatttatttactgtatattttctgagtaaaagactgaaatgaactacttggttcagatcatggtgtccattggtgacattgtttggaggcataatattctttatatggaaaatcctttaattccacagttagttacctcagattcagaatatgaatactgtttataatacgcttttgtaggaatgaatttgaaaggtagtttgtcagtaaacaaaagcacaacaactaatctcaaatctgttttgatggtgtgataggaaagaaagtaaaacctatgtgatggaccctgtaattggggcaggaatctcccaaagaaaaaggggagaattaatgacaaatgtcatagatcttgaaatttaatttagggtgcattttgtttatgaaacaatttaataaggcaacaaagtgaaatgatttttcatgtagcttatacacatgtaagtgcctctgattcatggtaactaacgtacctgatggtgtgtaaagtaatactgttgtcagaaggtttgccaattaagataatttgagtttactctttttttgttggttagtttagctgaaggcttgtcaattttattgatttttttcaaggagccaaagtggattttggggttttctctattgtgtttgtattctctatgtcatcaaactctgctcaaatcttacaaaatagtaagattagtaagaaagcagactaacttctgcttgctttgtatttagtttgtgtcttttccagtattttaaggtggaaggttaggttattgatttgaattcttttttgaataaaggcattaacagtta

SEQ ID NO: 190363 - DNA, 182 bp, Homo sapiens
ttgtgcttctacgaacataggtatacaaatacctctttgagaccctgctttcggttcttctgaatacatatgcagaagtgtgattgtcttttttttttttgtgaaattgacatttttaaagaaaacaaccccctctctgctggttttgtttttttttttttttttaaagaaaaatagaacac

SEQ ID NO: 190364 - DNA, 526 bp, Homo sapiens
agaagtttttaattttgatgaagtccaatttaataaatgttgttggtcatgagttgtgcttttggtgtcgtgtccaagtgtaatggaactttcaagtggctcatggccacacctcgcctttctcgtaacgaagggtggtatgtgaccaagttttctggtcaatagactgaacagggtgttgtgttccagaaatcctcctgaaattttggttggtagactttccctggctgcttcttctagtctcttccattttgtttttgggggtggggtggtgacagctggagcaccaccttgaggcacagagatgcaggccacaccgcaggcatggtctggtggggagacggaagtcatcgtgtgcttgagggcttgtggagccgagcctcatgccaatcctgcatggcctgctactggcttttaggggaagaataagaaacttccattttacttagactactgttattttttattttccatcatcctgggccaaatctagaccaactggatgcagggatatctcatgaaactc

SEQ ID NO: 190365 - DNA, 227 bp, Homo sapiens
cttttactcccctacttggcgtactatctgagacactcctcaattgctcaattaattctccaggaaaggcaaacgagcgagactccgtctcaaaaaaaaaaaagaagatacaacatttgagcaggtagtcaaagaaggtgcccacgagaaaaaaagataattacctcagtgaagtcttagaggaaggcaaatgggcttgagacctaggccacaggtggtgagactgg

SEQ ID NO: 190366 - DNA, 243 bp, Homo sapiens
tccgtgacagtccttgactgtgaatgctgctaaatctgtttaaaagaaaaaaaaaagaaactaaaaatgcaaaacaaaaaaaccaatcctttttgcttcacatgaaaaatcatttagcaatgacaagtaaagaaatttatagctgtacaagtaaacaatatatttctataactctgtgaaattttatatccagagatatacacttacacagagatacacacttatacacattcactacttgtg

SEQ ID NO: 190367 - DNA, 219 bp, Homo sapiens
attgtcatgttgctctgtcttgccttctcttttgtggccttgacacttatgaagagtagaggtcagatagtttgtaggatatctttcaatttgagtttatctgttgtttccttgtaattagactgaaattatggggttttgagaataccaccactgaggtgattttgctttcccaatgtatcacatcaaggtgtacgtagtatcaatctgttactgtta

SEQ ID NO: 190368 - DNA, 183 bp, Homo sapiens
gcactgtaagcatcaatgcggggtagagatcctcacccagacctctaacacctatagcctaaggctgcatgatcctccttagcagctgtgccagtgagaccaactcttgagatcctaactccaaggtcaggtccatcatcatatgaacttctatcagttaagaacatcctccgtcctggaacc

SEQ ID NO: 190369 - DNA, 525 bp, Homo sapiens
tccaggatcgtcttaatagactgtgtccgctgtggtacataaattgagaaagcatgatatttgagcaagaaaaattactgaggtttgttaagatttgagaagagagatggaaaatcttcctgttcagttggagaagaagctgaggaataagtctttgtgcatatgaagagtgttttgtaggctgtgtataggtattttctgtttcttcagaatgtagtaaaaaaacagtgtgaacttaagactggtcctgcaggaccagtcttaagagcatgatggggcagactgcacataggtctggtccgaaaccaagcccctgcagagacaaccagggaagtaatctgagagagttaatggccctcgtacctcttattatttcgtttcatttttgtaacagaggcacattatgttacgcttttatcttatttgagggaccaaggaacaagcaaatacttctgtagtgcctgttctgtggtaggctctgtcttaaatgcttcacaaacattaagactgtacctggattctact

SEQ ID NO: 190370 - DNA, 521 bp, Homo sapiens
ctttttgtggtgagcattcaaaatcctctcttctagcttttttgaaaatatacagtaagttattgttaaacatattcacctgacactgctacagtactttacaatttattcttcccatctagctgtagctttgtctgttaaccaacctcttcctatcatccccttcctcaatcttcacagtacctcataaccactattctacactcctacaaactcaagtttttttttagttctcacatatgagtgagaacacgcagtctttatctttctgtgcttgacttacttcacttaacataaagtcctctaggctcatccatgttgccaggactggcaggatttcattctttttcatggcttcttttttatcccattgtgcatatataacacattttctttatccattcatctgttgatggacatttaggttgattccatgtcttagctattatgaatagagctgaaataaacattggggtgcaggtacctcttcgatatactaattttttctcctctggataaat

SEQ ID NO: 190371 - DNA, 694 bp, Homo sapiens
tgggccctgaggtcaaacctggctctgccatgttcaagccgtgtgacattgcagaagacactgaagcagagcctcatttttctcatctcaggaaatgtgcacatgatgatagtagcatatgcctcttagggttgtgagaattaagagcatttactggccaagtgatggaaatggtctcaagaaggcaacctcaaatgggacttttactcaccagcaagtttgcctttcagtgactaagcctgccttctacaaaagagttgccatcaaatcacagttttttcattgtttttagtaccagcactactgacatttgagcctgtcctgttctagtatcatcgaggattaaacaattattaaagcactgtatatagtgagggaaagattccacttttctccaaagtaactttatcctcttgattattccatttcttctctcaattggatctttgcttttggctttatatattcacaagccttccatgagaaagtaaaagaacaaaacatactcattttcctccagctatcttccagatttcctccacttcaaaatcaaattcagagagctttcaaatagtctgtttgcttccatttcttcagttcttaattcctgacatgcctcaagcagctcctgtcaggtcatcagtgacttccatgacactcaatcagtcctcctcttatttgacctttctttcag

SEQ ID NO: 190372 - DNA, 318 bp, Homo sapiens
attaattcccaccaccccaaaaatatgtccccatcccatgtcttcaccatctcagacaacagcactataatccacccagttgctcaggccaaaaatgcaggagccattcttgatcattctccttcctccataccgtcatgcaaatccattagtaaattccactgaccctacctccaaatatctcccaaatctattgttcaccatctcacgccaacaacccaggcccaagccactagtctctcacttagcctaccccaacaggtatctaaagggcctccaacttcttctactgcccccacagtccatcctccagctagc

SEQ ID NO: 190373 - DNA, 316 bp, Homo sapiens
ggcattttactgtgggtctgtcaggtcttcagactgctaccctggtgaaaacgtgatttaagaaggtatttcggtgtggggctatcataggaaacttctgattttagatgcagtctatctgcaataagtaggatttgttgttgctgttgttttaactgtaggtgaaaaagaaaatctgcttcagagagaaaccaagttcatcttggagataagtgtggatgttggactccctccagctcagtaactgaggatcactttacttgaaatcgttgtgcttttgattggccgtccgtggttgcgctgaagagggaggagg

SEQ ID NO: 190374 - DNA, 250 bp, Homo sapiens
ggcattttactgtgggtctgtcaggtcttcagactgctaccctggtgaaaacgtgatttaagaaggtatttcggtgtggggctatcataggaaacttctgattttagatgcagtctatctgcaataagtaggatttgttgttgctgttgttttaactgtaggtgaagagatctttgtgccacacaggattttttttttttttaagaaaaacctatagatgaaaaatactaactgacactggtgtacgtgt

SEQ ID NO: 190375 - DNA, 321 bp, Homo sapiens
cagtatgctacacttttagaaaaattactttcccagtctcttgtagaaaacagtatcgtaagtttgatatatttttttaacttcctttttttggtcctactttcctagccattttattcagaggaagacccctgtaagcatactactaaaaagataaagaagcataatctaaaaatctctgggctgtcagtcaggacttcagaatgggaattccatctgttgtcaactattctccatgactgaagctagaaactttatagtatagctcttaataaaatcacgaaattgctagaaaccttttcttggttttgttttgaagca

SEQ ID NO: 190376 - DNA, 637 bp, Homo sapiens
tgatgggcacagcatttatggagtggagggaagaaagcctgatgggagtatgtttgagagaaaatgagaggctgggaattagagacacaagtgtagacagcttacttgggaggctgaggcacgagaattacttgggcccgggaggtggaggttgcagtcagccgagatcatgccactgcactccagcctgggcgacagagcgagactctgtctttatttatatatgtatatatggcagaaggaaaaggtgtgagacagttttcacattttggctaaataggtaaataaaatgtgggcataattctgatttgacaatatgtatgaaccaggagtaggaaggagaatttgctagtgaattgaatgccagaaacacatttcctgagcgggtcttttggaagtataacattttggaagaactgagttcatgtaccagttccctaggttatttcatggtgatgtaagttcatttttctaagacatgcctcagtgagcacttttttaagctgctgttgatgctatttttttctcacttgcattctcttgtatagcgaatacagtttcagtgtcactttcccacatgtaatcctaattatcccaagcctaacaagcaccctgtggaataggcaaagctggtaat

SEQ ID NO: 190377 - DNA, 782 bp, Homo sapiens
gctgctttcctttggccctacctatcgctttatttcttattcctatttgcagcaaaaacttccataaagagctgtgggctgggcgcagtggctcacacctataatcccagcactttgggaggccgaggcaggcagatcacttgaggccaggaattccagaccagcctggccaacatggcgaaaccccatctctactaaaaataacaaaaattagccgaccgttatggcaggtgcctgtagtcccagctacttgggaggctgaggcacgagaattacttgggcccgggaggtggaggttgcagtcagccgagatcatgccactgcactccagcctgggcgacagagcgagactctgtctttatttatatatgtatatatggcagaaggaaaaggtgtgagacagttttcacattttggctaaataggtaaataaaatgtgggcataattctgatttgacaatatgtatgaaccaggagtaggaaggagaatttgctagtgaattgaatgccagaaacacatttcctgagcgggtcttttggaagtataacattttggaagaactgagttcatgtaccagttccctaggttatttcatggtgatgtaagttcatttttctaagacatgcctcagtgagcacttttttaagctgctgttgatgctatttttttctcacttgcattctcttgtatagcgaatacagtttcagtgtcactttcccacatgtaatcctaattatcccaagcctaacaagcaccctgtggaataggcaaagctggtaat

SEQ ID NO: 190378 - DNA, 703 bp, Homo sapiens
ccttcccgaaggggtcctgcagtaatgctcacccctagacccacactctggccagtagcttgggtgcggggggacacattgattgactctcccctggtcatgtgcttcacatctgactctgttgtgaggttccccagagccaccaagattctgcaaatggaaattagcgcccttaggaagcacaggtacatgcagggcaataccaccaattgttcacgatgaatgaattggactcccgggataataaaccagaatgtgtgcttgcgggggcggggaattagttttgcttacctctgtatacctggtatcctaggagggtgcgaggggcatattaatgcttagcaaaagttgacaaatgaagggacctcaaaagttctttcctcctttgaatctctaaacccgagagtctgtttttgcatgggacatcatcttgttccatcagggagctggcgatttggctcctgggtcactaaatccaaacttgtagttgatcacccatgactgggttctcattgacctgcacgaagagttgttactggaataaacactggatgctagaatgccacctgctgcctgagatttcatcaaagaaagggcaacacgttccctagctctgagcatctctaggccaatggtgttgctcccagtctaccttgggaggcaagttctgttcttctcctggtatgaaaagcctgacgatgtg

SEQ ID NO: 190379 - DNA, 296 bp, Homo sapiens
ccattgaacgtggatttgggaagagaagcacaaattggagagtcggcaggagccagccccagcacatcaccatatcgaggtcacactgacttattctgtgaactgggataagttaacatttcaaatccccagtttcattgcctgtaaagtggagactaggaaagtttcctcaaatattgatggtaagactaaataaggtattatatgaaaactctcaccatagtatttgacctataataaagattcaaaagtatcatttcggcagggcatggtggctcatgcctgtaatcccagca

SEQ ID NO: 190380 - DNA, 475 bp, Homo sapiens
cagatcatactgtagatattactgtagatgttatattcatttgttcacttaaactaataatttgaatatactttactattattaagaactctttgttaaagatcaaattgttttaaaacttaagttagagaggcatttatagcattagataatgccagccaggacatatacactatctttaaaaatgaatctaacccttaaatgaaatccagcagccaatctaatgtttctttgtaataagcaaaatatttttctgtgttattgcatctcacaggaatctattcctaaaggattcaatagtaaagatgctcagtaatcatgctctagagtttctcatccctctaaagaacacacagcagttctgtgaatgactaaggatcagcaggaatggatgtcaggtgaatgttggcactactggatacaattgatatgctttatggattttttgtttcaatgtgattctgcatagatggca

SEQ ID NO: 190381 - DNA, 433 bp, Homo sapiens
ccaaactaaaagcagtatcacaccaaccatcgaagcagtctttgtggtctgacccagagaagagcttgtaagacgaacgacatatgtgaagaaggtcatgaaagggcatagtattccggtctaagtgcagaataacatcagatgaggctagagaatgaagtgagccccactgtgtgctacacaatatagatctttgtcccttaacagtgaggcatacaccaggttccaaggaggaaattttgtgagaaataaaactctaacataatgtagaaaatgaagagatggcagattaagccagtggcaggacgactagttaggacattaacacaagggcccaagtaaagaagatgaatgcctagaatcgggtagcaaagaggaaatgggggagaaatggaggttcagtaaggtaaaaagcaacatgctcaagtgtgaa

SEQ ID NO: 190382 - DNA, 466 bp, Homo sapiens
tacctcagaaattgaaaccattgatttaatggaacctttcatcaagtgcattagtccactaggcactcctatttattgagttttacattgatttttctcagttcaaaagagggcatatgttacatttaggaatgaaagtttgattttataagccaattaaaaaacagaattcccattagaaaaattaccttgtagcaagttttgctagattctaactgatctttaaagagggacattcagtaccctaatctaaatagcattgaaaactttccgtttcttttgggagaaattgagaattattttcccgagtttatgtgatgagagagaaaattatttaatcacaatcacgagcaacttagaaagacaaaaacacaacttttatgcatatatgcatgtatgtgggggtagatggaggggtgtaaatccagagagggacttgattgtgagtttcttattttgcattttt

SEQ ID NO: 190383 - DNA, 429 bp, Homo sapiens
tccatggtgtttttgtatacagttgatctcatagtcaggaagtggagatggatgtaagggaatgagaggaatcaagggttctgaatgagcaactgggaaaatgggattgtcatgaactgatggggaaggctaagggagaagtaggtctggtgggggatgatagagaactcagtttggaacatgctaattatgagatatgtattaaatatccaagcgaaggtactcatcaggaggtggatatacgaggtaagggctcagggaaaagctgtggccagaaaaatacatttagaagtcaccaatattatcagtgttataaaaagtatgagtctggctacagctgcctactaccagtgagtgaagacagaaaagagaagtggtccctgtcacacactaccattcggatttcaaaggagtgtggaaaaacttgca

SEQ ID NO: 190384 - DNA, 631 bp, Homo sapiens
caatcttgtgtgttttaaggaaacagaaaaaaagggaaaagaaaaagtcttttcctgccttgtacctctgtctaactaaaaagagaggcagcttcctcacagaaaaatatcactgatcttaaaactgaattcaaagaactgaagaaggaagtttctagtgtttcacttctgtggatttggcccagaaaaatccacagagaaggtgttaaagtcaggtaatttatcctgcatcccttagaaagccctagagccaatcaaaactctccccaaagggctgaaatcaggctctgagggttgtgggagtgacagagccatgtaagctctctggattcacaggtttaggtcactgctgatggattcaattactatgggaggacatttcatgctgtctaattttcattcaattggatgattctcccaaatccttcgttctttaccataagtttactcattattttagctttacctcaaggcactttcccctgggaatttttctgagaccagtgtgagttaggtgtacttcctgtgttttgatttgtcatactaaaaatcttacaagtatgaatttctacatgaaataaaggtaagatcttaatcttaacaatctaggtcttagatttcacggtatggg

SEQ ID NO: 190385 - DNA, 330 bp, Homo sapiens
cttagaagagcacctcacacctgatgggtgttcactaagtattgtgagcaatacttatgaaggaagcaaacaaataactaaatagacaatataatttcaggtggtaatgagtggtatgaaaacagtaaaacaaggtgaagggctggcggggctctttttgaaagaatggtctaaaaaggcttctatgtatgtgagagagaaaaagaaggagattggttttgtgcagagacctgagtggagtaaaggaaccaggggaggagaagtgttcaggcagagggaatagcaagtgaaaagaaaggcctttgacgtaggataagcttggcttagtag

SEQ ID NO: 190386 - DNA, 363 bp, Homo sapiens
tttaattgaccattgatttggaagatgcctagagccggcttggtaggcattctcagaagcgcgtttcaatgaaatatttccttgatatataaaatgtttgcaaaatgtcacattggtggggaggagaagagctctatctgggatcattaaagctaggatttgaattgttctccatagtgactgtaagaggtaatctgtccctgctgtgggcgatttcccaagctctgagtgttatctgatgcacggatttaccttgctgtgggaagtgtggtgattccaagcctcctctcttcttgggctgcaaggcgaaacccagagaacatgtgtgttcaaagaggaaccagaactctggtacttttctgt

SEQ ID NO: 190387 - DNA, 578 bp, Homo sapiens
tccttcagagctgagttctcaagtccctctgtgagttccttgattccatcagatgtttcctccatcgaagaccatggtttccctcagatcccttattacaatggtagctaaatgtctgtgtggcctgcaacagtataatctccagggataagtgtgtgctttgttcgcttctctactgttggtgctctttggagtgctgagtgcccaatacctgttggttagatgaattatgtgccagttcttggtgctagggttatagcattaatcaaatcagacatgatccctactctttggagcttacactgagatacagacaataaagaaataaacaagaaaccatcatgtagtaagggtgatgttttagagagttactggagaccttctttagttgaataattggggaagggctttctgaaaaagtgaaatttcagctaagatgtgaatgaaaagaagcagacagccacctaaaagtatctcaaggaagaacattccaggtggaggtcacagagaaatattacacagagagatattcctgtcttaagacagaaataagtctgctggagctgtttaagcaagtg

SEQ ID NO: 190388 - DNA, 168 bp, Homo sapiens
taagtgaactattgctaacattatttttgggaaaataagtttaatggagcaatatctattcctcagtgattattttactgtgcaggtatgctgggaatgtggggacctttaataaccttcattgcttgctaattcagatgcttatcatttgataccagcaaaatcact

SEQ ID NO: 190389 - DNA, 229 bp, Homo sapiens
ggtaaatgttctcaactaggagttgcaccagaattacttagaaagttttttcaaagtacctacatgaacaatcttatattatatatataaggtatatataccaactatcccccaatacaaacagacattcacttattactctcttatggactatcaaaatctctgggcagaaaaaaagatgttcatctgagcagatgatcctagtatgctacacataactcctttgcct

SEQ ID NO: 190390 - DNA, 271 bp, Homo sapiens
gtaaggagacagattcctctcaggtatcagtctaagtaattcaaaggaattgggctttgctgcctactatgcaaaggattagttttcaatgagagagcagacttgtcattttgagtaagtgtgcacatcacatcatgtctcatagtcagagagagaaaaaagcagaaacaaaaaccaagacaaaaacaaggccactatgtctacctctagtccccataatagaggaaaccttgagccctttccaataagttactgtctccctaaaaaaaca

SEQ ID NO: 190391 - DNA, 547 bp, Homo sapiens
ttgctgctcttaggattctctctttgttgacctttaagagtctgattattatatgccttggggtcttatttgggtcaaatctgatgttctctgattttcctgttcccaaatatttatatctttcttaagttgtgtaaagttttctgttgttatttcttagactaagctttctaccctttgctcttgctcaactctctcttgaacaccagtaattcttagtttgggccttttcaggtagttttctacatcttatgggcaatcttcatggcttttcatcattttttttttacctctgtgtattttctggttttgtttgtttgttttttacaatctcgctctgtcgcctaggctggagtgcagtggcacgatcttggctcactgcaacctccgcctcctaggttcaagcgattctcctgcctcagcctcccaagtagctgggattccaggtgcacaccaccacactcggctaattttttatactttttggtagaaatggggtttcaccacattggccaggctggtctcgaactcctgacttaaagtgatc

SEQ ID NO: 190392 - DNA, 456 bp, Homo sapiens
gggggcgtgagatatccctgagtggtggtagagtagcagatggaacactgagaagtaatttccttgaggatggatttccatgatggaaaagaaatgagaggttctaagagatgggccattggcttgtaacccacatgaaagaggttctgaaaggatgataagatagaatgagcctgtgagacaggaaggaggaattttccttgatccaagaaccatttgccttgagtaggaatggattaataggtaatagtttcatgagtaggaatggattaataggtaatagtttcagtgggagaataggtgggagtgatagatgagaaggaagaaaactggctgtgagggacagatgtgggaatactagctgcttcttttgctgcatatcagcataagtgttgcctcaagcaatgggatctggtgacctctgatgccccttgcagtgaatgacttcagcttctt

SEQ ID NO: 190393 - DNA, 238 bp, Homo sapiens
tttagaaaggtataagtgactgtgggaatgagaatgtagcacgggagagcagttgggccatgccgtttcagtgggagaataggtgggagtgatagatgagaaggaagaaaactggctgtgagggacagatgtgggaatactagctgcttcttttgctgcatatcagcataagtgttgcctcaagcaatgggatctggtgacctctgatgccccttgcagtgaatgacttcagcttctt

SEQ ID NO: 190394 - DNA, 469 bp, Homo sapiens
tttggcccggctgtcgtgcccagctggttggtgaaacaccagtctagatgccatggtgaaggtctttgtagatgcaattaacatctacaatcagttgaccttaagtcaagtagatcatgctccatagtgtggctgggggtggggtgggggcagagccaatcagttcaaggccttgagagctaaagctaaggtttcctggagaggaaggaattctgcctccagactgtcactgaaatcctgagttgccagcctgccgtacaaattttggacttgctatcccctacaatcccgtgagccaattccttaaaataaatctctttacacacacgcacacacacaccccccccacacacatacacacacacacacatcccacacacacgtgcacacacacacacatcctgttggttttgtttctctggagacctcccagctgataaagcctccatcagtaaatataatttaaacc

SEQ ID NO: 190395 - DNA, 403 bp, Homo sapiens
cacagcagagagtagagggagggtggggagtgagggtatttatttccttggctccctttttgtgagatcagtttgggctgcctgtattcctgcactgaaagtcattgctcttcccaaggtattcttctctatataactctttctttccagattctggtaatctcgaataacttccctgcttttgctaacctggatttactgcaatacccttggggttcttttccactactgcccacaccctgttacattgtctgtttataaataaattccctcagcttatcaggagctgtgtcaattaaagtcctattttctgttgattcagcttctgaaagcctgctctttggagtcttcttggattgataagaacagtcgtactcccttacctgttttggacatctgcttt

SEQ ID NO: 190396 - DNA, 407 bp, Homo sapiens
gttgttaaaaaaaaaaaaaagtaggtgaaggaagggacaggaagaggtggggcattctgtgtagagagaacaacataaatgaaggcactgtagcagcggctgacagcattttgaatgactaaaataggagttcaggactggaacagagagaagcagggcagaatggtggaagacaaaactggtgaaggaagcagaagccagatcatgcaggtccttgtagaccatgttaagaacctgtactccattaccagaacagctgtggaaagcttttaagcttgggattaacgtgatgagatattcaatttaaaggatcactctggattggggaaggtgaagggcatgagaggatgtggggaaatcagatgatggtaagttgggctaaggtggtgatcatggagatggaaaga

SEQ ID NO: 190397 - DNA, 765 bp, Homo sapiens
gttgagtctaagtaatggggcaagttgtggggagggcactcatggttttggtggggagggcagggaccattccagctctaatcagaaggataaaggaagtaagcagaccagcagacctggcctctggcatgtgaaacagcatccacatgcccccctcccgatgtcctatcagatctcattaaccctctcccattccattatccaggcactgcctccttacctgccttgattatctcggctagctgccagggttgataagaaatctgtcccaaaatggcagagggctaacagattaaggggttccctctcagggacttagcccttcgggtgggctgtctcacagttcccaattcttccagagccaaaggaaagccacagaagcatgaagtgtcaggaagattagacagacatttctgggccacaagcctgtgtgatgcttttcagatcaaaacccaggtcgtgcctgctatgtttgtaggaaggagggagtctgggtgggaaattagagaaagtacagcaccctctgtcctgaagaacctttcatccctgaactcagaggtgtaagctgcccttctgaaacacaaatccttatctactctcattttccaaatgttttgtgtttctatatgaaaatctttagatttgctgaaccattgggccccaaaaatatggcccaggtcactcaaacctatatattttcttcctatgattttcctcagggcaattcatgtcgtcacaggtggccccaccccccaaagccttcac

SEQ ID NO: 190398 - DNA, 177 bp, Homo sapiens
accatcgtcagaggctacttcatcacagcctctctgatttgaggattcaagtgggaaagactcatgacaagcagcagaaagtcgaattgggaaaacagtgccctcagggatggggccgcgctcaggtacttagattataacctccgttgggatgtttctgaagctttcgtcttagca

SEQ ID NO: 190399 - DNA, 273 bp, Homo sapiens
gttacaaaggtgcccctctttgctgctggggggaagaatagaataagcctttctttgattttctcattattagggattcaggaagttcttgaaggggtgaatgaatggaagagaaatgtcttagtattacatttgtttcttcttcttcttagtattacatttgtatctcttgttcagaataaaatctttttctttggcatatcatcaaacggaagatgtttttagggaaagggatgacatactaaggcatttgctactactgggacctagaat

SEQ ID NO: 190400 - DNA, 711 bp, Homo sapiens
aagctggcatttaagaacagactggaatgaggctttgagaacaagatacagagatacatggcagagaaaagtgtgcaaagcagcaggtaaccacatgcacaattagatgctagagatgaatgtgattcaaaattataaaagacttgattccatttcaattataactaggtgataaattatcttaagaagtttgaacaggaggtacctgagcagaaatcttccaaagcagcccatggaatttaatgttaaatgaataaataaatggcaatagatataacaccccatgtgtgcaaacacacaatctttaagtaaattcccattttgttaaatataccaattacggaaaagactaatttataagtggatggttcaaatgaatcagccattaaataacgagctcatcatatattcaatactacttttcagggacagttgttatgaaaaatctttgtggagctgtagagtaatctttgcttctcactgtcattcctggggagagggtggcatttaatggcctcagcaagtagttctagagaacacaggactgaatgttctctttccaacatctctatcaactaggcccacataagaaaggtggcattgcccactggagctttatgtactgggctctgccagccttttaggaaagctgccatcactctcaacatgtatggttctgcatggctcaccgactacaacgtatagcaactc

SEQ ID NO: 190401 - DNA, 597 bp, Homo sapiens
gagatctgtcagtacatagctttctttctcattaaaaaaagtatataatattccatactaaggatgcaccagtttatgcagccattgatggaacttagtgatgaacatttatgttgtttacagtttccaatactgtattaaacaatgcttcaataagctaacttgtgcatatgtgagagaactgttttgtagaatagttatattactatgcttttctaacaaaacaatttcacataataaaactcccagttcattctataaatgcctcctttccataaatattttcagcaaacatacaagatggttttctcctatcttccaaattattcttacaactggctaaactggaatactaaatgatatgttttagttttagaagcaacctctttgtcttcctttgcttctcttctctttatggggacaactagaaataacccctgattaatctcaaatcacaaggctaacacatgcaaggaagacacaataagaggaagtcaaaataggaataagctatttcccttttttatttgttttagttacaggctgataaatgcaatgaaattcctcactgctgtaatcttttctgaagcccctccg

SEQ ID NO: 190402 - DNA, 285 bp, Homo sapiens
tggggcctgaggtctgggggtggagtctcctgggattgtaagggtggggaggtacagctgtgggaggatgcgaggctgtgtgtatccgaatgtaaatgtacagggcactcaagcttgtgtgcaagcaggtgtgtgtggaaggctctgtccttccgtgcacatggggtaatatacaagagttgtgtaagtggacatagctggagctgcttcacaggattcctgacagtgcttggctgggctgctccacactgggtggtggacacgaatgttcagggtaccgagctc

SEQ ID NO: 190403 - DNA, 131 bp, Homo sapiens
tgggaattatcttgggtttctgataaaaagatgaggttagcctccttctcttgctctctcttgttcatgtgatgccctccaccatgttatgacccagcaagaagaccctcaccagatgttggcttcttgat

SEQ ID NO: 190404 - DNA, 384 bp, Homo sapiens
aggtgaccaaaatggctggcttcttagctttctggcttcattgatgtcagggaggttgcgtggttaaataatgaaggaggagtgacaagcaagagccaagagagggacgtccaaggactgtttccaagtgatccatggtagaggcttcatggcattcctgttgtttgtgctttgagcaagaattccttggtacgttggttctagtaaagagatcagctatggtctgaatattggtgtcccccagaaaatttctctgtggaagctttaacccccagtgtgatggtattcacaggtgaggccttcgagaggtgaatgggattagtgtgctataagaagaggcaaagaaagatgatctctctttccaccgtgtgaggctacagcaag

SEQ ID NO: 190405 - DNA, 262 bp, Homo sapiens
ccgaagggcaagttcccagactctgctgcactcagcttcaaggaatgcaaccctggataagtaaatagcacttttaatttgagcaagaagtctggaggtggcagttctaaatttggtacagcagtctgacagcctcatcaaaacaccaagtacatgagccaattgtgtcactcctgctcacaagatggctgtcacagaaccaaacatcacatctctacatcatgggatccaaaagcaggagaggaaaggccaaactttgcca

SEQ ID NO: 190406 - DNA, 496 bp, Homo sapiens
tgtatttacagaaaaattagcacattatgagtgctaaacttcccgacttccagagcttattgcccatgagttgctccatttcttcctaacacaggaaagaatacacataaaagggaggaatattgccatatcatgggttgaaggaaaataaaatctagtgcagtctgacttagtggcccatacttcaaatttgtgccaataattcctggcaggagattgcctaaaacgtttatacaggagagcatccacaataacatcttattctatgaaatctcattcagagtcatgctttaaaaggtgtctaacttcaatgaactgactggcaatctagttatgtaattgtcaaatttgttttctagaataaacacataatttaaaataaatagaattatcacataaaggcaaagttgggacagtaagatatggaagaacttggaacgtgactctggcacagctaactgtccagctactcttgaagtctggtcaaagatgcttc

SEQ ID NO: 190407 - DNA, 603 bp, Homo sapiens
aattttctggtcagtcaaaaatcttgcatgataaattactaaattaaaacattatgttcatagtgaaatataaatcaaaaggaaatttaaggaaaaacaataacaaaatcaatagtttatatatctgtgtttatgttgtatatccttatatagaagttaccctaagtaaaaagaagtcagaactttgtcctcagcatctgagaggtaatctctaggatcctgacatatcatgcgggaggacagtgtctttgtttgttagggtgccaactctggatcactctggatagtgaaacaatatgatttagggttgtggctggccactcctttcgagggtgaggggtgggagaccgtcctccccatgtcagaaagaacaaaagtgttgtttaatctgtgaagtctgttatttgttaccagcaacagggaatacagtgtccatgacaggacagagtaacagcagggaggacaacgtggctggaaaagatgatgcaagggcgagaggacagatgtagtcaagaggcagcaggggatgaagaacaaacctcagggtctctaaaagccaataaagaggttgtaactttaataacattaataaaccataaaggc

SEQ ID NO: 190408 - DNA, 205 bp, Homo sapiens
gccacattttgcctctcagggagccgtggcaggttgcacggtggaaccggagtagtatagaaacttgctgatatcagccggcacagagcaggaacacgctaaaaaattaatgtccgtgtgcacccacagtattcaagagttttcacatcattgtcagaatactgtgtaatgaagaagttataatatgtttctcctttagtccgta

SEQ ID NO: 190409 - DNA, 448 bp, Homo sapiens
cttatttgtgtgcctcttgatttttctcttatggatcaccaccttaaaaaagttaaaaaaaaaaatagaaaagtcttcattagatttttcacacagaccagactagaagtaaatacagcttttgcttactcaaaggctgactaaaccagcaatatgcaaacaaagatgatagcaaatggctcagctgaattggtaaaatgtccgctgtgtctttcttgtaagaccgcaaaattgagatctgttaatatcaacaatccttacaaaagagtaagaaataataactgattgcctttgtctcttccctttaatctgacaggccttcaagcacttagtaagtgcatagcaaattctcaaagaactagctaaatatcattttggtcaacaagaaatgatttgggcaagttttatatccaaaaactttattttttggaatcactgcatattccaa

SEQ ID NO: 190410 - DNA, 358 bp, Homo sapiens
ctatacctaataagaaagttaaactaccaaaatagacatttcattaattttaaggtgttttactcacagattgaaaggaaattactgaattctcagaactaatgagcattatcactgtctctaaaagatgctgattaagactagccaccacagaagatactttttctgaagttatattcatgagagctctttcaagtgtactgagaaaattaaaaatgttctgaaatattactttaactttcataaagtgtatgctttttttcacttaagaatcaacaagcggctgggcatggtggctcatgcctgtaatcccagcactttaggaggtgggcagatcacgaggtcaggagatcaagac

SEQ ID NO: 190411 - DNA, 211 bp, Homo sapiens
ttcaaggctaaattactcctccaaatggtctcttctcccaagagtgtctctcttcacattgatcctcaccgtttctgagcttctacatacataattagtttcatcttgtaattctcacacatttgagtactgccttacattgttatataactattccaggtgtgcaaggacatctatgacctctagaggtcagagatctttgccttacact

SEQ ID NO: 190412 - DNA, 265 bp, Homo sapiens
agtgaatgtacaatcagacagaaggaagggagggagggagggataaagaggtagttttaggagaccatggggttaagtttgagatgatggtagagaactacaagtgaaactagtcagcaggtatgactacctattcccaaacctcatgaatagttaaatccatgctgaactaaacttgtcattaggattttagaaaggaagagataaagaggggtttaaaagagtgtgagaccttctgaaacaatacctgctatacttgtaccag

SEQ ID NO: 190413 - DNA, 659 bp, Homo sapiens
aacaaaggcccagacgttggcaagaagcttcgagtgcacccagacaggactgaacccaggtcaatctaatcaaggtggatacactggaactagggccgcccttcaagctcacaaccttcactgaggcttaccacatcatgcaaattaaattattaaggccagcttttaaagtgtgtacatggggtggggggaaggcattttctaggtttcattatttctgttaaaatgtacacaattcttgaaataaaaatctggacaatccagtggaaacagcaaataaaatctctaaactataaaaaagtctcaaacactttaattgtgaccttgtgaaatacgactcatataatctggcaccaaggatacccatatgtaaaatggaaagaaattactcttaaaatgtccttagggtcaacttacccggggctggcgggccaatcatgttgatcgaataaactacgtaagtttatggatcactttcactctgtttcggtatacagcacgctagagggagggggagttaaattcatccctgctcttggatctccaacctcggcagcagtggaacgctcctctccagcatcctgaacatgttcaagttttccccaaactaagttcctgtccactctgcccctgtcctcctaaaagctggagcaagctat

SEQ ID NO: 190414 - DNA, 230 bp, Homo sapiens
atagagatttgctacacatctatagattgttttgggcagtattgttaacagtattaattctgatccatgagaatgtgatgtctccatttgtgtcctcttcgatgtctgtcttcagtgttttgtagttttctttgtagagattttttgcctccttggttatttctaggtattttttttgatagctattgtaagtgggattaccttcttctttctcagctaactcattattg

SEQ ID NO: 190415 - DNA, 337 bp, Homo sapiens
tttgtggatcgggctcacttttatttgcaatatcaattctaatgtttaatattatgtggcatcatattacttgtattaacttagattatgtggcatcatattgcttgtgtcactgtaaccctgagccctgtgcctaatgttaaatattgtctttgttttttcctcagatagtccctaagaagagtcctagaagcacctaccctctcattttacagatgagcagatgagcaacttgtacaaaagtcacctaatttgccacctaatgccaattccaggactaggactatagctttttttcttttgagacaggtctcactaagatagacagcctcactat

SEQ ID NO: 190416 - DNA, 373 bp, Homo sapiens
acgttgacacttcagaggagagaggacacgaattcattcttgaagtataatttccaacacaaaattttacaagactctaaaagatctttgtaagactataactgctattaggtaatacctgacgaaaatcaacaggactgctgaccatgacattaacaacatgcagaatccaaaattccttagcatactactcaaagccctcggtaatctggtctcatttcaccttattgatctatttcctgatacggcacatttaatttcttagaaaaatatcaatttttttcatcacatgcttttcttttcttttcttttcttttcttttcttttcttttcttttcttttcttttcttttcgagataagagtctcgctctg

SEQ ID NO: 190417 - DNA, 195 bp, Homo sapiens
ataagattcagctgtgagaaaactggggacaggatattccaggcaaagaaaacagcttctgcaaagcctagagggaatgaagttggccaatccaagcagcagaataaagccaatgtggcagatcaaagtaagaagcaaagaggaggataaaatgagataaacaggcagagaataacacatcaaggccaactagct

SEQ ID NO: 190418 - DNA, 439 bp, Homo sapiens
agtctcgtttaaactatgtgcaggaatagcaaaggaaatccagcaaatctggcacagtcattatcaaccctggccatgcagcaaaatcaccagcgaaaattttcaaaaatacacgtggccaggccccagcccaaactactgaataacaatctccaggctttcacctgctagactggcaaaaatccaaaagtaaccactctggagaaacaggcattcctagacagtactggtgggatacagaatggtacaattctcatgaaatttcacagtagttaacaaattaaacatatttatactttttaacccaggaatcccatatttaggagtccagtgagaagatacagcccacaaataccaaacagcatgtgcccccggacctttccctgtaatcatgcgcctgcctatccagagggtactggttggataagcttcctacatc

SEQ ID NO: 190419 - DNA, 707 bp, Homo sapiens
  misc_feature (15)..(15): n is a, c, g, or t
  misc_feature (18)..(18): n is a, c, g, or t
  misc_feature (63)..(63): n is a, c, g, or t
  misc_feature (76)..(76): n is a, c, g, or t
ggccattttattttncanttaattagggccaaaaaaaaccctggggaaattggggaaggtaancccattttcaagnattaacaacatgtggcatatgcatacaacgaaatacagcaacgcatcactaagacagaatgtgttctgagaaacgtgttattaggtcatcgcttcattgtgtgaacttcagagtgtacttacacaaacccagatggtacagcctactactcaactaggctatatgatatagcctactgctcctaggctacaaacctgtacagcctgctactgtactgaatactgcaggcagctgatacacaatggtaagaatctaaacatataaaaggtacagtaaaaatactgtattataatctaaagagaccactgacttatatacatcattgattaaagtttgttacgtggtgcctgatcatattactaatccataaaagggaatgaagtatggttacatgctataaatgcaaagtgaaagaagctagacaaaaaggtcacaataggaaatgtccaaaataagaaaatctacagagacaatgtcagttagtgattgtctttggatgggcagagggagaatgaaaggcagttgctaagaagtacctgcgttttttttgaaatgatgaaaatgttctaaaattaattgtggtaatggtcatacaattctatgaataaactaaaatgcaatgaattgtaca

SEQ ID NO: 190420 - DNA, 470 bp, Homo sapiens
catttctgcaatatatgcttttggaattttgaaacagattgtgttgaatccatagattattttgggtagtattgtcatcttaataatgttaaatttctcaatgcatgaaaatgggatgtctttttatttattttgttcatggtccaaaattaaaatctgcaaaagaatttatattcaacaaattccaggccaggcatggtagctcatgcctgtaatcccagcactttgggaggccgaggtgggtggatcacctgaggctaggagctcaagaccagcctggccaacatggtgaaaccccatctctactaaaaatataaaaatcagccaggtgtcgtggcaggtgcctgtagtcccagctactcaggaggctgaggcaggagaatggcttgaacccggtaggcagaggttgcagtgagctgagactgcaccattgcactccagcctgggtgacaagagtgaaactccgtctc

SEQ ID NO: 190421 - DNA, 324 bp, Homo sapiens
ccctgaatagcttcaggatggggcaggtcaccagaaagactgaggcatgattagagggttggaactttcagccccactctccaaccccaccccatgacatctgggaaggtaaaggactaaaggttgagttgatcaccaatggccaatgatgtaatcaatcatgcctatgtaatgaagcctccataaaaacccaaaagcatggggtcagagagcttctgggttgctgaacatgtgcaggtgtctgcagggaggcatgcccagagagggcatggaaactccacacccccttcctcataacttttcctatgtatctctttcatctga

SEQ ID NO: 190422 - DNA, 517 bp, Homo sapiens
ctgagacaggagaatcgcttgaacctgggaggtggagagtgtggtgagctgagatgtcaccattgcactccagcctgggcaagaagagcaaaacttcgtctcaaaaaaaaataaaaaaataaggctccaagcgctgttgtgagggttaaatgaactagataattaatgtaataaacagaatagttttggcattcaacaaacattggctgttattatattagctattaaaaatttaagtcatttaggtcaatgaaacaggagggtttccagaattatacccaattaattatacatgggaaggtgatgaaggtagcatgtcaaattggtataaaaagatggaatattaaataagtggggatactgtatcagataggaacatatttggttgcaagaaacaaaaattcctgtgattactagcttcactgtgagtttattttttcacgtaataaatccaaggttacataatccataactgatatggcagtttaacagtgttattaagaactcaaggtccatt

SEQ ID NO: 190423 - DNA, 575 bp, Homo sapiens
atgttggccaggctggttcgaactcctgacttaaagtgatccacccgcctcggcctcccagagtgctgggattacaggtgtgagccaccgtgcctggcctgtttaatttcttaatctacaacgtatgtataccagagaaacttaacaagatcttccgttgtgatcatacttggccatggtttttcagtgtaatactctaaattacttcttttatacactatttgtaaatgactttttctcctgagataatttcaaagcttccactgcattttcacatttctcacttccttgagtgacttaagtcagttaataattagaattttattttgggtgtagatcactttaagcgaacctgatttaaagtctagcttccaaatctttgataaatcagatgagcattatttagttttagtttggtacagtatgaaataaaagtttgtggtctaaagattatagcaagagcatattttaatgttatcagaggaaaaaattacatgtaaatacatatttcctcatatttacaagtaccccattttctggaaaaatgaaatgcttttggctccagatattgctta

SEQ ID NO: 190424 - DNA, 319 bp, Homo sapiens
gtccgcatccttctccagcagccttaactcgatcagggctgcagcggctcgctggcttgaccagtgcagaaggggcgtgaaggtgaggggggtggggtaggactctgaacttcaagcactggagtttgccgggatcgtgaacttgcagggagaggcggtcctcatccagtgaggtctgtatcgccacctacacccacacatccacacactgctttgctagctagaggaatgctctggagtaggaccagtgctgtcaaagaaggaaagtgggccaaggcgccaaagtccattaaaaaggaatagagccatcacggagtgg

SEQ ID NO: 190425 - DNA, 206 bp, Homo sapiens
ggttccaggcgtgagccaccacaccctgcccaagtctgtgatttgacctgccttgtatggataaataaaattgcaggttgcgacgaagacccacctctctcagcagggcaggagataggcatgaatccttgccttggtaatcttcctgaggtaaatattagtacagattttaaaataaccttcccttttaaaacctgagatttgat

SEQ ID NO: 190426 - DNA, 406 bp, Homo sapiens
agcaaatagctttaaaatagcattaacagtataatctgtttaatgcaaactgctaggatgtattttgcccagatcctgtttaagcaaggcttgatattttacatgctccttagagtctgtcttgttgggcctttcatcttactcttatataaggtaagtgctgatcttgttaatcatcttactcatatataaggtaagtgttaatcttgtaatccttccttgtttctcaaggaaggaaagcatacctctagaagcacattaaaggacttgctattggtttactctgtaaaccaggaacctgacatagttgctggtttctgagtaaccacagcagtacaacaaatgaaaggaaataaatctagttttgattttcaaaatgcaggcctattccagccaccccatcact

SEQ ID NO: 190427 - DNA, 357 bp, Homo sapiens
gttttgtggggaagacattaatcaaataataactcaaattattacaggttatgacacatggaggaaacagggtgagagagagaagagactttagaaccattgttagggaaggcctttctcaggaagttgcatttaaactgagcactcagcatgaagtggagctacccatgtaaaagggtgagggggagttctattccgtaagaggagaaataatatgcaaaggccgtgaggcagataaaagtttacagtgttaactgaaagagtggttggagcctgattggattgtaattggagcctggtgaatgaggagagtggcatgagctgggcaggtccacagcattcaagatttggtaggcc

SEQ ID NO: 190428 - DNA, 395 bp, Homo sapiens
tgactctagaggctcccccaatttgacgcggagtctaggcccacttcaaaatccaactaagatgtttctttagggtctactatgtttgtgtgattcccctcacaaattaagcatctgcagtgtcccctccagagaccatgaaggagaagacaggattcaagagaaaacactaaggatgcagaagtacagaggaaaggaaggggcagcacagctcagaggaacatgaagtgtttggcgaaaggggactcgtggtggacactcatgttgggaggagtaggaaaaattgcaagtatttattttcaaagatgttttcttaaaaactaggcaactgaaaggacattactacaattcttgaaaatataaacacacagctgaatctgtttgacaaagtagga

SEQ ID NO: 190429 - DNA, 340 bp, Homo sapiens
taagccagttttacttaaagaatgcttgatgaaacagtaacaattattttattaatttacttcatttgcacatctttttgttattctatatgaggaaatgggaaatatgcataaagcacttttgctgtggtaatactaagcatgacacctgtttgaagaaaacttgtatccaccacaagttttgcaacttcccaatacttataaagactttctgctagtatctatggtgatagtaacaaaaatagtttttagaaagatattagtgaaatgtatcaacacttggaagccctgcataactcagcaaaccagtattttttttttttttttttttttgagacag

SEQ ID NO: 190430 - DNA, 356 bp, Homo sapiens
tggagtagaatttagcctgctgaagtgttcatagatgacctggcatatgtccctagaagttggggaaaatatattggcctagaaacttgtctacttcttatctagagatttctgaagatgggaggcttgggtagagcagcctgcagcagcagacctaatagggccacagaaatagtatacctgggtggggcgggggagaagtggagagtacctctcacatttcccctatctacccactaattctctgagaccctagaaaaagaacaccactgactcccatggctcatatgagagaaccaggactggggaagaagcaagggctgctggtcaaacacatcaatgccccatctagagag

SEQ ID NO: 190431 - DNA, 616 bp, Homo sapiens
agtgtgagctggaccagcctctctcttgcttaaatccctcataggtttcccccgtcggagcacagaccaaagccgtgctcatctcccttatgcttcaggctcctcccagatgcctcatccatccctgtcctccgtggacttttcacagccttaactgtctaatgaattgtgctgactgctgtgtggagactgtctctcctggtggattgtatgctctgcaagccccgggacttcctctccccctgtcacctgcagagagtctgactactcaatggaatgtagtgcaaatctgtggaataaacgtatgcataactagtgtgcatttgtggaatggagcagtcagcccctcattctgggcgagggctgccaaaccccaaaaccaccatgccctcagcgggttttccacagagcccagaatgtttctctgccaggtgctgggctgggatggttcttgcaggatcctattggagcttcctaacaaccccaccagggcagcttctgttgtccccattttccaggagggaagtaaggcccagagaagtggagtggcttattctcggccacgcagctgagtcagagctcaggcccagctgactcaagtcttgttcagtcttta

SEQ ID NO: 190432 - DNA, 265 bp, Homo sapiens
aatactaattcaggctgagtcttagcaaatagtctgtttataaagagaaatcatatactttatcatcttacatcttttataaagagaaatcatgtacttatcatctttatatgtctttttcatatattggcttttcccaaaaatgtgatgccattggtacttaagcttagagatttttgcttccactatttgagtaacgatgtgaggtaatttaaaaaataataaaatagtccgggtgcagtggcttgcgcccgtaatcccagca

SEQ ID NO: 190433 - DNA, 302 bp, Homo sapiens
attaagtgaaattaaacattgccagaacagattcgtatggtaactaacaaatcatctctctctcaatcattttaaactgtacacatcaaggacactcttgttaagtaaacgagcccactttgtgaactagatacccatttatttttatttgaatgcccccaatttgtctcttaaacaccttttatgtttaggaagaaattcaactgcgaacacccctaccattgctccgacctccaaaaatggtacttacaaatgttccttgtttggatctgtcgacttcttctcccctcccccgacatttg

SEQ ID NO: 190434 - DNA, 384 bp, Homo sapiens
tcaaaaatagaatgtgaagtgtaaatcagtcattggcactggtacagaaaatgggaacattttagggaaaccattaaaagaaaatcagaaaactgctgctgagggggaaaaacagcctcatggaattcatgaaacagtaccacattgtattgcctacaaagggaaaaatcttacatttctgggtgttttctgaaagaatatttgatactttgatgtttgaaaagaagggctaaaaatggaaatgtttataacagggggtcaatttgacatttcttagatgatgcattataataaatcatttttagagaggctaatatccccaaaacaaaatttccatttttgtattccttggcccagtataagattacgagtcatcgttttttt

SEQ ID NO: 190435 - DNA, 265 bp, Homo sapiens
caggcatggtgagtttaggttaaggtgaaaatggaatccctagaaaagaagttccagcagacaactagacatacaggaattgagctcaggaaaagagatgaagcgggctagacatagattcaggaactggccatagagtttacagtttacagtgaatctagggaagtgggtgtaggtgaggttcctagaggaaagtgtgaagaaaaaaatgccaaagcagaagaaagacaaaaaaaaagaggcatcaggaagagaagggatcgcc

SEQ ID NO: 190436 - DNA, 275 bp, Homo sapiens
gctcaggggaatttttctgctcacttggtgccaggcagattgtggagaaggataagcagatatggaagaacaattctcttactgtctgctttaagttttttttacttctctgtggccctagaaactgtctcctccttatattgagatctgggatactggtggtgatagcttcagtgctgtatatttggttttggtattctgcagggggaaggagagccagtttgcttctatgctgctattttgcactagaaaagatacctttttttttttttttt

SEQ ID NO: 190437 - DNA, 452 bp, Homo sapiens
cccaggctggagtgcggcggcctgacttcggctcacttcaacccctcccaggttcaagcgattctcctgcctcagcctcccgagtagctgggattacaggcatgcgccaccacacccagctaatttttatattttagtagagacagggtttcgccatcttggccaggctggtctcaaactcctgacctcaggtgatccgcccacctcagactcccaaagtactgagattacaggcgtgagccaccgtgccctacctcggcctggatgttttcttttcaaggcatttttgtaggtacagaattttatttttctattttatttttttgttaggctccctcaaatcatgggaaataggagattttaatgagtatttaaggacaatattttctgggataggatctgaagccaccaatagaaacaaaagcggttgcagcagatacagaagggtgttg

SEQ ID NO: 190438 - DNA, 394 bp, Homo sapiens
tcctcagagtaagcagtggtggaaacttggtcgaattcagatgaaagaggactatatagtcggggaatcctgaaactctaataaaatatcttatttctcaaatctgcctcacacatttaactgagttttgaaaatcccagcatgactgcagaggtacagaaacaccacagagaatattttgagccttaatgaaagtggtcataaaatcagaatttaagcgttcaaagatattttaaagattacccagtctaatagaagaaaactgaaagtatcataagaacacttttaacttcaggtgaaccagaaccattcctgcttggtctactatcccttcctcagtctactcccgtctcagtggcctcgtaagtcaccacagtgaggcagcgctcctttc

SEQ ID NO: 190439 - DNA, 563 bp, Homo sapiens
aatgccctccagccagagactcctgggaacatacacctggagtggaacaagttgggtttattcctccttgtatggaggggtaatgcacaccttgcagaactgggagtgtcttagcaagaggatgttaggagggaattataagagctgagcttgtatgagatgatatgggggagagcttaagaaagtgggcattgtactggattgcttactttcaggaggcagagacaacgccatgattgattatcttaattaaatcatctgtaaggagggaagaattgagtgaagctaatggtgtagttggtgaagaagcagtcactcttactagctggaactgggaatatatgtttattttgtggcttggagagtgttcatattttgtccatacctgaatatgcagcggtcttgtttttgtcttgatctgttactgtcacagagtggcctcgtctaatgttgctgttctgtgaaattgttcatgttcaacagaataccaagtgagtctcagaccagctcatgataacataaaggccatgctagtaatacaataccagagcagctctcaaata

SEQ ID NO: 190440 - DNA, 469 bp, Homo sapiens
ttccctgagtagctgatgtagagggatttgtctagacaggcagatagatatgatccagtgccaacactgtaatgctggctgaaatccagatggttgtttgattgttaataaaatctatcttgtgggtgggtgggtgtcaggccttcatcattatatggtgcctgtcagatttatctacagacagaaccctgaaaacagcttgtgcctgccccgcatttttgaccccttgccaagatactgtactgaaatctatcaaaatcaggcaacctgggacaaatgcttcgagattccaaggcttaatagcaacagtgctgacttctaagatggagaagattctcaggaagggcatccttgtccggtggggaaaaattctagattaagaggtgaaccagatgctagctctggctctgccgctaatctgagaccctctgggctgtaaaataaggagattgggttagaatggttcctt

SEQ ID NO: 190441 - DNA, 294 bp, Homo sapiens
cgagtggggagagagaaacactataggaagacagtaaaagcatctagactttgcaattgtactgcctaaaatgtttttataacagtaaagttgtactggctaaaatgtttttatacttctgttgtgtgccaggggtcaggaatgccgtggagcaaacagggtgcatcctctgtggtatctgtttaatttaaacatttgttggggtaaaatattatgcattttaactagtaattaatattaaacatagacacacacacaaacacgaattgttttttgactaggaaggaaccacct

SEQ ID NO: 190442 - DNA, 381 bp, Homo sapiens
attatattggagagccactgcgcccgaccgagttgaacatttaatgtcagactaggccagagtttctcaatctttttattctcacttcccaaaggagccgttggagattttcccctcaatctctctccttcatgaaatttcataccacaaatatagtatgttttatttatgtactgcgaccctttgaaggatcacaaaccaatataatagtttttctttttaacccgtcaaggaccagtttttgcccctgttggaaatgcataaactggactgatgaattggtatagatggcttttatcatgaggatcagaaaaacttgaaattccttggctacgacaccccatatttatcaccgtatagggagtaccttgttatggggag

SEQ ID NO: 190443 - DNA, 198 bp, Homo sapiens
cctctagtccaacagttatcactgcgtgagttcatctgtactgcccctaaccattagtgagcagcttgtgcttagacatttgtaattgctaccttggtgggtgtccgttacatttctaaataactgcctatctaagaggttttctttaatgtcattatgatgatttttgaatgaacatttccagagcatcctaagtgg

SEQ ID NO: 190444 - DNA, 415 bp, Homo sapiens
tacagtggcatctgatttctacacgagctcctgtatatttgggacaaaataactcactggaggctttggtttaccactgctggtaccagaactggttgcattttctttgatctgccctttagataaggaactccacagaggttgttccatgtcatttgctttttggaaactgtacatctgcaagctttaaagcagtaggttcagacttcctggaagaactgacacttgaagctgactagggtctacttgagttcatactcactttggctaagccacagtatgagggaagggtgtccaggaataacgcttccatttttatcttgttcattcctgaaaatccaacaggagattcttttcactccctaaaattaactgttctgtgtataaagcatatctggatatctgatcttaaatg

SEQ ID NO: 190445 - DNA, 430 bp, Homo sapiens
ctgcttatgtgaccctgggaaatttcctaacctcactgagcctccattgcctcatctaacaggatgggtgcaatagtacaaatattgagagattagataatccaggctccatgacaggcacccatagatggtgatggtgatagtgatggtaatattggtgagagtgatggtgatgatggagaatatgaggaaggtaagccttaaaggataatttcctaactagttttttgggggtttttttgtttgtttgtttgttttttgatagagtctcactccatcactcgggctggagtgcagtggtgcaatctcggccctacctgcaatctctgcctcccaggagaatcgcttgaacccggaaagtggaggttgcattgagctgagattgagccattgcactccagcctgggcaacaagagcaaaactccatctc

SEQ ID NO: 190446 - DNA, 636 bp, Homo sapiens
cattgccttggtactttctgatgccttcagatttttttattttttagacacagagtctcactgtgtcggccaggctagagggcaaaggtgcaatcatagctcattgaggccaagtgatcctcctgcctcagcctcccaagtagctggaactccaagcacacaccaccatgcccagctaatttttgtatttttagtagagacgggggttcaccacactggccggggtggtctaaaaatcctgaccccaaagggtccgcctgccatcggactcccaaagcgcggggattacaggtgtgagccaccgtgcccagcctttcttttcatttttaacaaattttcatcaatactgtatattctatatacattaggttgaaaaaaaaatccttgtataagttgacccatgatgttcaatcccatgttgttaggggtcacttgtgcatgttaactatttatggagatacatattgaggcagtttcatagaactgagattggtaagaaagtaaaccccagtataggaggaactgcttccaaacatttccaccgttatcaccctaattcaggccaatgtgatctctcccgtgaattctttacagtagccatgatactggactccttgtgactacccttgcctcagt

SEQ ID NO: 190447 - DNA, 398 bp, Homo sapiens
atcagaaactagtataacaaatattcgtaaaacatatggagttggtcctccatatccatgaattcatagatggaaaatatatttttaattgtgtttgtactgaacatgtacagactttttcttgtcatcattccctaaataatacattatgacaactattcacatgacaccaacattgtattaagtattataagtgagctagagatgatttaaagtatacaggagtatatgcataggttatatgcaagtgccacaccattttatatcagggactcaagcatctgtaaattttggtgtatgaagagaggtcctaaaaccagtcccccaaggataccaaatggcagccacactctgaaaaaatagattgtactcaacttttgaaaattctcattgtattt

SEQ ID NO: 190448 - DNA, 297 bp, Homo sapiens
gcaaagacacatacattatgtgcatggtatttaaagatacataaagtaaacatagcaaaatcgttaaccactagtgaatccagataaaggacacacaggtgttcactgttccttttttcgaacttttctctaggtttgatgtttttcctaagtaaaaagttgcagaaaaacgaaaactttcacttcagactctgtattgttagatgctggtgaattttttttataaagggtcagatgataaacattttaggctttagaggtcgtacaatctctactggaactattcaactttaccta

SEQ ID NO: 190449 - DNA, 235 bp, Homo sapiens
gatctaactaacatttatgagtttttgctccctaacaggctctgttttgtgctcttcactaactcttcacagtaacctaatgaggcaggtattgttgtcaccaatttacagagaataataaagcaaataatgcacactcatgcaccactaacattttggtcaacaatagggcgcacatacaatgatggtctgttaagatgataatgaagctcaaaatttcctgtcacctactgac

SEQ ID NO: 190450 - DNA, 355 bp, Homo sapiens
ttggggaggggttgtgtcaggagggtactgaactggagaacaagaagtatggtaggtatcagggaggggcaggctcggaggcagacccggatgggagtctggggaaactcagggcctggagcagtcattgggcaagaagatgggcagttctagtgatggtcatgcttactgtccttggtaactgcaggcaccctcaccgtcttacattcttctttttcactgagttctctccctagggcctttgcccatgatattacaggaggagcttttctcccacatgtccagatgactcacttcccctgcttctttcaggtctctgtccagttgtcagcttatagggggccttccctggcta

SEQ ID NO: 190451 - DNA, 260 bp, Homo sapiens
gggaggtaataatggggacaatgatgatgacagccagtagcatttactacacaacaggaaccacgcgaaatgcttgacaatcacaatcacttttcactcgagtatctagttacctaaccatcaccattaccacgaactaatttaattcttctttgatccttatgagaaagatactatcattatcctaattttagacataaaaaaggatttttttttttttttttacaggaaagagaacagcaaaggcttagtggttatgg

SEQ ID NO: 190452 - DNA, 431 bp, Homo sapiens
gtaaaaagcaaacgtaaacaacctagatgcccatcaaaagtggattgggaaaataaaatatggtacatgtataccaaagaatattatgcagccatgaaaaataatgaaattgggttctttgcagcaacatgggtgcagctggaggttgttatcctaagcgaattaatgcagaaacagaaagccaaatactgcatgctctattgtataagtggaagctaaatagtaggtacacatgggcataaagatgggaatcatagacagtggggactacaaaaggggggagatgcagtggtttaaaaagcacctattggacactatgttcattatttggctgatgggatcaatagaagcccaaacttcagcatcacaaaatatacccatataagaagcctgcacatgtatccactgcatctaaaattaaaaaaaaaaaa

SEQ ID NO: 190453 - DNA, 488 bp, Homo sapiens
agagcctcccacctcagcctcctgagcacctgggatgataggcatgtgccactatgccccacagaaccgttttttaagtgtgatattacataagcgtaaccctaacccctgtccttcatggtatggccaatctatctctaattatctacatctctctatataaatttgtgtttttacttctaagaattatcatagttcattagtagaattaaatattcagtaaatgtttcattttgactactgtttaatcactgttgggagcaatgtgaaaattggtaacaccaatatattcaaatatactatccaaagattttcttttactcaacaaattttgaccttctatgtgtctgtgacactatattagatcctatgggtaatatagagatggaagctttggttttttttctgccacaagacagtgggtaaaagagtttagactgcagtgggtgaggtcacagaggttcagggactgtgctgtggaagtgtgg

SEQ ID NO: 190454 - DNA, 536 bp, Homo sapiens
cctgccaccacacccggctaatttttgtactgttagtagagacggggttttgccatgttggcaaaaaaaaaaagaaaaaaaaagaagggaggacatgcataacatctaacctctcgtgcttccacatttgagcaaaggacagtgatagggcagtgacatctagtggtctgtctgtggaagagcctccctgggctcctcttgcgtgtgagtcaccttaatagctttcaaagttgtggtttatagacttcacgatatgtccagagtggaggtgccattgtttattatttgtggtttttgcatattgttctgtaaacttgggacaggaaagttctgaaatgcagtgctttaaagcattgcccaagaaactcaatactgtccaagaagtcatccacccctctttttatataaaaccatatcagtaatcatgttcatttctattcaattttgttacaaaattaatttttaagaaaatttaagcaatgaaaacacaatatacacagtcagtgttcacatctttaggtattctcgtgctaatg

SEQ ID NO: 190455 - DNA, 486 bp, Homo sapiens
gaataaatgaatccaagcctttccctaattctcactgccttatgcagactttgcctcattacaatagcttaaatgtttcaaataattcttcctaagggggacagcaaaaatggtcagtaggaatccatgccataattatgaggaatcatggaattcttgaagtggggctaaggtcagtctaggtcagccagtcaggccaaactggaagaaatatttcttgccatctccacatctaagaactttcttgctgaaaatagccagagaagctaaactcatctttctttaaactacagaaggaaacgaagggccagagcctccatgaatacttttaaccctggagtctcgaagaaagatcagagctggacttaaggccagctaggagaatgtgctgagaatgaaaggctgtgcaggttaagtgattgggtgggatacactcactgcacagagtaaaagcttgtacaactcagcacatagccctgtgaatta

SEQ ID NO: 190456 - DNA, 918 bp, Homo sapiens
tgggctcagaaggctgatgctgggaccatcttctttcattctggcaaaaccgtgggtttcttcagaatgtcaaagtgcagaagggcgctgtgggtggcaggatgcttgctggccaggtagcagatggaaatcagtgtccctgcccacccaggaggagccaggagcagaaggtgaaacagtgagccgtggagatgctcgactcttcctgagattccttccatgatttccagagacggtgaagtcacgatgcacagctctccagcatgtgcatctcctcctcaaatgccttctgcagggacaaagaggactttatcctcaagagtgggacacagttctgtagcaaaatgtggcaggttgaatggaaataatgatcttcagaactttaagaaggagatgacccagatgaaatagaaattgggtaatttatcagaaagcctggaaaaacatctgagagagacccctgcaggagactgaggtctggaagggctgaggtagcgtattcttattctggcctccacaagccgcatggactcctcctatctggcctcgtcacctggcctccaccagcctttttcctatagggaagccactcacgctccacagttctgggaaacggactgatgagagatttagttctggacagccgcccctcaactgttcctgttccatgctctgacacctcgggttggcctcagacaatctactcaacaccttgtaatacatttatagacctgtggctcaggaaaagctgtggggaaggacagagcttcagcaggccaagtcccaagcctgtggggccttttcttcttgaactcatgcagtggctggcatttctagggagagggctgaagttcagttcacatcgtcccatttatggaggatctctcttggggttattcttccaaggagcatcagcaa

SEQ ID NO: 190457 - DNA, 188 bp, Homo sapiens
tactaagaaaacaactgaaaaatagtaaaaacaaaagacaaaagcaataaaataatcatacgcttaaaaaaactattaaacacaaaataaggcaataaaagaggtacaaacaaacagaaaaagccaaaagatacacaaaaaaacaaatacctggccgggcatggtggctcacacctgtaaccccagca

SEQ ID NO: 190458 - DNA, 409 bp, Homo sapiens
gatttttataagttgttgaaggtggtgataattctagagtgtaggcacggagggggccagcaggcaagaggcaatgggactgtaacgaaacaatcccaagtctggtgggttggtttggggctgctgcagggaggcacgggggcagtgaggctggaactctgagaggcagccccggaggtaaacctccattcctgacggcactctttttttgagcatggaagaagtcagaacacgcgttaccccttgtgttagctctctgcatgagttcagagtatccctgggtctgaattaaacaaatgacattttacagatagattttacagatacgttatgagtcgatatttcttaaagcatgtctaccttccataatgccagaattcctccttttcctttgtgaggtgaagatgaa

SEQ ID NO: 190459 - DNA, 492 bp, Homo sapiens
tcatggagagctaattacagcatgatgactgtagttaattctattgtatacttgaatctgctaaaacatagatcttaattgttcttaccaccccctctcaaaaaaatagcaatgtgaggtgatggataggttaactagctcgattgtttgataatgtaattcacacactgtataccttaaatatatatagtttttacttgtcaattatacctcaataaagctggggggttagggagagaaacaaaggaactctctgaaataacaccactgtagacctaacttcatgaagggctatagggtgtccttttctgcagaaataaagaaagaagccggaccgaaaaaagagaaagaaagaaaagaaaaaactgtcttaaaacccactggctatgaaagaacactgctgttgaccagagtggaaataaatctagtgtcaaagatgtctggtgtcatttttaaaaagcagcagcaggaactatttctttcaaatggatt

SEQ ID NO: 190460 - DNA, 327 bp, Homo sapiens
agcaccaaatgttggtgagggtgtggagcaacaggaactctcatgccttgtgggtggggatataaaatagtgcagctgctttggaaaaaggtctggggctatcctgtaaaattaaacatacacttaccctttgcccagctatttcaaccctagttatttatttaaggataatatgaaacatatggtcacaagaagacctatacaacgttctagccagaaaatagaggccaggtgtccattacaggagaacggacaaacaaatggcggtgttttcttacaaacggaatggtgtggtactctgcaacaaaaacgaatgaattactcata

SEQ ID NO: 190461 - DNA, 157 bp, Homo sapiens
gtttagctacattccaactagccaacatcccacatagcattaagagtgcctgagaattcaaacccactacataagagttgctgagactctgctaacacacatctaattcctgtgccaccaacccccacccccaaacactctgaagagtaattgagat

SEQ ID NO: 190462 - DNA, 897 bp, Homo sapiens
ggtagagacagggtttcatcatgttgcccaggctggtctcgagctcctgtcagctgttatacttctatgtgttcagtgcttttgggaggggtcagagtggtagcagtgcttctcagacacacttttgtgagtgtgatgcttcaggacctccacgttgccccatttttatctggggcccctctctgggctggagcactctcactgggactgtgtcattcatttgtttagtcaacaaacatttatggaacaactgctgggagctcacctgaccagttgatacaaatatgaataagacatggtcttgatcttgaagatgctgtcagcttggtggaaaagaagagcacaaagaccgggcgcggtggctcacacctgtaatcccaacactttgggaggccgaggcaggcggatcagctgaggtcaggagttcaagaccagcctggccaacatggtgaaaccccatctctactaaaaaaatatatatatatatacaaaaattagccgggcatgatggcgggtgcctgtaattccggctactcaggaggctgaggctgaggcggaagaatcgcttgaacccaaggttcaaggttgcagtgagccaagatcatgccattgcactctagcctgggcgacagagcaagactgtcttaaaaaaaaaagagagaagagcgcagaaagaccctcatcatcatcatcaaacatcaaacattgccatcatccgacagtgtcaccagtgcactacaagacatgtgaacaggaaatgatgggcatacggagaagggcccttgcccagccggggattcaggaaggcctcctggaggaggtggaactgagccaagtctcaaaggatgagtgtgagttagtcaaaaggaaagccttctgggtggaggggacttcctg

SEQ ID NO: 190463 - DNA, 262 bp, Homo sapiens
cttggtgatctagaggatccctactgttcccaaacaccatcacctcatcatcatcatcaaacatcaaacattgccatcatccgacagtgtcaccagtgcactacaagacatgtgaacaggaaatgatgggcatacggagaagggcccttgcccagccggggattcaggaaggcctcctggaggaggtggaactgagccaagtctcaaaggatgagtgtgagttagtcaaaaggaaagccttctgggtggaggggacttcctg

SEQ ID NO: 190464 - DNA, 1624 bp, Homo sapiens
atcatgtgagcccaggaggccaaggctgcagtgacctaggaccatgccactgcactctagcttgggcaaggggaataagaccctatctcaaaaacaaacaaacaaacaaacaaacaaaaacaaaaaaagaaaagccctttaaggctccgtgggttccagtacagctctcaatataaggaagctcagagccaaggagggttgggacagaggacagtgggaggaaggtacagtggttgaaagcacagcctctgtggacaggcctgggttcagttcttgtgccacatcctactaagcatgagcatcagccaaattattcttaactacttgttctaattgttctcatttataacatgagaaaaagcttatcctacattgttgctgggtggggcagatgagataatacatagaagcactcagtacagcgcccaataaatgctagccactgtgatgactcctatttacaattcttcactaggtgagttaattaatacatgcaaaggacttagaagaaggcctgcacagagccagcccttaataataacagctgatacatttacaatacttactgtgcattaggcactgtgccgtctgctttctatatgttaacttattaaatctcataccatggctatgagttgacactattgcaactattttccaaatgaggaaagtgaggcatggagagactgaataacttgcctcaaatcctgcagttggggccgggcgcggtggctcatgcctgtaatcccagcactttgggaggccgagacaggcggatcacttgaggtcaggagttcgagaccagcctggccaacatggtgaaaccctgtctctaccaaaaaatacaaaaattagccgggtgtggtggtgcatgcctgtaatcctagctaccggggagtctaaggtagaagaatcacctgaacccaggaggtggaggctgcagtgagctgagatcacaccactgcactccagcctgggtgacagagaccctgtttcaaaaaaagaaatcctacagctggtaaattattatcatcattcataatacagggccatgttttccaattgtgttcctttgaacactgaacgagtactcaggcaggcaatgggaggagactccctttcaaccattcattcattcagctcagatttactgactgtctccggctctgtgccaggaacagggaatagatgggtaatgtcctttctttgtggagtttataagcccatggacagagacagaaaagtgcacacacattagacaatttcagatcatagctgctcggaagaaggtgatatgatggtgatgtccatagattggatggtcaaagaaggcagcaagcttcaaagccctgaggcagggccaagcttggagtgtgcagagaatggttggtcggtggagctcctcgtgcagaagagatagtgagtgaacttcagtgtttgatctcttcttcatgggatctcattggattaaagagagttttttaaaaagctggatcattggataaatagttggaagaaagctggattgaaaaagtttggaaaccactgatgtcaagcaagctttgccattttaggaatacggaatccaaggttctggcctcagctctggccctaagtgctgtgc

SEQ ID NO: 190465 - DNA, 927 bp, Homo sapiens
atcatgtgagcccaggaggccaaggctgcagtgacctaggaccatgccactgcactctagcttgggcaaggggaataagaccctatctcaaaaacaaacaaacaaacaaacaaacaaaaacaaaaaaagaaaagccctttaaggctccgtgggttccagtacagctctcaatataaggaagctcagagccaaggagggttgggacagaggacagtgggaggaaggtacagtggttgaaagcacagcctctgtggacaggcctgggttcagttcttgtgccacatcctactaagcatgagcatcagccaaattattcttaactacttgttctaattgttctcatttataacatgagaaaaagcttatcctacattgttgctgggtggggcagatgagataatacatagaagcactcagtacagcgcccaataaatgctagccactgtgatgactcctatttacaattcttcactaggtgagttaattaatacatgcaaaggacttagaagaaggcctgcacagagccagcccttaataataacagctgatacatttacaatacttactgtgcattaggcactgtgccgtctgctttctatatgttaacttattaaatctcataccatggctatgagttgacactattgcaactattttccaaatgaggaaagtgaggcatggagagactgaataacttgcctcaaatcctgcagttggggccgggcgcggtggctcatgcctgtaatcccagcactttgggaggccgagacaggcggatcacttgaggtcaggagttcgagactgaagtgaattataatcataccatgcactccacacttcagcctgggtgacggagcagacgctatctccttatataaactaatacagaagcttaagtattccttaatagctaaacccatggcaggc

SEQ ID NO: 190466 - DNA, 424 bp, Homo sapiens
acaaacaaacaaacagaaacccctatggtggcacatgcctgtaggcccagtcgctggggaggatcacttgaggccaggaggttgaggctgtagtgaactgtgatcgtgccactgtactccagcctgggtgacaaagaccctgtttcaaaagggggaaaaaaagggttccaaagtgttctttatatggaaaccattttgattctggatataggtctagtgagtctagtgaagaaatgttgtttgttaagcgatctggttacttgaactgacggaaagcagaaagctgttgtttagtctggtatctccaacattaaatagaagtttcctaacaaaacaatttaagactgaatttgaatgtagtgctagaagagcagagcattccattatgatgtttgcagttaactattttagaatagctttagat

SEQ ID NO: 190467 - DNA, 604 bp, Homo sapiens
aatttattgaatatccgcgccaaatgtgaaaaacgaactggttttataggtactccagtacatactggttttgcacgatggtcaagttgaaaaactgtaagtcacggaccacggggacactctatgtacatttagaactaatctaagttcactttcaaatgacactataccacttaacaagtagtacaattactttataacagaatattcccaattcctttgtcctcttccttattgctgtcattcattttacttatccataagctgtaatcactgacacattgttgctattatttgttttgaacaaactgttgtctgtcagttaggaataagaaaaagattttattttgccttcatttattccttctgtaatgtgctttctttccttatgtaggtccaaatttctgactgaaatcattttctttctctctaaagattatctgttatcatttctagcaagacaaactttctggtgaagaattctctcaatttttgtttgagaaagtctttatttctgtttcatttttgaaagataattttactggatacagaagtctaggttcatgttatttttctttcaacacttaaaatatttcactcctct

SEQ ID NO: 190468 - DNA, 520 bp, Homo sapiens
ggaatttcagacaagaggctgtatggggcagatagagaagtcactactaaggcggatacgggctgataaggcagagctactcaccaccccctaacactgagatgacactggctttcagtctgctaagcagagagtttgaaaacacccacactcactcctttttcccttcactactcctactcgcttgatgtaacttataatgcaccaacacacacaagggcaacagcacattcagagcccagttttttcttttggagaaacttaaatcgagacctcaaagctgtccctctgtggagaaaagcactttcctaggctgcccagggctggaacaaggcaaagaccaccattctggtgaaacaagctggcaatatgacaaatatataagaaatttattaatatgcctggcctttgagcctctaactccaactctaggaatctatcaacactagagcagaatatgacagatatacacaaatattcaccgctccaaggtgaacaacaggtcctccctttggtgaaa

SEQ ID NO: 190469 - DNA, 429 bp, Homo sapiens
agggagtttcaaatagggccaagggatgactgttttagtatcaagcttcccaggggattccagtgaaccacccagggttaagagccattggcctgggggccaaaactgtgagggaaaagatcagtcatgttgcctgatgctttcttgggtatcttcaataggaaaaaccaagtccagagcaaactcagggttcactggctagagcttgccctggaaaatttggaaataggcctgtctcagccttcctttccctggtgaccttctgtcattcctctgccagctctttccaaaccctgtccctccagcagaacctgacttctgagccactccttcagggctggttaggtactgtcagcctgcagatgctaccatgcactattcccagggttagggtttcaatacggtcagtgtaaaccatgacctcagcat

SEQ ID NO: 190470 - DNA, 796 bp, Homo sapiens
gctgctaccttccatgcaggcgttgaggggcttccctacgttattacgcacaaagtcctcctcacagtgcctggtgtgtggtcagcatttatatgcctggcaccaggccgggggctatggaggcaaatcagctgggccctgccctcacagagttgacatcacttagtacgtaaccacatgggatacatgtttgaaggagaggacagtgtgtctggccagtgagcaacagtgggccatacgtctccagggaacccccgtggggtgtgggaggagggaagcaggtctgtcctgggggaatgtgtgggaccacgctccacccgacggggtggcagtaggtggatttcaggaccatgggcctgtgctgtttacagaaccttgtccaggtgcccagctgtgggagggcagcatggagaggaggaagagggggcccctagtagcaagcttcagaaacttgccacttcaggctagagagctcgcaccctcccacggcagcagggtagccatttctccctgactggggtgtccaccatggtgctctgcagccacctctcacttcattaagagtccacagatctaggagcagaggactggtctggagctgggcaagggcaggcagcaaatggggagtttttgctgtgtgacctgaggtcacttgcctgccttctctggactgcactgtagggcctggagacctgttcccctgttccaatttccccaccccgtcgggtggagcgatactcaagattctgccaacgttggaagctgttgctgccctggggaacaaagtcgtggaaag

SEQ ID NO: 190471 - DNA, 841 bp, Homo sapiens
gctgctaccttccatgcaggcgttgaggggcttccctacgttattacgcacaaagtcctcctcacagtgcctggtgtgtggtcagcatttatatgcctggcaccaggccgggggctatggaggcaaatcagctgggccctgccctcacagagttgacatcacttagtacgtaaccacatgggatacatgtttgaaggagaggacagtgtgtctggccagtgagcaacagtgggccatacgtctccagggaacccccgtggggtgtgggaggagggaagcaggtctgtcctgggggaatgtgtgggaccacgctccacccgacggggtggcagtaggtggatttcaggaccatgggcctgtgctgtttacagaaccttgtccaggtgcccagctgtgggagggcagcatggagaggaggaagagggggcccctagtagcaagcttcagaaacttgccacttcaggctagagagctcgcaccctcccacggcagcagggtagccatttctccctgactggggtgtccaccatggtgctctgcagccacctctcacttcattaagagtccacagatctaggagcagaggactggtctggagctgggcaagggcaggcagcaaatggggagtttttgctgtgtgacctgaggtcacttgcctgccttctctggactgcactgtagggcctggagacctgttcccctgttccaatttccccacctcagtgaaggcacaaccaacagctgctcccgggcatttccaagaccctccaggccccagttctgaggactaggtggaggcgtgtttctccccagcatcaagtgaccagagaagtgaagtgac

SEQ ID NO: 190472 - DNA, 764 bp, Homo sapiens
gctgctaccttccatgcaggcgttgaggggcttccctacgttattacgcacaaagtcctcctcacagtgcctggtgtgtggtcagcatttatatgcctggcaccaggccgggggctatggaggcaaatcagctgggccctgccctcacagagttgacatcacttagtacgtaaccacatgggatacatgtttgaaggagaggacagtgtgtctggccagtgagcaacagtgggccatacgtctccagggaacccccgtggggtgtgggaggagggaagcaggtctgtcctgggggaatgtgtgggaccacgctccacccgacggggtggcagtaggtggatttcaggaccatgggcctgtgctgtttacagaaccttgtccaggtgcccagctgtgggagggcagcatggagaggaggaagagggggcccctagtagcaagcttcagaaacttgccacttcaggctagagagctcgcaccctcccacggcagcagggtagccatttctccctgactggggtgtccaccatggtgctctgcagccacctctcacttcattaagagtccacagatctaggagcagaggactggtctggagctgggcaagggcaggcagcaaatggggagtttttgctgtgtgacctgaggtcacttgcctgccttctctggactgcactgtagggcctggagacctgttcccctgttccaatttccccaccccgtcgggtggagcggggacctctagatcgaccagcagcagcaag

SEQ ID NO: 190473 - DNA, 355 bp, Homo sapiens
aaacgttttagccaggcgtggtggtgcatatctgtggtctcagctacatgggagtctgaggcgggaggattgcttgagtccaggaggtcaaagttgcagtgagccatgtttgtgcctgggcaatagagtgagaccccatctgaaaaaaaatcaggattttttttttttttttttttaataccatgatcaagagacggtgactgggctctggcacacccttctagtctcatctgctgctctctgccctgctcactctcttccagcctcgccatcgtcactgctgtaggtccagcatgtcaggttagtttctgcctgggcctttgcttgctgttctgcctgtaatgctttctcccaa

SEQ ID NO: 190474 - DNA, 474 bp, Homo sapiens
tcctaccacaatcttagagttgatcattttcattttagagataaggaaagcaagtcttaggaagatcttacagctagttaatggcccaagtatttctgaccacgtggtcatttttaatattctcttgttcccatataatgctctcttgcctcttaatgagtttggaataagatagatttgagttggaatctcattctgttttctagctccttcaacttaggcaagttacttaacctttttgaggcttgattttatgtagtcgtgatagttaccatcttttcagttgtgcatgaggaatgaggtaatattactaaggtgcctaccatgttgtttgtgagaagctacatttgtatggtaaagtttcctatgggtaattgacctattgagtccataacttttaaaaaccaatataatacagttcttggtaatacaggtgaattactgggacaaattactgtttcagtttagtttaaa

SEQ ID NO: 190475 - DNA, 406 bp, Homo sapiens
tctagaatttgtttggttcctttttataatttctatctctttattgatattctcattttgttcatgcatggttttcctgatttcctttagttcttcgtccatgttttcctttagctcgctgaacatacttaagatagttgatttaatgtctttgggtaataattccaatgtctggacttcctcaaggatggtgcctgtcaattttttttcctgtgaatggaccatggttttctatttctttttatgttttgtaattttttgttgagaactggacattatgagtattacattgtggtaactgagaatctaattctgtcatgcctcagagattgctgatttttgcttattgagggctggagccaactatttgtgacttttccaactatttttgtgaagtgtgtattct

SEQ ID NO: 190476 - DNA, 368 bp, Homo sapiens
tttccattttgtcacttctttttatttcattttggttttaatttacaaaactgtttaacattcttacatagtaaaattagtatcttttttatgtcttctaagaaaatttaagcctttttgagatttttgtgattgaataattttgcctggagaatttatattgaacttgatttttgagctcaaagaaattcttagtggagaaaccacctctttttcattcatctatccaagaagtgtgcttgacttagatattttctgaaatgcctctgaaaagtatgcagcaaaatgatgtaggaatcatttatgaaattctacctcccaaggaaatcttagaaaataaatagttctgaggacttccatattccccc

SEQ ID NO: 190477 - DNA, 159 bp, Homo sapiens
cctcacagacctgcccttagggcagaagcaggaagcggaaaggttttctcacggtggctgcaaaatagaggaattctggaggcctgatgtatggattctcagtgtattgggtgtcctcttctctctcaccattccacccctgggcctgattaaaggaag

SEQ ID NO: 190478 - DNA, 718 bp, Homo sapiens
ccattttaaagcaaattccagaagttactggttttttccaattatgaatacttcatagttgcatctctaatctaactgattaggaaattacttaaaaagtaactttttggaagtccaagtccgatgtgaggacaaaaaagagtaacttctgtgtcataataggtaacacatttaatggtaatacctcttccatattcaaatatgaacaattattactgtaatgtctctatttccctattttttctttcctgggtgacagcaagactccgtctcaaaaagaaaaaagaaacaaatatggggacgaacagtgggaatgcacgaggagagggttcccatctgaggaggctggaagaaaaagaaggctgaaaagaaccatgagaaacacatgtctgtcgttaagctatacagcctatggtatttgtcatggcagtctgagccaagagagggagcaatttaattagcatgtgtatgctcttctatctaggtcccatataagatgtgccaacactgttagtgctatactccttttgtgttaccaacggacagatagaggaagggagggaagaaaggaaggatgggcgcagagaaccgacactcgtcacactgacaatgtcttctaacgcattttgggaaaagctatccaaaggcgggggacacagggggtccacgcctggtaatcccaaagtgctgggataccgggggagtcatgggcggtcca

SEQ ID NO: 190479 - DNA, 392 bp, Homo sapiens
aaatcgagctcggtccaattagaaactcagaagagtattttcatgtttgttcaagatcagaatctgaactacattaaaagtacaatgcaagttcattctattaggacaaaagaagttgggtatgaggatattgtgttttctcccttgcgatcagctgtctgttgttagctcttagtgcttagagcattatccagctggattccagacataatgatgtgttgccttctacaccatggaaagttacagagctcagctgcaggccaaactcagttgaaagtttgtccacatgacacaaaattcctttatgcacagaagaacagtaactgaaaattacgactgtcatctgggtcttaaagctggtggcccccaagctgaattccccagagaccaca

SEQ ID NO: 190480 - DNA, 238 bp, Homo sapiens
cccacctcttatgagactttcattttcctaaacgaacctctctcccattatccaccattccagctcaccctccctcccaccgatctcaccttctccctctacacttcctcattctctccaacgctttagcttttcagcttcccatcaattctttagaaatccctccccaaattatccccactctccgtatcccctctacttcggcttctccatccctcatcaattcctcttcccaatg

SEQ ID NO: 190481 - DNA, 278 bp, Homo sapiens
ccaaactggtgctaatggcacctcaactttagcagaagataatgcattcctagaagagggagtggaggcttgatgctgctcctgcatttactcacagctccaccacatctcttgaatgttctgtatttgttccatgcccctcttacccagttttcagatttggtacagattttctcctgtaaaagtctgtcggtaatttcaaatggaatgggaaaagggtattggaccactgcttttacttagctttcttactcataagtcctagacttagtcttaga

SEQ ID NO: 190482 - DNA, 242 bp, Homo sapiens
ttgggggtgcggtgggaaatgctgcttgtcttgaaatacagaattttgatagatcttttccacttggcctaaagctctgatggcaggtgagagatgaagggttagtaggttttgcctgtagtcaagtagtaacttttaacagtgcccctaaatggattcagttgtcacaggggatactgagttccttgacatggtaatatttgggacagtagtttagagcatgatttgttgtagggttctgc

SEQ ID NO: 190483 - DNA, 304 bp, Homo sapiens
aaaggaaggaaggaaaataaaaggaaggaaagaaaagaaagaaggaaggaaagaaggaaggaagaaaggaaagaaggaaggaagaaaggaaggaaggaagaaagagagaggccttgctgagtgccaagcatcagcctcacaaccttgcaaaatggtgtagaagttttctatttccaagcagttctgtgggtgagaagtccaacatgggtctctccagaggctctagggaagattccatgtccttgccttttccagcttctagaggccacctacaccccttggctcatggcccctttctccacct

SEQ ID NO: 190484 - DNA, 433 bp, Homo sapiens
gatgtcccccttttgcagagaaagaaactaaaactaaatgctggtgaggcctaaatatcttacactcacttagcttccaggagacagagacaggacttgattcaattctttgtctgagattcttctagtcatagatcaatgactctctctctttttcaaatttcagtagcctttggagtacaagtggtttgtggttacatggatgaattctgcggtggtgaaatctgagattttggtgcacccatcatctgagcagcgtgcgctgcacccaatatgttgtcttttattcctcatcccacctcctaactacccccaacccgagtccccaaggtccactttatcacttcgtatgtctttgagtcctcatagcttagctcccacttataagtgagaccatataatgtttagttttccattcctgagttacttcact

SEQ ID NO: 190485 - DNA, 223 bp, Homo sapiens
acagaaacaaggaatgcctttgataggttcatcaatggactggacacagctgaggaaaaagatcaatgagctaaagatatgtcagtagaaacctctcaaactgaaatgcaaatagaaaaaaaagactaaaaaataaaacagaagagaatatccaagaactatgggacaatttcaacacaagtaacatgtgctaaattggaataccagaagaaggaatagagaa

SEQ ID NO: 190486 - DNA, 303 bp, Homo sapiens
gtgaagcatggagatgtctggggatgatggttcaggcatcggggcagccagtgcaaaggccctgtggtatgaatgtgctgggcacaccccatcaagaaaaggagtgtggttaaagcagaggaagtaaggatgtgtgtggtagcaggcgaggttaaagaggtgatgggactagaaataaagtcattcactggcttttgagtgagatagagaagctctagaaagttttcggcaggggactgacacgagctgacttctgttttaaaaaagtcactctggccaggtgaggtagctcacacctgcaat

SEQ ID NO: 190487 - DNA, 1003 bp, Homo sapiens
gtcaaatgtcttaagggagagattggttgtatgtctgctatgggttccctcagttgggattttgtttcctaagtaccacagtactgcacaagattgccattttgaccccagccacctcctccaatgtggctcttacagacttttgattgagagcctggtaggtgtctgttttcacagcactataaattgtgttctttggattccttttaaatagaggtggggtctcactatgttgcccaggctggtcttgagcaatcctcctgtgtcagtcttccaaagtgctgggattataggcatgaaccactgtacttgttcttcagattttttgagcctagctctgtaacctcttgccccaagcaggttcaagatctggcagaggccttgcgtggaaaatcagttgcatattggtttcaggcccccttctccatagaagtaccttatctattaaacatcatgatactatgagagatttcactcaacctctctgagctagccccttcctccttgtgtaccatcttagactttcacaaatgttccttggggaaaactggctttgcacttggtttcttctagcttctaatctgttgtacatgaccaccaaaaactctgatggtttcactttccttctgcttgagtcaagtccagtcttcagtccatgcccaaaagcattacacatccctgaaaagaaaatgatcagcaatcatcagttcagctaagataggctcttgctctctagaattttagttcatgttgtccttgttacttccatagctccccagtgtctttacaaatgatttcatgatttcttcttttttctttccagttttgcagcaagaatgcaggttgcagtagacataatgcattccttttgtgtgtgttacatactacattctactcagaagtggaaaccaaatgaaacagttaaagaccgcgttttctacctagagcatattgtttctcctctattcattgtgatttcccttctttgacttcttggtttatg

SEQ ID NO: 190488 - DNA, 366 bp, Homo sapiens
ggcacatgttcatgtcatgcaatgacattagtatatgaccaaagtgatgatatggctaatattcctgggatgcaggaggaagaagattcatttgaagcttctcctctgaacgtggatgaaatgtggtcgagaatataagctctagcatcagataaacctgggtgtgcaccccagctctgcctctctgtgtgattctgggcaggttactcaatgtatataaatctctgtttccccacctgccaaatggagataacagtgagattcacctcagagatctattggaagactatataagcattgtattagactctgaggaggataaatccgagcttgcttaccatttcactgaaacgcaggtcctgcttt

SEQ ID NO: 190489 - DNA, 289 bp, Homo sapiens
tgggcagccaactagagtttcacttcatctatagagccagcaggagagatctggaaagcaaaaaactggtgtctgtcgccccaatgggaaatcacactctctcacccatttactagatctaagtcagttcccagacacagagctcagtctctgatccagagctcagtgactatcaaagagactaggtccatttggcaatatcctgcaacaccactgcaaaaatttaaaataaatatctcctgatcctttcccaaaggaacttgaagctatttaccagaatatcagatat

SEQ ID NO: 190490 - DNA, 184 bp, Homo sapiens
tgccgagaaccaagaggtgcagatttctcctaaagtaagagtcacagccctggaaaagtctctaactactctttggttaaagtgacaaaatgtaggagtctgcctgggccttgagcagggacagagataaaagagaccaaaccccagcatcacagaccagcaggggagggggctgaagaagcag

SEQ ID NO: 190491 - DNA, 584 bp, Homo sapiens
caccgagagtctggacctatccccaaatctaaagtaggcttcctctgttattctctctccttggaaatggttttcacctatttgtgatgccacaatctgaaactacttttgtttctagtttaatggctgttaccctcaccagagggtaactgtttgtggtttattttattctgagcctagcatactgtccagcacagtgtctggaaaacagcggatccctgattcatatttggttgaaacaataagtaaatgagtttcacctgattataacaaattagggtggaaattttgcatggtgtagaaacttagaaaaaaattctagagagcctttgaagcacatgattagtagttggaatgtgaacctaagaaattcatgctctaaggaagtcaaacaatatttatattcagatactttatcattaggataaggctggttgtagggaatgtgctatagagaggttagatattcaaaagatctatgggatgaagggggaatagtgtatatcactgaaagggagaggtatgggccatgagttaaacacagtagcaacctaaattaaggacacctaaatgaagaaaggaaa

SEQ ID NO: 190492 - DNA, 331 bp, Homo sapiens
ggcaggtatatgataaagcaaaaagaaaatattaactgtaaactcctggtggaggagatacagttttcattacagaattctttcaatcctttttgtctgaaaaatttcataataaaatgttgagaaaagcgataagcattcagttttgagtttgggttgactggcgggatactgggaatacagaaggtgtagctaggtcatgtcaattagtgacataagggtttgaggtacccaaggcattcaagtagaaatatttagcaggcagctggaattgcacaagtagagttcaattatagttattttactctgctgcttcctgaacatctctctg

SEQ ID NO: 190493 - DNA, 508 bp, Homo sapiens
caccactattaccactgatatccttttcctattctgggctctgatcttggacctcatgctgtacttagctgtccttccgttgagtctcctttaaactgcagcagttcctcagtcttgccttattcatctacgcttttccagagcactagttaattactttgtagaatgttcctcaatttgagatgagcctgggacatcttaccatgaagcaggaagccatgaagacaactggtcccatcaggaagacacagaggccacagcaaactaagggagggattcccaatagccatgcacggagccacatcaggatcaggaagaatgaacggaaaacaagtcggcagcaatcatgagagctaccaccaccacagtgctcgccttgggactacaggacacccacttattattcccaagatcactaaaggacaacagttatttcaagctgctgttcctcgatgaactgcatttctgaataaccaaaaagctgatcagggcaagaaccacagtcaat

SEQ ID NO: 190494 - DNA, 547 bp, Homo sapiens
ataagtggaattataatattataagtcctttaacgtttaattaaaatgccaagaacgtacattgtgtaaagggccacctgttcaataaattgtgctgggaaaactggatatccatatgcagaaggacaaaacttgatccctacctgtcaccgtatacaaaaatcaactcaaaatggattaaagacttaaacataagaccaaaactgtaaacatactagaagaaaacctagagcaaactcttcagggcattggcctaggcaaaagttttatgactaagacttagaaagcacagacagggccaggcatggtgatgcactcctagtactttgggaggccaaggtgggtggatcacaaggtcaggagattgaggccaacatggtgaaaacccatctctactaaaaatacacacacacacacaaattagctgggtgtggtggtgcacacttgtaatcccagctacttgggaggctgaggcaggagaattgcttgaacccaggaggcagagattgcagtgagccaggttgaagccaatgcactccagcctggc

SEQ ID NO: 190495 - DNA, 603 bp, Homo sapiens
tgctgtttctcttatctgccaggtgtcctcttataactgtttctttggccctgagtacaattaattgtaatgtaagtcagaccacgatcatgactcgtatgtcagtatagtctctgacttatgattctttgacttagaattttgtaagtttatgatggtgcaaaaatgatacacagtcaatagaaaccatactttgagtaccatataaccattttgtttttcactttctgtattcaataagttacatgagatattcaaatttattataaaataggctttgtattttttttcttcttctggtggttctagcagaagttatggggagggttctcagtggttcttactgagacatgggtccattcttgaacaagtcatggtggccaggaggatttagtatggtgagcaaccctggatccacccaaactacatgttattaggtccccatatgaagtggtagttccctagagtaaagtcagtaaggagggtgctttgttaaacagacaaaagctatcatcagactatgatttacgttaacatagatacaatctctttgaacagagatataaacagagtactttggcaataccctgaaggcaacaaata

SEQ ID NO: 190496 - DNA, 289 bp, Homo sapiens
tagcaatctcattgtactagcctttataggaaatgatttggaggaatcaggaaagcattattgttgtcctcaacatttcttgttgccatttactttgttggttctatcagtttccaagagtggcatggttgtagcaatgacagccagcagaaaatgatattttgtttaggacaattttgataactacatgcttttttagggccaacatttactctaccaagaatattattatatttttgaataatcattattattagaattatatttttgatcgaagacagccatttag

SEQ ID NO: 190497 - DNA, 555 bp, Homo sapiens
agtagactgcccaacccatggagctacacgacctcacttcctggtgcacctgccacccctagcagctggaatgggaccagatttttctgggtgaaatgctaggatccgagcacagagtctgacatatggtagatgtgtaatctatattccattcactgatgaatgaatgactctaacttagcaggaagatataccaagcacccaggaaaacagctgccttcaaaatgcagctccttattttttaataatctgaaacaagactaattcactgagaattccaatgtgaaagacctcccaatcaaggttcttatcagcaaacttacaggtatgggataacaatgagggttatgcatatcactttcctgataagtggtgacaaatactctttttaaaatgcctaccaacctcctgagctgagcttcatagaccccaaagtaccctccactctcaagatctttgaagaataaaaaggggtgggcaaggtggagcatgcctgtaatcccagcactttgggaggccgaggcgggcggatcacttgaggtctggagtttgaga

SEQ ID NO: 190498 - DNA, 596 bp, Homo sapiens
agtaagacctcaaagattgttggagtagtaaagagtgaattagaaatatgaagtggtatttaagagtaggatatatgaaatggagattattgagggtttgagattatttaatcatatcagaatctaggatgtgatcagggcatgaggggctgctgtagggcagaagacaagatcattggaagagaggctgtcaaggaacagagagactggaggttataaaagattgtctagatgtatactgaattctctaagaagtaaaataacagtagtgttgaagactgacagtaatgtaggtactaaggtagtggttggcaagctttttctgtcaggggctgaatactaagtattttaggttttgtaggccatactggctctttttaatactcagacctttgttgctgtagaacagagtagccatagacaatttgtaaacaagcggatgtggcagtgttccagcaaaactttatttatggacactggaacttaaatttcatagaatagttttcacgtgttatgaaatagtcttcttttgatttttttttaaaaagccatttaaacgtattaaaatcattcttagctgttgagctatacaaaaa

SEQ ID NO: 190499 - DNA, 324 bp, Homo sapiens
agataaactttagtataattgctagaacatatgctttctgaactgggattatgtcaggagaaactggggaaaaaatggaaaatgaacccagactcaaaggacagtgaagatattgaccttgtttgattgtctcattcttcaaaacaggctgaagagtacaaggttcttctcctggctaaaatatttgcagctatatgattgtataattcaacttttgttcaatttcaataatgaagtgggggagaaaatatagctgcactaaattacctgctccctgcacagatttgaatatttaatacctcaatcaatggcaaagcaattata

SEQ ID NO: 190500 - DNA, 354 bp, Homo sapiens
gccaaaacacacgttcacctatgtaacaaacctgtatatcctgcacatgtacccaggaacttaaaataaaaataaaaattaaaaaaagtataagccaaagtatgaaactgcaattttcaagtgtctctgatgctttctcataaaattttattaaaaattatcaactaggctgggcgtggtggctcacacctgtaatcccagcaatttcggaggctgaggcaggcgggtcacctgaggtcgggagctctggaccagcctgaccaacatggagaaaccccgtctctactaaaaatacaaaattagccaggcgtggtggcgcatgcctgtaatcccagctactcagaaggctgaggc

SEQ ID NO: 190501 - DNA, 156 bp, Homo sapiens
gtatcagtctacaatattcactttttaagtcacttctgtagaacagactattaattttttctttctagttagtgattttaagtgaggaaattgaagagaggtgtcttgaagagatgcggaggaaccagtcaagtaggagacaggtcaaggcttgtg

SEQ ID NO: 190502 - DNA, 236 bp, Homo sapiens
tctcctgagtgcccgtcccgagtaaataagatgctagctcagcttctggccagcaggctgcccacctactcatctccatccacatccccagggagggacatgaattgatgtcttcattcagcagaatgttgattatgcacccattctgtggcaggcacgttttaaatacaaaggcaaagaggtttgaccaagtgtctgccctcttggagctgggattggaatggggcacgaacaca

SEQ ID NO: 190503 - DNA, 812 bp, Homo sapiens
gcagtgagcagagattgcatcattgcacaccagcctgggcagagcgagactccatcttaaaaaaaaaaaataaagctgataaaagtttggttaaggtaataacaatgaagatggagagaaggaaaatggtttaagagatatttaagcagaactataggacttagaaattaggtggaaactagaatggcagagtgatttgctccagacggggccttttagatgttgactgatctgtgactattaagggtagaagataacacctactgagattttgggtgaaaaacatctttaaatcattggaaaaacgtcaaaggttagatgtgcaggttcacttctgtctcttctgataaaaaagcctttctcttagttaatagcaaattgagctgggaggagattcaaagatgctcattcaacaaatatttgttgagcacacattatatgccaagcactgtgataaggatacaatggtgagcaatacagacatggactctgactttatgaggtatataatgaaacaccattaaaagcactacacaccggctgcttgctttgctccatgcctccctgatgaagcccccatcatagctgccgccaagcctgccaccaccacctctgagcagaagatggctgtgccacccaagtatgccaatcttggcaaatctgccaggaatgtcttcaacaagggctacggatatggcctaataaaccttttgaaaacaaaatctgagaatgcattggaatttgaaagcttaggctcagccaacactgaaatcaccaaagtgacaggcagtcatggagaccaagtacagatg

SEQ ID NO: 190504 - DNA, 490 bp, Homo sapiens
cattgttaatagttgtggcaattgcacattttgtagtacttttatattgtgcaatgtttttggatgagcacatagaaatgtgccttgaatataaacaatcactcatagtatgttagaaggagccttaagaatggcaaatacagatgttaataaaacttagtatattaaactaattttttttttttttttaaaaacagggaattgcttttaaataacaatctgttacgggttttgccttatgaacttggtcggctcttccagctacaaactctaggtttgaaaggtaagtgatttttaaacagttttgaggtattctgagccttttaaagagcattttggcctttaaaaaggtcaagttttagtatgagttttagaatgtgactacgtgtactttctcttgaaagaaaagtagtttttgtttgtttgtttgtttgtttgtttgagacggagtcttggtctgtcgcccaggctggagtgcagtggcgcaatc

SEQ ID NO: 190505 - DNA, 404 bp, Homo sapiens
cattgttaatagttgtggcaattgcacattttgtagtacttttatattgtgcaatgtttttggatgagcacatagaaatgtgccttgaatataaacaatcactcatagtatgttagaaggagccttaagaatggcaaatacagatgttaataaaacttagtatattaaactaattttttttttttttttaaaaacagggaattgcttttaaataacaatctgttacgggttttgccttatgaacttggtcggctcttccagctacaaactctaggtttgaaaggcaatcctttatcacaggatattctcaacttataccaggacccagatggaacccgaaagctactgaacttcatgcttgacaatctcgcagttcatccagagcagcttcctccgaggccatg

SEQ ID NO: 190506 - DNA, 401 bp, Homo sapiens
taaataaaagctgtatataaaactgtgaagaaacttaacatcaaattttggaaaggaagtaaaaaaagaattaaaacaagctgcgatgctcttaacaaagacacacaaaacctgttactaggagagtcgtttggtcaaatttcctgttttttcctaagtcctcatttgttttaaatatgtcgtcagcacagagtttattgctgttgattaacgtttctacatgtaaaatccagaaccattctctaggatttcttatttaaagatattccaaacaatgcagattcccttttttctccagattctggtcttcatcatagttaggagatgataaaccatggatttaaatagctgaaaattagtgttagacactagaaaattactcgagtgtgtgttaatgaagg

SEQ ID NO: 190507 - DNA, 383 bp, Homo sapiens
ttctaattgcagtcactgtgagtacactggcaattatgcaccctgccccaaattcctaattgtagtaggaagttaaactggagcattttttttttaaattgctcaaacaagtctttaggaatttaaatgtatttatagaaacgtatgtaagtatgtttacatacatttctataaaaatattcttgtaagtaaatgttatttatatatactgcacatctaatgatgcaattggcttcatgactttagatattagagattagggagtttcttggtcaggacagtcaggaagaagggagagatgcttaaagacattggcagagctgcatggtagaagtctgatagaaagggcttgagtgaaacctggaaagacagttcattaggga

SEQ ID NO: 190508 - DNA, 536 bp, Homo sapiens
ttttagacttaagcaggtgggtagaaaatagtaccgtttactagttagggacaactggggaggaataggctatgcatagcctggggggaaaaggatttatgtaacacaatgggtactttctatcatgaaacataatgctagaggcttacatgactggattaaaatccaaatagaaatgattcatagcaattcattttgttgacattaagtctatggttagaagtaaaagtttgtcagttcctcaaggatggagactaccaactagttgagatcttatttctgaatccatacttagtacctaatatctcacctggtgcggtgagaggctagctacacaaaacaacaccacctatccaccaatccagttttcactggtttggttacacgttgtagctgtccctctagggatggctgcattcctgcctggtccagttgttacttatagttgtgcacgtccacaatcctggggtgctgtgtgtgtgctgtcttccctgcttcatgtcccccaaacacatgcacactctgcagaagtttca

SEQ ID NO: 190509 - DNA, 287 bp, Homo sapiens
agtctagttaagttgtgctgccagccaggagaattttagagaaggaagaaaaatgttttactttctctgatagacagttcatatcctaattgcactgttattcatctaacagattcttactggtggtctagtatatgtgtgcagtaaggtgctctgaatgatacattaaggtgaatagacctgctatctttgggaaagttgctgtgtagtagaagaacataggcatatacacacctaatacttagttgagtgtggttagagttgagcgcagagacaggtcactttgg

SEQ ID NO: 190510 - DNA, 597 bp, Homo sapiens
gtgtggggttgggtggggaattaaaggctgatgtatctggaggaactttggttgggctggaggcaacttctgccctgttctattcaacagttccctcccctccactaccccatttaatctggccacagctcagctacctgtgtataaaatcttgatctctctcctatttcctttctaccttccgtgtttttacttactcgaaaactgttcccctctcctgtgtgtatttttttaattgaaatataccaggcatttaggaaaggaacacgaaacctaagtgtacaggtcaacaaatgatgacacagtgaacacccccatatgaccaccatccagatctagaacgagatcattattggcatcccagataccctccttctatccgctcctggtgactatgccacactccttctcaaaagtaacgtttatctaacactacaggttagttttgcttacttctgaactttatatacatggaaccattcagtaggtattattttgtgtctggcttctctcactcaatactatgtttatgaaactcatccaaaacattgtggtagcagtagcttatttgttttcattgccgtacggtatgccatt

SEQ ID NO: 190511 - DNA, 234 bp, Homo sapiens
attctagtcaggggtcactagtgaaattatattggggttaaacgatgtatttgataattttgcattctcttctaagtgattttgtgtacttttccttgagttcgatgaaatgcaagtaaggtagtgaggacactatttccaatttacaggtggagaaaatgagacaacaagaggagaagtggtggcttgcctaaagtcagtgactgatcaggatgagaactgggtacctgttgc

SEQ ID NO: 190512 - DNA, 395 bp, Homo sapiens
tcccagtccactatctacccaatcccagtagaatattctcaagcaaatctcagatagcatattatttcaacctgtaaatatttccatatttacctctaaaaggatgtaaagcaactacagactatcatatctaaaataaacaataattccttaatatgaaactcctgggcagtgttaacatttctcaaattgttttttctttgtttgaattaggatccaaataaggtctacacactgtgactggatgactatgtctcttcaatctctgcatatgggttcctccccctttacaatttttttttgttgaagaaatcaggttacctggttgtttcctatagtttggattttgccaaatgtattaccatgatgtagtttaataatgtgcttctgactct

SEQ ID NO: 190513 - DNA, 754 bp, Homo sapiens
caatgtcttactctgttgcccaggctggagtgcagtggcatgatcacagctcactgcagcctcaaacttctgggctcaatgcatccttccacctcattctcctgagtagctaggactagaggtgtgcgtcaccaaggccagctaatttaattattattattattatttttgtagatatgaggtcttactatgttgcttaggctggtctcaaactcctggactcaagtgatcccctgccttggcctcccaaagtgctgggattacaggtgtgagccaccatgcccagcaaattccaagtttatatccaagctctctatgactgctctgatgccatatcccaccactcctctcctcactgcctcactcctctggccacactggcctcacctccttgctgtatcctgaaaacctcaagcacattcacaccttggagcctctgaattagcttctgccttttccttgaacacactttttccagatattcacatggctcactcccttcctgcaggtctctgattaacattcccttagtagagaggcctctctgactgtaccatataaaacaacaattaacttggatactctttctccttcagccaagttatctccatagcatatactaccacttatcatatgtaacatttattttattgtctgtctcctcccattagaatataaattccatgagggttggtttttgtctgacttgatcctttatctctagtacccagaacaatggctggcaaatggtgct

SEQ ID NO: 190514 - DNA, 507 bp, Homo sapiens
tttcagaaatgaagacaacaatgtctgagatgaaaaatacactggatgggattaacagcaattagaaactgcagaagaaaagattagtgaacttgaaggcacagtaatggaaattaatccaaaatgaagtacagaaaagaataatttttttaaacatgaaaagatcataatggagctatcattgaacattagagagaaacctccagtggcctactgtatgggtaatggagtccctgaaagaggagaagaaagggagggacagaataatacatgaagaaataatggccaagttttttctaaatttgataactataatctgcagattcaaaactgcagattataagcacaaaaaacatgaagaaaactacaccaagacacataatcagtagctcaaaactgagtgtaaaagaaaatccccaaggctgccagagggggcaaaaaagcatgttaggtacagaggagaaaagatgagggtgatgtcagatttgaaaatacaagtgaaaagtc

SEQ ID NO: 190515 - DNA, 346 bp, Homo sapiens
tcttctcccctgacatcaccctcatcttttctcctctgtacctaacatgcttttttgccccctctggcagccttggggattttcttttaccactcgttttgagctactgattatgtgtcttggccaagtttttttctaaatttgataactataatctgcagattcaaaactgcagattataagcacaaaaaacatgaagaaaactacaccaagacacataatcagtagctcaaaactgagtgtaaaagaaaatccccaaggctgccagagggggcaaaaaagcatgttaggtacagaggagaaaagatgagggtgatgtcagatttgaaaatacaagtgaaaagtc

SEQ ID NO: 190516 - DNA, 668 bp, Homo sapiens
cccccgggctgcaggattcggcacgagggcgcctgtaatcccagctactcgggatgctgaggcaggagaattgcttgaacccaggaggcagaggttgcagtgagctgagatagcaacaatgcactccagcctaggcaacagtgagactctatctcaaaaaacaacaacaaaaaagaaatgtcaggtttctgtataaaattatgagacaagcaaagaaataaagtattgttcttacacaggaaaatagcaatctatagaaactatacttgaagatattttaaatgtgttcaaagcattaaaggaaatcatgtttttaacaatgttaaaaagtgcaatagctgaaattaaaaattcactagagggactcacaagcaaatgtgattaagtaaaaaccaagactcagcaaaagtcttttttgatccattggatctctaggaaacaccagaattatcagtgaagaatatattaaatggctcaaggcctactgtcaggcatatttatatggcttgacagtaaaactcctagacctggttcctgtttctgcaacgaggtgttcctttagagtcaacaataactcacaaacaaaacctacaagttcatgcaggaggcatcttgaagttcttaaaaaagtcagttgaagaaaaattgaagaaaagtcaattgtgatt

SEQ ID NO: 190517 - DNA, 699 bp, Homo sapiens
gccgcggcttccctagattaggcttgggaggcaagaggaggcctcctgacctttcacactgcctttttaatattaagatgaagtcacactccacaactttcttccagccaggcccagacatgtccgtccttgtaagttaaaagcttccatgggagccttccttcctaatcaagatgcaaataatacggcactccgaacagacactaaaaacagctctcatctcaaagaacccagtgcttgtatcacagtatgagaaattagatgctggggaacaacgtttaatgaatgaagccttccagccagccagtgatctctttggacccattaccttgcattctccatcagattggatcacctcccaccctgaggctccccaagactttgaacagttcttcagtgatccttacagaaagacaccctctccaaacaaacgcagcatttatatacagtcccattggatctctaggaaacaccagaattatcagtgaagaatatattaaatggctcaaggcctactgtcaggcatatttatatggcttgacagtaaaactcctagacctggttcctgtttctgcaacgaggtgttcctttagagtcaacaataactcacaaacaaaacctacaagttcatgcaggaggcatcttgaagttcttaaaaaagtcagttgaagaaaaattgaagaaaagtcaattgtgatt

SEQ ID NO: 190518 - DNA, 415 bp, Homo sapiens
tctcccttttcccctcaaaaaagacttaggagacatctctttttttgcaccccttctgtttctttgaataatcatttcattctgattttgtcttatatgtttgcagaattccttacttctcctagaaataacccttttatgagctgaataaaatcatgcagtgtactgtggctttacattgacacttaaatattttcccttttctctcttgccaaatctggcttctgtgcactgccccctagcactgccaaggtgtgctggtttgagaagtactgtggtttgggaaatgcagaggtctggtgggttgctggaagacacagtgtgaatgtattctgtatgctgagacctggctttcctggacccagagccaggtaattgcacttgtgagacaagcctttgaggggaaaagaccaag

SEQ ID NO: 190519 - DNA, 519 bp, Homo sapiens
tccaaatggtataatcaaaatcatgcaataaacactgttaaaagtggaagatttgcaaataaccaagattattcatgctgtctcatcttcatttaaacgtcctcattcttcccaatatcaaaaattttaaagtattttctagataaaattttcatttcaaattactatttatctaaagtaatcccttctccaattactattcatatcacagtttatgttcttcatagcatttactacaattgaaaattatcttgtcatgactttaggctcagtgttctacatcatattgtcactctttcactgaaagaaaatgttatttcggttataggtctcactgcttacaaagttctgcagtgacatacaaagttaaaaactggtggaaataaatgggccccaatcaaagctttaagatggtgagatcttgtctccattagaaagaaagggggataaatgatgatggtgttggttggtggagctaggtcctgcactcagagagacctgggatctagtatacagcca

SEQ ID NO: 190520 - DNA, 152 bp, Homo sapiens
ccaggtacatgcaggatcaaaatcaaagagaagtcgactgtgttataaactgaagagaggaagaagctgaagacatatgggaaaataaagagaaacttaacaaagtaagatcctagagatgagatagcacaagatcaaaagcacaggggaag

SEQ ID NO: 190521 - DNA, 375 bp, Homo sapiens
agtagcaacaaggttaggagaaacaacaaattattttaattacaattctctagccaaggatgataatattgtaccatagcaaaacaaacaagctgaggagtagaggggtgtgtggggcatgtttgcagtatgccaaaggaatgattacgatttgactaccagattttgtttgtactcactgagggctaatgagcaatggagaaaattttatgcaggagctgctcttgtggatggaacagagagagactaggtgactagaagaataaagaagaggaaaagcaaacaaatatctacaaaattgaaaatcatacacatctaagaatgcggcttcctataaatagggagcctgtcaccatgggcatacctaaatgacag

SEQ ID NO: 190522 - DNA, 499 bp, Homo sapiens
tacaggcatgagccaccacacccagccaagaagtttaacaaagaaacagaaataattaactaaacaaactcttggacacaatgaatgaaataaaaaatgcaatagagaggcaacaacagacttgatcaaacaaaagacagaatttgtggactcaaagacaggtcacttgaaattatgcagtcaaaggagaaaagaagaaaaaagaattgaacaaagaaagcttatgggatttacaagtcaccaccaaacaaaagaatatatgcattataggagtctccaaatgagaataaagagaggaaggaaaataagtttatttaaagaaatcatagctaaaatttttccaagtgcagtgaaatatggacatccagatacatgaggcccaaaggttcccaaacaggttcaagccaaaaaaaacttcaccaagacatattataatcaaatgtcaaaaagcaaagatgatggattttgaaagtagtatgaaaagagacctatcacatgc

SEQ ID NO: 190523 - DNA, 490 bp, Homo sapiens
ttgaccaggagcacgtgatacacgggcggtcgatgctaatcgcaggagatccgcaatcaactgtctgcccaggcatgaacttgccactgctgtggaagagtctgactgcatccaagaatgccaaaggttgtggctgaactcacttctcaacagacttggatcatgttcatatactattctttaaaagatcaccatttgtagtagaatgtcaaaaacccaaagatgttgctcccgatgttgagctgtaactattttctgtgttggtggaaaaatatgagagaattagttgccattcatgaatctcagtgatacacagacaaaagcatgcttcaattttgtttctttgtttttgagtggttctgatttattttcagcttttgggtgatgtctggggctgtttattgaggacgggataaatgggggggggaccaaaatatatttggcatttattggtggtgttttatatttgtgacttgatttacttcttatc

SEQ ID NO: 190524 - DNA, 506 bp, Homo sapiens
agtttcagttagactgaaggaataagttttagtgatctattgtactgcatggtgacaccagttaatgatgcatatttcaaaattactaaaataatagatttttaacattcttatgaagagggtaacttggtgaagtgatggatatgttaattatcttgatacatagatgcatcaaaatgtaaacatagatcaaaagatcacattgtaccccataaatatacacaattattatttgttaatccaaaaggaaggaagggggcaagagaggagagaggaaagaaagaaaaagagaaagaaaataaaaaagaaagaaagaaagaaagaaagaaagaaagaaagaaagaaagaaagaaagaaagaaagaaagaaaaagaaaaaaagagagaagagagagaaaggaagggagggagggaaggtaggtcagagaagcaggagagccaagttttgtttttgttttttaaggatcatgaaaaccaagggaagatgtttaaatttaggatatgctg

SEQ ID NO: 190525 - DNA, 570 bp, Homo sapiens
ggagcttgcagtgagccaagatcacgccactgcactcaagtctgggtagacagtgcgagactctgtctcaaaaagaaaaaaaaatttctgtaatttctaaaagtgtgctgcttttgtctttcataggtgttgtatattcttctaatttaatctttaggtctgtctcttgaaactggctataaactttatctctgctctggtgtgtctccagggatttggttggggatggttacattgcgcctttcatgggatacttttgtttaccaaaaataaggccattgaggcagatacaatttgataaagttttattgtaagccaaatttgaggatcaacttgagaagacacaccaacaaatttggatgtgttccaaaattgattacaagttggatgcctttatgagaaagtttaggagaagctggaggactattcataccggaattgtcattttccttgaagggtacaatatagacgttacaatcattgcctatagatgacagctgacaggctaaaatgttctaagtggaagacaatcagcaaacatgattcagaaataaatcagtgtcttttttg

SEQ ID NO: 190526 - DNA, 732 bp, Homo sapiens
gaaggcagcagcacaggaggtaggagaggaaggaatcctgagcaaatagccatgctgtttacttgccaatgacatccccactttgcaaagacatgatatggttattgatctctcactgaacctgtaagaatcaaacacaacaactcagttttattcatttcataaatggtttccaagtgcagtcagacatttaatttgtggaacactgagcgaagaggtgatttctgctggtttaggtaagagagaaacggtctagtgtaatactcaagaatgagctagatctcctggatttaaggcttattctacagcttattagctctgctatgttgggccagtgacttgacatctccatgcttcagtctctccatctgtaaaatggaaatacaaagcgggtgggaggtgttgtgaggattgagtagattaatgcatgtaaagtgcttgcaacgttgcctgacatgtcactgtctgttagctgttagcagtagttgggctttttatagagggctggtgacttgtgcttgtctgaatgcaggaaaccaggcctgtgtagccttcggtctgttctaacactgaagttttgtagttgagtgctgactgtggtgcataaactgagcatttggatacctacatatcacaccacaaggttttggaggggctcactttgctttaatccctgtttcatccagtttctctttttctccacatgccttcacagaggcaaggggagcatgc

SEQ ID NO: 190527 - DNA, 259 bp, Homo sapiens
ctggccaacatggtgaaaccccgtctctactaaaaatacaaaaattagccaggcatggtgatgcacatcggtaatcccagctacttggaaggctgcggcataagaatcacttgaacccaggaggtggaggttgcagtgagccgagatcccgccagtgcactccagcctgggtgacagagagagactccatctcaaaacaaaacaaaacctattacataacacacttcaatgatctgtgactagtatagcttaaataaag

SEQ ID NO: 190528 - DNA, 426 bp, Homo sapiens
tattactccctgacagcatgtgctattaccatgcccttctttagtttcttcatagcactagatattacctgaattatcttattgatgtattattcataatctgcctcctttgtgacatatttatgtccatgagaagagggatcttacctgtcttaatcaccattttcttcttaactcctaaaacaatgttggcactgaataggtatttattgaattacttgtaaattcttcttgtgttgactgtcttgtaggcctacctcattactcgttcttcgcacccgacttttataaaactttttactgcaatgacttgaaactccttcaattgaattggacataaatcctgctctacataaatataaaattagcatttttttctctctttttttttttaattatactttaagttttagggtacatgtgcac

SEQ ID NO: 190529 - DNA, 473 bp, Homo sapiens
tagtctccaagcatgaaaagacaagacttgagactgatcaacattaggacgactcttcccatcaaagttgcagaggtgagtactgaatcctggcctcaatcccaaggctcaagtgtctggggtaaagatgagaccatgaccaatgcaggaagggtcagtcaatcctgggatttttcttgggaaccactgggaaagtactgggttcttttcactgggcattattaggccagtagggtgcgagcctggagctacttgggaagtgagccaacacagaagagctggggaaaggctgagtcccaatcccttcaagggaggtgctagatacagccatacccaaaggcacacatgccacagactttcatttgtgtgagcccacaaatatccctttttggtataaggcagctgaattagattattattaataccactgatagatacagacctttagtattaattattacacaacaaatatt

SEQ ID NO: 190530 - DNA, 735 bp, Homo sapiens
aagcccacagaagtgtgggtctcgcacctcctgagactgcttccccgagtttctcactctcactagtccacaccgagcatccagcaccagcttatggctctggcagtttctgctccaggtaagcggatctcctctgtgtctttccaggtttccagcacagtttgccctgttagctcagttctctgatcgtcccaaaagagccattgattttgaattttcccagctttttctcattacatgttgcagctgaaagcgaagtcaccaccttgtttttaacttgtattttgtgacttgttaccacttcagtgctttagacacataggctcagtgctgcaatattgtgtctaggtttgattatgctaaatttaacctttcttatgtatcaccggagtagtaaggatttcaaactaccctgcctggtagctttcgctttccttagaaaagcttatcacttcttgactgggccccgtggctcccgcccataatcccagcactttgggaggccaaggcaaggctggcggatcacctgaggtcgggagtttgagaccagcctcaccaacatggagaaactccgtctacaaaaatacaagccgtggggtggcgcatgcctgtaatcccagctccttgggaggctgaggcaggagaatcgcttgaacccgggaggcggaggttgcggtgagctgagattgcgctgttgcactccagtctgggcaacaagagcaaaactctgtctca

SEQ ID NO: 190531 - DNA, 300 bp, Homo sapiens
aaaggctagactaatcaaaacagtgtggtattggtgaaaaaatagacaagcagataaatggaaaagaatagagagctcagaaatagacccatccaaatatagtcaactgatctttgataatggagcaaagtcaataaaatgaagcaaaggtagtcttttcaacaaacaatgttgaaacaactggacaggcacaagaaaagaaaatgaatgtaggcacagaccttatatctttcacaaaaattaactcaaagtggattatagacccaaatataaaatgcaaaactataaaattcctagaac

SEQ ID NO: 190532 - DNA, 347 bp, Homo sapiens
tgggatcactgagcagcagagtggctcaggaaggcattcaccagactatttctgtacatgccagattcccttcaagacaggtcttcatagctacaagggtcatcgctgctgctaagaatgtcttcagtggctttctcctgaggcctcatcctatatcctaggaaaaaaatctgcatatcaggtgttatcacttatagaagcactgactatatcattcatgtgactggatcatgtactaagatgattgttatttagggtgcagcaaaaattaaatgcatcttctgcatttaagattaaaagaaagcttaaatacaaaacagcactgaaagaaatgaaaaaagatccaa

SEQ ID NO: 190533 - DNA, 291 bp, Homo sapiens
tgcttttgatttgggtgctaattttaggtcttatttcttgtaggcaagttttattcccttgccatatgtatttcccagccagttaaatggccaaaataacttcagaaagctttaacttctttaagaaaatatccctgataaaggatcgagacgtttaggtgttacccaaacaagtgtcagtatagaaaaggaagcctttgcattctggtatttcccttattcctggcccaagaaatgattgcttacaaaatatatctgcatagtccgttagttttggaggctgagtgaaaa

SEQ ID NO: 190534 - DNA, 389 bp, Homo sapiens
tattggttatcaatgtagtatcattacaagaagcctaaaatggccactttatgttaactggaatgctcaaatgactagtgttttcattagcaataaatggaaagctgaaaagtaacaattttattctttgtaatagatctgtgactttcaagtctttctttttgacatttttttgtagcctggtggggaagcaggtccggctgtgagaggtgtggacagtgacctctcattccagcttttatcatcatcctgcattgtttaacaacagcaccaacaccatgctgcttgctgaaaatgcagatttcattcttggattaatattctggtaccagatgtatgaggctggctctaaagaagctttttctcttaagtactgtcaaaaatagaga

SEQ ID NO: 190535 - DNA, 247 bp, Homo sapiens
aatatttttttgattgtgaagctcatctcatttgaaaatttttggttaacctagaaaagtatagtaaagaatagaatcatcacttgtaatcatacttctcagagactctctgtttacattttgaaatacttcaaatgtaatgtaaggaaatactttccttctgtctcttctccccctgtatttatcacagagacctgattttttttgttagttttttaaaactaaaaaccatactcttgtagcctcc

SEQ ID NO: 190536 - DNA, 301 bp, Homo sapiens
catctatggaaaggagctggatatgaggacatattagtgcagaggaagaacgggtgcagcaaagagagactgggcacgggggcccaagacggactgagaaaaatcatgtcttcagatatttaggcaacactgagtttcagagggcttaccaaaaaaaactttcactttctagaaacaaatggtagctttgcatagctgagtgatgccaagttttaaacagcctggttcagattcaggagagacaggggcagagaaaaaacttctgagacactacttctatttttacagtcactttgcttag

SEQ ID NO: 190537 - DNA, 269 bp, Homo sapiens
tgcgttcagaggatcccagtcggcgaagatcacctcaagaactcatttttctaattcctcctgaaacaggaatcaggcatatgtccctgtgttaagctaaatctttcccattcctaaaatgttaataattaactttccaaacttcattgtatgtgaaaaaatgattcattcttcagggaagtgaatcaccattacagagaccattaagacaacagaaggcttgctgtctccaaagtgcacaccaataattaagtaagagcccccaaatc

SEQ ID NO: 190538 - DNA, 440 bp, Homo sapiens
gttggtgttacttattgagttatttcaggtacattaagggatagttctgatggatggtggtgttggtggtggtagtagaggtcagaatcaagggacatgacaagggcaggtacatcacaaaggcagtttccaagaagggacaaaggtcaccaggtaccagtctatggaagtgtcacaaagatgaaggtctgaaattctagccttcacatgccatgtatcctcaatgggaaatgggaggtttgccattctgactatatagttaaatagaagagccaaacggtttcgtacatgagcatggagtacagataatttctcttaattctctccacttacctttcaggatatccattaattctgcatgaatctgtgctcagtgatagaaaatctgtgctcagtagaaaccaaatgacaaaattaactagcagcaatatggcacacag

SEQ ID NO: 190539 - DNA, 577 bp, Homo sapiens
cactctatcaggctaatgcctaggtcaggagaagacagacgcagtcactactatggatcctgagggcgagaaactctggatgccacaaagtggcatgttcaaccttcctacaagcacacagaggtgaagcctggagaacaggcagggacaggcccagctggccatgtgctcagccacgcctacctcgcaaggtcattctgaggatgaaggcatcatggatccaaatgccaccttgacgctgaatgtactacacaataaaagaaccactgtaaatcacactattgactcttgcttggttgatgttctttcctttacagtaaagtgaactcgtggacaaacatcgtgtccacagaccaccataaatgtagtttgttgttttaaataaaactgaaatcagacttccaaaaagaaacatctaaaaacttctcctctcccatcccaccagagccatggcccacaacacagcccgacgccccgtcacatgctctcacaggacaactgcccacaccagttaacctggtgtcacggtggaggcgaggttgcggtgagtggagatcacgccattgcactccagcct

SEQ ID NO: 190540 - DNA, 118 bp, Homo sapiens
actcacctaggcactgttaggcacagtcatttttaatttaggtgctacttactgaacaccaaacatgccaaggatacaatatgaagaaaaactatttttaaggatcttacatgtgtaa

SEQ ID NO: 190541 - DNA, 280 bp, Homo sapiens
gattgtttaagcctaagagttcaagactagctgtctctctctcttacacacacacacacacacacacacacacacacacacacacacgcacgcacacacggctgggcatggtagctcatgcctgtaatcccagcactttgagaggccgaggcaggcagattgcttaagcctaagagttcaagactagcctgggtaacatggcaaaatggtgtctcaaccaaaaacaataaaaaataagctaggcatggcgacatacacctgtagtgccagttacttggca

SEQ ID NO: 190542 - DNA, 384 bp, Homo sapiens
gcagaaagagaagtaagtatcaaaaaatataaatacttttcaaccttcctgaaagaaaatggccttggctaaatgctgaatctagttgaatatatatatatacacacacacacacacacacacacacacacacacatatatatatatatgtgtgtgtgtatatatatatacacacatatatatgtgtgtatatatatatgtataaatagatgataaatgtacttactatatcagcttagaaacatgcctcatttccaccaaattgaaagctaagagacgttttactttgagtaaaggcattgtgtcactgatgaaattataagagtttaagttaaagatttttaatagattaacattaatgacattggcttatactgctgaaat

SEQ ID NO: 190543 - DNA, 359 bp, Homo sapiens
ctgtttgtttttgttgctgttgttattcggtgaaaataacttctaaatttgaatttgggactactgacgttttcagtttctgcaaagttactgagcccagattgtccgctgttcttaaaccttataacaatgctgaatggtagttacggataattattttattagtgaggaaattgagactcagggagttaagtcctttggctaaggtcacctaactaattattgctagagcctgaatttgaacatagaatcttatagctcaaaaaacctctattaatggacctgcatcaaagtttgttactatcaagagatcaaaagttgtttgatgggcatggtggttcatgcttgtaatccgagga

SEQ ID NO: 190544 - DNA, 295 bp, Homo sapiens
atgagaacacagactgagaaacaggaagaggggtggtggttacggaacacgcacactgggcagttgttgggagaccttttaactcagcagtgaacccgtgctctggtaaggttatcacaggcagctgctaccttttgtggtcccacctgacagtttaaaaggtttattaaagtgccccgttttttgacttctatgatgtatctttaaaaaaaaaagtaccctgttcacagccacaaggtttatgaaagtgccttgtgtaagcagacagtggtgggccagccggtgcattcagcgc

SEQ ID NO: 190545 - DNA, 472 bp, Homo sapiens
ttctcaaacccctgggctcaagcgatctacccgccctggcttcccaacgtgctgagattacaggcatgaggtcactgtgcccagcccattgccctattctttaaacttttttgtagctttgaaatttttcaaaataaaaagtggggggaaatatacatatctgtatttgacaatatatgcacaaagaatctctggaaggatatcaagaaaaaaatatggtaattgtggctctctggggaacaaaggaactgaatggatatagagtaggtgggaagcagaatatttactatataactttataccatttccatataattgatgacatcatcagttttaagacagaccattattttattgaccaaaagtaagaaaaaacattgccaatttgcaggctgggcaccatggctcacgcctgtaatcccagcactttgagaggccgagatggacggatcacttgaggtcaggagttcga

SEQ ID NO: 190546 - DNA, 211 bp, Homo sapiens
acacagaccgtcacaacaagaagtaaggctcctgctcacaccttcttaggctccactggcagacagcttccctcggcctcccaaagtgctgggattacaggtgtcagccaccacgcccggccccatcttaaccatttttaaagtgtgcagttcagtggtattaaatacatccttaacgctgtgcgaccatcaccaccatccatccccataa

SEQ ID NO: 190547 - DNA, 404 bp, Homo sapiens
gcggctgatgtcctgtgctaatgtaagattgtgagggtggtgaggggtcaccttggactgggccaacatcctacaggtccttggactgtcaggttgagtgacaattgatctttatattttttaatgacggaatattgtaggttatccgaagaggaagcctttggtgctgtactaatctctgtagcactccatgatgttttattgccttagaaagagactgcatctttgcagttaatcaagcacttagtggaactggctttctttgactcatccttctttagtgacttcagggcttgggaatgggatctggaagagaatctctcttcatagggacaggaggagccatatgttggcttcctcatttatggtttttttttttgtttgtttgtttttttttttttttt

SEQ ID NO: 190548 - DNA, 466 bp, Homo sapiens
acatcttctgtatcaactctaatccagacagccatactaattgtccagtacctgcagcgagggctgagtttagacagagccttttctgaagcatgctgggaagtatatgtctgttcccagcattcaccagcaaaccggaagcttgtacaggctttactggagaaacatgtttcttctttgcgagcacatgaaacctggggagactccattcttggcatgggactgtggccagattctgtgccctcagctctctttgctactgaagattcacacctgtctacagtccgaagagatggacagatcttagtatattgtctcaacaggatgagcatgaaaaccagcagctggacaaggagtcagccttttaccttgcaagacttagagaaaattatgcagtcccccagccctgagaacctgaaattcaatgcagtcgaagtgaatacttactggatcgatgaaccagatg

SEQ ID NO: 190549 - DNA, 508 bp, Homo sapiens
ggaaggagtggagccataagatgcacactgaccccgcatcaggaatgctgcagataaacccagataagaatgagagacttctgaggcctgaatagtttgttcaaggaagaaagaaaggaccagtggcaggcaagaaaagctcacagaagcccagcccgtgttgcctggcaggagaggtgataaaaggaagggtccccaaattacacctttctgctgaggaataagaagaagaaacctgttgggaaatccagggacacgataccttataaggacttctggtcaccggaacttggtacttttctgttgtttaagccactcagtttgtggaacttcggtaggcggccccagcagacaatgcaaaggtcctcctgcatctagcctgctttcatccctctcctcagctctcagtattgcccctcattcactctcctagcacagccgacctcctcctagtgtatggagacactaggcacacctccactttgggcacttttcagggctgttccct

SEQ ID NO: 190550 - DNA, 547 bp, Homo sapiens
acaaccttctatataaagctcttagcacaaggtctgatatatagtaaatgcaaagtaattattagccacttctgctgctattgtttttaattaagaaaacactgaacttagaatcaggagatctggggctaggcatggtggctcatgcctgtaatcccagcactttgggaggcttaagtgggtgatcacttgagtccaggagttcaaaaccaccatggtcaacatgacgaaaccccgcatatacaaaaattagctgctcgtggtgacctgcacctgcagtcccagctacttgggaggctgaggtgggaagtggaggtttcagtgagccaagatcatgccactgcacaccagtctgggcaagtgagaccttgtgtcaaaaaaattaaaaaagaatcaagagatcttggtttgggcacccattttgcctcttagtgtctctaaccaactggaaactgcttaattaacctctgtgaatatcaataagatcaggataacatgaagatgaaatgcaattatgtatcaagacacataaagcaatgcacaaatg

SEQ ID NO: 190551 - DNA, 431 bp, Homo sapiens
tgggcagctttcaggctcttgggagtgtacacattagtccttagcagcagcagtaacagcaatgatgacagtgggcagggagcctgtcctcagagtgcatgctagtgcatagtggccacgcaggcaaacagctgtcaggctttggggaacatgcacattggctccccttgtttcagcagcacagcagcagcttccctggtgtgccacaccacccattccctgtggtgtgggactcttgagtgggctagagtgctagggaccctgctgcactgctgggtccagccagcatcatgctactgcagtcctccagtgtagggggttgttagtggtgcttcagggatgtcgagatgcaggggctatggcatcccagggcaggatgccctggttgaggttaggcactcagaatggtgctgttctgcagttgcttaggt

SEQ ID NO: 190552 - DNA, 360 bp, Homo sapiens
gactatcggtgtgtagccgttatctcatgtgtctaattcgcattccttaagaaataagatgtggagcatcttcccacattcttattgccattgtgtatcgtctttggatgatggagtttgcatttgctggatgtgtgaatctatgtgtattccaactggtgggcagggaatatagggctacgaatcggcacactcatcttgcaggcattatttttccttcccagccacaacctgctagacacctttattattattattttttccggtcacctctaagatggcttataaggtgactgcgttaactttgaacccaggaaattctctttcacacttgactgccctgccgttaggccgatctga

SEQ ID NO: 190553 - DNA, 379 bp, Homo sapiens
caattcggcaagcggcacaagccggttgggcttggagatcaggtcacccactttcgaggtgttccatgtatgaaattgacctgtaagcacttggagcaattatggccgggacaaacacgtctttggatgatggagtttgcatttgctggatgtgtgaatctatgtgtattccaactggtgggcagggaatatagggctacgaatcggcacactcatcttgcaggcattatttttccttcccagccacaacctgctagacacctttattattattattttttccggtcacctctaagatggcttataaggtgactgcgttaactttgaacccaggaaattctctttcacacttgactgccctgccgttaggccgatctga

SEQ ID NO: 190554 - DNA, 452 bp, Homo sapiens
ttaggggttgcaccctttcaaaatctgaaactttgacatatctagcagtttttacatggtttcagagggttcaagcctcttagagcctacagtagaccccaaattaggaaacgtagagtctcttctaaatcgggattctcatccaaatcaggggatcacagatacctggtctccttgagagcctttcggagggcctgtgatgttagaactatttccatcatactgctaagactttaattgactttttcactgtattgaaatttgtaccgatggtgcagaagcagtagtgggtacaacattgcgcaccttagcaagaagcacagtgatggcaccaagctgacaaccacacaccccagtagaaatagaaacagccagtttcacttagtggtctaaatgaagcaatagaatagattaattgtattatttcatgacccttgtgcacacatggtctt

SEQ ID NO: 190555 - DNA, 344 bp, Homo sapiens
gcaggcaatccatgttttcacatcagacccatgcaactgctaatttagtatatgccttttctggactgtaaatggaaacataccatatgtgggatattgcatcagacttctttcactaagcataatgttttgagatgcatccatattgtagcctatatcactactccattgtatacatatatcatttaaagaaatccaccagttaaaaaaaaaaagaaaaagaaataatctgggtatgttggtgcctgcctgcagtcccagttactgaggaggctgaggcaggaggattgtttgagcccaggagtttgacttcagagtatgcaacatagtgaggcctcatctct

SEQ ID NO: 190556 - DNA, 363 bp, Homo sapiens
aggcaagaaatctctaatataaggagggactgagcctcagcaaacctctagagaagagaaggcaagaaatctctaacatgtggcattgagcctcacatcaaacctccaggatgggaaacaccccacgtaagacaggaaatgaaagatataaagctagtgatgataacaacattccctctggtagtcccttaggtctcatgttaacatactggagggacagtgaaaggactaaacataataaaaaacaacaaatgacaaaatattgttgtttcatttggaccacagagctcatcctcacaccctcagttttctggccaaagtttcagtcaaatgaggattgaatttgtcaacttctaatagagt

SEQ ID NO: 190557 - DNA, 128 bp, Homo sapiens
aaaacaggctggatgaaatccgtctgccaccaccagccaagtgagctgaggcaggttaccaacatccctttgcctcagttttctcatctgtagatccaggcattgaagggtcttaggagaacctggag

SEQ ID NO: 190558 - DNA, 117 bp, Homo sapiens
tataatcggcattgtacatagaaaggatatggctaccttttgttaaatctgcactttctaaatatcaaaaaagggaaatgaagtataaatttttgtataatctgtttgaaacatttt

SEQ ID NO: 190559 - DNA, 431 bp, Homo sapiens
accttatgctctgacccacctcatcgaagtgtagaaagtatctcctttaatgagctacttatttatttagctcagttgctcttgctaagaattaagaattgcattcctcttatggagagaaagtaaagagaatcagaacctttagttatattattttgaatataatgtcatattcaaaatatatatgcatgcctttgaaatcaggtgcctagaagggacaggtatttgcttcagaagttatgaattccttaacagaaagggaaagtgggaaccaacatttcttaaatgcctcttatgtgccctcctggaagcagattatccattctgcttatggtttcttttaagttgcataactgttcattgaagtaaatttattggtacgaaaacaaattcataggttggtgagtttgacttttgttgggtggtcagag

SEQ ID NO: 190560 - DNA, 392 bp, Homo sapiens
tggacatcttaaataacagagatatattttctcacaatgctggaggctagcagtctgatatcaaggtattggaagggttggtttcttctgaggcctctgcctggcttgcagatggccatctgtgtcttcacatggcctttcatctatgtctctttatcctagtctgctcttcttataaggacaccagtcataatggattagggcccatcctaatgacctcattttaacctgattatctctctaaagaccccatctctaaaggcagtcacattcttaagccctgggagttttcaacatatgaatcttgaggagacacatagcccataacacttgccctcttcattttagcactgtgctagctgtcttcctgttccttgaacaagttaagcttg

SEQ ID NO: 190561 - DNA, 323 bp, Homo sapiens
gggcggccaggctggagccctgagaaagcagagcagcctaggggcaggagaagcagggggagcttgagggggtgggggctcctcaggaggcgggacggaggtgttggaggaacgcaccctccctccctccccagatcccacccagacctgggacccctcacgcaggcacagctgggaagagctgtccgtgtccctgcacacggccctgcctgtgcctagccctgaacttggccctcactctgccctgctgctcaggaaggcgtctcctggctcttgcagggtgggtggtccgagcctcagtctctcctagcacgtctgtgctg

SEQ ID NO: 190562 - DNA, 422 bp, Homo sapiens
taaagttgtggggtgaggctgccaggccaggttcaccacctcctggtcgaggagaggattgtccagatggtgcccaagcagttttctttctttttttttgtttgagacggagccttgctctgtcaccaggctggagtgcctcggcctcccaaagtgctgggattacaggcgtgagccaccgcgcctggcccccaagctgtttcttaatggggatttgaattcaggtggtgtgaggtgtgtctgggctctgtgcctttacaaactgagggccatagttccttggggaaaaaaaacctgtctttctcctctttggcctacaacacactctgatgtctacaagctggctgacaatagaaccggaggcagcctgtgcacagcagattctgtccccgtgggtctgtaggagggagtttattttcttg

SEQ ID NO: 190563 - DNA, 306 bp, Homo sapiens
ctgggattacaggtgtgagccactgcacctggcctatataggcttttttcttaaacctatttagtaatgttttcccaagtttatttttgtatttttagtagagatggggtttcaccgtgttagccaggatggtctcaatctcctgaccttgtgatccgcccgcctcagtctcccgaagtgctgggattacaggcatgagtcaccgtgccaggccacataatttttaaacaaaaagtaaaatattaatggacatgaaactcactgacatttacagagctttttttctttatattgatgtatctaaga

SEQ ID NO: 190564 - DNA, 276 bp, Homo sapiens
taaccagtgtctttctggaagccaccctgcaatttaggcctctctcacttcttcatggtcccctgtggaaacagtgggtctcccagccccaaggcccctgtgcttctctgatgccatagctctctctgctctccctgcctccaaatgaaatcagccccactccctcactagaatgtctccaggtcttgggaaaagtcactcaaggtcacatccagatgtctagaactgcagaggtgaaagggcttttagaaagcaccttgttcagctgggcgtggt

SEQ ID NO: 190565 - DNA, 406 bp, Homo sapiens
agaaacaagacccaactgcagtgtcttcaagagacccatctaacatacaatgacatccatcatccataggctcaaaatgaagggatggagaaaaatctagctagaaaacagaaaaaaagtgagggttgctattctaattttagataaaacataatttaagaaaacagtgatcagaaaagacaaagaaggaaattacataacagtaaagggttcaacaagaagagctaactatcctaactacatgggctcaacaagggagtacccagattcataatcaagttcttagagacctatgaagagacttagataaccacacaataatagtgggagattttaacacccacctcacagacagattattgaggtagaaaactatcaaagatttttgacacctgatcttgacact

SEQ ID NO: 190566 - DNA, 371 bp, Homo sapiens
acctcctaccccacgtttcttctcccctcaaccccatgtgagagctggtttctgagtgtcctggcttatgtcgctgtcttaattagatttcattaggaaaatttgccctgggtaattgaggttgttctagaaggtgaaatataccattccccttaaacaatgatgcccagaagcccccagggtggctggaatccccactatgaattgcagaaattttaagcagagcttccactaaagccaaatttaccttccgagattccctctttcccctccaacccccacttttgcctctctcttagttgctttcccatggtgctgttcatcttttctggaatggcctctcctcccctgaaattctttgctgcatcatc

SEQ ID NO: 190567 - DNA, 419 bp, Homo sapiens
ttgacttactgagggttcacccaaaggaatcataaaaagagctcaggcagttctgtggagcacaaaaacactctacttcccatctgtgagcttgattataggtaagagcagaatggctggacagctgttggggttgtgccagctgtggcagcgtgccacgcagacttcccttccagaaagagcctgctgcaaggaatgcagaacgctgacagcttctagtctggatccaccccagcatccagggtgcagcactttctcccaggcagccctctaccaatgactgagcatggcaggggtactagggcatgaccactgccatgcaacgtgggacttttttgagggcaatccttgtgccagagctccctattaggctgaccaggacatttccagagctgcaccacagtctgagactctattca

SEQ ID NO: 190568 - DNA, 351 bp, Homo sapiens
tagagtatccctggtcatccgctacagaaacaacgaagtgctacatgggtgtgttcctctttaatcacaatgttagcgtaaagctttctaacaattattcaaaatccagaggcaataaaaaatcaagaagctgaccgcataaaaggaagaacatttccacctgactgaaaagcatacacaaagtcaaaagacaacttatgaactgggagagaatgtctgcagcatactgcatgagtaaaaggctaatgtccctaccatataaaaaaattcttggctgggtgcggtggctcatgcctgtaatcccagcactttgggaggccaagacaggcggattgtgaggtcaggagattg

SEQ ID NO: 190569 - DNA, 561 bp, Homo sapiens
gataggggggacttctacacaatcattatgactacaaatctgttgacatgtcatatttaaaaaggaaaaattttaaagctgtgacgtgcttagcatagtacctgtcacttagtaagcattctatatattttaaagttattgtttcatggaaaatttcaagcatacacaaatatagagagagtaagatgatgaacccctatcacacagcttcaaaaattatcaacactttgctactctcaggactttttaaagtttgcaactacccctcctttcccattcacagtgcatataggtttttcctatcaaaagtacatgaatgtactgcacactgtatgtaagcatacacaaagtcagaagaaatttacaccaaaattttattcatcgtaaatctcttaacggtagaattatgggtgatttatttatttctcattttatccgcattttctcatttttctaaaataagcatgtattatgtaattttaatagctgattaaaagaaatgaattcaagcaaacatatgtcaaagaaggagaagttgtttccgaattatacttttagatg

SEQ ID NO: 190570 - DNA, 485 bp, Homo sapiens
tggtgactcacatctgtaatctcagcattttgggaggcaaaggcgggtggatcgcctgagcccagggattgagaccagctgggcaatgtggcgaaaacccgtctctacaaaaaatacaaaaattagccatagggatgggggtgggaggatggcttgagcgcaggagatcgaggctgcagcagtgaactgagactgcactacggcaatccagcctgggcaacagagtgagtccctgtctccaaaaagtggatgtaagaagaaaaaaatcaaatgaagattaaattccaaactcctatgccaactcctctgtcttcactactagagtgtagattagactcagatactccatggctatgatgagagcaggtaaacttgctgggctttcctccacgagttttattctataagagtaatccacatcccaggacagttcacatgacctacggcttagctgttccctgcggtgggtcatgtcttattcccga

SEQ ID NO: 190571 - DNA, 626 bp, Homo sapiens
tgacagttattcacctcctctgggcaggacaggccaggctgtaggcgtccgacaggctgtaagcttccctgttagtcccaacatgatattttaaaattctgcctgtagtaagtagtctctgtagtctcagctcagtggaccccaaggcttgctttctttttgctttcagtttacttgaaaacaagatcaaacctatcacaccaaaagtttttcctcctcctttagtcccccgtccccaatccattttatagacactgaaacggccttctgcaggctccacgcatcatctgtgtcatcaacactactacccaatgcttttcatgaagttaagtagttttcttttccttctagcttacttcttaacttccattactcaaagcagctatctttccctgtttgtcccaatccagtctcatttaccttcttgtttaaagacaccttccacattcatagcttttagggatggttcaggctaaaatcatacctgttcccttcccccttagactttcagaaatcactaactgcttgagcgtgaccttcgaattggtctccattcaaggtcttccacgtttacattattcttgccgcatctcagttttccttttcctgaatgttccatccacata

SEQ ID NO: 190572 - DNA, 481 bp, Homo sapiens
atacaatcagctcgtaccatcggaaccaatgagcatccttgagtgttttctgtgtaacttgaggatagtaacaatatcctttacctagaatgtagtaacaaaatcctttatctggaatgtagtgcaaaagatggtagttctaaggcagagagtgtacaggaatagggagaaatagttgttctggagtaaacctttgaatggaagtcagttcatttatggctaagaggttgagtgtgttggtaagaaaatttcccaatgcttctggcttggattttccttgtcttcttttccaccctgtgatgaatagcattaatttaaacctatttaaggctagtgtgggagaaaccacagcctttgttgtggtcactgctgtacacagtaggactgggtgtttcatttggttaaggcctcaagctgcttccagaggacacgggacagcctgtcggcattttaaatcttgcacagaagcagcaacaattct

SEQ ID NO: 190573 - DNA, 330 bp, Homo sapiens
tgcctgcatagggcgctagtttcgcatagttagatggttcctagttcttatgggacagttaagtgtgccacagggtcatggtgctgtgcactgttgccatgaacttccagctgctctgacacttgggataggagagaaaattgcttccatagtaggcagactgcacaacctagttgaagctcgagcacagcttgactagtttttgacattggttccctgccgagggcctggatgctttccccccattccctactggcctctgagaccatttctcaagtccctccatcccacctcttcttttcccccacactgccttgccgaggaactggc

SEQ ID NO: 190574 - DNA, 662 bp, Homo sapiens
acattaaaatctagataaataagaatgtatcccatgtctgtagattcagagacccaagactgtcaattctctaattaacttatttattcaaagcaattctaataaaaccctgacttttttgtaagctaattctaatatttatatgaatgactaaaggctaagaatagctaaagcactcttgaagaagaacatttgtggagatatgtgtgtgttggggggtgggggttgggaggaacttgctctcctggatatcaaatctccttataaagccgtagtgactaaaagagtgtgagaatggcaaagggatagagaaatttaccaataggacaagataaggaacttccaaacatatccacaaacatacatggcaacatatatgataaagtggtggataactggggaaagaaggaccatttaataaatggtactgaaaaaattacttattcaaatggaaagaatagttagatccctgtctcactccgtattcaataatttccaggtgtgagaactaaggtttagaaaaaacaaagggaagaaaaattttctgacgtaggattttttaagatatgaaataagaaactagaaaagattgataaatttgcatacattaagaacttctctttgttaaaagatacaacaaagagaatgaaatacaagccaca

SEQ ID NO: 190575 - DNA, 201 bp, Homo sapiens
atatttgcaaagattgatacaacactgcctctttaatatttgcaaaattaaacttgctgtcagtatacatttgtgaatttgttcttcttaggtggtttccagaataacattttatttcactccccattttcatgttggttatttgacaatcagcttggataagagaaccttgttacagttctcatgacgttggctttttaa

SEQ ID NO: 190576 - DNA, 142 bp, Homo sapiens
cataagagttgaggcaacactgtgggtaaatcagtgtaagacttaattagagacctggtgtgtggtgggtttcttccacaactttccacctaagtacctatctaaattattggggcctactgaatttgctgaagtgtgactt

SEQ ID NO: 190577 - DNA, 248 bp, Homo sapiens
ctgtgtccatttggacatgagaactgcagatgcagactttcatcctcggagcctcgtgtagatgctgcacgggaaacgcagaggtaggactgaggctaccacaggcaacagacttcaggttctcactgtccactctctgagccgctggaagttttaccagggccacatcttaaggttttacacagtaatgataacgaaaaagaacaaaaacaaggggccccaaggcgtatgaagcacatcggtgcgct

SEQ ID NO: 190578 - DNA, 197 bp, Homo sapiens
tcctaaagtgttgggattacaggcgtgagccactgcgcccaaccaggacttaggatttgtgtagggaaagtcagataattatttgcttccaaatcccagactcctttcagcttttgtattccgttgttgaattcatctttggaaccacctgaccttttctgtggtagaaagggcctcagttgaacaatgaattaggg

SEQ ID NO: 190579 - DNA, 316 bp, Homo sapiens
gagagcttcaatatttaaaagggaaaagtgggcttaggggaaagaggaagagtatggttgtccatgtgtcacaagagaaaaggaacaggcaggagaatcgtcaattacacattggtctcatgctcagtaaatgggcactttacagaagataagatgaacatacagtagctacctgtggagatatttaaccttttacctgtagtattctacttaggaacaaaaggaaagacagcttcttgcatgactcagctttcagcttaatttgttccttttggcagagtcaactggggtcctgactttttattttccttttaca

SEQ ID NO: 190580 - DNA, 677 bp, Homo sapiens
ttccaggctcatgctcaggaaaactaataacgttctctttgacaaaacaatttccttaattttctaggatgaatcttgaacatgtttagctcagcctttcagatatttattctttaaattaccatcctgtcaaaattgcctttacgcactgatccagaatcaccaaggcagttgccacgatgcctcccaggactgtgggtgactgggcaaactggtaatgacccgttggctctgcttcacacacacacatacacattgacacacataaatgtacacatgcatatatgtgtgtacaacacaactataaaacatagaaacatatacctgtacatatgcacatgcttacatacacacatatcacagatgtgcatgcacacatacacatgcacaccaccttttacaatatgcctgacacatttgaggcacattaaaatgccttggcaggcccagccctatagttctgtaaggtttggcaggccaaaggcttcggatgtctgcaggataccattgaaaaaatgttatcttccccttctatatgtttcttatgcacgagcacagctaagagcagccaaatagtaagctttaaagaaaagaaacctggaaaagtgaatgtgccttgcaatttaaaaattgctaacagtttcacagtgggaaaattgcatttgttggaattttcc

SEQ ID NO: 190581 - DNA, 532 bp, Homo sapiens
ttctactgtggattcaacgagataatataaataatttcccaacacagtacatggcttaatttaagtgccaaagcaatgtgagttcccttctccccatttatctttcttcattccaacaatatcctctagctgagaaatggttatatcctgtccaaacaggacgttccattatttctagcaaatccattgtgggtttctggaaagataggaggggcaaagcagtaaggatgaaatcttaatagcctagtgttgcagtacccagagccaaacccaaatatagaatatcacctcccctaaaccctgagtggaaaagctcaaaggaagagaagacacacctctacacaacgttcatgagaagaagggaaggatgagttttcttggacagcattttcttggaagtaaagtgtctgggtttcaagaaaaaggttctgactccaaggactctccaggaagcacatggagaaggttgctaagaagtagcatagagccacagtagaaagttctaccgtggctttgctgggcacacttaggc

SEQ ID NO: 190582 - DNA, 626 bp, Homo sapiens
  misc_feature (25)..(25): n is a, c, g, or t
  misc_feature (74)..(76): n is a, c, g, or t
  misc_feature (106)..(106): n is a, c, g, or t
  misc_feature (142)..(142): n is a, c, g, or t
  misc_feature (157)..(157): n is a, c, g, or t
  misc_feature (201)..(201): n is a, c, g, or t
acctggaggctgagacaggaagagngtgaggttcagtgaactataaattgcaccagtgcactccacactctagnnngggtgacagagtggaacctgcatctaaaanaaagcaaaaacaaaaacaaagaaagaaataagaaancaaacaaacaaacanaaacaaataaaaagaaaatttggatataggctgggcatgatggntttatatctgtaatcccttcagcactttgggaggccaaggcaggaggatagcctaagctcaggagtttgagaccagcctggacatggtaaaaccctgtctctaccaaaaatacaaaaaattagctggatgtcatgtaacagaggtagaaggattgtttgaccttgggaggcagagtttgcagtgagctgtgatcatgcctctgtactccaacctgagtgacaaaataagacaaaaaacaatgaagtgaagagcaatgaaacaaagtatgcctgtacactaaaaatcagtctgttgtagctatttgatgttaagaacactaaattctttagtgcctttaggtcatatttgtagtaaacacttctgttaatgttttgaaactttactatttgcaccacccccagttataagtgtacacattcttgca

SEQ ID NO: 190583 - DNA, 656 bp, Homo sapiens
ctccacaaagaatacagagtggcagaatgggtaagaattcaccaaccaagtatctgctgtcttcaagagactcacctaacacataaggactcacataaacataaggtaaaggagtgaaaaaagatattccatgcaaatggacatgaaaagcaaacaggagtcgctatccggagtcgctatccttatatcagacgaaacagactttaaagcagtaacagttaacaaagacaaggagggacattatgtaatgataaaaggactggtccaacaggaaaatatcataatcctaaatatatttgcatttaacactggagctcccaaatttacaaaacaattgctactagaaaacagcagcacaataatagtggaggacttcaatactccactgacagcactagacaagtcatcaagatggaaagttaacaaagaaacaatgggcttgaactatacaacaaaagtgaccaaatgagaatcaaatcaagaactcaactgcttttacaatagctgcaaaaacaaacaaacaaaactaggaatagacctaagagctgaaagacctctacaaggaaaactacaaaatactgctgaaagaaaccataggtgacacaaacaaacagaaacatatcccatgcttctcattatttcttgccccctgctcc

SEQ ID NO: 190584 - DNA, 327 bp, Homo sapiens
cccctcttagtaattcttacattccatttcttactttcttctgtggcatttatgacttccaacttttataattataaaataattttaattttatagctctttaggtgcacacttcttctctcctgctcaatagtaggtttttgatgtgctcaagtcttgtattccctgcaaccttgagtatagtaggtgtctaatgctttctttttgggtaaatgaatgaatcagttagttgaatgagtgcttactacaaaacagagcatgcgataggcagcgggtatctattaaatataaatatcttgttccatggccccaatcagtgaaaaatgt

SEQ ID NO: 190585 - DNA, 310 bp, Homo sapiens
caggattctctcatcacatttagatattatgtcctttggcttcttttaatctagaatggtccttcccccattttttgttactttttaggatattgagttttttggtgaagaatccaagcctgctcttttgcagaacgcccctcattctgcatttttcttatgacttcctttaagtgcccctctgctgtgctattggtgtgctgaagcgctcctgcagttaagatggcgtctgcaggtctgcctgccagaggtgctctcctgtttcaaatagcgaagcgacactattctatggatgttaattccccagtga

SEQ ID NO: 190586 - DNA, 369 bp, Homo sapiens
caccaacccttcccaaggaccctaccatttatgggtccccagccacatcttttggcagaccacctgcggtaggctgccccacaagaccaagcaaggctaggctgccctagatcacctcaaggtgtttgatagaatccccctgccatatgacaagaaaaagcagatggcggtttctgccaccctcgaggttgtacgtccgaagccttgaagaaagtttgcctacctggggcactgggctcagaaggttgactggaaataccaggcaatgacagccaccatgggggagaagaggaaggtctattatcagaagatctgttaccagaagaaaaacagctcatgaggctataggaaaaggctgaaaagaacata

SEQ ID NO: 190587 - DNA, 297 bp, Homo sapiens
taagggtgctttataacaattcaccaagagtagaactctaggcttcccactgacccttttttccctatggcatttggctggaatagaatagttatcgaataaaagtttctgtcatggtaggctgcccctttcctggtcctttagctaggcaatggactttttttttttttaatctgtacccattggcgtttctaggttactggtttcttcagcttcaagtctgggatatattgggcaaaaaggaaacccagggaacttaccaccatgtcatttctagccaccttgctttttcttccc

SEQ ID NO: 190588 - DNA, 148 bp, Homo sapiens
tgcatattagaaaacattttctgtattttagtaagtgaaaatcttataatgcaatttaatgaaattatagtttttggatttaatccacattttagttgtgtgtgtttttaaattttattatgcagtacattagaactgaaataaaagc

SEQ ID NO: 190589 - DNA, 501 bp, Homo sapiens
tgagggtgtctatgatgaaattgatatggaaatcagcagcctctgagtaggcaagttgtcctacataatgtgggtgggtctcaactgaccagtcaaaggcctttttgagtacaacaaaaagactggcctcccctgagagcaggagaattctccagcagactgctgccttcagactgcattagcaccactgcctctcctgggtcttcagcttgccagcccacagtgcagattttggacttgccagcttctgtaatcatgtgacccaattccttacaataaatatctttctctatatatacacacatccttattggttctatgtgtgaagaatgctgattcatacaatggttagtttaaagatctaattgtgaaagaatctgtggatcccaaagcatagcacaatattagttattggattgcactgggaatggccgagcactctgggggacaggatgtgagtttaaaatgactgagggcaaatttaaaatgggcaaattcaag

SEQ ID NO: 190590 - DNA, 514 bp, Homo sapiens
tacagtataaaaaagtcccccaaaaatgttatcatagatggacaggagtaagctgcaagagcctaccagcaggtccttattatagattttccattttaagattctatatactcatcaataaaattaaattttctaattattacagtttacattttgaaaatattatatacatttattctgggcacaagttcttcatgagatacaagtataggaatattttctcccaatctgtgacttgagtttttattttcttaattgtatcttttgatgagtatgttaattgcgatgaagcataattcatctattttttcttgtatggttagtgtttttttggtatcctgtccaagacatttttcctttccccaaggttataaagatatttacttaatgtttgcttttaaaaatgtacagtttgaaggcaaggagtatatgccttctgttcaattttgctgtgaatctaaaactctaaaaagaaagtcttatagtcttaccttactgtttacttttttatatc

SEQ ID NO: 190591 - DNA, 448 bp, Homo sapiens
aaggatttcttctaaccaagttaatttagcagaaatgtgcattgggtggagttacctctcttttcaacttcaaagctgggaagcaatgggaggtgaggaatgcagagaaaataaagaggagggcaggggcttcaggcaaatgagtttccatccattaaggagcggcaatttctgctagctcccctagagaccggtcccctccaataatggcctgactctaatgattcccactcctaagcaacagcctgtgttatgctggtgttgagacgaactgtgccagagaaattccctttctctcagaggtgctgctatcattacacaagagacattagttagccaggaggatgtgctattgatggggagagagaaagataaccaaagagaatgctcttccctagcaggcttggtacagctgacttaggacagaaaaggcggactgagaggttac

SEQ ID NO: 190592 - DNA, 557 bp, Homo sapiens
cttcctaatttctgtttctctgaaaatgtgggtgggtatagtagttccttattttctctgaagatctgagcctgagagcaaaccctggggtaatctgccttaaagtcttcagatgcataatttacctaccagagagctgatggctgcaggagagactgagtggtatcgagaattgtcaattaacttttatcattttgtttaccattggatagaaatatactggacttaacccaataactggtgatctaacccttataattttttcatgtgattgatgagctcgaagtgtgtgtgtgtgtgtgtgtgtgtgtgtgtgtgtgtgtgtgtgtatttagctgagtcaaatatcaccaacaaaacctgctgataaaacaaagcttgaatttcttacgtattttggcaaggaaaacctcaacttgcacaaagctttggcaatgtttcagagggaaatgtctgggcagaatttattaagaattggaagtttgatttaaggtggatatttcaatgtggggtcttgattaagactgggcaagcatcattttacaacaatccaggat

SEQ ID NO: 190593 - DNA, 104 bp, Homo sapiens
aaccaaagatcaaggaagacagaacttcctagaaagaaaagggaaaaatggcaattccacaagcagatggagccaccaagggctgccccacctaggcccctcag

SEQ ID NO: 190594 - DNA, 185 bp, Homo sapiens
taaatgcatcctgcaactatcccgttctatgtccactgccatatcctgccctatctgcgatgatccttctcaagaagggagacaaacacttccttactggtcccttctttgtgactctctattctctacagagtagccagggtaaccttttatttagaaaaagaatctttgcttgtcactttctg

SEQ ID NO: 190595 - DNA, 162 bp, Homo sapiens
ggtcaagtaaggtctctttgtagtgtcatcatacggcaaaaccctgaatccataaagacaggtgggataacaacataatacactaaattggaataatcaatgagagtttatgaccttacgaggcattcttctgaagtaccatcagcactaagaatggctcaa

SEQ ID NO: 190596 - DNA, 173 bp, Homo sapiens
aagcctaatgtcatctctttctgagatttagggttctcctacagcaaattctccttagtagttcagaatgttgtgcagccaattttattcatgtactctcagctaaaactgaaacttggaatttgtgtattaatgtttgaatagtgttactgtgccgaataaccctaatatga

SEQ ID NO: 190597 - DNA, 509 bp, Homo sapiens
aggtgccacatatgtcttgttcaaccaaatattcttaaaacctgaaaaaatagtaggtactccaaataaattggtactgcagacagtgtagtactgctataaagctacttgaaaatgtgggagcagctttggaactgggtaactggcagaggttggaatagtttgaaaagctcagaggaagacaggaagatgtgggaaaatttggagcttcctagacacttgttggatgtttttgaacaaaatgctgatagccatgtgaataatgatgtccaggcggagatggtcccagatggagatgaggaactaattgcgaactggagtaaatgtcactcatgctgtgctttagcaaagagactggtggctttttgcccctgcactagagatctgtggaactttgaacatgagagagattattaagggtatctggcagaagaaatttctaagcagcaaagcattcaagaggtgacagaaaataaaagtttggaaaatttccagcctgaccatacgat

SEQ ID NO: 190598 - DNA, 457 bp, Homo sapiens
gcaagcaggctggctcggctgagataaaggaaaaaaaagaaaacaactcaaaagagatgttgtataaaagaggatttgaatggagaccttgaatcctaggctgacaagtctggacttgagtacaaaggtattcttgttttctatttcaggagcataccccccacccccaacttctaaggatattaaaaataactgtcattacaaagtttgagagctatgaaatactactgctctgatattttaaaaagagaatgtctatgctttactcaattttcatatccctatgtgtctagcacagtgccttgcagatagcagatcctcaataagtgtttgtgaattaaatttagttgtacttgatattatctttcattttcctaaagagaaaaggtatggtgtctaatgggactcctaatgactaaaccatgaagagaaaagctaaatctctgggtacacattc

SEQ ID NO: 190599 - DNA, 382 bp, Homo sapiens
cacctgtttgctggtcgctatgtccacactgcagccagtgcgactttctaaaatgcacatccgattgcgcctctgcttaaaactcttgcagtaagtctctactgtcctcagggtggagtacagcctcgtcaggctggcagagcaggctcccacggacggcaactcaggttcctcttcaccacagtccctcctctcagtgcctcccactctgtcctcctctgtactttcctccttcttctttagattaacaccatctaccatcgccggtactcaaggaggaacttcacctccacagcaagacttatttattagtttcacttctgaaacatttcttgaatttgtttcttcctatttccactgccattttcctaattctagctct

SEQ ID NO: 190600 - DNA, 455 bp, Homo sapiens
tgaaccaggaagaaatagaaaacctgaatagaccaataacaagtaacaagtttgaatcagtgattaaaagtcttccaacaaagaaagttccaggatcgatggcttcatagatgagttctactaaagtttaaaaaagaatgaataccaattcatttgaaactattgcaaaaaattaaagtgtagggaattcttactaactcattatacgaggtcagcataacgctgaaaccaaaagcagataaggacacaacaacaaaaacataaaactacaggccaatacttctgacaaacattacacacaaaaattatcaacaaaatactagcaaactgaatccaacagaatatcaaagataacacactatgaaagtgagctatatctcaggaatgcatggctgcttcaacatacacaaagcaataaatgagacatcacatcaacagaatgaaggacaaaaact

SEQ ID NO: 190601 - DNA, 428 bp, Homo sapiens
aaaataagtggctgtttcttagtatatctctatggcaaagacataatctaattataatttacatcttttttaggtctgaccacattttccctgtctttgccttactgatttccctcaagcactagagaatgtaacttagaagttacgagtaagagctttggaatcagagttgaatttgtgttctagttttgccagttactagctgtgttctaatcaagttactttactgctctgagtgaatggcttcacctagaaaatggagatgataatcaatttacagagtttctgtgaaaaaataaaatgaaatatattcaaacagctttgtaccatgatggccacattagaaatgctcagtctctcatagccattcgaattaatacacctattgcatgccactcatttgtaatgtcttctgataatcagtgcta

SEQ ID NO: 190602 - DNA, 538 bp, Homo sapiens
cgaggcgatccaacccagagggtgtgctccagtggtcaggctttggggtctcacaggccttccactgtcatatcacaagctctttaggtcacgcttgggagaatattcataaatagacttgtacatccctagctcctgtcttctgctgcttttttccttatctgtggccctctaattatcagtgcactttgctgaactggttactgacactgtgatggcagatgaagagggcagtgtaaactgagtgaagctcttgtgttttcacctgctgtctttggcagctaagaaccagctaaagttgcctcactttactgatacatgctgttgacagatgcataaaatgaatataaagtggatatgtgtttggtagcattttgaatctttgtacaggaggagcatgccctacgtgaagtgatcatcctgcaggagccttgacctagagggattcaccgtgttacctatgcattgtgactgttacaattatgcttccggtatcatctcactcgtccgtttatgatcatgatatcagttattaact

SEQ ID NO: 190603 - DNA, 517 bp, Homo sapiens
cgaggcgatccaacccagagggtgtgctccagtggtcaggctttggggtctcacaggccttccactgtcatatcacaagctctttaggtcacgcttgggagaatattcataaatagacttgtacatccctagctcctgtcttctgctgcttttttccttatctgtggccctctaattatcagtgcactttgctgaactggttactgacactgtgatggcagatgaagagggcagtgtaaactgagtgaagctcttgtgttttcacctgctgtctttggcagctaagaaccagctaaagttgcctcactttactgatacatgctgttgacagatgcataaaatgaatataaagtggatatgtgtttggtagcattttgaatctttgtacaggaggagcatgccctacgtgaagtgatcatcctgcaggagccttgacctagagggattcaccgtgttggctaggtttggggtgtttcatttttgttctcggtgtgttctgtttgtttgtttttgtttt

SEQ ID NO: 190604 - DNA, 124 bp, Homo sapiens
aaatggttatagcaactttatttataatagctgaaagctagaaataaccacaatgtcctacaataagtgaatggataagcagtggttcgtccacacaatggaatactactcagcaataaaaaag

SEQ ID NO: 190605 - DNA, 332 bp, Homo sapiens
tccacttgcataccaatacctcctgcacatatcaaaaaaactcagacataaacaaacataaaacgtcataggagtcaacagaaactttgaccactagagggatcagaaaaggcaatgagaaagaggcaccatttaacatgggttttgaaacacggtaggatttgcacagagagcgatggaggaaaaagcatcctaggggtgggagagaagagaggaaagcaacaaatatctgaggaggggaaggaaaagggttagtgtcctcatttggctaaactgtcaaatacctcaaggcaagcagtaaggaataaggctagaagagggggtgggatcag

SEQ ID NO: 190606 - DNA, 188 bp, Homo sapiens
aaggagccctgtgttttgacacaggctagggcttgggaaccgccggcctaggacagacaccatgaaataagcatagcaacggtcacatgtcacccaccgtcagggatgtgcacggccaggtgattgcattgtcgtgcaagcatcctacagggacttacacagagctcgatggtgcggcctcctccaca

SEQ ID NO: 190607 - DNA, 358 bp, Homo sapiens
aggccagtgccaagaagacaaacgaagggcacatcatgtatcataccctactttcttcaaagccacattgtagatgcagggtagtggctacagctggtgcacagaaatactgcccagttgaaaactctcttggagtttgttgcaggggtggggggacatatccatggtcctgaatcaccagtgcctgctttagctgtggtgcactgctaacttctattcaccctcttccagaaagcacatttctggtttgcattttctctcttgattaacattttggaaactttatgttctcttgtcacagaaaccacgactttcacttcataatttaccatatacatagctaatacaatgtactttt

SEQ ID NO: 190608 - DNA, 311 bp, Homo sapiens
tagaggatccccccgtgtaaccgtagatgcagggtagtggctacagctggtgcacagaaatactgcccagttgaaaactctcttggagtttgttgcaggggtggggggacatatccatggtcctgaatcaccagtgcctgctttagctgtggtgcactgctaacttctattcaccctcttccagaaagcacatttctggtttgcattttctctcttgattaacattttggaaactttatgttctcttgtcacagaaaccacgactttcacttcataatttaccatatacatagctaatacaatgtactttt

SEQ ID NO: 190609 - DNA, 680 bp, Homo sapiens
tacctggcggataaattcaacaggctagagtcaattccaacaatctccagagctttctccaataccatactctcactgattacgctattctcagaattctgaattcactaattaactacatcctggctttttaccatgaggtcacactgtcacttttacgaaactattttttcaacagataattataaaatacaaaattactcaaaatcatattacctagaagttaactaatggccaatacacaattctgtgtattcccttcaatgtttctatatagtttaaaacagaaaaactgcataatttgtattgttattcttttcactttgtattgttactcttttatgattatttcccattttactgctaatttttctttttaaaaaattttttaaaattttttagagatagggtctcactctgttgcccagactggattatagtggcactatctcgtgcctcagcctcccaagtagctgggattataggcacgtgctaccatgtccagctatttttgcattttttgtagagacggggttttgtcatgttggccaggctagtcttgaactcctgaactcaagtgatccaaccaactcagactcccaaagtgctgggattacaggcctgaagcaacggacccaggctcttcctgttctttaatatctcttatataggggggctgc

SEQ ID NO: 190610 - DNA, 223 bp, Homo sapiens
tatggctgccataacaaagtgccacaaattggatggcttaaaaatgcagaaatgtattctctcacagttctgggggcagaagtctgagggtggcagcaaggccatgccctctgttaggccccagggaaggatgtttaattgtctcttcctaacttttggtggtttcagtaatccttgatgttccctggttatagacatcccactccaatttcagcctctgctg

SEQ ID NO: 190611 - DNA, 208 bp, Homo sapiens
actggaaatgaagacatgaaaaccagtaactttcagtgatccacgtgttttgaaagtgaattaaaaatatgaccacttagctgggtgtggtggtgcgtgcctgtagttccagctactcgggaggctgaggcaggagaatcgcttgaacccacgaggctgaggttgcagtgagccgagattgctccactgcactccaacttccagcctg

SEQ ID NO: 190612 - DNA, 122 bp, Homo sapiens
atgtttatggaattttgtgtagccacaagtaaggactagaagaaacgttttgaaaaagtggggagggggaggaaggaagagaatgtatgatgaaattggagagtagagaaaagcaggccgaa

SEQ ID NO: 190613 - DNA, 472 bp, Homo sapiens
actgagtggatgtactatttttaaaatttagccatttacatattgttgaatgggagttattgccagttatttgctcttataaataatactcttttgaacatttttatgcataaagccttttcattaaattattttatatgaattcttcataggggaagaaaactggaaagcctgtgtcatcatctttgaggacatatgccagttgactacaatggtgctaggttttagtggggatcacttggcatttcttacttaagatcctcttttttccttttggaaaggagcagtaagaattgggaggggagtaccacctctgaatcagcacatttagttttcttggcagcttttggaagatataatgtattgggacttattgcaaagttggtactgcctagtaattcactgagttatcaccctccttaaaggagtccccaggggtcagccaacactccatgacttaggcccatgatgc

SEQ ID NO: 190614 - DNA, 519 bp, Homo sapiens
agcccccctttccatcacacaaagatctgtcttatcttccttattcttgccattcttgcctagcacatagtgggtacttcataggtatttgtgggcacacgaatgaatgctgtttcttcctaccacaacagcctttggtcacccatccccctgcctatttcccaaacaactcttacttggcctttttcaagattgaatttgagtgtcacctccaccaggaagctttccctgattgcccagagctccttccctcctgaactcctctaagtctggataatgagcttcttcattgtactcagtgcaccctgaatgcacttaggaaataacagtctttacaatattctgaggttccctgttagttgctatgaaccacaagtctatttgtgagctcctcaggagcaaagtcggggggtttcttatctctatattccagcctcagtaccttctagggagtatgctcataggacggatggagaaatgtatatacgtatgggtggatggatgggtgaatggatggaa

SEQ ID NO: 190615 - DNA, 429 bp, Homo sapiens
taaaaaggcttggttgtagataagcagatctcagagtatggtttgaggatttctaggggtcccctgcgattcttccaaggagtccacaaagtcaagtgttttttataaaagcgccaacacattatttgactttttaactttcattagctcatgaattcacaatgaaaatttccagaagctgtataacgtgatatcatcactctgatttattcatttgtattcttttacacttgtatattctattgttataatgtttttgtttaaaatcctaaaatagtaaatatcgatagttatacacatgtaaataaaagctctttggggtccttaacaattttttaaaagttacagagggatcctgagacccaaaagtgatagtaagtggaattaaatgtcatagaagtcatttaagatagggactgtaaaaagtga

SEQ ID NO: 190616 - DNA, 650 bp, Homo sapiens
  misc_feature (102)..(103): n is a, c, g, or t
  misc_feature (105)..(105): n is a, c, g, or t
  misc_feature (107)..(108): n is a, c, g, or t
  misc_feature (110)..(111): n is a, c, g, or t
agtatcttttcatgcagtaactggcagaaaaaaaaaaaaaaaaaaaaaagccaagttcaaaactgttgggccggtatccctagtattaattgaaagttaaanngnannanngtgaaaaggtcaagaggggcagtgttcttctgaatgacatgaagatagactataatcagtaagaaggcagttaaaactaaagttctggccggcaggctggtcttgaactcctgacctgaaatgattcatgcacctcggtgtcccaaactgctgggattacaggcatgagccactgcacctggcccaagatgaattcttgtacaagttgtgtgacttgcctgtggcagaaggaatgaagaggcagccttgggtttgtctgttattttactaaatttcctttaaaaagatgcccctttggttccccactttagcccaagtatcttttcatatgcagtaactggcagaaaaaaaaaaaaaaaaaaaaaaagaattcaacttgggagttccttacagggattctaagagatctctcctctgaaacttttataacctgttattcactacattccctcatacattttactcttctttcccaccttaggtgctacactttcaaacgaccagactcatgagaactcactcaccatctgaagacagca

SEQ ID NO: 190617 - DNA, 688 bp, Homo sapiens
  misc_feature (102)..(103): n is a, c, g, or t
  misc_feature (105)..(105): n is a, c, g, or t
  misc_feature (107)..(108): n is a, c, g, or t
  misc_feature (110)..(111): n is a, c, g, or t
agtatcttttcatgcagtaactggcagaaaaaaaaaaaaaaaaaaaaaagccaagttcaaaactgttgggccggtatccctagtattaattgaaagttaaanngnannanngtgaaaaggtcaagaggggcagtgttcttctgaatgacatgaagatagactataatcagtaagaaggcagttaaaactaaagttctggccgggcacagtggctcacgcctgtaatctcagcactttgggacaggctggtcttgaactcctgacctgaaatgattcatgcacctcggtgtcccaaactgctgggattacaggcatgagccactgcacctggcccaagatgaattcttgtacaagttgtgtgacttgcctgtggcagaaggaatgaagaggcagccttgggtttgtctgttattttactaaatttcctttaaaaagatgcccctttggttccccactttagcccaagtatcttttcatatgcagtaactggcagaaaaaaaaaaaaaaaaaaaaaaagaattcaacttgggagttccttacagggattctaagagatctctcctctgaaacttttataacctgttattcactacattccctcatacattttactcttctttcccaccttaggtgctacactttcaaacgaccagactcatgagaactcactcaccatctgaagacagca

SEQ ID NO: 190618 - DNA, 567 bp, Homo sapiens
aatctggagtcagtctcatctactcacaaaacctgttaccaactcagggagtggcatggccatctcccagtcactgagctcaaatctcagatttagggttgattccttccactccatcccaagacctgctccttcctgtctccaacattctaccttcccagtccagcctctgctgcccacagattggaccacatcaatctcctgtgcaaaaatcctatgatctgtccattcctaggcagatttccaccccaccccatcttcatccatcaacaaagcaacccagtcaccaaatcatttactgtttttcaactgtgcccaacatttctgctttgctccagctactcgcccttggaaacagcctctccacaaatttttgcgtctctaaatcctatagcattcaaagctatgtacaaaagccccttctttcataaagttgtctgagacttactcacaattaagctttctttgacttgcgtctcactgaattctgtacctctattagagcatcggttccagttttccttgtaaagctctgtgatgcctccagagtccccggcgggggaaggt

SEQ ID NO: 190619 - DNA, 421 bp, Homo sapiens
aaataagtcttgtttaacgggtcagttctttaatgatgccactatagaagcttacatgaccataatggcttaaagctacataaagtgatcatcatttaaaaaaccccaaattgtagtttctaattctacaataaactctatgaaaaactctaaaaatatgtttagcaacaagactatatttgataaattattttccccaaagatctttatttaaaaactgttattgagacaaggtttcactctcattgcccaggctggagtgcagtggaacgctctcagttcactacaacctctgcctcccagactcatgcgatcctcctgcctcagtctcccaagtagctgagattacacctgcactccagtacacccagctaattttttatattttttgtagagatagggtttaccacactggccagga

SEQ ID NO: 190620 - DNA, 429 bp, Homo sapiens
ctctttttcctccaaactgaacctctgggaggagttgccgcccctgcggtctccattcccccgctgcggtctccattcccccccaactgcagcaccaccagccctcaggccataataatctggctctggcagctgtcactgcatggaaacgcttctccagcatcacctgctgcttccatggtgccacaggcgcctggtttgcttttctctctggccatggctccctgccatcttggtggcttctctctccctctgtgccatcctgggcctctgccctctctctgaagactctcactctgcattcgtgactttgtggtttttgtggttgaattcccagtatctttattcctgataattttttgttttttttttttttgagacggagtctcgctctgtcgcccaggctggagtgcagtggcgcaatctcag

SEQ ID NO: 190621 - DNA, 376 bp, Homo sapiens
tcatgacactgcactccagcctgggtgacagagtgagacatggtctcaagaaacaaaacaaaacaacaaccagattactctggagtaggacagtgtgctaaaaataatttagattctttgcatttcaagttgtagagggaaagtagagaaattaggctgagtttttctttgtcttcatgtgattaaactgaatgtgaaggtttacaattattcagtaaaaggtagaaacaagcaaaaatgtgcctttatcttcctttattaggtaggcagtatgtctttgaacataagtgaatttcaaattttcatcatggtactttggtttgtatgtctgtgtgttcttgaatggtagccatattattaatgtgtcaggaaatag

SEQ ID NO: 190622 - DNA, 531 bp, Homo sapiens
cagtcagtgatcaatacatcaaaggaaaaaagaattttcagtatagatttctacataaaatgatgagttttttgaatcttacgcttggtatcagatttctctgacctgttatctattatctccaagtctggattctggacagtgaggaagacatgaggggcggtggggaatttgtgtataataggcaactgaatttcttcttgtgcactcagggccttctgctcaggatgctgtagggtgctcatgcaggctacaggacatagtaccaaatggttaaacagcatgggggagatcagaagaatatttgtgcaattgataccaacaagctatttcttgggcaacatacatggccagaattttgagagtacgttgacagaaattagcaattgataatgactatgtttgaattttgcagaccaggaactcaaaggtttttaaaatatgcattaacattaaaaaagtaataaaagcactttctagtttagatgttatgagtcagattgataagtcagaagaaatggaaaacttgaa

SEQ ID NO: 190623 - DNA, 455 bp, Homo sapiens
atgacaggtcccttataatgcaggccagtgtctcatctcaaagtccactccccatcatggggcacacaacttcataattccaaatgtcaagtattaacctagatggattagaggagggggaggggtggtgagaagtcctagagtcaatctccaataacggccaaggccctgacctctttgctctgttctttcctggcctccagaacacaagggatcatggaaagtctgaggtttaccaagtgcctccagctctggtgtccaagtgtccagcaaattcctatcttctaaaaatgggtaagacattgtgctcttcctagaacagacgtacccatccccattcacatgctggcaggaaatcagctacagacatctctcagggaagtcatggggaggagaggacctggcagagggttccagttcattaatgctacctcagagggtataagagaccaaat

SEQ ID NO: 190624 - DNA, 238 bp, Homo sapiens
ctttataataaaatatttcaaatattctaagtaaggttgtgtgctcagtcttccatgatgaagctcactggtatgtagaaaatccttgagccagttatttctctaattatttcgtaggctagaaccttatcaacctagttgatacagtcaccatatgaagtaaatgctgctctaaaatatttacaatggaataaaagaatcatgaaacagtgtatactcttcaaccttttaaagtact

SEQ ID NO: 190625 - DNA, 359 bp, Homo sapiens
accctaccccacccctagcacttcaatgtgtgcagcagcctggatactttccaaaccccatttttgggtgattttgtggatgcattattacatatgcatgattgattaaatcattggccattggttattaacaactttgagtccctctcccctccctggaagttaatggcaagtgaagtgccttcctgaattctgtgagtcatattagcagattatcaaacatgaggccctcctcaggggatcttggaatcccacagtttatagttcattggtcagaagtacaagtggaaatctgggacttgtgactggcacctgcagtggggacagtggcctaaactgtagtgctatgctaattctgg

SEQ ID NO: 190626 - DNA, 435 bp, Homo sapiens
aagaagggacttttgcaatacaaagcagaaaataggtgatcaatacatatttgtatcttgcttaaatgtaaacatgaatgaatgagtaaatgacaggagactgcctctgtccctatactgttttcagtgagtcacaccatttttctcctaaatgagtctagaaaatttcttcagaaataaagtgacttaacctgtctttttttccataaatcatacggtgaaaatcctgaggagagaaataaagaccaaacacttacaaagtataattttctcttgggctttgttaactgagtaatttgtagagtttttggctttaaaaaaaaaaagtctgctttgcaccatagtgttcattatcaataacatcttttggttctgtttatatcttaattttttttgtaaccatttaagaatttagtattctgaaatgaggtgatg

SEQ ID NO: 190627 - DNA, 610 bp, Homo sapiens
ctggctactaagttgtatatatccttaaaaaatgcgagtttatttcttttaaacactttagtttattttacattttgtaacagatccttaagtccttaagggtacattctgtttttattctttttctctgctgcctctcactcataatggatataacacagagtatgaactcttatttcactgatttccatctgcatgaaccccgaggaattagatttgagagtagcttcctctacagaagtttaatgtttgttcctggcaggcacccttgggggctataaacacaaactactttaattcattagcttggagtcttccaaacaccacaggtgaagtaaatttaaaaccacaacttgtgtgagtagacagcttagttacaaattatgagaaaagattaggggttttttttccccctctgtttaaggcaaagtcaagacagacattatatcaacttgaagataaagaggattttttgtgttgttttgtttttctcacctgtccaccttgtcatggatatacagcccccttgtcaatgctggcttaatgccaactctcaatcttcaccttgggtcagctcaaggtcttgtgatctgtgtgtctagctattcac

SEQ ID NO: 190628 - DNA, 236 bp, Homo sapiens
ggtgcaagtcagctctttcctccaggggatgggacaggatgattttatgatcacgatttttggggccttgccatctatcaagttcaaaagaccagtataagagatctcagtgctcaggtacgccagtgctcagccttttcaagaaaatcttatactttctccttttgtgtacatcctactttcagcaagatgtagggactattagaccaggcatcatatgagactaaagcaagaaa

SEQ ID NO: 190629 - DNA, 520 bp, Homo sapiens
ccttgcagtaaccttgtgagcaacgtgctgaaaataatagaactagcatctcctgggttccttgaaggatgcttggagtagaaggcccaccacctggcctgttctagactatttacatgaaagagaaaaaaccttttactcttctcaaggcattgcattttgggtcttccaattggcacagtttagaccatgttaactagtatatacaataactgggcaaagtaggtgatgtcatcattttataggctaagaacctgcagctctgggaatttaagagatttatttatttacccaatatcaggatacgaatgtggagtcattatttgaactgaagtctgtcagtttaaacatttatctcccagaagttcagacctccagagcaaacaggtagcaacagatgacttgaatgagagagggatctctgatttggctaccatgtccactaactcaagcccaaactcataccacctctttccacagctccagctgctgcactgctgaacttgatcttcatgctgga

SEQ ID NO: 190630 - DNA, 738 bp, Homo sapiens
caccgccacagcacctcggcaggcgtggcttttcacctgctcctctgggacagatctgcagggggcagcgtagaaaatgagtccctgagagcatggcatctggtgaggcacggaaggcctcagaagctggggggctgctccccagggagggctgtctgcagagggtggggttctgggggcaggaaggtcttccgggcaggggcacggcttggcccttacttgctgcctgccttcagctcaggctcccagccttccctggggccccactctgtggtcctcagagacctgttccacagggattgagcccaccatgtcacttgcagggactgccccctggagtggtggggactggggcccccatggggacctccctggccctgtctgttctatctgttgactcttctgcaaaaagcaggcagagaggggaagagcaggctggccagctgtgccctactgtgtccccacgtgtcccttcatctctgtgcccagagatagggctgggctaattgtcactgcctcaggttggcccctttcccaccaccagccccagctacaggttcctaccacgctgatctatggtccagcacctggcacctgcctacccacagccccttcccctcccataaaatctagtcccatggagccagacagtagtgcccacagcagggaacagatgggcatgaaggtgctttgaagagggtcctggcctgaccaggggcgggaggctggggaaggggc

SEQ ID NO: 190631 - DNA, 587 bp, Homo sapiens
tgtctcaatcgctacaaaacaaaacaaaaccaaaaggtacgggactgggatgttaggggcatgatatcaaaggaagtaatcagcaactatggagcttggtgataaacacataggaaacagcaagtaggtcttagggtattctcattattaggtgatcaggaagtcagatattgtaaatggccagacaagattagtgttaaattctgaagaatgcaggcttactatctgctaatagaacaaacacacatctgtcaaatacaaggatgtctatctaagaaatgggtgaacctgaaagcaataaagactacattttgtaacaattcaagacttggagatgggggaatgaatcattgctagtagtagactctttaattgtttttcttcaacccctcccccccaaatgaaagacacacactcatatatgcacacgtgcacatatgtgcatgcacacacaaacacacacagttttattcattaatgacagcttctgagttaggtgctggggacatgaaaatgagccctcagagagttaactataatacaatgaaagtttaatagaatgataatactgatgtgtgaatatagat

SEQ ID NO: 190632 - DNA, 383 bp, Homo sapiens
acaaggtatgaggaaacaaaatactataaaccagttttccgtgactaccactttggctaatctatccacctatgctttctctgttttgtaaacggctctataatacctccaaaggcccatcataaactaataataatttctaaaggtgtctgttggcagagaaaatacttgcaattttaagacatgaagaatctacttcatgctgaatttaacccccacatcctttggaacactaatccattcatcttgctgtacacacaaatgtctccagaggctactgagtgatgggtgttgaatgttgaaaggaacaatacctgcatggttctctgatgctcctatatcttttgctgggtatgccaagaaggcaaggccctgaccattgt

SEQ ID NO: 190633 - DNA, 546 bp, Homo sapiens
ctaggaatagggcagtatccccatgatgcttattttgaaggggcaaggaaagacagttaaacatttttatatataaaaaatgagtcagatggtgacatctgctataaagaaaaagcaaagtataaaggaacagagattgatggaggggtgtatattttacatagagtagtcatggaagggaaataaagggagaaagccctcaataaatgttaaggactcaagaaatcatccaggatcatgagtgccgagtagttcgggaagatgtacaatacattattttatatcctgtggctgtcacacaaaagacacttggtgcatatttgctgctgaacagagaaataaaccaccaaatgtatttcatcacacttagagaaaaacaatggggagcctgggcacggtggctcatgcctgtaataccagcactttgggaggctgaggagcatggatcacttgaggtcaggagttcgaaactagccaggtcaacatggtgaaaccccatctctactaaaaatagaaaaattagccagacatggtggtgggcgcctg

SEQ ID NO: 190634 - DNA, 398 bp, Homo sapiens
ctgtcttcggatggtgagtgagttctcatgaggcgtcgtttgaaagtgtagcacctaaggtgggaaagaagagtaaaatgtatgagggaatgtagtgaataacaggttatagaagtttcagaggagagatctcttagaatccctgtaaggaactcccaagttgaattctttttttcttttttttttttttttctgccagttacggcttataaaaagatactgcggctaaagtggggacccaagggggcttcttttaaaaggagatttagtaaaattaacagacaaacccagggctgcctcttaattccttctgccattgtgcccggccagaactttagtttaacggccttctaacggattatagtctatcttcatgccatcctgaaaaacagctgtgg

SEQ ID NO: 190635 - DNA, 408 bp, Homo sapiens
atgaacaggaagcagcagatctaagagccatttaggtgctaaaactgatggccctagctgttgactgaaggtggcaagagaggaaatgggggagaggatgagacctcagcaaacacccaagcctgggtggatggtggaagcttttataaaggaggaggaagggccagttccaagtctggttttagacatgcaagcagaggcccacgagatggtcagtgacacagggctgcagctcagctggtgttgctatagtgtagaccacatccacaccaagtgagaggtaagagtctagggaagttgcacagagcagagagaagaggcccaggccagaaaaaagttgttttggcagcaatagggccaacaacacagcagggcacattcatctaagggatactgtgcaatcagtaa

SEQ ID NO: 190636 - DNA, 545 bp, Homo sapiens
catagtattctcagtaaccagacatctaaaagcagtgataacagggagacaccacgaaatcattctttgcctaagtgtagttcccatttggagataacaattccaaaggacttgaaactaaaagaagcagagaaaactgatgggagcaagatggcccaccagtgtcccgtaccctcaccaccccttacatgcgcttacacagcaaccatagtgttagggtgtgtgccggctgtggttgggcttctttgctgtggcgtgtgagtgatgctctagggccttccgcaggttgtcacggcccagaggctctggcactgaccaacacgaatggataactgtctgatgtcagtatttctttggagctgatattagccaaaatgactaaagactttgcgaagaataacttgatggagtatcataggaaaggactggtccacaacagaaggggacatgagcattttgcctcacagagagagcctggagtcacaaggtggttaaaagatggcatctagttaatgatctgatgtggtaacattttattttttggg

SEQ ID NO: 190637 - DNA, 268 bp, Homo sapiens
aggggtgggacgggtccacggactcagccaagtccatgtccagaaccctttgctcctggatgtgacaaggggcttccagacagaaattgctggcagatcgggcgcggtggctgacgcctgtaatcccagcactttgggaggccgaggcaggcagatcacttgaggtctggagttcgagaccagcctggccaacatggagaaaccccatctttactaaaaaatacaaatattagccgggtgtggtggctcatgcctgtaatcccagcta

SEQ ID NO: 190638 - DNA, 472 bp, Homo sapiens
gacgtgaatatttttaaagccccctccataacatactaataccacttgctattaaacccttaaaaaatacagatactagtagctcctgtctggtatccttgagttgtatggctgaattgcaacatcactggtagctactgctcctaagtagtaattatctctgtcttgtatacatcaagagtgtcctttaacaaggaaatatttttggctttttctatatcattccttagatactttttgatatgaatgaatatttttgggtcatgtatacttttcctctatctttcatactgattatggtttagccacagacatttgaaggatttcactttgaagaaaaaagttatatatggacattaagaattatttcttgttgacttactttggttaacatttgtagtatgctctgaaaccattgtagatatttggaaacatagccaagtttttcactgaagtagagaaaaagggtccc

SEQ ID NO: 190639 - DNA, 668 bp, Homo sapiens
cctagatcttgtgtttgtgacagcgccccctggagctgggaacgccctttggaaagccttcattaatgctactgggacaggaattccaacgaactgatgaagcaaagaatttcctattaaaaccttcctgatataatgcccttcagaaattattttagagagataaaattgggtcttgatatattatcttaaatactctctttgccattgtgaaaaataaaggaataatgatacttccttaattccagatgttaaaacaactgagaaagatccctggaaggcaggggctgctggaactcctgctcctgcttgctgtctctggacatagctcagcaccgcaggcctctgcctgtgggttcatctcagtagttcgggggtgaagtgcagagaaggacccgagagccacagtggacagaccttaggggctgagggtggtttatataatggcacaggctatagagtcacccaggattgttgatagggcagtgtggacttggtgatgggtccagagctccagccacagtgaagagaccctccctgattccatgatgctcaagcagcaaaagctcaggacagatgaaaggaggcatttatgaacatggaagggagtcactagcaaacacacacgtgattgagtggtaaggcccgaaattcaaggtatttgaaat

SEQ ID NO: 190640 - DNA, 518 bp, Homo sapiens
tgtatttttagtagagatgaggtttcacgtgttagccaatatgatctcgatctcctgaccttgtgatccacccacttcagcctcccaaagtgttgggattacaggcgtgagccaccgcgcccggccccagctctgtttattaaaaaggagatacacactgtttatgaaagaggtgacataattttattcatttgtgttccataatgtgtcctggtccaattgtgtcctcaatgtaatgccagctacacaaaaaattttttaaatattatctttattttcattttagtgtttttctttgtatggactattccataattatgagctgggagttttacttctggaacatttttgtttgttggtttgatttttttttccaagaatttattcaatttgtttagtagactaggagtttttctatttcatgttatgtttgggtcagtttgggtaagttggtttttaaatgtggtgcattttgttctctgttgaatttttagaccctcatatttcacaaagtcctc

SEQ ID NO: 190641 - DNA, 408 bp, Homo sapiens
tctgtgcctaatgtagctgagactttaaacgaaagaatcatgtgcaaagagaaaaggccagagtgtacaaaaatagaatcatggaatttcagagctagaagggactttcaagatggtctagagtctagaccaagcctgtcattttctgagtgaggaaactgaggctcagggagcctgaggtcacacagacagtggtggagcagggcaagaatccaggtctcctgactagtaactgttttcttatttcattgtggtggttattacatttcattcaaaagcccttagcatctcaaagggctggtgctgaaagagttaatggacaatgctcagagccccagagcgcagagctattctaagacaacacataacaggaataccaagggtccatgaacccagagggagcaaaac

SEQ ID NO: 190642 - DNA, 396 bp, Homo sapiens
agacttcttaatcattatacaggtgtcatgaagaggcagcatgatacactagaaagaacaaagactctgcagtcagagaacctgggttaggcctgcctctgccaccatcacctgtaattgctccaagtctgttttctcatctttgagcggagataagagtccccttgctgcctgcttcagagagttgttggaagcatcaagtgagatgtgtgtgacaggactctgcaaagtgctgtgcaaatgccactactgatgggtcacactctgacatcctcaagtgccctaatggtgttgcaggtcaaagagccctgctatgcttataaacaccagaggcaccagaggcccaatagctcttctgtgctcatcctagtgtctgttgaggaatgtgggtcagtg

SEQ ID NO: 190643 - DNA, 239 bp, Homo sapiens
cctagtgaggaaagcaaggggacctcagagggaaagctctggcagcccaggttgactcaggggtctaccctgaaactggggtccagaaagctaggaaattgtcccctcttcctcccatctcaaatcctctcttgggaacagagtggccctggctataattttatcacatacatttaattagaatttgtcttcttcatgatggtttcaagtgaagtcccaatagaaacattctaaaagaa

SEQ ID NO: 190644 - DNA, 450 bp, Homo sapiens
gacaggagcccaagagctggaaccaccaagcctgacctagaactttagaggccttgctgtaaacggggaacttgagccttcgaggagaatatgccagagatagcaacagggcagagagagaaggggagaaataccttggcttctctcctttgtcttcgattttctggcagtgcctctgattggccgaaatgggccagaaatggattcacaagggatcctgggaaatgctgtttgcagagatcagctctgtatggttgtcccatacacagcagagcaaaggagagagggggatgattttgaaatcaaacatggacataaactgcattgcactgaaaacttaccacaatatacaatagcaccttgtgcttctctttccttctagtgccaccctgaagaagcaaacactttcaagtctttcagctgattattctatagttttatttatatttc

SEQ ID NO: 190645 - DNA, 468 bp, Homo sapiens
tccacctgacaccacagcattgcctgtcccctgctcccgctcttaagaaaaagcaagaggagcatatactcaaatgattctcttgtttgacagggagggagaagagggcagagaatggaatacactcacatcagcattttgcctatttccccttgatagagatcaaccttttaatgcaaaagatctgtaaagtttcttgccgtaaatttgtggggtttttttgttgttgttgtttgtttgtattttttggagacggtgtcttgctttgtcacacaggctagagaatgagaccctgagtcaaaaaaaaaaaaaaaaaattttttttttaatttggcccattttccccccataaagtaccaacgctttttgactcaaatgtgttaattatttttaagccggggtttttaaattcctaattccaaaacctttttttttaaaaaagacaaatctgcacaggcgcaggggctc

SEQ ID NO: 190646 - DNA, 457 bp, Homo sapiens
ctgagtggctcaaattttaagagatttcaaaattaagttactgatctttagtattattaaagaagagctgaaattggggattttaagtcacaaacaacaaggatcttctgtttctattttattaaccatgttgtatgtatactttgctggtagccccctcaattccttgtggaaaagataaaagataaaaaacaagcaagcaagatcaagatggctgatggaccacccaacacttgccttctctacaaagaaggatcaaacaacaaatagataaccacacattaaatacagcatctaagaattcagcaaagaagagataaagacactctgaggcatggaaacttgagatgtataggatgggaagtaaagcagccagccagaactggcttggagctgagagccccctgcccccttattgcaggaaaaaggtaggcaggagatccccagcagtccacat

SEQ ID NO: 190647 - DNA, 418 bp, Homo sapiens
tgtgttaagaaatggggacataaatttatccaattctaatcaaggaagacctataaaaaagatcaccttggttcttacctatgtgggtggggcttaagtgatagaatttggaacatgcctagttttttattattttttttagggcacaggtttgggagttttcactatattgcctaaattagtaatttaaaaagtcaataaataaaatcagggccattcttgggctaatgatgggaatttgacaaaaactggagttttttttttccataaatttggtacaacaggacttaggtcccttaaaaaaaatctaaatctgtgctgcttcttgaattttctaaaatctagtttttactccacattctgtatgccagatctgacttatttgttatccaatgatggagatcatggctgtcactta

SEQ ID NO: 190648 - DNA, 846 bp, Homo sapiens
caatctatagtgatgctcagtatcagtcaggctaaaccttctgatttctctttaatgtccaagagcttctaacccaagagcctctatcccagtgctccaaggaaatgaagtcacatcatgacattctctctccaaaacccagttgttctctgtgacgatgccataaagtgacatctaatgactcaggtgtgtgtactgggtggcaggggcatgtcacacacaagcattctcaactgcagcctcagtctgggaacgaggtggtgcgaccctcatttccgaggggcagctgctgttttagttcccatcttatcattactggaatttcaagtgtagtaccagaaaccaaattaaaattcacaggaacgctgcactctgtactgttttcagatgttcagatatctacaaacactcgagtagaatcaagattagattttcaagtcatcagcgtgaattaagctttgaatcgatattcaactcagaactgagagaggattttacacacataatagaacatacttagccaaaaagtgcacattctgtctggcacttgcgggaaacagccaggcacagccagggactgcaggggtgtgaggagaaagaaggcctgtccttcagacattgcagggctgtctacctttactctccagagagattctgctttaaccaccaaaagcaataaaggatcctgtaaagggccatttctttgtggactctgaaaccagctttaaaccaattccaagagatactccgaaaatgtttaggggagtcactgcctctgtctgcaggtgggctctctgaagctgacattcatttagagaaagaaaaattccagatgtttacttcaac

SEQ ID NO: 190649 - DNA, 699 bp, Homo sapiens
gaataaaaaagcagaaatgtacaggccacttcctcagataccattctaactagggtcaaattatacatcaggactgaaaccacaaacacataggaaataagataaagtctttggtttttttgagatggagtctcgctctgtcgcccaggctggagtgcagtggcacgatctcggctcactgcaagctccgcctcccgggttcacgcccttctcctgcctcagcctcctgagtagctgggactacaggcatccgccaccacgcccagctaatttttgtatttttagtagagacggggtttagaatcattgtttaaatgttcttgtctgctaattttaacatcttcatcagttctgtgtcactttcaatggacagattttactctttattatgggttgtattctcctccttctttacttgcctcacaatttttgattggatgccagaaatattaatttaacttagtaggtgctggatatttttgtattcctataaatgattttgaattttgcttggagacatagttaagttacttggaagtagtgtgattctttcaggtcttgctattaatatttgctaaacagatccaaggtagtgctttttctagtgctttctattcctcactactgaattctacctataccctgtggtacttatgctattcctgatctcaagtaaatgccaagtactttttcttctaa

SEQ ID NO: 190650 - DNA, 220 bp, Homo sapiens
ctggaggtactctgccatgttaacattccctggttcagttgttgttgagagctagcttctttcttgtgtatcctgtggtttaactattcaacatttcctttgattccacaagtcaatacattttttctttttttctgagctagtttcagttgaatttctgtcacaaccaaagtgatatctatgtcaattaaatattttttctgtgttcatattcataaat

SEQ ID NO: 190651 - DNA, 239 bp, Homo sapiens
cccaaagatggctgccacttattcctgccccttctcccaacaagcagagcctatttcccttccccttgaatctgagctgtctttgtgactatttgacaaacagaataagacagaagtgatgccatgccatttccaggtttggtctctgttaacttaaaaatcacacaatttataaatttagaaaggagatcttatttttcgtaaagcattgcaacctgcaggctggccatctgcaggtt

SEQ ID NO: 190652 - DNA, 330 bp, Homo sapiens
cagggaaaagacaaggattggatagagaaggggagacaatgtcaagaagagtgtggccaagagaacatgacaatagaacaggaagtgagaagcagcacagacaagacactgcttctccagaccactgcctctgtctgaaaagccttctctctcaatcttgccagagatctttgtcattagctaatattggcttttttaataagttaaaagtatattttttctaacagtcctagtaatttaggggatcttttgtttgtgtggcagggcactattttaagatacaaagctgtgcaattttgtctccacacgtgttcatcctttcgctccatg

SEQ ID NO: 190653 - DNA, 380 bp, Homo sapiens
tgagagcatgtctctaaagttacacagtcctgggtctgaatctcagcgctggtacttcccaaatttaacctgaggcttgggcaaatcatgtgacctctcagggatttagtttcctgtctgaaactaaaggggatcaggaatatctatttcattgactttctgtgaaaactcaatgaaataacatatttaccgtgactactagagcagctgtgccatggcatattagggctcaggaaatgggagccaattcactaaaccatgcacatatcctcactcaagttctcttggaaatcataaatgatctcagcaatgtcgggcaataggttcagagtagggcagtaggttcaggggtaaaaccctctctccaagaccagcgacta

SEQ ID NO: 190654 - DNA, 646 bp, Homo sapiens
gttgaaaataaataaataacaaagaataaatatccctttctcttcttccctctgcctgtatccatataggggaaagaaaaaactgctctgagattcagtgagattatgaccttcacaaaatcatgaactttctgctgcctttttaaccagaaatctaggcaggagggtctcaccattttgcatatcctacctgttccttacaggctctaggcttttgagccttcctatcatttgaccagccaagttgcttctcagcaccttttttttcccctttgagtcagggtctgggtccagtggcccaattatagctcactgcagcctcagtatcccaggctcaagcaatcctcccacctcagcctcccaagtatctgggactacaggcatgagccaccatgcctagccttcaggcaccttccattcagaccacattttctgtggcaaactgacaacgccaatgtttgcagtttgcagtttaactacagctgtattttttgccaaacatttacacctaactactcttttccactagagtatataacaatttacagaagcatttaatgttttctgaatccccaagctcatcagcagagaagctccaaaacatgaaggtgtacatccctattttaggccttcatagaaagaaacc

SEQ ID NO: 190655 - DNA, 240 bp, Homo sapiens
ttgtctagaggatcccgggcatgctcacatgtgtgggagggagcaggagttcatgagttcccccagggactttgcacttctgcccaaaacactccttcatcagatgtcaacatgcatagctcttaaggtctctgtacaaatatgagattctatgctacgtaaaatagcaccctggccaggtgcagcagctcatgcctgcaattacagctactcaggaggttaagacaggaggatcacttg

SEQ ID NO: 190656 - DNA, 651 bp, Homo sapiens
gcagactctggggataattcattcacaacactcttacctgctcacagcaggaagcctgttcacagcaccccaggccagatcagccatggagacatttatactagacactgtgggccacctggatgccaacagacacacaagagcgccttgtgttcccatccacatcaactcagctcatcaaaaaacccatcccagggaaaatgagcttgctaataaaccaactaactaagcctaacaagaaataacagcaaattttgaggcactttacaaggagagtcacacccaggtacttgttggacccaagaagactcaggtagcaaggcagggagtggctcatgacaaccgcccggaagagtcacgtctatttagttctcgaaaataatggaaaacaaactcggttttcgcaagtggtatgctgtgtacactgagtccacatcaggtgttcttgaattctctgataaataaaaaccacaagcaactgtggcaccaccgggctggagggaagcgccggctcgcacctgtcaatacgagcagcctgggggccttatgggacagaccctttttctgaactagtggtgctggagtgaacaccttccaggtccccagggctcgcccctcaccctgaaaagattaaatcatttatttataaga

SEQ ID NO: 190657 - DNA, 347 bp, Homo sapiens
tcctggcagccagtgatctgttctccatcaatatagtttatctttttccagatgtcatataaatggaatcatacagtatatagttttttgagtatggcttctttcaccaagtataatgcatttgagatccaggcatggtgttttatagatcaataattaattccctttcattgctgagtagtattcaattgtatagatgtaccatagttactttatctattccctagttgaggaatatttggtttgtgtacagttgggggcaaatgtgactatagctgtcattctaagaatttgtatataggttattatataaatgtaggttttcatttcattttacttgggtaaat

SEQ ID NO: 190658 - DNA, 375 bp, Homo sapiens
gaattgggagcgggcaggaatgtgccttttaacaggttcctgtggtggaggagtatacagcttgaggggttccaagcttctatctccagcccagactggggccccgaattccagacttgtgtatccagctacttacttgacatacccttttggatctcaattttttttttttgagacagtctctgtcacccaggctggactcgaactcctgacctcaggtgatccttctcggcctcccaaagtcctgagattacaggcgtgagccaccgcaccaggcctttaccacggattggaccaaactttgtgctcagcacaaaggacatgctcagtaaacatctgtggactgaatgatgaatgcatgcatgactagatgac

SEQ ID NO: 190659 - DNA, 508 bp, Homo sapiens
  misc_feature (229)..(230): n is a, c, g, or t
  misc_feature (240)..(240): n is a, c, g, or t
  misc_feature (243)..(244): n is a, c, g, or t
gtcaaaatccacacagctggaatgagagacaggtgaggtccagaggctctgcagtggggcaaagaggtatctgatgcagattctccaactacctgcttaacttcaagtctgcttcatacagttgtatggtttgtgcactgcccaaagattcctggctgagggaacaagttgggaccagaatctgacctgagctctctttacagagtcttgtaccccttgtggttccaanncccagaaggncanngggtgcccctttttttttcccaaaaaaattttaaaggctccagggggggagctctcttcacctggttttccaaagtgaccagtcaggggtaggttgccccgtgtattagtccattttcatgctgctgataaagatgtacctgagactgggtaatttataaagaaaaagaggtttaatggactcacagatccatgtggctggggaggcctcacaatcatggcagaaggcaaaagtcacatcttacatggtggcagacgagagaaa

SEQ ID NO: 190660 - DNA, 694 bp, Homo sapiens
ataactgccaaatataactcaagaaataggcaagcagaatatgtttgtaccaattatgttgactgaaattaaggctgtttaggcagaaaaaatttagtaaaggcttactggaagccacatatgaggattgactggggaagacacatcagcaaagtgggtatgttccaaagtctgctacaagtccgaaggcttttataaggaagtttgggagaaggaaaggtgactcctcatatcagagttgtccttttcaccggaaggtacaatacagaggttaagatcattggcaagagattgcaacatacaggctaaaatgtctgtgtgcaagacaatcagtaaaacttcatgattctagaacaaatcagcagtgtctgtgtgtcagttgtttacatgttaatcgatatgtcaatcgtgtgaggaactgacaataaaatttgaggattccttattcaaggacaaaaggttcaccatgaatcataagaccatcaccacgtgggtaatttggaagcttgccaaatgtgacctaaggttatcaattaaataaattgaaggaatagttaatattcttccaaaaaggaaacttcaggaacagagggttttacttggaattctgtcggtatttaaggaataaataggggccaggtatgatggctcatgcctataatcctgactctttgggaggctgaggtgggaggat

SEQ ID NO: 190661 - DNA, 170 bp, Homo sapiens
gtgtatattcagggcaacttcaatctatgctcccagactgcaaaataataataaaagaaaactaaatttaaaaggatctccaaagtgattctcctttttagacccattcctgggtctaaaggaagccagacagtgaacgccaatggaaatctggcaggtccttgaacgac

SEQ ID NO: 190662 - DNA, 311 bp, Homo sapiens
acctggtatctcgtttctctaaaactggagatgggcaggtatgatcagaaaggtgctcaagatgagcaccaaacacaagctctcctaattgggaagtctgaaaaagaactgaaggggaatgactttgtcaccttttgattcagttatttaatgtcctattccattgttatcgcctaaatctataacatagcagtctgttttgtcatattcttacttatgggataggtcttggcctgactttgaaaatcattcagcattgttgtgaagcctctgttctggccactggagcaggttacttgtctttggttctg

SEQ ID NO: 190663 - DNA, 398 bp, Homo sapiens
agcacttcagttctttctcatccatttaatttatgtttgagtaaattgcttcttatctccctgagagaatggaagaggtttacaaaggagaaggagttcagctgtcttcaaaaggtaagttgtacagacagagatgagagcaatggcatgaagtgctctggaaattgtggaggagcagatgggaggaaaagatctgtacaagggagagtgagttctgtttaggacatgcccacgggaccttgggagacacagacaaggacttgggattaagtagcatatatgctgtatttaaagtggatgatgtggctgggtgcactggctcactcctataatcccagaactttggaaggccgaggcaggtgaatcgcttgagcccagaagttctagaccagtctggg

SEQ ID NO: 190664 - DNA, 247 bp, Homo sapiens
gggggtgggattgggggatccggacctagacggtcgtgcgcggggcgggggtgggctctggccctgactcctgcgcccggtgtgggaaggtgggaggccttttctaaggcaggtgttcacaccggccggaccggggcgttacccccacccggcttttcccacgcagctccttcgcgcggtcatttcttgactctctggaagaatccgccttctttatggccactgttcctttccatgtacacaccag

SEQ ID NO: 190665 - DNA, 426 bp, Homo sapiens
gtcttacagtggaaactatttggtttttcaggagaatttgctcatatatttctggcttaaattacggacattttccccttcaagtgtctgactagtcacaaacatctatgtaattttttttaaaaaacagaagaaaagatgccatatatcttacatactttactccttagaaatcccttcaggctctcactccttacttttgctttacttgcaagtttgacttcttagcttgtaatggaaggggtgtaggaggtctctgtgatgctagaagctggtgtccggatagagtaaggggagacacggaaattgtttaaaaacgtgtaaaggaactcataaagcattgccaaataggggccattttgcttagaggcaaaagcagctcctttcccaggggaatcaccaaggtatcagctgaggatcctttga

SEQ ID NO: 190666 - DNA, 382 bp, Homo sapiens
taattagtgctggctccaagcgagaggttttgtagccaacttggcatgggttcgtgaattttgattggcaaatttgaagcaaagttcagccaagctgtacatctattttgcagtgtgccttatgcacatccagagaagccaactcttccgatagatctttcagttttatgattgttggtagctgaagatattagctctttaaggaggcaaatgcttctggcaggctggcctgcactaggaataggagaaatgccttctggtttcttctaaaattaatgtaataagatgcattaatcagaattctatcaagtctacacacttggcccaggcttaagaagcaatactttgaaactgcagttggctaagcttccctattctttgt

SEQ ID NO: 190667 - DNA, 244 bp, Homo sapiens
attcattttgagctaatttctatagaagatgtaaggtaaggagttgtggattttttttttttgcatatggtgtctaattgttccaacaccattttttttcttttacactaaacaagtcctcaatatatacagcacgatttttaaattaaattacattttttttcttattactcaccactatactaacggggacagcaccatttgttaaagacattatcccttcttcatcaaattatcctggcac

SEQ ID NO: 190668 - DNA, 199 bp, Homo sapiens
tcattttcttcacagcatttaatcaccagcatttatcgtttgcctccctcaactgaatatgactgccataatgacaagaactttgttcactaggtgtatccaagcacctacaacagtgtctcaatagttgttaaataaatgaatgaaagaagaacagatattattctggcaagcagaaattgggggcagggagagggtg

SEQ ID NO: 190669 - DNA, 108 bp, Homo sapiens
atattgtatgtattttgctagatttatacctaagtatttcatttttggggggtgctaaagtaaatggtattacatttttaattttaaattctacttgttcattgctgg

SEQ ID NO: 190670 - DNA, 618 bp, Homo sapiens
agaggtcatttactcttcattcatgaagtacgtattgagcacctgctaaatgtcaggtgttctgctaggccctgggaactcggtggtgaggatgcagacaaggtccctgtccttgcggagcttactttagggtgggggtaaggatacgcaataaaaaaggaaaccactttaaagacaagttaatgatataatgattcttagggttttctggtaagggaaggtctctctgggaagatgacatttaactgaggcctgatgacagagtgatgtttcttgtgcttgaggttcattgagcttcttctttttatctgtggatttatagttggctctctctctctctgtctctctgtctctctctcctttctttcttctttcattttattttctttgtttttatagggtctggctctgttgtccagactggagtgcagtggtgcgatcttggctcactgcatgctgcttcctgggctcaagcgattctcctgcttcaggctcccaagtagctgggactacaagttcatgccaccaggcctagctaattttttaaattttttgtagagatgaggtttcactatgttgctcaggcttgtcttaaactcctgggctcaagtgatcctc

SEQ ID NO: 190671 - DNA, 291 bp, Homo sapiens
gctatgtcgatacgaatcgagccggagaagaaaaaagggttaaatgttatcggtgcttcagaccagtcacccttacaaagcccttcaaatttaagggataatccatttaggactactcaggtatatgaattgcatttgattattattttgtgtaaatctagtatcactgaattttggaatcagagttacatgagggtcaaaactctgcctagtaccagagttctttttttctttttttgacatggagtttccaggctggagtgcaatggtgggagccaaccgtggactagt

SEQ ID NO: 190672 - DNA, 269 bp, Homo sapiens
aaagaataagaagacatcaacaagcgtgcctgagggagaagaaaaaagggttaaatgttatcggtgcttcagaccagtcacccttacaaagcccttcaaatttaagggataatccatttaggactactcagactcgaaggagggatgataaggaactggacactgccattagagaaaatgatgtaaagccagaccatgaaactcctgcaacagaaattgttcaactaaaagaaaccgaaccccaaaatgtggacttcagcaaagaggta

SEQ ID NO: 190673 - DNA, 235 bp, Homo sapiens
gctatgtcgatacgaatcgagccggagaagaaaaaagggttaaatgttatcggtgcttcagaccagtcacccttacaaagcccttcaaatttaagggataatccatttaggactactcaggtatatgaattgcatttgattattattttgtgtaaatctagtatcactgaattttggaatcagagttacatgattgataggtcttaaaaggtctgcagtatggatacttatttta

SEQ ID NO: 190674 - DNA, 169 bp, Homo sapiens
aggcttcaagagctgcagccaggagatgggagaggaggtgactgttctagtccagatgaatgatagtggggcctggactgggcagtgtccttggagaaagggctgaatttgacatccgttttggaggctgggccaactggaggtgctgggacaagggggatgactcctt

SEQ ID NO: 190675 - DNA, 369 bp, Homo sapiens
caagagtcatttttgactcctcctcctccttaccttgcacaacctctacttaaatccaatcactgaattttcagatctggaaagaactttcaagataatctagtttgtgctccttaaacataaataagagaccttggggctcagacatattggctgcttgcctcaagttcttccaaccctgattataagacactttctattaccaagacttatttaattgcatttttccaaaacttccacacaaatctttttttttttttttgagagggagttttgcactgtcaccagggctggagtgcagtggcgtgatctcagctcactgcaaaagagggttcaagcaattctcctgcctcagcctcccaagtagct

SEQ ID NO: 190676 - DNA, 500 bp, Homo sapiens
ttgaggattctggggggtgttcattgtgcagatacgttaggtatttcattatggaaagaactgaagcgtttctcagggaaggaaagaagggagataggagttcccgtgaatagaaaggatcgcgtttgaagcaagagggagtgctaaatagtagagaagatgcagggaatgcataatagaatagacagatgtagtataattaataaatattggcctaagtactgaagagttattccagatgggccgggatggcctagttccgaacctgtgtgggctgttcagtagatgacatctggtaagtgtgggtctgggccgtggttggggtcactgagaattagattttagtctgtagtttggtctgtgacattttagacgtgcaccaatgagtatgagaacctctgaagcagaccttgagaaagggtctggcctgtggggattccttaggctatggagcttcgattttagaaaatttgaagtattaacacttacccgaggttggg

SEQ ID NO: 190677 - DNA, 599 bp, Homo sapiens
aataggagcatgaggataaggcaaaaactcagagattttttatcagtcccttgagtccttagaatgagttagggtctggagctgtcaacctatgaaaaagaagtataatatgggctacttacctgcctcacagtgctattgaaagatgtaatcagggtctttaagattctttcaaataacaattctgtaaagtactcagagttatgtgacactagtttttagagaaaggttacacatttacatttaagagttaatatgaagctatataattggtaagaaaacccacacagattataatcaaatcccaagtgagtttattgtaattatatttaattcatcaaatgacaagaaatttaataaagactagggcctggcgcatctcctgaaaagagaaagattctgatcagtctagggtttgcatttttatttttctcattttaactttcaaatagaaaaactggaaattaatagatctgacctgagatccatggtgaagagaaaagttttggattttttatgtgtcttactttaagcaattcacagttcacttaaagcaatagtgctgaaagtctatttagagttgctttccaatgttgtaa

SEQ ID NO: 190678 - DNA, 172 bp, Homo sapiens
aggtgacatttgagctgacattttaggtccaaaagttaagagggaagctgccacatgaagacttggggaggagctggttattttcaaggttttttttcctccccaaaacgtactacttcctcagtctttcccagatcaaaatggcaccaccatccatttggttctgaaacca

SEQ ID NO: 190679 - DNA, 554 bp, Homo sapiens
atactctgtctcaagaaaagagagagagagagaggagagaagaaagagaggagaagaaaagaaaggaaaaggaaagaaaagaaaaaagaacttgggaaaacaaaaactagacccctgtttctaatccctcctttgagtgatgctagttaaaccaaacaatgaaaggatgtatggaaaaaatcaagggtggtgaagagataggctgcccatggtctcctggctagaaaagaatgtaaaatttctacagtagggacagggcacacagagtctttcagaaagcagaaactccccagtacaccagtcataacctttatctactctttctccaacacccccaaaagctgcttggccttttgaaggcctcagaactttgtgccaaagtatcttgagactcactttggaagtgtttttctctgcagttcaatttagacagcaacctttactgagtacctaccatgtgccttgccctttcagaacttgattttgaccaaagagaacatacacacaaataattccaataaaatatggtgagacttatcagtacaagagaactg

SEQ ID NO: 190680 - DNA, 598 bp, Homo sapiens
gagtccttggtgcccaatctctgccaggcagggtcctatcttgctaccccatgatccccacatgatgattgcatggagcagatgtcattatccccattgcagatctgggtctcctgggtccctcctcaaaataagacccattcaaaagacacctcctacaacacgggtctgaactacaggtctcccgaggccactatggaaggatactggcactcattcaacagcaaaactgtcccaaaacatcttctgtagacatctgtccctctccagcgttttgcttcttgtggcagctgttctcttttctccgtctctcacttctctctctactacccccttcttggatcccttttctcacaagagctctaggccaccatttcttactcagagtgacttcctgcttctctgatctgcccatcagttgccccagttagcaagatgaagggtcctcctcaggaaccaacctccttagaaagtattagaattctgtatgctccttattttatactctggctgggtcacattctaacaaggaaactgaagcttggagaaactaagtgtttctcaaggtgctcaacagagttgttttaggaagataaat

SEQ ID NO: 190681 - DNA, 479 bp, Homo sapiens
tgcaccagcctgcgaggttccgagcagagcacgtggcgaactctggatgcccaggctgctgacccaagcacattgggagatcattacatctgtgccgttttaagttgctaattggtggtaatcttttcatccagcaacaaaaaacctttagtacttcttagggcaaaataaccatgaagcataaaggaaaatgtcatcttccctgcacattctcagccccagggacctcttgcacttagtacgtactgaacgcttgctgagtcaatgaagacatgtgttttttcaaacctgactttttaaatggcagcttaaatattttttcctttaatagcttagtggttctctgactcctgttcgctgtccccacatcagaatagcaataataaggaatgattcttccctccccctgcaaatgtagctgcctggttaacacagaacacaagctctacagacctaataaatgtctggaaaacctcttg

SEQ ID NO: 190682 - DNA, 610 bp, Homo sapiens
acaaccaaccctgaaatatattatgccaagaaatcatggaactaaactgccctcacatcacagtctatgtctctattacctatggatggtcaatgactaatgctttgagggcattttacctgagaggagataccacagctacttctgtcttggagaaaccagccccttttcccatttatatgaaccaccccaaaaaaaaaaaaaaaaaaaaaaaaagcttctctgaagtcttcaccaaatcaatgattggctaaggttacttcttttgtttttgttttacctgaaactaaaccaaaagatcatttctttcctatgcaatatcatttgcaacaatatcaacatacagccactgttccaggtacactagtctctccataaactatgcattgagattaaacaggattattaaacaccacatctttactccttattgcaacagtattcctttctgttacctttactcaagatctcatttgatttctaccttcctaggaaacctcttcagttgatcacacatccaccccacacatcctttcctgtcggaattttccgttgtgcttacaacttacttcactatcataataaatttaggatgatgagatcctctaaa

SEQ ID NO: 190683 - DNA, 419 bp, Homo sapiens
catccatgtctgtcataagtaaagggtagggctggggggcagggagtatggtgggtgcagtgctgaggtgcaagagtgccatatatttactgaccccagtctaacaccttcttaaattagaccaagatctttgcttcattataaatactgaggcgttctttggcttaaattcagaaatattaaaaagcattttcctcactccaaaactggcttcacgtgatcactgcctgaagggatattataatggccatggctttgtcatctctcctgacccagtgatacacgtgcaaactcataattcactttattgtcttttgtgatctgtaatgctttcttcagtagcttttgtgtctatggtgcaatttttaagttttataataacctctatcttgttctttcctactgtgagattgtatttc

SEQ ID NO: 190684 - DNA, 399 bp, Homo sapiens
tttgatgattatgaaatatccttctttattcctggttataatctttattctgaaatctgaagtttactctgtttgatattaatatagcccctctgactttcttttgattcatgttagtatatttttctatccttttaaactatctgtgtctttattatttaaagtgtgtttctggctgggtgcagtggcttacacctataatcccaacactttgggaggccaaggagggctgatcacctgagttcaggagtttgagaccagcccagcaacatagcgaaaccccatctatattaaaaatacaaaaattatccaggtgtgcgggggtctgtcctgcagaccctgacccaatgatggatgaataacgtgcactgatacagatactctgctttgccagtctga

SEQ ID NO: 190685 - DNA, 269 bp, Homo sapiens
atgcccccatccagagctgattctctttcttaaaccacagtatcaacaccttttgaggcactttcttctacctagtactcagttgtgtacatgtctcatctttcccattaatgagaaaatcatcatgggcacaatctctgtcttggtcattttgtatgccctattttgctacattaattaaacttgtatttcactaaagcatataataaaaagaaaggggcaagaatctaaaagttaaaaaaaaacaggcttttagtatgcattcattt

SEQ ID NO: 190686 - DNA, 1898 bp, Homo sapiens
ccctttatgaaagatttttatttcaaattgcttttccttttattatttttagggcttaaaagacaaccttcttgcttctgggacatccagcctgacagccaccaaacagttgcatcgtccaagaatcacgagaatctgcctcagggacttgatattttgtatggaacaggaacgggagatgaagtattctcgagctctatacctggcccttctgaagtgaccactccactcttccatccagatccttgctatttactgccaaagaagacacaaagcattgttgcactgtcctgaaatttcaatttctggaaaataatcaccaacatgaaagagcattgtttacagttagaaactttattaactcttacctatccatctcatgggactcttacagactcagattcatctttgtcttctgaaaatcagttatgaaatacactttgcacagaattaggcatctgcctatctgtgcattaaattaaagcaagttaaggccctatttgttactacctgcctcatttgccaaattgtagcaggtgaggtgtccttccctaatacagcatgcattgagatgcaggagaaaggaagaggcataagaaaatacaagaatgactatttcattctatattgaacctgtcccaaagtggtaggttttctgggctggaatcagaagttgcttagctaactatgacagtcaccctctgtacgtgacaggccactgtggtgactttggtcggctgagttccagtgttgtcaaaacaagacaaatggggatagattgtgcctggggttgctaattctctgcttcatatcaccatatgccgtttctggtaccaagtgaggggacatgcttgtcagggaaaccttaaaattgaatctactgatatatcttgttgaaaaaatggaaaaggtgcaaagtattagaaggaacgttagggcgttgctttcaaactgatgagggggaatgtgaaaatggtatcataaaacaggaaatgtgcttcatatgcccaagaggggaagaggtggaatcggaactccaaaacaactggtacatgttttgttgatgggcaaaaaaaaatcacagcacaaccagaaaggagaatgtaccagatgttttcaaattagagtatttcaaaaggaaaatgttattttttgttttgtattgttttaaatcccaaggatagtttttatagttccttctgtcataatatattttagttatcctaatttttaagcatgttggcacatttaaaaaatcctaattgatgatgagaaatttttaacaataggactttatgttggattctgtacttaaaaggtactgtcaatatctcactcttggggatatgagctctaaatatgagaagcaagttatatgtgttcacctgaggaagaagctgacggacaaagcaaaccctctttaaaaaaaaaaaaaagaaaattccacgtgtgtggaatacagccggtgaaaaataatcactgtagttagaatcacatacagaaaaaaaatgattgaatcctccaagaaggtatttcaaaaatgggaaatgctatacttataagaattgaaggaaaaaaaaaaaaacacctcacgtatgttattcttcatcctgttcttcccattgggactgttatggccatattctacagtatagtaaattttaaattggccacatttttttttgtttcagcaagttatgtaaaatgctataaattatgtgtatgttaaaggagtactttaagaagagatctttatccaaagttgtttttgtatatttaaatgcttacctttattttttgtaaagtgcagcatactcatttgtgtataatcttactgatcagatgtttaaaattattccaaatacttcattaaaataattattttattataagaataa

SEQ ID NO: 190687 - DNA, 4203 bp, Homo sapiens
  misc_feature (1928)..(1928): n is a, c, g, or t
gggaccctggtgaccaaagtggctccggtcagcgcccctcctaaagtcagcagcggccctaggctgcctgctcctcagatagtcgccgtgaaagcccccaacaccacgacaatccagtttcctgctaatttgcagcttcctccaggaaccgttttgattaaaagtaacagtggtccgttgatgttggtatctcctcagcaaactgtaacaagagccgagaccacaagtaacataacctcaaggccagcagtaccagcgaatcctcaaacagtcaaaatctgtacagtgccgaactctagctcacaattaatcaagaaagtggcagtgacacctgttaaaaaattggcacaaataggaactactgtggtaaccactgttccgaagccttcctcagtacaatctgtggctgtgccaaccagtgtcgtcacagttactcctggaaagccattgaatactgtaactaccctgaagccttcaagtttgggagcatcatccactccttcaaatgagcccaatcttaaagcagagaactcagcagctgttcagattaatctttctccgacaatgctagaaaatgtgaagaaatgcaagaacttccttgcaatgttaataaaactagcatgtagtggatcacagtccccagaaatggggcaaaatgtgaagaagctggtggaacaacttttggatgcaaaaatcgaagcagaagaatttactaggaaactgtatgttgaactcaagtcttcacctcagcctcacctggttccttttcttaagaaaagcgtggttgccttacgacaacttctgcctaactcccagagcttcatccagcaatgtgttcagcagacttctagtgacatggtcattgctacctgtactacaacagtaacaacttctcctgtggtgacaactacagtgtcctcaagccagtctgaaaagtcaattattgtttctggagcaacagcacccagaactgtgtcagtgcaaactttgaacccacttgctggtccagtgggagcaaaagctggagttgtgacacttcattctgtgggcccaactgctgcaacaggaggaacaacagctggaactggtttgcttcagacttcaaaaccacttgtgacatctgtggcaaacacagtgaccacggtctcactgcaacctgaaaagccagttgtctctggaacagcagtaacactgtcccttccagcagtaacttttggagaaacttcaggtgcagctatttgtcttccatctgtgaaacctgttgtttcttctgctgggaccacatctgacaagcctgttattgggactccagttcaaatcaaacttgcccagccgggccctgtcctttcacaaccagctgggattccacaggcagttcaagtcaagcaactattctcattgtttcagtagttcagcagccttcaggaggcaatgaaaaacaagtgaccacaatttcacattcctcaacattgaccattcagaaatgtggacagaagacgatgccagtgaacaccataatacctactagtcagtttcctccagcttccattctaaagcaaattactctgcctggaaataaaattctgtcacttcaagcatctcctactcagaaaaatagaataaaagagaatgtaacatcatgcttccggtctacttttatatgcgtatattaaaatgttcaccatcggtctttttttctgtcgtgttctgtcatctcttggttggatgaagttcatctgctggtaaattcctcaggaaaggctcacagagatgaggatgacatcaatgatgtgacttctatggcaggggtcaaccttaatgaagaaaatgcctgcatcttagcaacaaactctgaattggttggcacactcattcagtcatgtaaagatgaaccatttctttttattggagctctacaaaagagaatnttagacattggtaaaaagcatgacattacagaacttaactctgatgctgtgaacttgatctcccaagcaacacaggaacgactacgaggccttctagaaaaactgactgcaattgctcagcatcgaatgactacttacaaggcaagtgaaaattacatcctgtgtagtgataccaggtcacagctcaaatttcttgaaaagctggatcaattggagaagcagagaaaggatttggaagaaagagaaatgttacttaaggcagccaagagtcgttctaataaagaagatccagaacagctgagattaaagcagaaagccaaagagttacagcaattggaacttgcacagatacagcatagagacgctaatctcacagctcttgcagctattggaccaaggaagaagagaccactagaatctggaattgagggcttaaaagacaaccttcttgcttctgggacatccagcctgacagccaccaaacagttgcatcgtccaagaatcacgagaatctgcctcagggacttgatattttgtatggaacaggaacgggagatgaagtattctcgagctctatacctggcccttctgaagtgaccactccactcttccatccagatccttgctatttactgccaaagaagacacaaagcattgttgcactgtcctgaaatttcaatttctggaaaataatcaccaacatgaaagagcattgtttacagttagaaactttattaactcttacctatccatctcatgggactcttacagactcagattcatctttgtcttctgaaaatcagttatgaaatacactttgcacagaattaggcatctgcctatctgtgcattaaattaaagcaagttaaggccctatttgttactacctgcctcatttgccaaattgtagcaggtgaggtgtccttccctaatacagcatgcattgagatgcaggagaaaggaagaggcataagaaaatacaagaatgactatttcattctatattgaacctgtcccaaagtggtaggttttctgggctggaatcagaagttgcttagctaactatgacagtcaccctctgtacgtgacaggccactgtggtgactttggtcggctgagttccagtgttgtcaaaacaagacaaatggggatagattgtgcctggggttgctaattctctgcttcatatcaccatatgccgtttctggtaccaagtgaggggacatgcttgtcagggaaaccttaaaattgaatctactgatatatcttgttgaaaaaatggaaaaggtgcaaagtattagaaggaacgttagggcgttgctttcaaactgatgagggggaatgtgaaaatggtatcataaaacaggaaatgtgcttcatatgcccaagaggggaagaggtggaatcggaactccaaaacaactggtacatgttttgttgatgggcaaaaaaaaatcacagcacaaccagaaaggagaatgtaccagatgttttcaaattagagtatttcaaaaggaaaatgttattttttgttttgtattgttttaaatcccaaggatagtttttatagttccttctgtcataatatattttagttatcctaatttttaagcatgttggcacatttaaaaaatcctaattgatgatgagaaatttttaacaataggactttatgttggattctgtacttaaaaggtactgtcaatatctcactcttggggatatgagctctaaatatgagaagcaagttatatgtgttcacctgaggaagaagctgacggacaaagcaaaccctctttaaaaaaaaaaaaaagaaaattccacgtgtgtggaatacagccggtgaaaaataatcactgtagttagaatcacatacagaaaaaaaatgattgaatcctccaagaaggtatttcaaaaatgggaaatgctatacttataagaattgaaggaaaaaaaaaaaaacacctcacgtatgttattcttcatcctgttcttcccattgggactgttatggccatattctacagtatagtaaattttaaattggccacatttttttttgtttcagcaagttatgtaaaatgctataaattatgtgtatgttaaaggagtactttaagaagagatctttatccaaagttgtttttgtatatttaaatgcttacctttattttttgtaaagtgcagcatactcatttgtgtataatcttactgatcagatgtttaaaattattccaaatacttcattaaaataattattttattataagaataa

SEQ ID NO: 190688 - DNA, 4083 bp, Homo sapiens
  misc_feature (1808)..(1808): n is a, c, g, or t
gggaccctggtgaccaaagtggctccggtcagcgcccctcctaaagtcagcagcggccctaggctgcctgctcctcagatagtcgccgtgaaagcccccaacaccacgacaatccagtttcctgctaatttgcagcttcctccaggaaccgttttgattaaaagtaacagtggtccgttgatgttggtatctcctcagcaaactgtaacaagagccgagaccacaagtaacataacctcaaggccagcagtaccagcgaatcctcaaacagtcaaaatctgtacagtgccgaactctagctcacaattaatcaagaaagtggcagtgacacctgttaaaaaattggcacaaataggaactactgtggtaaccactgttccgaagccttcctcagtacaatctgtggctgtgccaaccagtgtcgtcacagttactcctggaaagccattgaatactgtaactaccctgaagccttcaagtttgggagcatcatccactccttcaaatgagcccaatcttaaagcagagaactcagcagctgttcagattaatctttctccgacaatgctagaaaatgtgaagaaatgcaagaacttccttgcaatgttaataaaactagcatgtagtggatcacagtccccagaaatggggcaaaatgtgaagaagctggtggaacaacttttggatgcaaaaatcgaagcagaagaatttactaggaaactgtatgttgaactcaagtcttcacctcagcctcacctggttccttttcttaagaaaagcgtggttgccttacgacaacttctgcctaactcccagagcttcatccagcaatgtgttcagcagacttctagtgacatggtcattgctacctgtactacaacagtaacaacttctcctgtggtgacaactacagtgtcctcaagccagtctgaaaagtcaattattgtttctggagcaacagcacccagaactgtgtcagtgcaaactttgaacccacttgctggtccagtgggagcaaaagctggagttgtgacacttcattctgtgggcccaactgctgcaacaggaggaacaacagctggaactggtttgcttcagacttcaaaaccacttgtgacatctgtggcaaacacagtgaccacggtctcactgcaacctgaaaagccagttgtctctggaacagcagtaacactgtcccttccagcagtaacttttggagaaacttcaggtgcagctatttgtcttccatctgtgaaacctgttgtttcttctgctgggaccacatctgacaagcctgttattgggactccagttcaaatcaaacttgcccagccgggccctgtcctttcacaaccagctgggattccacaggcagttcaagtcaagcaactattctcattgtttcagtagttcagcagccttcaggaggcaatgaaaaacaagtgaccacaatttcacattcctcaacattgaccattcagaaatgtggacagaagacgatgccagtgaacaccataatacctactagtcagtttcctccagcttccattctaaagcaaattactctgcctggaaataaaattctgtcacttcaagcatctcctactcagaaaaatagaataaaagagaatgtaacatcatgcttccgagatgaggatgacatcaatgatgtgacttctatggcaggggtcaaccttaatgaagaaaatgcctgcatcttagcaacaaactctgaattggttggcacactcattcagtcatgtaaagatgaaccatttctttttattggagctctacaaaagagaatnttagacattggtaaaaagcatgacattacagaacttaactctgatgctgtgaacttgatctcccaagcaacacaggaacgactacgaggccttctagaaaaactgactgcaattgctcagcatcgaatgactacttacaaggcaagtgaaaattacatcctgtgtagtgataccaggtcacagctcaaatttcttgaaaagctggatcaattggagaagcagagaaaggatttggaagaaagagaaatgttacttaaggcagccaagagtcgttctaataaagaagatccagaacagctgagattaaagcagaaagccaaagagttacagcaattggaacttgcacagatacagcatagagacgctaatctcacagctcttgcagctattggaccaaggaagaagagaccactagaatctggaattgagggcttaaaagacaaccttcttgcttctgggacatccagcctgacagccaccaaacagttgcatcgtccaagaatcacgagaatctgcctcagggacttgatattttgtatggaacaggaacgggagatgaagtattctcgagctctatacctggcccttctgaagtgaccactccactcttccatccagatccttgctatttactgccaaagaagacacaaagcattgttgcactgtcctgaaatttcaatttctggaaaataatcaccaacatgaaagagcattgtttacagttagaaactttattaactcttacctatccatctcatgggactcttacagactcagattcatctttgtcttctgaaaatcagttatgaaatacactttgcacagaattaggcatctgcctatctgtgcattaaattaaagcaagttaaggccctatttgttactacctgcctcatttgccaaattgtagcaggtgaggtgtccttccctaatacagcatgcattgagatgcaggagaaaggaagaggcataagaaaatacaagaatgactatttcattctatattgaacctgtcccaaagtggtaggttttctgggctggaatcagaagttgcttagctaactatgacagtcaccctctgtacgtgacaggccactgtggtgactttggtcggctgagttccagtgttgtcaaaacaagacaaatggggatagattgtgcctggggttgctaattctctgcttcatatcaccatatgccgtttctggtaccaagtgaggggacatgcttgtcagggaaaccttaaaattgaatctactgatatatcttgttgaaaaaatggaaaaggtgcaaagtattagaaggaacgttagggcgttgctttcaaactgatgagggggaatgtgaaaatggtatcataaaacaggaaatgtgcttcatatgcccaagaggggaagaggtggaatcggaactccaaaacaactggtacatgttttgttgatgggcaaaaaaaaatcacagcacaaccagaaaggagaatgtaccagatgttttcaaattagagtatttcaaaaggaaaatgttattttttgttttgtattgttttaaatcccaaggatagtttttatagttccttctgtcataatatattttagttatcctaatttttaagcatgttggcacatttaaaaaatcctaattgatgatgagaaatttttaacaataggactttatgttggattctgtacttaaaaggtactgtcaatatctcactcttggggatatgagctctaaatatgagaagcaagttatatgtgttcacctgaggaagaagctgacggacaaagcaaaccctctttaaaaaaaaaaaaaagaaaattccacgtgtgtggaatacagccggtgaaaaataatcactgtagttagaatcacatacagaaaaaaaatgattgaatcctccaagaaggtatttcaaaaatgggaaatgctatacttataagaattgaaggaaaaaaaaaaaaacacctcacgtatgttattcttcatcctgttcttcccattgggactgttatggccatattctacagtatagtaaattttaaattggccacatttttttttgtttcagcaagttatgtaaaatgctataaattatgtgtatgttaaaggagtactttaagaagagatctttatccaaagttgtttttgtatatttaaatgcttacctttattttttgtaaagtgcagcatactcatttgtgtataatcttactgatcagatgtttaaaattattccaaatacttcattaaaataattattttattataagaataa

SEQ ID NO: 190689 - DNA, 173 bp, Homo sapiens
cgtggaataatataagaccacttatttgataaactcttaagaagttgagagcataacattaagttgtaattctggtaaagtatttgtgtagggagccaaaataatacaaaccacatatatatctttgtggtgaagtaatttgattacagttagaacatagaaaatcagtgtgg

SEQ ID NO: 190690 - DNA, 178 bp, Homo sapiens
agtttcatgattttagctcctatgtttttgatccattttgagttaaatttatatatggtgtatggtaagagtcctacttcatttttttacatatactcagttttctcagcactgtttattgaaaagattgtttttccccccattaaatggtcttggcacatctctctttcctttcttt

SEQ ID NO: 190691 - DNA, 442 bp, Homo sapiens
cacagggcaaccctggtgccagggaggctggcattcccgggacctgaacaagccacgtagggccaccggcatctgattacaggctactgtgacctcaaaccctggccggcatcctgcaggctctgggaacctgccgtgcctggagtgtctggggaggaccgagaagtcaggacagaaggcaccttagctattctctcagcctgtagacaccctgcattttgctgagccacactcagccttccagaacttgtatccttcagcccaggtctgcccccaggagccatagaggcgtgatgttgtctcagagccttctcttcacaacccacccatcccgtggcaggatgtgagtgtcatcctgctgcagtcacaggctggagcccacaggacctgcccttgtccaggggtgcattagtctggtcccacttctcctctcccgggcaca

SEQ ID NO: 190692 - DNA, 205 bp, Homo sapiens
ttaataactccaactcctccacatttctgctcaagcatcagtttcccagagaagcttttattggcttttatcaccaggtcaaattcctatctcctagtactttgtacagtccttcatagtgctcatcaagttggaatctgacacatatatatgtgttattatatcatctccctcactagtctaagccataaagtcatggatcatg

SEQ ID NO: 190693 - DNA, 528 bp, Homo sapiens
atagggtgtttacctctcgcaagctgttggtgtcactgctggctttccgagcctcagggaggaagagtgttgctattgtagtgaaagctccaccctgtttgttaatctgtcttaactctataaattatggactctgagacttagtctaattacaattgaaacgattctgaagcattgtaatgcagtgaagtattcaaagtaatatgaacattgcatttacatttttctaaatgtcaaattgacatcattctggcctcctaccatggcacaagttttaccaaataatagctaatctgacaacatgtggtacactccagtattttgttttccattctatttcattccatcccactccattccattccagtctgttaaaaaaaaattatttcacaaaccatttgaggaagccttaatgtgagataactcacagtttgagaaacactggttcacttaataaccacctacctgtatacagcactcttccaaagaagcagtctttgtcctttataaccgtacaccctatgcagc

SEQ ID NO: 190694 - DNA, 472 bp, Homo sapiens
agtgatgagcatatggtaaataagaatttaatagattttagtgaaagcaaaataaaaggtcctatcattgtccttaaggagcttacgaaaacagagctatacgcacatccgtagacagttaccacactcaggaatagtggaaaactgacaagaccctggagatgctgtgtggggagggataatgggaacgcaggtcagcatgctctaggaatggtaagagaaactcccaatctgaacggtagtcaaagaaggtcttcttctctttggagactgaaaggctgagagggtacctgccctgctaaggaaatgaacaggacggaagaatgatggagggagaatgggaagtcctcagcacataaaagtttgagctggaaatgaaatatacaactctgcatagtcagcagattttgctgggctgggccagttcagctcagcaaggattgctgggcatgtgcttgaaggagaaaggtga

SEQ ID NO: 190695 - DNA, 248 bp, Homo sapiens
actcgtatcctccactattcctgagtgtggtaactgtctacggatgtgcgtatagctctgttttcgtaagctccttaaggaaatgaacaggacggaagaatgatggagggagaatgggaagtcctcagcacataaaagtttgagctggaaatgaaatatacaactctgcatagtcagcagattttgctgggctgggccagttcagctcagcaaggattgctgggcatgtgcttgaaggagaaaggtga

SEQ ID NO: 190696 - DNA, 478 bp, Homo sapiens
gaaatacgtacagttttatttagtgctgagttattttttctgtatccagtcatccattaagagttatttttaatctaaacttagaaataatgtaaacatccaaaccaatagggaaatggtaagtttatggtacatggtagataagcagttgttaaaacttccttaagttcttcttacatgtggcaaaaaaaaagaaaagaaaaacttgtttaggagaagttttaaagacatgggaaaaatcaggccgaggcgggtggatcacctgaggtcgggagttcaagaccagcctgaccaacatggcgaaaccccgtctctactaaaaatacaaaattagctggggtggtggcacatgcctataatcccagctactcggaggctgaggcaggagaatcgcttgaacccgggagacagaggttgcggtgagccaagatcgcgccattgcactccagcctgggcaacaagagcgaaactctgtctc

SEQ ID NO: 190697 - DNA, 649 bp, Homo sapiens
ggtcatccgctacaccatgcggagtgcagtggtgcagtcatggctcgctgcagcctcaaactcctgggctcgggcgatcctcccaccttagcctgccctgagtacctgggattataggcgagtgtcaccatgcccagctaatttttaaatttttttgtagaggcacgggggtcttgccatgttgcccaggccagtgtcaaacttctgggctcaaacaatcctcctgctttggcctcccaaagtgctgggattataggtatgagccacacgcccagcctaaagctaagttttatgtcagtaaatctgtaattaggaaattcagggtctttattttccatttactttaggaacttgtacaagccatttattctacctgtttctatatcttaacttgcttcgtatcaatctttggaaagatcttgaaggatacacaaggattatgtattacttgtgaagagctctgtcttcataagaaattgaccccttctctttacaatagacactattcctaaattgaggttgaaatttttttcagtccattattgccagtccatgttagtcttcttccagaggctgttgagtgtagaattggattagaattaatctaattaattagttgtctacaatctactgcacgatattgtttcca

SEQ ID NO: 190698 - DNA, 457 bp, Homo sapiens
actaccttgatttgtactaagacaccaacagttatctccattgcttttgtaccatcagcacacaggtgaacacagtgaaaaagacaaataacatattattatttgatcttgaagatattttgagtactactagtttataaccaatccaaaaggtattattgttccgtttgttctggtgaagaagttatagttcagaaaacttaagagaattgttcagggtcacaagtcaagagatagtaaagctagaatctgaacacagcagaaatgattacagagcttattttctttatccgttccaagggagtagcacctaatagatgacagcaagtgtccattcccatccctcttgcctagtcaaggttggtaaaggaaagggtgttaaagtcttgttaagtcagaagtacagttggttaatcgcatgttaccattttaaagggaagttattttaaagaaatac

SEQ ID NO: 190699 - DNA, 658 bp, Homo sapiens
actcaaacaatttttcagtaatatgtgctctttaatggttaactgagaaggtggtaagcttctcagttgtttgtctaagactgcagtttttaattgtaattttggaataatttcaaacttacagccgagttactaatacagaacagaaatctcccatgtatccttcacccagatacgctgttaaaagaatatctatacagtagttccctcttaaccatgaaagataatgctccaaggccctcagtgtatgcctgaaaccataaatattaccaaactctacataaattatgtttctgcctacacattaaccgacgggtagcatatagagtagatacactgcacaaagggatgatacatgttccagatgagacacagcatgacggttcaaaatttcatcatgctactcaaaatggctgcaatttaagagttatgaattatttctaaaaatttccatttaatatttttggaccacagttggccaaaaactgaaaccaaagaaagcaaaaccacgaataaaatgggactactgtattttttcctttattcttgcacgacagtttagcgaagtatagaattcttggttgacagtgcttttccttcagttctttgcagaagacctctattgttgctgatgaaaagtagactatcaatctaattc

SEQ ID NO: 190700 - DNA, 325 bp, Homo sapiens
taaaacccaaattaaagtatgaactctgcccatatccctggcgactgctgtgagtatgcagggaagaccccaggaaccgtattaaaaaaaaaaaaaaaaagtggaaatcaaataagagataatccttgaaagacataactataatagctgagctatgcaagtttgctgctttttagaaaaactgaggaaattttctgcctgtgcttagcttgtgtgggaaaaactgaagtctttctgccttagttggagtcccataggaaatgagagataaaggggtcgaaaattatttgaagacagtggcagaaaacatcccttatttggttaa

SEQ ID NO: 190701 - DNA, 547 bp, Homo sapiens
aggcagagggcaaagtgtatgcttcagcaattgcaattgcgaggatggatacggtgagaggtagaggtgggtgggtggtgatgacactgctgaggaaaaaagcttacgactaactcccaggactttgggaggccgaggcaggcagataatgaggtcaggagatcaagaccatcctggctaacatggtgaaacccagtctctaataaaacaacaacaacaacaaccaccaccaccaccagcactaagcgcacaggaggaggaaaacctggattcattatccaacaaagaggctgaagcagaaaaaagatgtggtacttggcctaaaagagtggtggcaagaaaaccagaaagaacacatgtggcacactctgaagatcaattctacagaccttggcctaccagcaacaaaaatggtgatgttaattttaaaaagaaattcataatgagaatatggttgtggaacgagttcagcattcatttgttcaacatttaccaaatacctactgtatactgggcactgtctttgcgtgtgtgtgtgtgtgtgtgt

SEQ ID NO: 190702 - DNA, 563 bp, Homo sapiens
ccaccaatgtgagtcagttgttggttgctctctgtggggtgtggggcatggagtggctcccatggccaggaagctccccttagctgagggcagttctccagagaagggagtgagctgtcagcagcccaccctcactgcagccgggcgggtgtaccagccccaaggaggggactgcacctgggaagtttgcttaattctttggaccttgctttgctcatgaatctttccaaagtgagcataataacagcgcccacctcccagggtggggctgacggactgtttagcacaacagctcagaaagggcttgagagttgttatttttatgatgttaggattgcttgcaaactgggggtacatgctagttctttgaattgggttatccttgctaagtgtcatgtgcgtgcgtgagtgtgtgtgcgtgcctgtgtgtgtgtgtgcctgcgtgtgtgtatgtgtgtttagctctctttaagcatcccagagacaaagtggttctagatgagggatgagacagggtcaagaaaaagaaaaggaaagctacccagggtttggcaacattagac

SEQ ID NO: 190703 - DNA, 524 bp, Homo sapiens
cgtcagcaggatccgttggtcgatcactgtactgtgtcagagaggaaattcagtaacaatataaaatatctgcttttcagaagcatatattcttgttgaagaaaacagtagacactaggcagcttattaagcaacataatgtgtgacctgaaaatataggtgctattgaaagtaatgaaacaatgagatcaagatgggtggggacagttaagaagggggttttctctcatcacctctttcttcttactttacaatctaattccggtctttactcaattgcaattgtaccttgaagaatactactgacttaattgtcaaggccttactattcaaaggcctttttcagttttcaataagcctcacccccttaaaatacaggacacaccgaccattccctacttattaagaatctcttctcctggcttctcagacaccaccttgttatgtctttagtatacttctgttttctttttttttattattaagatgggtctcgctctgtcgcccaggctggagtgcagtga

SEQ ID NO: 190704 - DNA, 228 bp, Homo sapiens
atttcttgatcgatgaaaggcaggtccaaggatacagatgcagagttgatacttttgcagaccagtcacacagagtgattcctgctaggtaaagcctagcacagtacactcgcatagatgatgcttaatacacatttgccataaaggatagcacccagaacaatgtaacattttaaaaccagtctggatagaattctagatatgtaaccatcatgaaagctttatttc

SEQ ID NO: 190705 - DNA, 541 bp, Homo sapiens
taatcctacttcagcaatcctcaccaagacctgggggtctgggtgaggaagagaaatttgaaggagaaacagaaaagtgatgctgaagaaaatggtggcactgtcaggcagaagcaggaagcaagggtcttggtgaggggcaaaagcaggaagcaagttcttcctcctggtgggagatggataggggaggcagtaagataaactgaggcgatataagtaataagatgaaacggggccatgtgatcacccgaccccagggcagatggagggtgtggggaccgccacaggaagggacaatggaatgaaccccacagggcgagaaggggcagcctgcaagagacgggggtggggaggcccagtgagggcaggctgaggggctggcttgggggctgtactgggtcagggccatggactctgttgttggatttgctatgatatcctggtgctgcccccacccagcatgtaatatgctcaggtggattctctcccaagcccagcttcatgggctgaaaaagggatgggctgtggaggggagaggaga

SEQ ID NO: 190706 - DNA, 163 bp, Homo sapiens
aatgagtaaggccagtgcttttcatcaccatgcatttctagcagccacactggctataagccctcattcatggataccatggtacagtgatttcctggtccttcataagaattaactttaaccttatttcataatctactttattctcatccaattgtcacgt

SEQ ID NO: 190707 - DNA, 195 bp, Homo sapiens
tttaagtaattctttcttcttttttatatccccttaaatttatggaacttctgaaatgaatctctctcacaggcaacaattttagttttcaatgtaacaaagtaaatttattcacttagttagtattgcattccattttacagaagattcgtatctgtgagtttccccacctccttgctcaagctcttcccaagc

SEQ ID NO: 190708 - DNA, 510 bp, Homo sapiens
cagaatgattggataaatttaaaattatattttagtaatcactggtaatgtcattgcaaagatatgaacttgcatgaaattgttctggcccttattctgtaatgggcattgccatctgttcagcataatcagttctttcatacttccctgataaatgaaaacaatacaaatttctattgaaacaatatatcagggaaagaatatgttctactgaatgaggaaactaaaaaaagaaagtcatattcagcaacctgggatgatttctttcaattttaaaagttctgagaccaataactttccttaagaggaaagctttataaaattggttgaaaattcaacaaaaaatagctcctgttatcaagtccataagtatcttatgtccatttaaaaactgaaggaatagctttttccataatcctttgacatttttatgcgcactgcttccatgatcaagccatttggcagtaataaaacagaaagctggctcaaccattatcctccacattaaaa

SEQ ID NO: 190709 - DNA, 216 bp, Homo sapiens
cgttgtcagtgctaccattgataaagtccagcttgttgaaagtgtctggaaaagtaaatctctcaattaatttcataaaaggctattactgaaatcagcatgaatatttccatgtccagccttggatatgcttaggtctttgacagcttgactatctctatgattgggcaacaaggacagggttttaaaggacaatgtctttttactctattgctt

SEQ ID NO: 190710 - DNA, 580 bp, Homo sapiens
gcctgctgctcacttgctgctatggggcgtgattcctaacaggccacagaccagcagcggtccgtggcatgggggttggggaccgctgctttagtgtgatgcagataaagatcatgagaagcaagccacacgaggaagtaagtaacctgttgctattattggtatggaaattgagacccatggaattttgacatgctcttggctatacacatcagaataattctcctagaagagatgtgaagacttacatccaggcgttctgtttactacaagaaaacaaaattaattgagtcagagttaataatctggatgcataaaatatatattgaaaattaataggctgggcatggtggctcatgcctgtaatcccagcactttgggaggatgaggcgggtggatcacctgaggtcaggaatttgcgaccaacctggtcaacatggcaaaaccccgtctctactaaaaataacaaaattatccaggcctggtggcacacgcctgtagtctcagctactcagaaggctgaggcaggagaatcgcttgaatccgggagatggaggttgcagtgagccgagatagcacc

SEQ ID NO: 190711 - DNA, 460 bp, Homo sapiens
attccagaaacagtataccaccacgtggtaaaggcttacatttgagccttagttattttggagatcattttcattgtcacctatcatcatggcctcccaaagtgctgggattacagatgtgagcaaccacacccggcctacatttggaattctttgtcacatttggtttagcacaggcaatccgtgttgagccttagcattcattacattaataaatggaatgaatacgttcacctgagacaattaactagcttctgctagtatttaatgctcaatagtatagctgaaaagatgataattaaatgggattttattttattaaaaaacataacttcctcagctgagcaagggattttataactttaaaacaaccttattattgtaaacatagtatatattattattgaacattaggagatgacagaaaactaagaaaagtaaaggaaaaaaaaggactgta

SEQ ID NO: 190712 - DNA, 365 bp, Homo sapiens
gccctagaggatccggtcactcatccatgctacacacccggcctacatttggaattctttgtcacatttggtttagcacaggcaatccgtgttgagccttagcattcattacattaataaatggaatgaatacgttcacctgagacaattaactagcttctgctagtatttaatgctcaatagtatagctgaaaagatgataattaaatgggattttattttattaaaaaacataacttcctcagctgagcaagggattttataactttaaaacaaccttattattgtaaacatagtatatattattattgaacattaggagatgacagaaaactaagaaaagtaaaggaaaaaaaaggactgta

SEQ ID NO: 190713 - DNA, 541 bp, Homo sapiens
agactagagagagccatcaaggaaagttgatcttgaactcagtttggaaagatgattacgagatcgtttaaagaaggcacagtggcacaaaatagagtcatattggaagaacagatggattaattgcatggataagagaagtaggctgctgactgagtccaaaacaagaagcctgggccacacaatgaaagatcttaagaccaaatttaggagatgaagaacagctatttggatgtcttctggttttcttaaactgaattcaaaactaagatggattatctcctgtgttcacagaacattcctaattggacttctgacaatccaggtttgcaagtttaaagctaatggtcctctttatctagctgctttttgtttttcaacatgcatttccaattaatcatcatactgtattgcctttacaccacgaatgtatcacaattcagcgtttaaatatagttatcccttcaattgtcctttctaacactgctccttattcatcacttactcagaagatttcaacaatgaagcggctcccgtgcat

SEQ ID NO: 190714 - DNA, 142 bp, Homo sapiens
ggctggagatgtatttagctgtgcagcagtgactgctgttctgtagagttctaaggcagcattacagggagaagccgtcttgaactgactctctaggtttgttgctattgtagtgttcggttaaaaaattcaagcccttggg

SEQ ID NO: 190715 - DNA, 944 bp, Homo sapiens
ttcccccaataaaaagctctggggatgaaagttcttttggcttttatcttttcgatttaaaaatttgagaagaaaaatgtgactagagatgaatcctggtgaatccgaaattgaaacacaactcccccttccccttcctatcctctcggttttagaaccgcgctctcccgccccaggagattccttggggccgagggttttccggggaacccgggcgcccgccccttctactgtccctttgccccgcgggcacagcttgcctccgtctgctttctctacttctggacctctcctcgccgggctttttaaagggcttctgcgtctcaaaacaaaacaaaaaaaccctttgctcttcccaaccctttcgcagcccgccccagcggtggcgcgggaccagcaaaggcgaaagccgcgcggctcttgccgggcgcggacggtcgcgcaggggcgcccgcggcctccgcacccggacctgaggtgttggtcgactccgggcatccacggtcgggagggagggctgagctgttcgatcctttacttttcttcctcaaagtctacctgccaatgcccctaagaagaaaaccaagtatgtgcgtggagagtggggcggcaggcaacccgagttcttgagctccggagcgacccaaagcagcaactgggaacagcctcaggaaagggaggtcgggtggagtgggctttggggcaggagtcatggggcccgggccccggggacgacctggcgctcccggccctgctgaacgctgagttgcgcctagtcgggttttcgaagaggcccttgcgcagagcgacccacgcgcgcggcagcatcttcgattagtcaggacatcccagtaactgcttgaactgtaggtaggtaaaattcttgaaggagtatttgctgcgtgcgactctgctgctggtgcaacggaggaagggggtggggg

SEQ ID NO: 190716 - DNA, 459 bp, Homo sapiens
accacatagatagtcaccgctccctcctcaaactccctgggagtgcaaagggctggatctgcactgaaagtgagatttaagaatgagaaaatgcaggagagacactccaatgggaaaaacccatcacatcccatgacaatggcaaccagtcggtccctgctccaaaaggagaggactctaagcagttcgtcaagagcccaaggacgtgggaggaggcctcttttcagaggagtgatggcttcctaagaacaacaatggccctgtcgctttttcagcttcccattaattttccataaagagcagttttcttgacgagcgcttgtgtcaggcagggcctgatgcttcagaaacctgtaattattcttggctccccaccccctacagcctctgcacctgtgtcagttcaaggcaccagctggccatgtcttgccccctgcctcttaagagggggagcggtgg

SEQ ID NO: 190717 - DNA, 411 bp, Homo sapiens
agggagacttccagaatggaagctattcttttcactagttgtgatggttcagaatggctgctaggaggaatcagaatatgactgagctgctgcttgttgttctgcaagggaagataatgtcctacaatggagatgcctggatgcatttttagctacgaggtagctatccttattaggctcaaagcagaatgcatttaaataggtcttggttgttttctatgacaagctgttatctctgtgatcttcagtaagataagtaaattttctaagtcaccctctttaaatcttattttgtggtatgatgatcatacattcagggtacctagcatataatgttcaaaatagtagatggttattgtttcattgatcaaaaagattaggtatataatctattcttccacagcccccttc

SEQ ID NO: 190718 - DNA, 116 bp, Homo sapiens
acagtgagctataaggtcctaggataaagagtggaagtcctagcttccgaagcctttgtagactggaccttaagctctgagggacccaggtgaacatctctgagaaccaatcagac

SEQ ID NO: 190719 - DNA, 172 bp, Homo sapiens
aaaaggtaaggcacagaggtgagtcaatgcagcaatcaccagcagcttgaagttgtcagtgagtaaagcgtaagtcaggcagtcccaggagaggaggctgcagatgaagttcagctatcagaccatggacacacgcttgatcctcatatacccccagggtttaaattctcag

SEQ ID NO: 190720 - DNA, 407 bp, Homo sapiens
acataaaagtatgaggcagtaggaaaaaaacatgcttaatttcatcaactattaatatgaccttgtattcagaatatgcatgatgtcaggcacataacagatactcaaaatatatttgttggttgaatgactgagtcttgcatattttcagcatctgagttgtgcaaagatcttagctttcttttcatgaaaagaacactaacagttttactaggactaggtgttttcttgccagaagaaatgcttttaggcatatgggaattataataagtatcccaatatgaaatttccttcttcagataaaaaatgaaaatgtcaagatggttccatttcttttcaatcttgcccttctcctttctcaaagaaagccttgctgtttctgaacagtcattcatacatacatctat

SEQ ID NO: 190721 - DNA, 562 bp, Homo sapiens
tgactatagtcaataatttaattgtcacatttaacataactaaaagaatataaccgcattgactgtaacacaaaggatggttgcttgaggacatggataccccattttccatgctgtgattacgcagtccatgcctgtaacaaaacatctcacgtaccccataaatacatacacctactatgtacctacaaaaattaaaaattaaaaaaaagaaaaggagggaaaaaagaatcccttccagagtgaaggaatagggtaaatgacaaagaaagaagaaagagcatgaaggtttggtgggagagtgagagtctggctgtgctagaatgtaaactgcaggcagaaaacagttggaaatgtggttggagaggaaaattaagctgagtttggatttcaggccaaaggcaaggtaataaatagagggcaaagatgactttagcatgctaggttgcttgcagaaactgtgctgaaattaaactttattttccaacccagactgttaaaccaattgtgtttatctctaagacaaaactgatctgaaaacctccctgagaaaatgtccatt

SEQ ID NO: 190722 - DNA, 459 bp, Homo sapiens
gccacatatggaactaataagtcaggcaataagtggctttgtgtgaatgaatacagtttggaagggtggggacatgtgtgtgtgttgtctaaactgcatttctcctgtgccaaagccgaaatgacacaatgattcctgaatccccagaggctttcctggcctggaaaaattgtgtttaaaaaataaaaataaaattgagcactttgatattaaattaaacctctcagctcaataggaggatgcttactgggtgcaagaacacagcattattcccaacagtcaagagatggaaagcacccaagtgtccatccctgaatgaacagataaacaacatgtggcatctacacacaacagaatgtcactcagccttaaaaaggaagggaattccagccaggcacagcggctcacacctgtaatcccagcactttgggaggccgaggcaggagaatcacttgagtg

SEQ ID NO: 190723 - DNA, 354 bp, Homo sapiens
atggaaagcccctgacataagctagaagtatctggggtccacagaaaggcctggaaaagaagcaaagaaaagatggagtttttttgttttgttttttagagatggagtatcactctgtcgctcaagctggagtacggtggctccatcgtagctcaccgcagactcagctgcctggactcaagtgatcctcccacctcagcctcccaagcagctgggactacagactagggctaccacacctggctaatttttgtatttttcgtagagacgaggttttgccttgttgcctaggctgatctcgagcttggtctcgaactcctgggctcaagtgttctgcccacctcggcctgccaa

SEQ ID NO: 190724 - DNA, 290 bp, Homo sapiens
gctgctagtctacacaaatatcaaatatatgagatcaaaccttttgcatcacattgaggcacaaaagcagagggcaggaaaatttgtatgttgtatgttattaatcctctaagaactcaataatctatgtaggcatggaggtaaattttagcagaaagaacccgataacttatgaaaaaattaagaaaagcaagcaatatgaagaaaatgcaaaactaaccaaatttcttcagtttgtgaggtgtagtgtctgtggtctttggggacgcgggatacattgatgatgaagg

SEQ ID NO: 190725 - DNA, 122 bp, Homo sapiens
tttagcaagtgagtcacccaaatgaccatcaaacaagcaagtagcagagatgggacttgaagccacaggaccttggctcctgggctcttacccatgaagctacactgtactcctaaaggcaa

SEQ ID NO: 190726 - DNA, 419 bp, Homo sapiens
catggacctttggaaacctaaccccaatgagaaatggaagagacagcattgctgtggactgtcacctctgcaagagtgggactgtccctctttgcagacatgagcagctctctgcccccatctttgtacaaacacttcagatatacacacttggggctttcaactaagtctctgttcctgctactgtgtctcctgaagaatactggagtcagccatgcagcactgtcacatggggattcaggtacccagctttgctggtagacaaaacacaggaagcccactgtttactaagctccccatagttcaagaggcccctgcaggggaaagaagatggcagtaaggtcaaggaatcaacatcaaggactcatcaagctgaggtatgcagcaaagtaaagatggaggccagggatggccaccag

SEQ ID NO: 190727 - DNA, 257 bp, Homo sapiens
tgctaaccatattacagtaatttttttcatttattaacaaatatttattaaattgttgctatattctacgcattattataatctccagggatagacaaaagctctttccctattggagcttacttcctggtatgggagagataaacaataaataataaactcagggaataagtaattatgtatacgtaagaaggtgataaattccatggaataaggaagaccaggtttaatgtttagtgggtggattgaagttttaa

SEQ ID NO: 190728 - DNA, 305 bp, Homo sapiens
agatgcattaaagcaatctttgtctatcaagttatggaggtgtatctaaattttatgccttttatagatttccttccatgttaactatacagtgaatcatgccccataatcttactgatcaggtttataagaatatcatgttagctgtaggtaacagagacccccttttatgatatgaagcagtgttgttgttgttctttgagatggagtctcgctcttgttgcccaggctggagtgtaatggcacagtctcggctcactgcaacctccgtctcctgagttcaagccattcttctgcttcagcct

SEQ ID NO: 190729 - DNA, 341 bp, Homo sapiens
tgggctttgaagatgagggaggcgaatgcaaggagcagagatcagcctttaggagctgtgagcaactccccactgagagcaaggaaggcagggacctcagtcctaccaatcataaggaaataaactctgccaacaacttgaatgagcttgtaagtggattcttccccagagccaagctttgattttaacctcctgagattctatctagagaaaccagtagagaccctctggacttctgacttacagactgtgagatagtaaatgagtattgttttaagatgctaagtctgtagtagtttgttatgcagcagtagaaaatgaatataaggccgggtgtggtg

SEQ ID NO: 190730 - DNA, 908 bp, Homo sapiens
gtgggagaattgcttgagcccaggagtttgagatcagcctgggcaacatagggagatccccgtctctacaaaacataaaaaaaaatttagctgggcttggtggcacatgcctgtagccctagctacatgggaggctgaggtgggaggatcgcctgtggctaggagttggaggctgcagagagctatgattgcactacagctaggaccacagagtgagatcctgtctctattaaaaaataaatgaatgaaacaggagatgtggctgtggtaggtgagggtgggagggggagctatcttacctccattgttcagggacattctctgtggaagtgacatttaagctgagacccctctccctctcggctcttccttacttccttctgctttttctcctgtgaactcttccgttcgcttcagtttttgccctggagttccccctgtgctctggtctgtggcttctctatttctttttttgagacggagcctcgctctgtcaccaggctggagtgcagaggcatgatctcggctcactgcaacctccgcctcctgagttcaagagattctcctacctcagcctcctgagtagctgggattacaggtgcccgccaccacgcccagctaatttttttgtatttctagtagagacggagtttcaccacattggtcaggctggtctcaaactcctgacctcgtgatccgcccacctcagcctcccaaaatgctgggattacaggtgtaagccaccgcgcccggctggcttctctatttctcaacctgtgtctccctcgaggagccagttgctgtcttgtaactgcctgcttacagcatccgtctctcctaccaggctggagctctggggaccacatcctattcactgctctgtccccagctcctagcagtgtctgttt

SEQ ID NO: 190731 - DNA, 413 bp, Homo sapiens
tatggtagcaacgaggagaatacctcaaagtacgtgtcatcctcccttataaaagcaaacagaagaggacaattatgtctcttttccttatgtagccatggagctatctagttcaaacacagggcttttgctgatacagcacggtctgttctagtagtctaagtttatttcctatgatgagcccttatttagtaaaacagcatcttactctactctaccaaagtcctaataaatagaaacatgtcttcatcaactgtgatttactattgagatgcctcattaacacttctgacttatagctaatctacatatgtctaaatccaaagtgttaatgtgtgaatatcctactagaaatgtgaaagtatgatagtctgtaaaaagaacacatccacaaacatctgaaaatcaaacaa

SEQ ID NO: 190732 - DNA, 373 bp, Homo sapiens
gttgggcatattgtcatgttatctaattcatcttcaaaataatcctatactaccatccctatttttcagacaaaaaagttagaatcggattacataacatgcttgccatcatataagctagtaaaatgtagagcttgaattcagatttaacatattttatttcctcatgtaggcatctttccataatactgtaacaccttaataatgatggcgattattacaacaatgatgaaaaaataataccattaatataacaattctgttaccacctggcatcagtgaatttataacattttctcttacattgtctcatgcttattctcatttcatacacaattgtttaaaacatatatttatatactaaataagcatc

SEQ ID NO: 190733 - DNA, 224 bp, Homo sapiens
cagtactacaaaaatatcttcatgaatattgtcttctttcatataatttcatccattatttatggttcttagtatgcattattaaactgctttcttaagattgtacacttatactttccattaatcctgtagagtataccagctctacaacactctcattctgcagtctgtgctagagtttcttttactaacttatttttcctcgcttctgttaaagaaaactt

SEQ ID NO: 190734 - DNA, 548 bp, Homo sapiens
attagaggataccgtggctcactgcaaatagactgtaactcagatggactcgggacaagccgtgaactgagtaacgcaaggaaggagtggaccctcatgttcagcagatgccaatacctgtgtggcctcctctgctcccagttctctaacatggtacatttctgcatcatggggtagaccagactagcccttctgggggattcagctggtcctttgccctcattttgcccatctgttgagtgcctttgtggtgagcaaagtcttccctagcatcttccatttccctacggagggttggacatcctttgcagttcatgcttggtttgagaagtagagctggcatccttctctcctccccatcaatgtaactgtgaccctcaccttatcctgtgggtagacttaggacatatgctaggaagagcaagccccgagatggtaaacaccttccaggaaacatgtgtagggctaacttggaccccaggagcccataagataagagtaccccaaagagacacgtcagtattcctgctctgcatgataccactctg

SEQ ID NO: 190735 - DNA, 257 bp, Homo sapiens
caggagacattaactcaactacataaatggatgccttagcacattagggcttcattctctggcagaatcctcagtggagcaggactgcagagggagaggatgagggaaaatgaacacacaatttctgccacataaaacaacgtatatgaatcacagccatattcatgtaaaacaaactggaatgcagggggaaatcatctgtggtgacggaggtgaagacagtgaccactctcaggagaaaggggctttcctgggac

SEQ ID NO: 190736 - DNA, 180 bp, Homo sapiens
gtatgacttgtaagcccctgctctgggatagcctgccgttcaggctgaaccaaacgtataccttccatgcactgacttacatctttgcctgtaactcctgtttacctaaaatgtataaaagtaaactgttaccagccaggcacagtggctactgcctgtaatcccagcactttgggaggc

SEQ ID NO: 190737 - DNA, 125 bp, Homo sapiens
gaatgttagttattagcattttaaaaggttctacttcagcataaaggtcatttccaatcaatgggaggtccaatataattaaaaggtgcctaaattattattgaggaatcactttctttatgtca

SEQ ID NO: 190738 - DNA, 311 bp, Homo sapiens
tttaggctaacactaagaagctgcaccatgttaatattcaaaaattccagtactaaactatttgaaggaaaggcaagaaattcacattttatgcaagcagcatgtaagaaacacttgtggttttttccaaaccaaaaaatacaatgctaacaccactgccactttcacacatctttgtgtgatctttgaaagtttcacagaccaagtaatgttttgtttccaaatgtgaattcattgtaagtggcttgtcattgtaaggggctaatttgacagcactcaaggttgcggcagtaattgcccttacttgttaa

SEQ ID NO: 190739 - DNA, 273 bp, Homo sapiens
ttcatgtcatctctggataacttttgattgtttgatttttctcctcattagtggttgtgttttcctgcttctttacatgcctgatagttttcaattaaatgccagacattgtagatcttccttgatgggtgctcattatttttggatttcaataaatatacttaagctttgttctggaagagttgttacttagaaatagtttgattcattctggctttggttttatgatttgttgggaaggtctggagcatgctcagtcatgggttagttatt

SEQ ID NO: 190740 - DNA, 1054 bp, Homo sapiens
attaaattaagggttgttacagaattatgtcaagtgaaaaaaatgtataataaaatcggctaatttctttgtagacattggccaattaaagggagaaaagcatagtttctacaactagtggagtaaagttattagttgataccaatggatattagcagaaaattgatgaaaggttttaaattttggctctatgggattccatttttgctaaatgatataatattctcatggtaggaaaaaagttctctgatttacataaaatgcgggtatagcaaaagcaatggtattttaacttaacaacagccctcaaaacacccttataatgttcttggaacaaatgctgtaaaagctgaaagggttcattcctaggtgttcctattggcactattactagtgctaatagaaagcacccagaaaactgaatcagggagataaactataccttcacacaatacataacaacagtaataatcatagtactttgcattggcattatgttttacagtgtacataaacatgaagtatgcccttgaacttgagtatattacataaaacacagatggagtgggcagcttcaaaggaagtatcatcattatttatcatttttgtctttctcatttccaaggttagaaaactgagatttagcgaagttatatgacttatccaaggctatatctcaatactattggaatcaaaagtagatgtggctgagtcttctgaattctagggcaaagtgttttctcaagtaatactgtctcaactgtcaagagtacagttctaccttataactgaaactatcgtaggtatcagaagagggactatatcaggagggcaggcggaggagctccatcatgatggtcctaaaccttgaaagatgggtaatgcttaactaatacaagaaaaaaatgaaagaaattctgagcaaggcaacaccttggataacgattagaaaattaacatttgttgactgatttaataagtattaagcactcataagcaccagctagtgttctaggtactgcgatttggcattgagcaagagacaccatcttag

SEQ ID NO: 190741 - DNA, 267 bp, Homo sapiens
ctgctatacaccatgaacaccatgagtcaagccgcagagccaggtgacctctcagatcttcttcctagggcctgagccaaacatcacatggtttcctatgacatgaggttagatcatcttcaccaggtggtaacctttgagtcaagcagtcaacttatatttagtgagctcacctggtcttgcagcagcaatggttccaagttactactgctgaagcaaagaaagaagtatctcatacctaacaggggggtggtatagggtggtata

SEQ ID NO: 190742 - DNA, 667 bp, Homo sapiens
ctcatgcaaaaatatacatacacacaacctgccacagtatgctaatgcatcaaaggcctttctactctgaatttaaaacacagtttttttaagttgcaaaagatagtcaaataatctgggcactgccaggagctaggattgatgcttacgaaggccccacatgctgcagtgacggttccaaatgccccattcccaccgttcacagttaggtaaaacattcaacgtgcaaagactctcagagagatgctgattcagtcccatggagcttctcaacagacaaaactttccactgttgttgtcaaccttgggagtaatgttcaggatgaggtggggggtcctggaatcatacaagaacatgccctaatcccaaccctggatttcaaaacaaggccgttcttgttcctgcttctgtgccccaaaatatgtaacacctaaaatggaggactcgacagcctcaacccaatgacatgactgcagtttgggcagccaacagcagaagggtcatgaccagcttcattgggtggaagttccagtagtcttctgcaattcccaaaggaactgcagggcacctctgtccacagagcctctggggaccatggtcgcggaatgctaagtgccagtaacataagccacctgaatggctgtggatttgcctgtattcccacag

SEQ ID NO: 190743 - DNA, 645 bp, Homo sapiens
gctttccaaaactatgggaaataaatgtctattgtttataagccacatagtttattagtttttatcacatagccgaaacagactaagagaataatgaaataacaaagaagcaagagaaggaagtgtgccttgcttgggcagagaaaaaaaggagaggaaagagggaaaagtagggaggagaagagaaaagagggcacaggaagaaaaattaagaatgtgaacacaaagggtaaggacagaagggaacagagataagagaagggtgctatggttggaatgtcctcccaaagtgctaggattacaggcatgagccaccgtgcccggcctcattttgaaatttaattgtcattgtaacagtattaataggtggaacccttaagagatcattaggccatgaaggctacaccctcttgggtgggattggtgctttatgaaaaggcaagtatggccctctccttcccctctctttgcttttctcctcttctgttgggtgaggaatagcatttctcctctgtggaggatatggcattcaaggagccatgttagaaatgaggagggggccctcaccagacaccaaacctattggcaccttgatcttcccagcctctagaactgtgagaaataaatttatgtttcttataaatt

SEQ ID NO: 190744 - DNA, 159 bp, Homo sapiens
gggggacttaatctgacctgaccacgatatcaaatttatagtggatattcatatgttttaagatacttacatgaaactcagtcagaggtcaattcttttctcatgggctcaatgtggattgtcttaaatttcaactctttcaggcaacaacatcctaat

SEQ ID NO: 190745 - DNA, 351 bp, Homo sapiens
tggagtggaacagggcttggcacattttttcttaaaggcagattgtgagtattttaggtcctgcaagctgccaacaggaggatcacttcataaccactcactaccagtgaggccgaaagccgctgtaacgacacagacgggcgccgaaagccgccgtaatgacacagatgggcgctgtgttccagtgaaactttaccactcactaccagtgaggccgaaagccgccgtaacgacacagatgggcgctgtgttccagtgaaactttaccactcactaccactgaggccgaaagctgccgtaacgacacagatgggcgctgtgttccagtgaaactttaccactcactaccac

SEQ ID NO: 190746 - DNA, 142 bp, Homo sapiens
ctcagcgtgcttgttacagagcacctgctcaaggactgctggctcaaaggccctcttggccaccccctccctcctttcacatgagtgtctttggttttggcactggtctcccaaacactgaccatcctcaatttgcccaggc

SEQ ID NO: 190747 - DNA, 473 bp, Homo sapiens
atctgcttttcaaaagaacccacatcaaggaacataatgatgaagaattaaatacacagagcaaaagaaaacaccctaaagcctcctggggcaagatgataggtcatttgcctttacgggaagcagaaaaaactttagacttctcacagcaataattgagcaatgtcttcaaaatgttgagaaaatgggcagggcacagcaactcacgcctgtaatcccaacactgggaggctgaggcaggaagatcacttgaggccaggagtttgagaccagcctgggaaaacacattgagaccctatctctacaaaaaataggaaaattggctgggtgtggttgcatgtgcctgtcctcctagctgctctggaagctgaggcaggaggatggcttgatcccaggcatttgaggctgcagtgaaccatggtcacaccactgcactctagcctgggcaacagagtgaaaccctgtgtcttaaa

SEQ ID NO: 190748 - DNA, 643 bp, Homo sapiens
catattattccttcttgggggcatggtgtaatgtagactaccctactgttggacatttaggttatttccaatttttggctattatagataaggccctgataagtaacgtcctgcataaaattctagagttcatcccctaccctgtatttgggtggctgttactgttattatcttcagctagattccccactgaaaatttctgagccaaagagtaggaaaacaaggtaatgggtgttttcttgaaaggccaaaggtttggcttgattcataagactgaaaccaagaagacaatcttggatatttgaggctcaaatggtcaaaatggtgatagggctgagaaaacacatttgtgaggaaactgaaaaaacatgggtatatggtaatatcattttagttcaaattctcccttcttccttttccctagtctttccacttctccatattcttccactccatacaaatgcatggtttttgtttggttggttggtttttgagacggagtctcgctttgtcacccaggctgagcaattagccagtgcaaaagccctgaggtgggaatatactaggcttgttcaagaaagagcaagaaggccagtttggttggtgcacactgaggggagaatggcaggaaatgaggccatgg

SEQ ID NO: 190749 - DNA, 888 bp, Homo sapiens
aattttggcttcagtttcatgtaaacgttttatatatacaaaacagatatgaagcaaaacaaagtaatacaacacatttccaaaatgtaaaaatgaaaactgaacaattaaactagctgtataaatgttggcatgaacaaatagagaaaaattatatcaaatgattttgtggaaaaagtattctgattatgtacccaaaaaggaaagaaagagagagaaaagcaaggaaggaaggaaggaaaacaaggaaggagaatggatggaaggaaacaagggaggaagggaggaaaggatggatggagggagggagttagggagggagagaaaaataaaaacaagcaaagaagtaagaaaaaagagagagagaataaaagggagggcagagggagaccatgttcaactgcatacctgggcctagtgttttagtggtcattatagtattgcttatgttgttatagacataaggaataagcaccactctcagctgtgatctctggaccatgactggatacatgattcagtataaatacccttcccatttgctgtccaaaatatctcgcttcacagctggaccctagttgtacctgtgtgtcataggaagcagagtgagtgggcctcccccatgtcctaggagagctgagagaaccttgctctcagccaggctgcttagctgaggcctggagatggcagcttgatcttcaggaaagttgtgggggaggggtggggaacagggtgcggctgctgccaggacagtgtgatattaggagggagatcaggagttaagctgtctttctcttgttcagaatacagtaaatttggtgacaggaaatgagagggggcggctctatcctgtgaaccagaggcagccacaaggcagattttcagtgt

SEQ ID NO: 190750 - DNA, 705 bp, Homo sapiens
aattttggcttcagtttcatgtaaacgttttatatatacaaaacagatatgaagcaaaacaaagtaatacaacacatttccaaaatgtaaaaatgaaaactgaacaattaaactagctgtataaatgttggcatgaacaaatagagaaaaattatatcaaatgattttgtggaaaaagtattctgattatgtacccaaaaaggaaagaaagagagagaaaagcaaggaaggaaggaaggaaaacaaggaaggagaatggatggaaggaaacaagggaggaagggaggaaaggatggatggagggagggagttagggagggagagaaaaataaaaacaagcaaagaagtaagaaaaaagagagagagaataaaagggagggcagagggagaccatgttcaactgcatacctgggcctagtgttttagtggtcattatagtattgcttatgttgttatagacataaggaataagcaccactctcagctgtgatctctggaccatgactggatacatgattcagtataaatacccttcccatttgctgtccaaaatatctcctctgaaagctgagttctcgggtccttgtgaaggagggaagcttgcctgccttggagcgtgaaaaagtcttgctggacagaagtctcacggtttaaaaatgggaagggagaggattgagatcacactagaatgcacagaaaattctt

SEQ ID NO: 190751 - DNA, 192 bp, Homo sapiens
acacacacacgactattatcccaataatgattagtatgcacagcacccagatcttggtttctaagtatcattccccactaaaagcaatcagagctctacagaatctgtggctgaggcagggaatatacaagataaacctaatatcttactgtaccagaaaacaaaggttcatatggatgacagacaggtaga

SEQ ID NO: 190752 - DNA, 253 bp, Homo sapiens
gagaaagaggagtaatctctatagaagtaaagtcatggggcaaggtcagtgtttagacaaagacatgtaaaagagcattctttatgttatttgaaaaagaatgttggagtgttggggttttgtgcctctgaggcctggtgggccggctgctagctgttgtggtccatgatggggatacatctgagatgtggaatgaagaccaggtgagccagatgagggacaaagacatcacactctaacacgggtgtctggt

SEQ ID NO: 190753 - DNA, 560 bp, Homo sapiens
cgcattccccgctccttcctgtatactctgggtattcacacgttgcctaaatgaaagcatgtttatggtcactagtgtttcatgtgtcaggtgtaaaaggcaccagaatgatgcctcttctaaaagtacacatggatgggggatggggagggtcctactgaatttctgggactgtgagcccaggcacagtattttggggaaaaacaaaacctgcccaggtgactctgatctgcagccaggattgaaatccactgaattggagtcatgacaagaaaacaagtgattcagccagtgatcttctgtccttggcttcactagtctccatctcctaacaaatcttgctttacactggatcaattttccaacgtgctctatcccggggccgctatggcagaatcctcgaaggaatcccatcgttcactgcacctcatttcaaagcgatttaacagcaggaccacagcaataatgaaaagaccctccctatctttttatgggtaatttgattatacacggtgcttgaatgtttacgataaaactcctttgtatgctcagataagaaa

SEQ ID NO: 190754 - DNA, 337 bp, Homo sapiens
aatacccagaccatgcaaggacttttagactcagagtctgagttggctctaaaagcaaggaattgaaaatgctattgtgacccttcattagaaagaggcatgtagaagccaggtgatgaatagaatcctggcccatgtccatctcatagtcgtccaatggggccgcaggcaacctgtgtggttatttgcccagtccctcagtacaatcaagattggttcctatgggtcaaagctctcaggtcatcactctggcctcactgtttatttcagaaattatgaccaccctatttctgtgaagacaaattagcctctcctatatgagaatcctatcattccc

SEQ ID NO: 190755 - DNA, 382 bp, Homo sapiens
ctaaattttagtatatttcgcccagttgacaagagtggaaactggtccatgataggctctcagaatgattgtgttctgaagaaagctacctggcagctactcagtcaaggctgtacacctcattttttcctaccttacatgttgaatataaatggcaaaagcaaaatcattagcagtgaggcagaccaccaactcacttttacacagggtatcttatggcctatagtttctgttagtctttataccagagagctcaggtcagcaacatgtctacttccagggccctaagttatcccagccccagtaaaggcatcctcaaaatggaaacttaataatataagatcaacattaaagcactttttgtgcaaaatggcaaaacttt

SEQ ID NO: 190756 - DNA, 437 bp, Homo sapiens
ggaggcagaggttgcagtgagccaagatcttgccactgcactccagcctgggcagcagaaccagatcctgtctctggaaaaaagatagcagcagtcacccctaggtgttgggattggaggtgatcttattttctttttatttttctgacttttctaaatctctgataaacttgcaattaaagaaaaaataacagaaaatgtgttatatgcagtattattggaggtactattaatatttgcaagtgttcagacctaattgcggggaaatgatggcaggattctacaggtatattttagagcagttgtgagatgcatgtaactatttgtaaaggttcatacagatgattactagatcagcataaataatatgtctgtggacgttttctgcaggactttgataacttgttacctgagtgaaatttaattcctgggcgatt

SEQ ID NO: 190757 - DNA, 891 bp, Homo sapiens
tcccctgccaagaactctgaatggtactcctatcagaactagaacatagcaggaggtgggcaggtttatggcctctgggaaaaggcaggtttatggcctctgggaaagcagtaaagactggacaagcatggaaacaaaactcactccctggcaggagacgacagcctatggagtcagaagtgaaatgctgtcccagtaaacctttcccagtaggataatcacattctaaccttaggtcaattttcatgtgcttcgccggctgtgacctggaccctgcagtgtggaacacggtcacttctacaaccctgtaagttaaggtctgcactccaagcacttgtgagggaagagggactctcattggctgtgttgtgcaatctagtctgtggccaagggcaaagcagaagccacagatgacaggccctcccacagggagaggaaagctcctccctttccagaacacagcctaaggctgccacagagaggtgctgtttagtgacagaaatatttgtcaggagtggccggaggaatggccactacatacttcctctttctcaccaactgctaccatcagcctccactggctgcctctcaaaagcctgcagaacctccggtggcaggagtgttctctgagtcattccctcaagagaaaagggaaagtgggcctgactcctgggcctgaagaagcctcacagtgccctcagccagcccttgctgcagagcaaaagccaaggattgaaatcctggacagcctactcttcacccacacctgcacacagtgaatactcttcacccacacctgcacacagtgaatactcttcacccacacctgcacacagtgaatactcttcacccacacctgcacactgtatacctcctaagccgggacctgca

SEQ ID NO: 190758 - DNA, 599 bp, Homo sapiens
cagaagggaactcattcactcattcattcattcaagaatagtatagactctgcacagtagagaaaacatgtatatcatttttccagattcaacagctagtgaatttcctgtatgccaagtctttagaactcagggatgaatgaaatttcacaggctattctgtctctgaaaatcaagtaaggcaacactcacatcccctctgggaagccaaccttagcctcgtagtctggataaaatttcactattatgtgctacctcagcagttatgtactgtagcatcagtcacatccacttcagtgtaagttctgggaggacaggacatgtgtctctagtagcagaagagattggcatgacaacaacctccagtaggtgttctactaattaagtttagaagaatttaactgtggagcccgaggcacggggatcacttgaggtcaggagttcaagaccagcctggccaacatggtgaaaccccatctctaccaaaaatacaaaaattagccaggcgggtggcacacacctatagtcccagctatgtgggaggctgaggcaggagaattgcttgaatccagaaggtggaagttgcagtgagccgagat

SEQ ID NO: 190759 - DNA, 350 bp, Homo sapiens
acaggtggggaaactgagggctggaaggaggcagagcatcagaggcaaggtggccactaacagtagattcattcagcaccttaaatcagccaatgaatttccaagtatccctttgcatggattcttttaatccttataagccctctaagaggtgtaaatgccacaaaagctacagtgaccagctcgtcccaggacacttccagtgttagctctgaaactctcgcatcctgggaaccccttcagttctgggcagaccaggagcgtgggtctctcatttatgattccacttttctgatgaggagactgaggcacaaggagatggagtgagttgctgatggtcacgaggctgg

SEQ ID NO: 190760 - DNA, 269 bp, Homo sapiens
atttatcccttcaacccctcacccactcatccatttctccacccactcagccatcccttcactgactcaaccatccattcattcgtccacctgcccacccacccattatccatccatccacctatgtatccatccatctgttgtccttctgttcatttatgccacaaagactcgttaaccacctgctagattctggggaggtacctgctctagtaatggagaacatggtctctggaatatgattccctgggctcatactgagctgcctc

SEQ ID NO: 190761 - DNA, 553 bp, Homo sapiens
taaatggcatggtgattcgtatttctaccagcaagtctttctgtatcttgccaagggacgatgcctctaaattgcaagaaagggtgggatgccttgtccatttgaaatccaaaacatcaagacaaatatggggcaataatatgaccatcacaataatatatataaaagagaattcattaagggatgattatcgctttctagagttgggttctggggaagtattatttatagaaatgagccttaggaggccaggcacactggctcacgtctgtaatcccagcattttgggaggcagaggcaggtgggtcacttgaggtcaggagtttgagaccagcctggccaacatggtgaaaccccatttactaaaaatacaaaaattagctgggcatggtggcacatgcctgtagtcccagctacttggggggctgaggcatgagaaacacttgaaaccaggaggcggaggttgcagtgagccaagatcgtgccactccactccagcctgggtgacagagtgagcgtatgtctcaaaaatagataaataaataaataaata

SEQ ID NO: 190762 - DNA, 786 bp, Homo sapiens
  misc_feature (92)..(92): n is a, c, g, or t
gatgagtcggaccaaggtatcagcagagaagccacaccgcagccctacctctgcctaatcacactactctgttttactctgatgagtcaggncagcctgagaggacttctcctttcagattcgacatatgaagcaaggtaaatgccctaggtctggtgttcatgtcaacctacctgaagcagaaaagagcgtccttcatctgcgcccttataaaatctgcagtagatagtctccaaagatggccactgttgattcatctctccctatgtgtgcatattgttcctcctttagagaaatagaagccatttcctctcccttgactcagggcaggctttgtgacttgctttgatcaacagagtgcagtggaagtgctgttctgatagctctgagcccagaccttaaatgcactggtaacttcctcttccttttaattggagccatctaccatgtaagaagtccaactaccctgagatcaccatgctatgaagaagcccaagctattcatatgtagaggctatatgaaaagagacagagagagagagatgccagccagccagctatttcagttatcccagctggaggcatcaaacatgggaatgaagaagttttcttgggtattccaccccaacagatactccatgaacagaagaacactcagctgagttcagtcagatacagaactatgagacaggtcaattagtctagccctagtttggagggttttatcagatattatgaaaacccgcgggctaccagcatttaattgcccataaagtggccggtcaa

SEQ ID NO: 190763 - DNA, 275 bp, Homo sapiens
tattgaggctgacaagcaaaagcccttggcacaatttaattttcacataaccactttccattgtccagctgcaggcaaaagaaatgagcaatgaaagttttgaagtctaccccagtaccctcatttcctgtctttatttcctttactttatagatgtattctatacctgctatgtagataatgctctagttttccctttagtgccaactggaaaaggagagttggctttacaggggctgtggattaagagccaggcttcattccatcccagggag

SEQ ID NO: 190764 - DNA, 464 bp, Homo sapiens
ggctaacccaccatatatgtaatgctcctttcccatctgtatttctagttccaaccttccttttgaactctagaacaatgtttccagctgcctgttgggatatctcttacacagtctccgtatgacatttctgaaactgaatttattatcttttctcatatgtgtattccttaccctagtttctacttctcttgtatctggtattgtagttatcaatatctccatatattagttgctgaaattaaaatccacattatccatgagtctctcctcatatctctgaaattcctacatataatagctctttaggtactgtgtctggttgattctatctcttacataacttttgaatgtttttccttattttcattccctttgctattgccatggcttagcttggtgctttctccaaacttacagtagcttgccagctggcctccttgctgcagtccatccttcattct

SEQ ID NO: 190765 - DNA, 485 bp, Homo sapiens
cataacaattagtattgttaatgcaaagtgctgtgcctatttttgccgaaacgggtgtcttttacatgaatttgccaccattttagatgtctttgcatctaaaatgaaatgaggaaaaccatatctgttattaaactgtgcctgtctttgtttagagctactgctatgagccagaaatcttggaaaagtttttctgcatatccccagcatgttactgaagagtttcttactaccctgaagacagatatttcttcctcatctattgggagactccaggagtcagtcttaagaaggtcttattgtgtgcatagcctcatgcccctgcccacattgataactcaccaaggggttgagattttataattcagcctgattaggctgttatccatcacatcattacataaaaccctactataatggtacacattcaactaaagcatcaacacaatctagatttaaagaatgagttaagtaagacaaaaaaa

SEQ ID NO: 190766 - DNA, 423 bp, Homo sapiens
tctgtgtgtatgtaaaatttatttagtggaagaaaagaaagtacttgaatcatatttaagtaaggaactagattaagaagccaaaaatgcaggactatgacaccacctaagggaaaaaatgtcagtaaacagcacacagtgtaacagtggcttcaggattcagacagctgcctagaggccagaggttggcaaactttttctgtaaagggccacatatacactttagattttgcccgccatatagtttttatcacaattatttacctctaccattgtaggagaaaagcagccatagacaacaagtaaaagaatgggtgtggctatgtttcagtaaaacttttattttacaaaaacaggcagcagataatagtttgtcatcgtatattcaagaggtcagctggctggagagcatgcctttccagt

SEQ ID NO: 190767 - DNA, 503 bp, Homo sapiens
tgctgggattacaggtgtgagccaccatgcccagatgcagtgttgtctcttgttctcaattgcttaaatatattaattgtggtcttttaactccataagctccatgaaagaagacatcattttattgttctccacacatgtagttgccttcagcaaatacacatttagctgttttggaaaggagaataaggaatggtgttctaggatttctgctgaataccttttgggtccctcttgtgttttagagtctctgtccttggtcagctttccttcgttgtttatttgaagagattaaggccatttcttgtgagtggtttctatttctcctttggtaaactcatactgggccatctaagaaatctagtatgagcaggtctcccccttcttttggctctctggtcctgtgactctatttccacttctaagtgtcttacataccacaggaaactctatctcacaacagcttccaggctcttatctgtagaaataagaaacaaacaagt

SEQ ID NO: 190768 - DNA, 691 bp, Homo sapiens
gtcatatagatttactactatattttcttctagatattttatcctgttaactcttacattagatctgtgatctatttgtggttaatatttgtatatgatgtgagggagggatagaactttatacttttgcatgtggatatcaagttgccctagcttcttttgttaaaataatgttctttcttcattgaattcccttgtccgagatgaagtgaccgtcaatagaagaactcactcattccattgatctgtatgtctgtcctgccagtaccatacgatcttgattactgtagttttgtagctggtttttaaataggggcatatgagtcctctaactttattatttctgaagatgtttttgggtattctcagtcccttgcatttccatattgaattttaggactagattgccagtttctgccaaaaaagcaactgcaattttgataaggtgtttcacggttttgcaggtatcttttaatgtcttaacagctggattctcatctctgctcctgaattcattcccttaacgttattttaatgaagtaaggagtacttgaatagtttttcaggtagttgaatattctttgataccgaaacttcataagtgatagtttgcaaagaatagttacactatgcaatctgaaatcatattgatgaatttgcccaactccgcaggtctgctttatacttggaa

SEQ ID NO: 190769 - DNA, 355 bp, Homo sapiens
ccagatctgctgttgttcctgggaagctggcgtatcagtcagaataggccaggttatgctgcagtgacaaacatcccctacatctcaatggcttgatggaacacagaaaaacgtattctcctcttcacattgtcaacacagcctgggcactgctcccaggctgctgacctccttgtggtgtctggccagcctgagccagttagagttcacgagttgtccacctccatgtgaggtcaccatggggcatgcacagactcccatgtccctggtgctcacaccccacacgatcacacttagctgaggggtgctggagaggagagtcttgctgtgcccgggaagcggagaaaaaacaggt

SEQ ID NO: 190770 - DNA, 299 bp, Homo sapiens
tatttggtgatctttgtaaatagattaatgcttaatagagatctattctctgttgagtgagaagaaaacagaatctgattctttagtctctttctgcttttctattatgtaagacttctcaagttgtaagcaaaataatgagccactggaaggttttaagcagaagagtaacacaatctgatttatatttgttttgtttatatgtatgtgtgtgtgtgtgtgtgtgtatatatatatatttattattattattttaagcaacagggtcttgctctgtcacccaggctggagtgcagtag

SEQ ID NO: 190771 - DNA, 142 bp, Homo sapiens
tccggttgtttccagttgttatgaataaagcttcattgaacatttaaatagaattctttgtgtttattttgaggaaataactgggagtggaattgttggccataaggcaagtatatgtttagctttataagaaaccatcaaa

SEQ ID NO: 190772 - DNA, 479 bp, Homo sapiens
  misc_feature (393)..(393): n is a, c, g, or t
  misc_feature (414)..(414): n is a, c, g, or t
  misc_feature (453)..(453): n is a, c, g, or t
taggaaaaatatctgtcagtaaagaattctttaagtaattcaagttctcttaagaaaagtcaagagagcagagccgtaagaaccagaggaaaacaaagttaagcctgaaatcagtcctattcagacttccagctatatgaaccaatagacttccttattaaaaactgatttggtttgtttacctattggtaaaaactttgtaaggacttaaagaccgtgacattttaattaaataatcatatgtgtttcaccccaatcaaaccctatatgtttttatgagtatgggcaaaaggtgtggaagagttcacatctaggagaatgacaacaggcattcaatagagttacaaagaggtttttttttgtttttttattgagatggggtctcactatgtngcctaggctgaatttgaattngggcacaagtgatactcccacttcaaccagcctcctggntagctggaactacttgctatcatcgg

SEQ ID NO: 190773 - DNA, 352 bp, Homo sapiens
ccacgggacagcacacagccccccacggaacggcacacacacccatggaacagcacacacactcccacgaacagcacacacactcccacgaacagcacacacactcccacggaacagcacacacacccacggaacggcacacacacccacggaacagcacacacactcccacggaacagcacacacacccacggaacggcacacactcccacggaacagcacactctcccacggaacagcacactctcccacggaacagcacacacactcccacggaacagcacacacacccacggaatggcacacactcccacggaacagcagactctcccacggaacagcacacacactc

SEQ ID NO: 190774 - DNA, 602 bp, Homo sapiens
tgccaagcgctgtgccagatactaggaatgcagtggtaaagaagatccgcaacagatcagctctcagggaatttgcattctggctgggagcaatgaagagtagacaatgaaccagaaagataccagatggtgatataagctacgcagtgaataagaatagatcctggtgaaagacagttactagaggctattagagattggttgatctggagggttttctggggagcaatttagactagatctaagtcaaaaatcaaaagccagcaggataccatgggggtggggggtttgcaggggaacatcccagtggcttgaaagtggcaatgaacttggcatatttaaaggaacaaaagaaggcctgggtagcttgaacctacccccagccagctattagtacttgactattacactaatcacctacagttcacctcaggcttatttattataagatagtctttcaacaacatttattgaacacctcttatgtcaggcattgtgctagtttctaagatggaaagatgactaaaaatgcaatcaagaagctcacaatgaagtgtatataaaaggaagagcgagagagataaatcattataattgaatgt

SEQ ID NO: 190775 - DNA, 535 bp, Homo sapiens
caggctgatctagaggacccctgctgcctgacaatcagtgaaatcatatatttgatatgagactagtatccagaatatatgagaaacacctaactcaacaataaaaacaaaaataaccctatttttaaagggaaaaggcaggtgtggtggctcacacctttaatcccagcactctgggaggctgagacatgagaatcacttgaacctgggaggtggaggatgcagtgagctgagattgagccattgcactccagcctgggcaacagagcgagactcttgtctcaagaagaagaaaaagagaaaaagaaaaagaaaaagaaaaaaacttttgatgccagtagttctgtgaaggacaacaaaaaagcagggctttgagagagagcaatgagggcataggtggctgattacatcagatgggttaatctccaagtgaaatttgggggaacggtgttccaggcatagggaatagcagatgtaaaggccgtgatttgggaataaacttggtgtgatggtggaatggcagagagggcagaac

SEQ ID NO: 190776 - DNA, 141 bp, Homo sapiens
ctttttctagttcttaaggtgtaagatgaagttgctgatttgaggtctgttttctttctttctttttctttctttctggtctgttttctttctttctttcttttctttcttgttttggtgttagggtgataatggcttcat

SEQ ID NO: 190777 - DNA, 297 bp, Homo sapiens
ggagcatcaccttgtgagggagaaaggtggaaattgcttagcacttgaacaactctccaaagaaaattctctttctttgactctgagaaccttgaggaaggtgttgggttgaggtgcaaaaccagtttttggccactttgaaaatctttgcatgtaaaaaacagaatcacataagagccacaacactacttatatatgaacgtgtgtgtgttggggggaggggcgttgagggattaaaatgccactggggggccaggcacagtggcttatgcctgtaatcccagcactttgggaggc

SEQ ID NO: 190778 - DNA, 537 bp, Homo sapiens
gaaccctggaggtgaaggttacagtgaacggagattgcaccactgcactccagcctggacaacagagcaagactctatctcaaaaaaaaaacaaaaacaaaaacaaaaaggccaaaagagaaagggactctgtagaagagttaggaagtgtcccttgagaaggctaggggaggggagaggcatacagcacagcattgtatctttgaccgatggtaggaaggcactacttctctatcaaactgacttttaaaccaagactccatcaaaccgatttttataccaaggttaggctttaaaccatgggtgctaaagagcaactaaggagttttaggcaagaagtagcataatcagatgtacaaaaaacagtatcatgcctgtaatcccagcactttggaaggccgaggaaggctgattgtctgaggtctggagttcaagaccagcctggacaacacggtgaaaccccgtctctactaaaaatacaaaaattagccaggtgtggtggtgggcacctataatcccagctactcggaaggctga

SEQ ID NO: 190779 - DNA, 553 bp, Homo sapiens
gaaccctggaggtgaaggttacagtgaacggagattgcaccactgcactccagcctggacaacagagcaagactctatctcaaaaaaaaaacaaaaacaaaaacaaaaaggccaaaagagaaagggactctgtagaagagttaggaagtgtcccttgagaaggctaggggaggggagaggcatacagcacagcattgtatctttgaccgatggtaggaaggcactacttctctatcaaactgacttttaaaccaagactccatcaaaccgatttttataccaaggttaggctttaaaccatgggtgctaaagagcaactaaggagttttaggcaagaagtagcataatcagatgtacaaaaaacagtatcatgcctgtaatcccagcctataagttgacttctttaagtcatgagttttccagctgtttatgatatattgccacttggtttatccactgataacctcaaatttagtgttttcaaaagtaaacttactaatagtgtctttcattacaaaagtgattcctgctgtcctgtgtttcacattgggcg

SEQ ID NO: 190780 - DNA, 721 bp, Homo sapiens
ggaaacctcagggccaaaggctcctgtctgtccttttccgccctaaatcttctgtgaagaaccgtacttggcccgtacgtgctcagtaaatgtttattgaatgaatgcacttttctaaatcacaagctggcagaagggggggcctttctcaaactccatctctagaggtttatattgctgtcctctcaagagattccagattcagaccttgagttctgtggctgtgggcaaaagccaacaaagacccaaatcctctgtccttgggagcttgaggagagtttaccagttcgagttcccactgggtctgagaactttgcctttaaaatccattcctggtccctgcctaccacttcctgctctggggaatagagttgagggggccaccctccatcaccttaatgtgactctccccacagaaacaacagaagaaacaagtggaacatcagctggaagaagtaacatgatttctttgtttgctcgcgacatgactgctcggtttgggggacactcagatgtagaggccccgagtctcgtctcacccactcccagcctggggaagaaggctcaccccccagagtccaccccatcccccacagggtctctgataacccggtcccatgggtgggcctgtcccggggcaggggcagtggtggcattctggggacatgtctcttgcagtaccatctctgcctctgcctggttagatctctgtcttcctctt

SEQ ID NO: 190781 - DNA, 607 bp, Homo sapiens
attctggtttttgtcctcatacttagggttaattttgatatctttttagctttttcagtttaatttttattctttcttatttaacgataaaagtatttaaaactaagaaattttccctgagtataacttgtaaaaaatcttacacattgctatgttaggttgaaccaataaaattggcaatagttgacagttttgagataacaaaaatgataatttcatatggatcaacctaatgcacagtgttattgacagaattgttttcttaatattctataattacaatttgatatgctttcttgtttcaaagattatttcaagtgagagatttaagtgttcttaatgacttaatttttactcacatttttctcaaaacatttttaaattctaaaaatttgaaagaattaagaattctaaaacatagctctaatgttctctttttactcaaaaaaaatttcccttgttctaaggtggcagtcattacccaccacaccacctctcgacacacagaccaaccttaccccagtgtaacagccagaccccatccttcccctgccagcgtctggcatgaagaaagtcaattcatcttttttttctttttttttttttt

SEQ ID NO: 190782 - DNA, 293 bp, Homo sapiens
aagatagtaacactctcagctcatagggttgtggtgagatttaaaatgtgtgtgtgtgtgtgtgtgtgtgtgtttgtgtttaaagtgcctgggaaataataaacactatgcaactgttacctattatctgaaattattccattcctctgtttgtgtttatattatcagtctttcctcactcgaatataaactccatgaggacaggaactttgtattcccagtacccagaatgtttcctgggatacaccaagcaggcactcaattgcttttgcagtaaatgaataaaagaggaa

SEQ ID NO: 190783 - DNA, 640 bp, Homo sapiens
ctaagcccagggcataaaacccctcgtagcctctggaaagtgcacagacttgttggttgctctcccaggctagtaaacatgttctccgttacctgaagcagcagagcatgttctgtatgtgtttatatgcgtcactgctatttttctacccccacgtctgcacatcctcaccacctgctttgtttaatcaccaacaaacagtgtgggctcccagagctcggggccttcgcgcctccataccagcattggccccctggaaccaccttatgcactcttaacttgtcttttctcattcctttgactctgccagattttgtagcccccacggcctagtgttgggtctgatcacctcaacagatatcagataaggtaatggtgatctcataagaagttaggtagtattcctctctcttctgttttttagaaaaatgtcagaaggattggtgttaattctttttaaaatatttggtaaatcatcaagtttggtacttcaccagtgatgcaatttggtcctgaaattttctttattaggaggttttcaattactaatctgatctttcctgttacagatctgttaagattttctaattcatcttgagtcagtttaggtaatttgtgtggaatttgttcatttcttgca

SEQ ID NO: 190784 - DNA, 426 bp, Homo sapiens
actagattatgctgtcctttctccctctgtgtaactgattcagatttgtggtcaagatgaaacctaaggaagtttatgcacaacactgaaacatctaagagaattttttagggctgtttcacttgtaagtctaattaacttataagaagagttaagtacttgaggtttgtgttaatagactttttaaaaatagaaaccaaatattaaattagtaaaggcaagcttaaatgttgaagatattaacgagtttataaacaagactaatttgtaattcaaaatcccttaaaagtgattaaaatgtttaatttataaatgagatttataagctgaattttttaaaaagtgtaacagtgtccttcaatttgcaactttaacaaattgaatatcaatttttttaaacctaggtaaaccttctggacagtcatt

SEQ ID NO: 190785 - DNA, 311 bp, Homo sapiens
tttgtaagcctatcaaaatatatttttctcatttctccaaaaaagtttatattcataagaactaattgtatttttaaaaaaagtcaactcacctgaaatttattatttaacaatggagaacatgagaacctttttaaagttttctttaaaatcgtatctatccatttaaaacctgtatttcctttaaattttgacactttcataccttctctttaaatatatataacttcactatacatttattagagagcagaataatgaagaccttaattcatattacatttaaagaaatatttttagcataatattca

SEQ ID NO: 190786 - DNA, 350 bp, Homo sapiens
acatgtgactcagatttcaacactacatatgcaacttgaacctttccttgtcaactaagaagtatatatgcaaatctcacatgctgagagagattagaaggctatacaccaaaatgacaggatttgttatctgtgagagatacactgcatttcttcatgtttttatttaactttcaaaatattgttaaagaatacaaatcactttagaaataaaacagccatactggccgggcgtggatgactcgcacctgtaatcccagctgcttgggaggatgaggtgagaggatttcttgagtccaggagtttgaggctgcagtgagctatgatcacactcctgctcttcagcctag

SEQ ID NO: 190787 - DNA, 556 bp, Homo sapiens
cttgtttcctcactccatttcaaactgcctccaccatcccactaaaactaactcactcatgcagacacttaactgcctaaacaatgtctccagttaacaaccaaagccaaaccccatgtcaaaaactaaatgcataatctttccttacaatctgttcctcctccagggttgttgtttttgttttgtttaattttttttttgagatggggtcttgctatgttgcccaggctgatcttgaattcctggcctcaagcactcttcccatcttggcctcccaaagtgctgggattacaggcatgaaccaccacgcctgtctgggacagagaataagtcttgatggactggctgtgggaaaggggagaagggtgtcagggatgactcctagatttctcttgagcatgtaagtcagtggcatgcaaagaacattggagggacctctgcttttggtcaacttggtatgtcagggactagattcaccttcttacctgaaacagtttttttaaatggaaaatatatgaaataatgattttcaggatgctggacatcaggcaacaaa

SEQ ID NO: 190788 - DNA, 517 bp, Homo sapiens
gctcatgaagtttgaggaatttgtgtacagctgcagcaaatactaaacaccatcaacaagaatgaaaactagcacctcgatctttccaaaggtgaagaaacacatttcctttccagcttaaacatggcaaatacttaagcaatgcttagtgttggtgtgaggctggctaggacggaagaaataatactgaacctggccaggagagaaggagcagtatctgctctaaaataaaagcacaaagcactctaagctcagtatattctttcttaatcatttagctaacactcaatcttgattttggtgccaattccccttcagctcatttcaagacacattagcaatgacaagtatgtaacttagaactcttagaatttctcatgagactggatgtagaggaaaaaaaaccaacccagaattttaacacttaacccagtaacttgcatgcatacattatgtttaataatatttttagtgacaaactgcagaggcaaacaaaacaagctttttcttccctcca

SEQ ID NO: 190789 - DNA, 565 bp, Homo sapiens
tgaaagaagccagtctcaaaagcctccattctgtatcattccacatttatgacattcttaaaacgacagagaacagatcagtggttgccaggggttaggtatgtgagaaatggtgtgactataagtatgggggggggtttgggggtgctaaaactattctgtatcccaactgtgatagaagttacacaaatcttcatgtgtgttaaaattcatggaattgtacagtaaaaaagaaagtcaaatttactgtatgttaacgtaaaaaacaaaaatacaaagcaaaataggttgcctacatccatactccaacttagtgaagcaggatctccagtaatgtgacgtagttggttgtatttttaagaagctccacgggtgatcttggtgtatttgtatagccaaggatgagaacttctgtttttttgtttgttttgtttttttgtttttgagatggagtctcgctctgtcgcccaggctggagtgcagtggtgcaatctcggctcactgaaagctccacctcccgggttcacgctattctcccgcctcagcctcccgagtagctgggagt

SEQ ID NO: 190790 - DNA, 554 bp, Homo sapiens
gagacacactcactcccacctcagggcatgtgccccactgttccccttccccagatctttgtaaagctgggtcccctttgttcaggtctctgctcaaatgttgccttccctgaccacccgatctaaataaagagaaccctctgctccagcctttgccttagtccactgagagcccctgatactctctgaaattttggtatccatctatccatcatttattcctgttcaccggaatataaatccatagctgggggagggagaaatcttgccttgttcacttctgtaatcccagagctgaggcagtgcctagtacagagtaggcacttaagaattactggtggaatgaaccaatgaatgaatgatggcagatgaggcgctccttagggtaggatgagtggggaagcagtgctgtggaggcgctgtgtcctctgtttctggcacagagcagacccatcaccccgggaggaagccctggccataagaggcccactgaccctttgaccagatagcactggctacaaaaaacctgggggtgtggggcgtgctgtcaatca

SEQ ID NO: 190791 - DNA, 1311 bp, Homo sapiens
agacctaattcttaaaataataataataataataataataataataataataatttttaagtgacctcttgaatgaagtcttccttcatgtttattttttacaaacctttcttaggttcagaacagcttgttcaatattaattccatagaacagagccgaccacactatgagaactcaatttgaaaacaacagtatatcaaaaatatcagtgattttcaaaaaattcctcttttccagactagaaattattaatcaaaaaattatgaattagcagtttttagtaaagttggtatttcaccaattttgttaagtcagaaaactccttataaacacctgtttcatgttttcagaaattttcaaatgattccacagttgctacatggtcaataaagaaaaacttcatgcttttacttcaattagaattctctgttcgcagtttgggggtctcactggccagtgtgtgtatgagaacttaagggatgtatgcactttagagctcagctgtgcaagctgggctttccttacctacgctgctataaacatactgctagaggagggacatttaagctactctcatgctgctacaagattaaatgcctccctacctatttaaaaaaaaaaaatgtcagtggagaagaaggaaggagggagggaaggaaactcagcttgaacgtcagtaacttgataagcatgctgctgataaagaacaccctggactttgtagcaattgccaataaccaaaccaataagcaaacaatccaaacttaaccgtaaccttaaatttttttcccttttcatgtttcatttgaacatgaaaatgttcaaatctcttgcatacgttgttattcataagtgagctgcagggggaaacccaagcctagatgtaagatacactcttttcaacatgcatgcaggcctcaccagtgatgtctctggaggcatattctgaccagatcaactgcctcacctgcgacatcgccgtttactgggtctcactatatataaataacttctctgcttactcactaaagccttgtgcaggtccctcttacctcctcaaatacgtccacatgtgtaagcacacatatctgcacatcggtttgctttattcacaggaatctgagaacccctatgaaacggcagtgaggaaggggagagagggtggaatgggtaccagaagggagataggaagacaatgtacaggaaaacaacaacaacaacaaaaatcctaagtagttgtgttctccaaagaactaaatgtaaatggtcccagcacaccttagaaaaacaggagcagcagggggtatgtg

SEQ ID NO: 190792 - DNA, 1024 bp, Homo sapiens
atccccagtgctggacctgtgttcattttctccactgagctactgagtgccactgcataacagtgtgctgactgactctattacagatttatgagctctagccacagcctggctctcaatcctatcctgaaacctttttattctcttctggttgactgccattcatttttttctgcagcagccattccagtctttcaccattctcttcaaacttgttgctccaccccaccttataaactctcaataagtaatttagtcttttacgtctcaatttatctgtaggctttaccagtccttaccacattccctcctatttcagaggcaggtctctgggcatatacatatatattttgtgttcttagttcctcccttcctagtgactgtttgtaaagatattcaggttttctccatcctaagataaaaattcctttaagcttatctcttcttcagactaactctctgtgcttttttttttctttaccaccaaactacctcaacagcctttcttctacttctttagtcatcgtgagccactatagccaaggtttgtgcccaccatcccaatgaaaggctcttgtttgtgatgacttgcttgcagaactcagcagcctctttttgttctcacgctgtttcatcttgtcacagcatctgacaccatttggacctctttccttccctgactgtgtgctatctctggatgagttgacctactctggtgatttcatttaggaatttcatctgtgtgtacagtgatgactctcttgtcagaatctgtaactacctattgtatgagcttttcccccaggtccaaacttgtatttccaaatgactactctccttttccactttgtagcctacagaaatttgcatgtaatgtatccaaaattcagcttatacaaccactatggagaatggtttggagaactaaaaatagagctaccatacagtccagtaaccccactccttaggtttatacccaaaagaaaggaaatcagtatattgaagagctatctggactcacatg

SEQ ID NO: 190793 - DNA, 116 bp, Homo sapiens
agctcggcagggttgtgttccttagcatatcatcttcctattcctcccttctttccaacttccagaaatttcttgaaagtgtccatctagccactctccctgtcttcctcagatgc

SEQ ID NO: 190794 - DNA, 103 bp, Homo sapiens
gaaacttaccaactcccttttctccccgctatttcttccttccatggcagggactttcagattttctttcttttactaacaaggcactaagcatgattttctc

SEQ ID NO: 190795 - DNA, 192 bp, Homo sapiens
ggttagatctagaagactaagatctaattccacggtgagtgtttatctcaaagataggtctaggtgagttgcctttactactgccaaacccagatctaagagttgtgcctagctcctaaaatgagtcacaggattagtagttgacctagaaaaggcaagggaagggattctaccctggagcctccaaaagga

SEQ ID NO: 190796 - DNA, 678 bp, Homo sapiens
taaaaagattattcataatagcccagggatgcaaacatggtttaacatacacacatccaccagtgtcatacatcatagcaatagaatgaaggacaaaatccatatgatcatttcaattgatattgaaaaagcatttgataaacatccttcatgataaaaaaaaaacccctcaaaaaactcaggttttagagggattttaaaaggaacatatctcaacaccataaaagttatatatgacaggcccacagctagtatcatactgaatgaggaacaactgaaaacccttcctctaagatctgtaacaagacaaggatgcccactttcactagctattaaacatagccttggaagtcctagttagagcaatcagagaagagaaagaaataaggggcatccaaattggaaaggaagaagtcaattattcttgtttgctgatgatatgatcttctactggtactgagaagctattagaactgataaaccaattcagtaaatttgaaggatacaaaacctacatacaaaaattagtagcatttttatatgccaacagtggacgatgtgaaaaagaaatcaaaaaaaggaatcctatttacaatacccgcaaagaagatacctaggaatagacataaccaaagtagtgaaagatctctacaatgaaaactataaaacattgatata

SEQ ID NO: 190797 - DNA, 160 bp, Homo sapiens
actcaaagtgggctctggtagcctgcctgcctgggtccgcagtctgacttccccatttattgtctgatttcaatcaaaatctctaggcttcactttcctcatctgtaaagtcagtaataacaacactgccttcctagggttgagtatgatatgaaattat

SEQ ID NO: 190798 - DNA, 284 bp, Homo sapiens
tcagaggatcccgttggtcgatcactgtactaagcttccccatggtcttccatgggatagtcatacgggactccatataaatatttggctacatctatccatcctttcatgctacataatttctgctttcttcttttttttaatccaaggctattattgagcttcactatcttacatccacatgcacattgtttattttttaattcagttataatatacatgggataaagtgcacaagtcttaacagttccataacttttttttttttttttttttttgggaca

SEQ ID NO: 190799 - DNA, 371 bp, Homo sapiens
cactgacattccaggctgggagtagcaggttggacgaggggaggctctgggggcagggagggaggttgcagagtccagagcttggaagatggaagataagggcacccagtgtagggcaggagaagaaaggcaactggaaactctgggacaaactataaaaccccacggaaaagacaggtgtaaggtgactaccttgatccgagggtgatctgagtggctggtacctttgtgctcacagcaggactgtcgtaaagtaggtacatccatgacttctacttgacagacgaagagactgaggccgagaaattgaaccagctcacccacgctgcccttgaacggtggtcgtgagaggggaacccacagcctaccag

SEQ ID NO: 190800 - DNA, 677 bp, Homo sapiens
ccacaatctaaattactctaaaatgtagatactgttattctccccatttattttatttattttatttatttatgtatttttgagacggagtctcgctctgccatccaggctggagtgcagtctatcaaatgctttcttttcctactgaccattgaaatgggcaaggctcaggctcatggatctgtttgacttgcaggaacaaagcaatcaatcaccgtgactatggacagcatctatgctactatgctttggggcacaaaaatgtttttcaatgtgaatgaggtacattgtagttcaaattcagcagcatattaagtgcctaaatgctgacaggttttattacttgactctggaggcaggagtaaaaggaaagcaaaattatttaagtccttcaggaaataaaagcatgcttgctggctttattatgagtatttgatgataagtaagggttaagtagccttcgagtctcagggtcagtattctttcagcaaacatttattgaatacatactcattttcctttatttcatgagtatacgtttgccctcctggcaagcatttaaggtggctgaaccctattatattccaagctttgtgctaggtgttggaaacacaaaaaattatatatagtccttgccttcatggatcccatttatcagaaacataagtttctaggga

SEQ ID NO: 190801 - DNA, 423 bp, Homo sapiens
aaaggagtgcaatatcctgattggtcagaagcaaggagtaaagacaactttatcagcagcacagagctttacatggggataaaattcatgtcccagagggagagcaagttgtgtttactagaaaaactcatataatgatgtccagataaaaattcagtacccccggtgaggtatgaccagagaataaagtaagacaatcacttcctttattatgaactttctatgtcaacatgggagtaagtgagatagcatattctccattccaaaactatcaggggctgttatttctatcctctgtctgtgctggtagcctatacatggtggggacattgtatcaacataaaacattgttttttggtttccagaccaaagcatataattaagatgagctggttttaaaaagaagagagaattgtataattg

SEQ ID NO: 190802 - DNA, 700 bp, Homo sapiens
tcagccttagggggccatgtggatggaatgatccctgggcaccatgcctggggagtgccccaaagctttgccccccagctctcacctgggacctgaagtgcacagtcagctcagataaggggctggagcgtgaggggtggggtaagagccagcagaaggcatccctgaagtaccccctcccacctgtgtctgttctggtccctgtaggaccagtaggggctgtgagcagcattcccagcctttccctggtagtacagggtcggaaggagccgtgagctctgtcccaggcctgtccctggctggcataagaccattaggagctgtgagcagcaccctgggctgtctctaattgtgctgccctccatatatgaccgtgagcgaggcaagcctgtgtttcctggcctcagtttccctatttgtacagcataggtggggctttcctccaagcagttgggagggagacctgtgagtgaaagccatttctggggccttggtgggtgggttgccgacccagcggctccgagcctgtcagaggctgcagctctttaaagaggctgaggaatttggggttttctgtccaaaattgcttcagctctggccagccccccactatctgtctcgtgtcatgctcaggggcccttctcaatctgggtctccactggaatcgccgtgtggtccccctgggttggggacagctgca

SEQ ID NO: 190803 - DNA, 111 bp, Homo sapiens
aaatctctacttcagtttggaagtgtaccaaaaactgtccacctcttcagaaaatcatgtcaccagtggcaaagtggctcataatatatgagttgccaataggacccctct

SEQ ID NO: 190804 - DNA, 222 bp, Homo sapiens
aaactagaaaaagcatagagggatgcttacgtttgcaaatcgtggcagaagtcagaaagtagaaaaattgctactgacttagatacacagttgtctctagcgtatacaaagtctacctatgcactaagacttgcactgggaacttttcttgaatgtcattttgacagatgtgtcaaacggacaatctctttgcccaggaaacagagttaacctggaacagtc

SEQ ID NO: 190805 - DNA, 1297 bp, Homo sapiens
ccccagcaaggacatccggagccgatgggtgacgtgtgcccgcagactcatgcccgccatgttccaggatccgggcacagcgctggctgcccccatggctaggcgggacctgtggccaggccggccctttgggcgtgttgaccactcaggattgtccgcgctgtgtccaccagtcctgaggcttcgcacccctcccctgccgcccagcaagcgcgccgcatccaacctggccttatatgggcacgttcgggtgctgggtggcgggcggtgaccaggtgggccttatgccacagcacccccccctaccccccgcctgcccacatgggcctggctgagcggctgctctgagggcccggcagcgtcctgggctgtgtgggcactcaggccatactgggcgagcccctaccatggccagcggcctggacttgcattctctttgatctgtttggcctccccaatccctacacctgcctgtcctctggccactcggccagggaggctctggaggcctctgtcctgccatgtttcctggctggggctgaagctgactggtggatggccacggtcagccatggcagtgggcggcagagcccgcctcttcgtggagacgccccagcggccacccccttcgccttcgtcctcctcagctgcggccttggggctgaggatatccagccctggctttgcgtggcaaaggccctggcggcactggggagctgggatcaagctgctttccaagggcaggggcctctgtggtttgggtggaggtggggaggaggttcttccggactgtgctgattttcctagcgtggactagggcgcgaggtccatccaagtgtgtttctcctgctctgaacagcccactgtgcaccttcgttaggccaaggaccagcatgcagagggcttgggttatttttgaaaagccatttcccgctgggtcataagttctggaatcggcacatcgctacactcagatcatattttaaaagttcctcttttcccaaactttcacaatcttggtggatttgtcttaaactgctttttttttttccaatttgaaaaaatataggaattggctttctccctttccattttatttctcacagtgggaactcggtcagaggtgagaactcggtcagaggtgagaactcggtcagaggtgagaactcggtcagaggtgggatctcggtcagaggtgggtactcggtcagaggtgagactcgctcacgagctgggtaactcgcctcagaggtgtgaacatcagtccagaggtgggtactcgctccatgcacggtga

SEQ ID NO: 190806 - DNA, 526 bp, Homo sapiens
gggaaggttgtactggtgtctgtcccagaactagggaccagtgaggtcaccagatctgacatatcaggtgagatagttgtcgttgaaacagctgaactggcttctggcccaggactggtgatggctactgggagtgtggtgtctgacttactatgggaaaacttgggagttgtcctgggaaccattgtgttggtctctgcaggatgaatgagctgtatggctgttgtctctggttcatatggggtctccgtcagtgttgggaaagttgtagtgctgtctgtcccagaactgatgaccagtgaggtcagcatctttgatgcaccaggggagacagggagagttggaatggctgaacttgtgtgtgtctcagaataggtgataaatgaggttgtggtctctggctcaccagaagaaagagtcagagttggaatagttatactggtgtctgtcccagaactagtgacctgtgaggttaccatatctggtacatcaggtgagacagttattgttggaaaatctgaagtgg

SEQ ID NO: 190807 - DNA, 341 bp, Homo sapiens
tgtaatgttgagattatatgttacattgaaggtaatttgtattgtggggacatttctagctttaaactgctatcaagttaggaattagtcattttgcattttctttgttaaataggcaaaacacaaatagttaaacaatattgtattcatagtgctttctgttggaaccctataaaagtgagaactcaccacctatgaggagactatgagctggtccccagtggtcaggggagatttcatgggatatttgatggatagaccttgaaagaaaggtggttaggacttgataaccatgaagacgtatcaggaattgtgattggcaggcataatgttttagatgt

SEQ ID NO: 190808 - DNA, 374 bp, Homo sapiens
gtcgtgtcatggtctctggggagcacaagataagagagcatagaagactgccaagtaggagaagtggcccagaggccctagagaatgtgaccaaaggggatcttcgatgaggggctagtctgcggctcctaatctgtggctaaagtggggtgagctgctgtgtggggttacgtgaccagagtggcagtgagactaatgcccatgacccagaagctgtggctggctcggaaagccttcatagtaagggcgcagttaagacttggatttcctgccattacacacagaactgacagctcacaaagcactggatattcaggctcctgcttttgcttttctccccatatcggggtctgttagtatctataatatcgtgg

SEQ ID NO: 190809 - DNA, 395 bp, Homo sapiens
ccagaactgagttctaacgtgccctctcaatgactgtgatgcagatctaccttacagcgctgctgtggtaacacggttccccatgttggctcctcagcttggcattcaaagctctagaagatctggctccattttcctactctcccttcttgtactctacgggtactcatggcattccttgaatactttcctgtgttttgccctcccattttccttttgcaagtttagagtattttccccaagatgtctgtctgatgttacacaatggcccttcaaagtcctattcaaatggcattgttctagtaacatcctcctgggtccaaattgaaggcattttttcctcttctatgttcgagaaacaatttatccctcctagtgcccacatccatttcttc

SEQ ID NO: 190810 - DNA, 790 bp, Homo sapiens
cttagagtctgcctgatcatccaaccaattcatgatctccagggcaaccaagggtgtgaaatatgggaagcttgggcaaatggctcccttccaagtacctgtcccattctccctggggcttggggtcccagacactggccctggacccggctcttcatctctactgagattgcccggccctcatttcccagtccccggaacaggtcatcctgttgtcaattaatctagtgagctcagactccaccttcacttgagcagagggtctggctgggcagctgcccctgctgggccatctaccagcatttccagcttcctgtcacagccttgcgtacaggctggagggcggaagaggattgaaaagaaaacttgagaaagggacttccaggagttttctcaagcaacagtagtgagggacaggggttgggcctcttccacttccacttctgggagcagcagagagaggaattcacaaatcaagccacatgtgtgctcatgagctgtcttgggacagctagcatttattgagctactactgtagcctagaacttcatattccatgttttgctaagtcctcatcacagccatataaaataacaagaagtggaggctcactcaggatgggcgcccagggaaatctcaggggctgcccagttctgggccccgcacgcagttttatctgcagattcccagcgtgcaaacagataaaaagatctgtggttgacaaagctgggggctggacttctctttttcctcccttccgcttccccttccccttccccaggctctgact

SEQ ID NO: 190811 - DNA, 252 bp, Homo sapiens
ctaggaactgtacaaagttggtaattcttgggcatacagtgatttcagggtgaggacactaaaacttagagaatccaagggtcttgggataaggtcatgatagctaacagaaccataagaaattcaactcattctatagtttttgtgtgctttctaccacacaccagtgcttcttaagtttcagttatttacatatattatgtaagttcctagataaatctatacagtgaagctgaatccctggaatgtgct

SEQ ID NO: 190812 - DNA, 667 bp, Homo sapiens
tcccccataattggccccaaccttctaaagaaaaggctctgcagacagcagtgggggaaaatcagtctgatgtagtctggagaaaatctttgtcctgccctgttttcctgtagctttgaaaatctcaaatgcaaggccaaacaacgaattattattaacgtgatagaggaagctggtactattaatgtcatgcaaggagaaagcccattttgagtagaaacagaaggacatttatgaggggaaagttggctgggtagggcaaaactgagtagtagaaaatttaactgtaattattccattgaatttttttagaaggactcttcaaattattgaaagttgcttagtaattagcatagtaaccatttacaaaatacactctgacctagagcaacagggaagggagtcagagagacaagttttgtgcagactgtcagctacagcaggaaagtatgcacggtgaatttccacgttaggtcaggcccatgtaaaatttacaaatggcagggggtatggaggaataaaggcattagcattgcatatgacctggtggccctttgaaaactgtgtttggggtttatgtttctagttgcagctaaatctgaatttgaggttttaatccttttgaaccaagctaggtctaagaattagacatttgatctcatgcatc

SEQ ID NO: 190813 - DNA, 224 bp, Homo sapiens
ccgccagaaaaaaatctctagttatctgcctaaaaaaaaaaattctcatggttcagtaaagagtaaaaacagagtaaagagtaaaaagatattgttttattcaacatttagaagtttttaaagatttggaatagaaaaaaaacagcaggaacatctaaactgatttgagagaaagtgagaaaattatacttctggaatgaaaagtggtagtcataaaagtggta

SEQ ID NO: 190814 - DNA, 165 bp, Homo sapiens
tacaggtgagaaaaagtgagtcccagaaatgtaaaatagtttgctcaaggtcaaacagcattcattcattcattcattcattcattcaatgtgccagatacttgtatttggtctcactagagcctaagagggttcagcagaggagtggctggttgcctgcaggaa

SEQ ID NO: 190815 - DNA, 168 bp, Homo sapiens
cccagggcttgcctcaccccaggcatcctctgggagtttagaattcttccactcgtccacactgcccatggacacacaggcctcggtgctgctctgcaacccccgtcagacacctggggaggtgatcccttaaggacatatcttcctggactaaaaggctgaggattg

SEQ ID NO: 190816 - DNA, 549 bp, Homo sapiens
caggctttttctaacctcaaaaaaacattggggtttgatgaggttcagatttggggcaagtttcaggatagtgtttgttctagcaacttccttcccatctctgtggaaagtctgttagagtttgttgtggttctggaagccacactctgaaggctctaggctggggcatccaatctgctatttgtgcctctgcccacgcttccttcgctgtgtttcttggaactgggctttcctccactgcaggaacttgtacatgactgagaggagcccagaccccttctcctccaaactttgatggtggagcctctgcttacttcccacctccaagaatctccagcgtgtcctgggccccagtgccttcagatgggtggctgtccaattcctgcctttagctgagcttcattccactgctctaagccttaccttgggtctggggggatttcttatgttcaaccagcaggttcttttggttgtatcattcattcagctctggaaatccactgctttctgggatatatcttctagaaggaaaaattatgatgtctgctg

SEQ ID NO: 190817 - DNA, 462 bp, Homo sapiens
ctcaactgaatttggaaggctttggaaaattttggaaaagattgtgttgcaactcactgagtggttggtaactggctaaaagacattctccccggtctgttgtttgtttaagcaccagtcattttttttctaacccagttttttctcgccaaattaaatggtgattgtagtcttccaagtgaattagccagagcttgtttttgacctggctacacagtagttggattgtttgtgtcttacttggtcagcatggatgttaagggcagagaagtaagctagaaggcgatatagtctttaaaccttaagagaaaggaaagaatgaaaccccagtttgtctttattggttttaagaggtgggagctgtttatggtaagagtttagtcaggttcattgttatttcccctcattgccattttggttccattccccgcaaccttcccgagcttttgaactaggtttgct

SEQ ID NO: 190818 - DNA, 380 bp, Homo sapiens
aaaagttattgatgtgggacaactttgcatatcaatatacaagcatttattttatttgttttaatagctgcgaaatatcccattgtatgaagagactaaaatctgtccttctattgtggatatttggaatgatgaaccattggaacaaaacagagagggcaatcaaagcatttgacagcctggcaggtcaaagtgagaggtttattacagaagacagtaatgctaaaaggggaggagagctaagtgaatccacctgctgcaatgagagcccagaatcccaccaccctaagaggcaggagacaacgtggccaaaagggcagaggcccccagggctcccagcagtgccagatgcaaacttgtcatcccaccctgtgtgtggg

SEQ ID NO: 190819 - DNA, 179 bp, Homo sapiens
cctatggttcaggtaaagtagggagtgtggaagaggtgctctgttcttctgtgtcacaggagcatctgtgggataccaggatccaaaagagtttgaactgtacatcataggaatgactagactacttgccctggagagcttgatatggaatcttagaaatacccacttatggctgggtg

SEQ ID NO: 190820 - DNA, 105 bp, Homo sapiens
gcagaatttgaatagatatcaaggacgtcaggacattccttgggtgaggaaggtttagtgaagggtggtgaaggttattgagtccatgggagaagtgaaaatgag

SEQ ID NO: 190821 - DNA, 448 bp, Homo sapiens
tcagctcttacccgtcctacatcgtgtttcatctcatactctattaaacattttcaacttttcttatgcattaagagatccataaggggaaataagcaagcactttgtagccagaaagaaccaccatgggattcttgaggtcgcactagctcactggataatattaggcaagtgactgaccctgtccaagattctattctttaaaatcaagggtaattgtacccagtttgcaggattgagttgataagaaacacacacacacacacacacacacacactacacaatacactacacagtgcctagcacatgaaagagctatggtaactattgtaattatgagtctttatattgccaatggcatgtatagattgttttaagcaagaatatgatagaacacgcatccctggtaacctgtcatgaaatgctggggaatgtgataactgtaaa

SEQ ID NO: 190822 - DNA, 392 bp, Homo sapiens
tcattaagtgcattcagtgtgccagcattgtgctaaggctgtggataccagatgaagaagatcctgttctcatcttcaaggaccatgcagttttgtggaagagacaggcacatacaaaattacagcacaaaagccaggcacggtggctcatgcccgtaatcccagcactttgggaggcaaagggcgggcgggcgggcggtggagggggtggtggcggctgatcacttgagggtcgggagttcgagaccagcctggccaacacggtgaaaccccgtctctataaaaaaaaattggctgggagtggtggtgggcgcctgtagtcccgggtactcgggaggctgaggcgggaaaatcacttgaactcgggaggtggaggttgcagtgggccaagg

SEQ ID NO: 190823 - DNA, 377 bp, Homo sapiens
gataggacctaggagagcaggggagacgttccaccaaagctgagttctaggggtggttttaagcaagggagagctgtgctttctttgtgaaagaaacagcccttagttggcaagttctccaatgcataactcccccaggcatggtaatgctgtttacaagcgcaggaaacccatggtgagaacaaaacttttcaagagcaacttctctcttgcccttggagatttatttagttgctactgaggtgcctggacccaagctgagatcccttgtgaggaagttgggaacacgtcctgtgcgtttcagaaatctctgttctttactttttctacaatcaacaccagcacatggaggggagagggaaaatagtgggatgggc

SEQ ID NO: 190824 - DNA, 440 bp, Homo sapiens
cgtcctccaccatcccccgggtgctgtctgatcaccctgcctgccttcagcaagaatcctgttgggtcagtttcgccagaatcctccctgcccctgatgtttccccttagtgattttccatccactgcctcccaccctgctccttggctataacccccacttgcccatgctgtatttggagttgagcccagttctataccgaggtctctgtctttattgcaatagttttgagcaaatcctgtttttactgctttaacgaccatccagctctggtttttcattggtgcctaatggaaaatgagacatgaaaccagatacaatgtcctggtttccaggggtgtggggtgtcactgggttggagagacagcagagtggtgaccctggaggctgggcggggaggtggggaaggagtatggcgcaaaggacgtgggcagaacgtt

SEQ ID NO: 190825 - DNA, 324 bp, Homo sapiens
tccgaggtcactggcagcactagccccggctcctgtggatcacagcctgctcgtcctcagggcagcacctgggcttgttgcagaagctacatcttgaaagagcccatggcctaacgctgggcgctgcagtgagccgcacggggccggagaaggagaggactcaggggagcttgtgttcaagttcactccagaggatccagtgccaggtcctgcaaagaattctaagccattgagaaagcagtggatggtttcaccatggggcttcccagtatcacgtggggtgttagctgcacccgtcttggggaacagaggtggctgtgcagc

SEQ ID NO: 190826 - DNA, 495 bp, Homo sapiens
gtgagctgtgtttgtgccagtgtactccagcctgagtgagtacactttgagtgataccctgactcaaaaacaaaaacaacaacaaaaatccctgtagctttgattatttgtttaaagactgacagaatagttcatttggattctttttggctttaacttcaagtttggacaacagaacaagaatgaggaaaagtttgtagtatggacaagttttcaaaagaatgagtcgtgtagttagaaaattgaagctgttgatcttgtcagctgaatgagctttcttaaagcttataaagggatatgtttgaatatagttttataacctttttcagtgactaatttctgtagtaaatatttggaaaagcaaatcatcacataattcctgcaggtctctttgtgcctggctccatgctaagctcttgggacataatagtgaatcagatggatattcatggttcctgccctcatgaagcttgctttctttttttttttaaaaaa

SEQ ID NO: 190827 - DNA, 587 bp, Homo sapiens
tgaaagactaaatcatgaaagagtaagacacagatacagcaaacaggagcccaacacagaagacatggcctgggaggcccacagaggatggcgagaagtgatcctagggtggcggctctgcaccagacgtggagggcaactgagccatactgcagcagtgcaacccaccgagaggtgaaggcaggccatggtgagcttagaaacaggaagtacagggcagcccccttgctctgactgtatttccactgcaggtccagcgcctggtccccaccttggccctgcctggtgcctgactatgctgagccctgtgtttcccaaaactccaagatcttgctcacgacttcctcaggaggggctttgtcagctcccggagaagcagaagtcagatcacaacctggagattgatgcgctcacctcctggagcctccatccagcaggggcagtgctgccctctccttgcactgccagtgtgcacctgctctctgctttaatattaatcatctttgatattcatttacatgtagttataatagctgcccaaatagtgaaatagtaaataaaattaccaaatgatcttctgtgaaaaa

SEQ ID NO: 190828 - DNA, 558 bp, Homo sapiens
tgcaatctataaacactcaaaataaacacatctctgcaggtggtatccccaaaaagcacaacagtcattatctaaaaccatccccctctgcagaaggacatcccgcgtgaaaatacacaagagtttcctacaaactgtatacagaaaaactccatctggcgctaaccccgggcagctttaccaacacagcccattaatatttccgcagtcacatccctttgctcttaattggactgttgatgggtcccgtgctctgctaatgggctcttctgaacacagcccggctgctcactcgaaataagaacatttaatcgccaggctactctcctcaagcctaccagtaagagcactttgtcacgtcagtgtttgtggaacaaataaaaatacaatctcactgttatctctgttggcaatgagggctcctgtcattgtcctcaaagagacacagataagggtacccacccaggctccctaaaaatcaataactgaactgcaaaatacgtcccgctctactgttgatttgcattcagcagttaactggaagagatcgcggtgagg

SEQ ID NO: 190829 - DNA, 308 bp, Homo sapiens
aaagtacagttttaaaatatcaagcaagcatcatgtcaaaaatgaaattttattaaaggagctattctagacgattaagaaatgaaaacttagagttctaggggaaaaattcagaaccacgtttaattttatacttggaagcgcgctacaaatgacaaggtaatttttatatgtatatttatagatttaattagcagttattccattatatctttcatataactataaatggaaaatgatttcagacaagaggctctcatcttcaagaattattgttggtaaagttatgggagagctgatttctcagt

SEQ ID NO: 190830 - DNA, 336 bp, Homo sapiens
tttgatatacttttcaggagccaagaataggaaaggctgcataacagactttcacaagtcaggtgtttttaatcctgtgctttcaacaaaactgaagcaatacctaattgagttaacagctgatagatcttcagaaaatagactggtgaagttaacagtaatggaccagtgttgatttccttgttgtgaccatgtgtaccacggttatgtgagatgttaacaatggggaaactgggtgagggatattcaagaactctctgtactatctttgtaacgctatgtaaatctaacactattctaaaatgtttattaaaacaaattgatgagattacacta

SEQ ID NO: 190831 - DNA, 424 bp, Homo sapiens
agtgtggtggcgtgtgcctgtagtcccagctactcaggaggctgaggcacaagaatcgcttgaacccaggaggcagaggtggcagtgagccaagatggcgccactgcactccagcctgggtgacagagcaagactttgtctcacaaaaaaaaagaatattacattggaagcatcatcagggatcacctagtctaagagaggaaactgaggctcggaaaggttagaagggataagtcattctggataactctggagggtaaatctagaagcaacaggtagatggttccagggaagctgtttttatattaacacaggaaagactttcttagtattaaagctgtcagaaagtggccagtctcatgtgtaatgaactcctcgttactggaaagattcaagtagaagctaggatttccctctccgacct

SEQ ID NO: 190832 - DNA, 429 bp, Homo sapiens
gggaggctgacttcagggcaggcacttgatccctgtgcagatggtgctgactcctagaaggctggttgatagatgccttacttgatttatatattcctgagaaagaaagcaaaatcttgttgagatgctctgcatctatgttcataaaggatattggcctgaagtctcctctttttgttgtgtctctgccaggttttggtgttaggatgatgctggcctcatagaatgagtcgggtagtagttcttcctcctcaattgtttagagtagtttcagtaggaacggtactagctcttctttgtacgtcttatagaatttgagtgtgaatccgcctggtcctgggctttttgtctttgtttttgtattttggttggtaggctatttattactgattctaattcagagctgattattggtccacttaaggattc

SEQ ID NO: 190833 - DNA, 338 bp, Homo sapiens
agctcgaacctgtggttgatgccactccagagttcctggggatagggagagaccgaggtgtgtgggtagtttgcgccttcacgtccgtggccctggaaggatatgacactcaggaccgtgggtggcgtttgtaaagcccatgtgggaagctggcagtgttaaaaatatcgtttgcagagcgtgtgaatccctggagtgtgcagcgccttgcctaggtggtgtgggtgtgggagcaagggtctctccaccagtgtcgcctgcgacagctgccaggtccacatggcctgtgaggggatgtgtgcgcaaggatgtgtgcggggaatcatctaaagtcgacc

SEQ ID NO: 190834 - DNA, 307 bp, Homo sapiens
tatgtggtatagctgagtagaactgtgtctaacactattcttaacctttcaacataaatactccaactctgagtcactcctgcattgccaccaattcctaaccaactaaagtggatttagggctgagagccgtggctcacacctgcaatctcagcactctgtgaggccaacatgggaggactgcttgaggccaggagttcaagaccagcctgggcaacacagcaagaccctgtctttacaaaaaaatttttaaaaattagccaggcatcgtggtgcatgcctgtagtcccagctactcaaaaggctg

SEQ ID NO: 190835 - DNA, 404 bp, Homo sapiens
ttttatctttgaagttaaacattctttatctgccttttatttttctgttccttttttcttgcagtattttagcacagattccatgcttttccttttttgacaaccagctttgaattagttaaggtttttctgcaccagctatttgtacaaagtttatataagggaaggactgggtatttcaagtaacgggaattttctttttgacacagggttatgtcagcatccttttaaatctttctctctcccaagccaaaagagataggcagctctacaagtatctcatctaccctctctaccacttgaacagattgcttaatggaaatatggcttgatccttgatcagtccctcctccactgcctcttaggatcaaaacgggtccagagactctcctatcatgacctgt

SEQ ID NO: 190836 - DNA, 298 bp, Homo sapiens
tgggtaattatcaaggagcatgactgctagattgtatggtaagagtatgtttagttttgtaacaattgcatttttgacaatgcagtgcttaatcaaaaacaatgttttgggaacaaaactactcttgtaggctgtctgtctgacagcatcaataactggattgtcacttgtagctttaattaccttactcatggggttaaaaggttcttttgaagggcacttacaattttgagatcataccatgaagacagtgctttaaaaacagttctgttcacaagctagtggtagactgtgaaaa

SEQ ID NO: 190837 - DNA, 249 bp, Homo sapiens
cagcctcaaactgtcttatgggtagtcaccagagtaacagatctcagattccactaaaatagctaaatgtatataaaatgtttatatcacacataaatgtttctgaattacaaaagcatcattggggctctagaggaaaatgaaaacacaagtcccagaaatctgaaaaatgaaaaacaggggtgaaagataatgagaagtacagtcacatctaaagtcaggtcatctgggaaccctgcccactggatg

SEQ ID NO: 190838 - DNA, 454 bp, Homo sapiens
ttcatacccaactctccatgaacactgtttctcttcctgtgtccatctcatggaacagcaatagctttcaccacattttcccacttagagatttggcatcaccatctgtccttctttttcattcaaccacatcctgtcaatcaccaggtctattttttctatctctttaatatctttttagctaatttgttattctccatactgcctaccacctctgtcatccaagtgacagtcatctcttgcttgggatgctctacctttctaactatccttccttctttgattcctcctcttcaccttctaatccatttgccacacaagcccaagaagatttattccagtgcaaatctgaacatgccttacttataatattcagtggcttgccattgccaatggaataaagcccaaactcttcaagactagtaggtcttcatacttagaggtttcacatgat

SEQ ID NO: 190839 - DNA, 290 bp, Homo sapiens
gaggcaggggcagaggctgaactctgaagactactcctcctgacccaccccaaggcttttttgccttgtgatgcctccactaggaatgccagctggcttttttggtggggtacatggactgctctgtgtagtcactctcctgttctggacctcagtttaccccctcaacaaggtggcatcgttagagtgtgagcccctgctgtctcactgagaggagctgagaagaaacatggggcgtgcattcaaggtgttaccagggagctggtgggagaagcagtctcagtctcaaa

SEQ ID NO: 190840 - DNA, 121 bp, Homo sapiens
ccatatgcaatggaactgggttttcttgctgtagaattgtggtgtacttttggtcagccagcactctctgtggcttagcaaccccagcatctcctcccaacaagcagggaatctgttagca

SEQ ID NO: 190841 - DNA, 455 bp, Homo sapiens
gcgaatggcattttgtttggtgttttctccattgtaagtcctgttgcctgaggtaaggtaaaattctttttcctaacataaatttaggaagttgagtatgaagaagaataaatgggtctaggctggaagaacttgattgattgaaataaaaaaattaaaggctttttgtcccacagtgataatcaaaacatccttctattatttaaaaaacaaatcttgatgtctagtataaaaaaaaaaaaagaacaaactggctgcaagttgtgaattcattttgcctgtctgtgccagttttccaaactggcagaagggagactttatttctgagtatgtactccattaaatatttcaagttgttagaagtattcttggtttttgttgtgttttattttgatgttaagatgggttctcagaccctagcctaagatctggatttctgtgttgtcttcatgaca

SEQ ID NO: 190842 - DNA, 391 bp, Homo sapiens
atcttccaccacgattgtaagtttcctgaggcctccccagccatgctgaactgtgggtcaattaaacctcttttctttataaagaaaagtaactctcattcaagttacttcattacctttcatcttccagcatattgtgttagttactgacttttatttttcagagataatttcctcatagccaaatgcacagatcttacctgtgtcattcaatcagttttgacaaatcaaattcccacgtaaccagcacctctgtcaagacacagaacattttatcaccccacaatgttgcctgtatagcttttccctaaaagctaccactgatctgatttctggggtttttttttgtttttttgtttttgaaacggagtctcactctgtcacccagtct

SEQ ID NO: 190843 - DNA, 245 bp, Homo sapiens
ggttccagtttctccacatcctcaccaatacttattatttgggggacttctggtgataatagccttcctaacaggcgtgaggtagtatctcactgtccatttgatctttaaaattatgactattcttgagacatttctgtaaattttatatatcagagcaaaaacaaatttcagtccagtttttcttcaaatttttttttattctgaataagaggaaacaaattaggcttcaaaaagctagtctt

SEQ ID NO: 190844 - DNA, 409 bp, Homo sapiens
gaggatgtatccgtatcagtacaggaatacagtgaagatacttataaaatacagaaaaactgcccagcaaatcagggccggtaaacagttggtagattccataaattcaactggctaccatgtatagccctcactgtaaggtaggtggttctcctctactttgtggctttgacttttggacacatgtcctctgtagttctcacagaaagaaaacagagctagagaattatacaggatattaagggccaggcttggaaatggccttccgttcaatacattctagaacactttatctctgacctgctacaaaggagaatggaaaagatagtcgtaatttgagctcagaaagagaaaatagtgtggtaaatgcacagcattgtttttgctgcagtgcatatgtctgcttatt

SEQ ID NO: 190845 - DNA, 443 bp, Homo sapiens
cagtgcccaatgccattagtaattaggaaaatgtaaataacaaccatggcgagacagccctccacacccactaagatggccaaaaatcaagaagactgtcaataccaaatgttggtgaggatgtggagcaattggagctctcctctgctcctggcaagagttaaaaaataatattggctaggcattgtggatcactcctgtaatctcagcattttgggaggccgaggcagtcaggagtttgagaccagcctggccaacacggtgaaaccccgtctctactaaaaatacaaaaattagccaggcgtgctggtgggtgcctgtaatcccagctactcaggaggctgaggtaggagaatcgtttgagcctgggaggcataggttgcagtgacctgagatcacaccattgcactccagccttggtgacagggcaagactatctctca

SEQ ID NO: 190846 - DNA, 274 bp, Homo sapiens
aagacaacatatgtatacacaatcttacaactcaataattcaataatttaaaaaaccctactaagccgggcgcagtggctcacacctgtaatcccagcactttgggaggccgaggcgggcggatcacgaggtcaggagatcgagacgatcctggctaacacagtgaaaccccgtctctactaaaaatgcaaaaaattagccgggcgcagtggcaggtgcctgaagtcccagctactcgggaagctgaggcaggagaatggcgtgaacccgggag

SEQ ID NO: 190847 - DNA, 434 bp, Homo sapiens
gaagatttttttattgagaaacaatattacaaattaattaaaacatattcctgggcacccttaaataaatatagtggaataaagtacaagataaaaatctacttaaacacataattagcttggctaatctttcttctccctattctttcttctccctattctttccttcctaattgttataatattgacaatgttattttttcatagatttctattaaagatttttttcccatattgtagagataatggtcacagatgttagtagttcctgattccttatctctccaaactttaccttgatattgtgaataaatttcacagaattaatttcagaataaaaagagaaaaaaccataatttctggtcatgtttttatgcctgtttgtggtttgtaaccccataagttgtcaaactttgtgttcagtttacagattt

SEQ ID NO: 190848 - DNA, 271 bp, Homo sapiens
gacgatggcgcgtccaaacagtgcagctctggtcgactgtcctctgttgggtgcatacccaggagagggaccgggggtcacaggcctgatctgttttcagtgtcagtagttacctgcagcctgatgacgctccagcacagctgtcctgatctccgttcccatcagcagtgagagaatgcgccgctggtgccacatcagtacttagcactgcctttttggggtggggggatatcctgaggactgcgctatcggataccgggatactcaagat

SEQ ID NO: 190849 - DNA, 235 bp, Homo sapiens
gcaataatatctttaggagtttctaaaaagtctattggaaatcattttataataaagatattaggagccctcatgtttttgaaacgttctaaaagttattttggtaaatcattttctccactttatttgttttgtaaatcctaagccttatgtgttgggaatttgtttagtactttattttaaactttacaactttattataaactgaggatgcaaggaacaacatatttttctg

SEQ ID NO: 190850 - DNA, 1007 bp, Homo sapiens
gaaaacaaaacagaaaaactctaaatggctttccagtgccttaaggacaaaagtttataatgtagcctcaagggtacacatatagttggtgtacatatagctttacatcccttaacaatgggatacattcagagaacctcgttgtgtacctcatagagtatacttacacaaacctatatgggacaacctactaggcacctaggctatgtaatatggcttaatgctcctaggctacaaacctgtacagcatatgactgaactgaatactgtagactattggaacacagtgctgtgtaggtatttatttatctaaacatatctaaggacagagaaagtacagtagaaatgtggtataaaagagaaatggcatgcctgtgtagggcactgaaccatgaatggagctgtcaggactggaagttgctctgggttgagtctgtgagtgagtggtgagtgaatgtgaaggcctagaacattactgtacactaccgtagactgtatgtaaacactacagttaggctacactaaatttataaaaagtttcttcagtaatttaccttagcttactgtaatttttttaacttaataagctttttaacttttttttaaactttctgtctttttaaataacacgtagcttaaaacagcctcataatatggatccactgtagtatatgtggtctgttgtgttgacagaaatgtcattaggtggtgcatgactaattacttttgggcctcagcctcatcttgtactgtttttccccttgctttcctttgctccagttgtgtggggcctccttcattctcctgtgctcaccatattctccaccaggaatcttggcacttgttcttttcctctgcctggaatgcctttctttgttaacagttattcctggtctttagagtttggctcaagcatcacttttaatgaaattttctgtgtgcgtgcttgcacattttcataagataaagagattggactgtactgatattcatcaccgactccaaca

SEQ ID NO: 190851 - DNA, 146 bp, Homo sapiens
actgaaaaaaacgctttaaagctaaaccatttatttaaaaactctataattccaccaagtacaataaacaatcttaacttccttgagcaacctatgctttttctacttaaaaatctctctctcaatgaattcatgcctaagtcttt

SEQ ID NO: 190852 - DNA, 322 bp, Homo sapiens
agaagccagtcaaggcctatgccctggctcaggcaggctgagacactgaatcaaaacggagaatctgagaacagctgaaagagcatttcttgatttcttttttctttttttaattaaaaataaaagagatccaagtaaggtttacacattgcaattggtggatataactcttaggattttttttttctttttgaaacagggtctcactttgtagcccaggctggagtgcagtgacgtgaacacagctcacagcagccttgacctcccaggctcaagcaatccttccacctcagcctcctcagtagctgggactacagacatg

SEQ ID NO: 190853 - DNA, 392 bp, Homo sapiens
atccttccgtttcatttctatatttttcttttcactgctggtatagaaagatttctaatgtaataactataagaaaaataggccgggtgtggtggctcacacctgtaatcccagcactttgggaggctgaggtgggctgatcacctgaggtcgggagttcgagaccagcctgaccaacatggacaaaccctatctctactaaaaatacaaaactagccgggatgttgtcattttttaaactttttccattcaagaaaaaagctcattgtttttgttttaaaaaaaatatactgtggcttttaatttacatttcactgattattagtgaagtatatgtagtaaaaaatgtaaggcagcagtctaatttcaatccttttaatttattgtactgg

SEQ ID NO: 190854 - DNA, 293 bp, Homo sapiens
tccagactctaggtggttaccaaaatgcttttctttctgggagtccccagaccctccctgtctcctccatttccaaggagttccacatctctttggtgggattcagggggttttctggggtgggctgtcatgtcagacctgtctcaagcacacactgagaatggtccctggggtgctaagaggatccagtagcccctggtcctcattcatgggctcaggacttgggtgtccagggcacagtggcctccctgtgggaagctcagaggctggggagcaggatgctgatactcttg

SEQ ID NO: 190855 - DNA, 697 bp, Homo sapiens
agaataaaggtgatttaagattggttttacaggcactcttgggctgtcagctagttggcttttcagatgatgatcataaagacactccccctcacgcaggtatatgagtaagtaaggtctaccccatccacactcccatactgactttccattcccaataattgcacagactgcatactctgatcgcttattaaacatttctaaggaagccgagatggatctttgatgtaattttctcatctgtatacccagccagtaagtcagtagcacctaagatttctttcccttcaagattgtattctaagcagtagaattaaagtgttcttcatagaaaaagtaacttttaattagaggctgtgcaaactctggagaatcagtctttgttaccagataataatgtttttagctttttctgctgagaggaaaaaatgctttgaagaataaaaaatactagagcataacaagcttggggagttaggaaaaaatatattagggcagtaagaaccagcattacgtcttctctgcaatgcttgaaacattcagtattaaactttggattaatccaaagtctgaagagaaatacaccaaaatgctaaagccgtttttggttaggatagtggactttttttttcttcttcagaatgtttgtaatgagcctatattttataatggaagcaataaatgcaaatgtgaaatt

SEQ ID NO: 190856 - DNA, 505 bp, Homo sapiens
ttctgctcaagatgggtccatcgccacccacgttcatgggaggaggggtgaggttggtggcaccagggaagttgagaaaggtcaaggtgcaaagtccataagtcagtttctactagctgccttgtgggtgcttgtccttggcttaaaatcagagggacatacagaccctaggcccaccatcaacacaacaaggacgaccagcacacaggtctggatgaaacattttgcccatttcttattgaactggtgattctaacctctggatctctgagcctgacattcccatgtgagaatctccccctgctgattctgaaaatgaatggatgtcatggatatgccacttgcaagttatgggactgcaggtatattgctgacctatccaggacacagcctcctcatctgttcaatggaaagaagaattttatccaaagtgtgttgtcgtgaggactaactagttaatatcagtcacagcatttgctattgccatagtcagaagactgagaag

SEQ ID NO: 190857 - DNA, 140 bp, Homo sapiens
gctcctgagtactctgcaaattgtttttgaatgactgctagtatgtgggtttgaattttggtatttatgaacattatttttttttgccgtggggaacggagtcttgctctgttgcctgggctggagtgcggtggcacgat

SEQ ID NO: 190858 - DNA, 344 bp, Homo sapiens
tcgactctacacggcatcccccgttagatatatttgctagtgggctgatagctgatatttcagaaattctatcccctccttagagcactatggttctggaaggcgggtttggaaacaacagctctcagcgttcataccaataatactcttgataatgatccttggtcaatttcattatccacagacacaatccttccaatactcagcctcctggttcctactccttgctcttctccaccaatcttgtcctttatggcattgcggccactacacccctatggccgttcccttgactgtgtcattactcccagttgtgctatctgtactatcttgacttcaaacat

SEQ ID NO: 190859 - DNA, 464 bp, Homo sapiens
agatccccccccaaatgatccctttaagtctaattacacttgccatacctcctctccagaaatatatattggtttaaaagagtaaaacagcagaccctaaacatctggtgtttttttttttgttttttgttttttttccttcctcctcttctttgtcctgtctttcttttgatttttttaacttttgactttcatctttgtttgggtctttttctttctctctcttttttttcattttaatgttttcattccctcaattttttcttgaaaatgtcagttttcatttttataatattaaatgttttgtgctcgatgaaaagcaataaggattgaaagcacatctatttttgtacttacacacttttacttttttacccttttaatatttagaaaccacacaatataattatttttagaaattttgaagagtaaataaggttacgttattaggattcaattatgta

SEQ ID NO: 190860 - DNA, 580 bp, Homo sapiens
tcacgcttatctggaccatactggcttacaaactggaaaatcagactcagaaggtgctggaaagtagttctttgttcctgaggttcatatagaaattgccacttgttccacaatgtattaggctggaaacaatacttggttcagagtgcttaaggaggccaagcacggtggctcacgcctgtaatcccaacactttggaaggccaaggcaggtggatcacctgaagaccagcctggccaacaggatcagacctactaaaaatacaaaaattagccgggcatagtggcatgtgcctgtaatcccagctacttgggaggctgacacaggagaattgcttgaactcgggaggcagaggctgcagtgagccgagatcgcgccactgcactccagcccgggagacagagcaagactccatctcaaaaaaaaaagaaagaaagaaagaaaaacagtgataaggaaccagtagccaactccaggaactagtggtcaattctagtgcttaggagctggttcacatttttcaattgctgggttgggaaggggggctcaggtttacagtgtgttgggagctggtggtgta

SEQ ID NO: 190861 - DNA, 258 bp, Homo sapiens
  misc_feature (15)..(15): n is a, c, g, or t
  misc_feature (21)..(21): n is a, c, g, or t
  misc_feature (70)..(70): n is a, c, g, or t
gtgtttgttgcattngctttngggttcttggtcttgaactctttgcctaagccaatgtctagaagagttntactgatattatcttctaattgttatggtattaggtcttagcttgcaacacaggttcctgagtgtcatttgaataaaaagttaagcacgactataatacatataaattaatgtgtgccttaaaaaataaagcactacataaaatgtgtggtagtatttttatgtacatatgcatctacatgcatcact

SEQ ID NO: 190862 - DNA, 262 bp, Homo sapiens
agggtgagattgttaatcctaacaagtactttgatcttacattttcttattctttgatttttttatggcatatggcataggcttaaagacaaaataggttctatgtaaatcctagttggcgtgtgagatattttagcataagagtccgtgaggttattttttaatgttgtgtaagaagatacaagaaaaacaaaccaaagtgttttttcttgcctattctctctttcttttttaaagagacagagttcctctctctcacata

SEQ ID NO: 190863 - DNA, 450 bp, Homo sapiens
atttcttaggtcacagaatttctgggtcataggatatgagtttacttgactaagtggtgccagattctctccggattggttgtaggagtccagactcccaccagtatggaatgagagtttccatatcccacatctgtatgaacacagcactgtgtagctgtctcatagttatcagtctaaacggtataaagtagtatttctttgtagtattaatgtgcatttctgattgccagtgattttgaatagcttttatgcttgttagctttttcagcttgtttgtaaattgccttttgtaccttttgttaaaatgtaattgggattagtctttttcttgttaatttgcaaatgtttatgttttctagatattaactctctgatagttttagactctgctgataccctcttatgtattattatactttttattaaacagaaatacttattttaata

SEQ ID NO: 190864 - DNA, 310 bp, Homo sapiens
ctccaccatcctctccctcacttggtttttgaacagtcgtctaagttgacatgagttagatgtccagagcaagaaaagactggatggaggggtgaggcacattccttgttctctaaagtccagttcccaaatgaacaaaaccctcaccatcttacattcatatctttctcaatttttctaacatgagtccattccatctcacacaacacaggagtcctccttttggtctgaagccagtatggttctggctctgctgaggagagctcatcttgaaacatcttttcacgtggatattgtgggaagagagcct

SEQ ID NO: 190865 - DNA, 320 bp, Homo sapiens
tactattatgtcgacttcatatgatttaaactctccagaatagacagagttttaaaagtaaggagtagagtgatgaatgaactgggaaaaggaacaaggatcaatctctccaggaaccataaacccatgagaaattccttctcaattgacacactcatacagactcttcttaaaatgccaggtacaagtaaaacttaagttcacgttcctctctactaacatttcaaaaaagacaaatgcaatttaaacattgagcattacttcatcttcatttcttaagttaaaaaaaaatcctctcgtttccgacattcacagggttt

SEQ ID NO: 190866 - DNA, 231 bp, Homo sapiens
ttcttaataccaactcttttctgaaatgaatgcgagttccttaatcttactgtataattaattatttttccttgtgttccccatcttctcttgctccaggggagatctttaaatatgcaaactacttataaagaaatggtgacaccatgctgagcctctaatggacttgaaaaatcagcatctctacttgaaagctatgaaaattaaaaagaagccacacagtactttcat

SEQ ID NO: 190867 - DNA, 499 bp, Homo sapiens
aaataagcattttttaaaaccaacaaacaggctggacaccgtggctcccgcctgtaatcccagcactttgggaggctgaggcaggcggatcatttgaggtcaggatttcgagaacagcttggccaacatgtcgaaaccccgtctctactaaaaagaaaaaaaaaaaaaaaaaaagaaaaaagaaaaattagctaggcatggtggcacttgcctgtaatcccagctactcaggaagctgaggcaccggaatcacttgaacctgggaggcagagcttgcagtgagctgagatggcaccactgcactccagcctaggtcacagagcgacaccgtgtcccaacaaaacaaaacaaaaaacagcaacaaacaggctatttcagtattatggtaaatgttgcacttttcaacagatgcaccctgagttcttagattatctagttcctttatattctctccttttaaaaactggcctgcattttagtcacttcaccagcgaagtta

SEQ ID NO: 190868 - DNA, 526 bp, Homo sapiens
attttctctctctccatctttcttgccctcagaatgctgggaacacaatgtagcctacgaagcccaaggaataaacattgtgccaataagatgttctttaaattctaccgtagagtccatcctgattggctgcagggtcattgtgtacaaaacccactgcattaaagcagataacatctgtgagtcctccgatttcctatttggctccagtgtcaatataataatagtgtcttgtagatatttttactctaggataaacagattaagctccacttctatatacaaggatttgaatatggcagaagaagccaaaatgggggctttctgtgtacctcctgtaaaataacctgctcatcacattccttgccactgacaattcaacatgcttgacattcgcacatcggaaggggagtgcagtggttactcctcttcaaatgtattccctacccccaagaaaactcaaacataatcaagggaaagataatcctactttgacagaaaaaggaaagcaagatctgtgcgtgtt

SEQ ID NO: 190869 - DNA, 236 bp, Homo sapiens
ttgtaacttctatacatatgtttatataaacaaagggaaggaaaagaatgaacaaaaactaacaaaaccaatatgccccactggcatccaaagagagcttaaatctaattttaactaattcctcaaatttcaagcttagctatttctaaaagaatgagactaggtaacacttggaagtctacgagctggtcccgccttctcgcctcacagcctgccacgctccagctcaggctgtt

SEQ ID NO: 190870 - DNA, 95 bp, Homo sapiens
tagtgtagacacagggataggaggtggaggagaggggaggctgggagacttccataataaaggtattttttaaagcagtgctcactacctaacag

SEQ ID NO: 190871 - DNA, 465 bp, Homo sapiens
cacgcaataaagatgagctacaagactgagaaaggatgaagcaagaaggaggagaataggctttatttggccactttgcaagaaagaagcctgtctccaagtatggttctaactaccaattaggtgtaggtgtatcaaggtttactaggaaggaagaagacttgcttaatgattaataattagtaacctaagctttggaatcagacagtcctgggtgctaatcctagctctgtgtgctcagctacatgacctaagccttgtaaatttcagtttcctcatctggtaaaatgggaaccccctaactcattgtactgagggtcaaatgggagataaatgtacataaaactcgtggtaaattctcaataaatattgatattagggttggttagccaaagagaacttttcaagggagaaaatatgtcactctcactttctctctcaatgtctcatacttcagggaatctt

SEQ ID NO: 190872 - DNA, 418 bp, Homo sapiens
caggcgttaatacgtcgtcagtggaaaaataaccttcaaaggcagaccattaaatccctcaaacgacacctaacagcaaaatttaaaatcatttagcatcactaagctttaattacaactaagaagttccgacggtattttttggttaaaaaaaaaatgtatgctctttattcattctctcccctagacttgggaggcagaaatgcagggataagcttgcaaacgactggtgtgccaaatgcaaaagcgcggtaggttcctgacacagaaaacgagcctgatctaacacgtagaccacctatcttctgcctcatcgcccaaacttccaaaggatctgcccttaatggaaacacagttaaacctatatcaacaatccttcggcgataacaagaaagtaaaccacaaataacctgtcccg

SEQ ID NO: 190873 - DNA, 352 bp, Homo sapiens
aagtaaaaggtttctctccagtatgaattctcttatgttcattaaatattaaagaccatttaaaggctttgccacattcttcacaagtgtagggtttctctccagcatgaattaccttatgttgagttaggtgtgaaaacttctgaaatgatttgccacattctttaaagtgtttctctccagtatgtcttgtcttacgtttgtttgaatttgaaaatttactaacaactttgacacttgctttacactgaagtattttgctctgggtagttgacaagcattcattaaattcattataacctcctttctgcaacttacactcattcaaacttttacagccttttcttaattg

SEQ ID NO: 190874 - DNA, 180 bp, Homo sapiens
atgatagaccaaatccctctgtgagaaatccagaaaccggttacaggttgctttaccacaagtgagactaaaatcaacggcatcaaagccaggtaggaaaattcaactacctgtcgcttgccagagcctcccagcccccaacccctgcacagcgtggagcaattgggaggaaaccttcaa

SEQ ID NO: 190875 - DNA, 462 bp, Homo sapiens
agtagcgacaccgtacctggagagcacctctcttcccaagaaggaagttttggcagcactctccgctggtggagcagtggtctatggaacggaagcatggccaggggccctgccctggacctcaggtaaaccacagctgaccctgtgccagctgtagtctgaagttttcctccccaagagccagcggcgcaggaacagccccaccccgacctctgagacggtgtgagcaaagcggtgctctggggtggtcatagcccgggagcgtgggcagcacacctttctctggggtcctgatctgctgctagtggaggggtggttctcccaggtaaaagtcatggaacctgcattcctacagttttttcacggggcatttcttggaggaggaggtggttatgatggagactcaagccagactgcctgggtcggaatctcagctccatccctgctggacggtgcaactct

SEQ ID NO: 190876 - DNA, 257 bp, Homo sapiens
tcttgccaagatctgataattttgtctatttcattttagccattgatctgtgtgtagtgatgtctcactgtgcttttagtttgctttctctgatgactaatgaagttgggcacactgtcacacttttaatgtccatttggatatgctcttctttgaagtgtccaagtagttttttgcccattaaaaaaatgaatttttttttgtatttgaagaagtgtgtttttgaagacaaagttttgctcttgttgcccaggctg

SEQ ID NO: 190877 - DNA, 249 bp, Homo sapiens
aaaggaagaggagaatttcttggaaggacaagaggagaatgggcagtgcaggtggagagagaagctgggcagaggcagcaaggccaacaggcagaaggggccagcagttcagtaaagataatctcagtagtggataagtatttatcataaaccagaaggaaagattatgccaagttgcaggattgctcccccacagactgtgccctctaagtgtaaaggcataggattatgtgtctacaagttcctcag

SEQ ID NO: 190878 - DNA, 269 bp, Homo sapiens
gtattacctgtacgcatgttactgtactgagtgctgtaggcaatcgtaacacaatggtatgtgtatacgaggctacaccatctaggtttgtgcaagtacactgcatgacgttcacacagcaaaactgtctaatgatgcatttctcagaatctaccccagttgttaagtgacccgtgactgtcctgtcctataaatgactatcattgcaattactctggaaaaattataaaacaattcatcagtctcagtcagaacaccagccccgacag

SEQ ID NO: 190879 - DNA, 124 bp, Homo sapiens
ggacagaagaggctgctggcatgggccaccacacaggcaatgggctaagaaagaacagtcaggatgcaagagagaaatttctccgagttcataaccagccgattgtgcaggtgcaaactttgtg

SEQ ID NO: 190880 - DNA, 320 bp, Homo sapiens
aaatcagtatctacttctctaggggctttattccacattcctggagtgagttttagaaagttggtttagaaagttataaatctttttttgtttccctgagataattgtctgaatgttaagatttactaatatgtttctcggcctttatccatggcttgcaatcctcatcacatcatgacttcataggcaactcctttttaattttagcttactttggaggtaagggaaactccaatctaggggataagataaaaatcatggaaagatggcaagcaggtactcctgaagtgacaattcttttttggtgttttttttttttg

SEQ ID NO: 190881 - DNA, 684 bp, Homo sapiens
cctcatctattgattatataaactaaagaagctaagaacaattaacccttacgaggttacacagtcaggagatgctgaactgagattcagtgtagaaagtctgtcttcagagcctatgcttttagtctttatgctaagtttaacttgtttaaatagcaagattatgaagcactatacagtgacctcgtatagacaaaaatatagtatattgattattagagaaactacatattagactgttgtacatacgtgggcaagtatttgttaaatcatttcagttgcctaaatttaagcaactgtgctgtttaaaacatgctcattcacattttttcttaatctagaaagtcacttctgaataattgcttgtttagattttctcatttggtgtgggaaatttatattaaaattttaactaatattctaacaatacagagtctgaacctaaagtccagaagaattttaagtcatgccgcagacaggatgaacagtatagcaaatcagaataatagactgtttgggggggttggggggaacccatgagaatttcaggatttcaagataaagcttggaattgaggtaaaggcatcagataaggaagtgatcatttcataacttgtttttgcttgaaatatattatattttacatcacaaaagtagtataactgttattttgctaatgcacag

SEQ ID NO: 190882 - DNA, 224 bp, Homo sapiens
tccagcctgggcgaaagagcgagactccatcaagaaagaatgggaaagggaaaggaaagaaaggaaagaaaacaaagaaaaaagaaaaagagaaagaaggaaggaaggaagggaaagagggaggggactctgtccattggacaaagcatcccatctagcatgcctcttatcaacaagcgagatgctgctggagctaccacttgggttgagggaatggagggcag

SEQ ID NO: 190883 - DNA, 445 bp, Homo sapiens
acctgacggctccagggccctcttgcgagtggacctgcgggagctgtctttttctgactggcttatttcacggggcacagtgtcctccggcccgtcgtgctgcagcacgggtcggtggtcattcctctttatggctgaattattccattgcggggagaggctgcatttccttgactcactcatccatcggcacagcaggtgcttccgcattttggtcattgtgaacggtgctgctgtgaacatggcgtgcaagtgggactttcagacgctgcttttttatgtttgtttttggtttttggttttttgtttatttttgtttttgtttttgacggagtctccctctgtcgcccaggctgaagggcagtggtgtgatctcagcttaccacgacctctgcctattgggttcaagtgattctcctgcctcagcctcctgagtagctgggat

SEQ ID NO: 190884 - DNA, 443 bp, Homo sapiens
tggctgggcaggaggacagtaatcagatgggtagtcgattttttcaaaaagtatagcattagtgatgcaaaatggggtgctaatgatttcctagggcttggcatgaagcagacagtaaattatattaaaacctatcacagtgataacagtgacaatggccaactactcagccagagtgcaacctgggcctggcatggtctaagcgcttctcatacacgagctccctactcctgttaaagaggaggaaagagaggctcaggaggtttaaggaacttgcccaagctcacgcagatgattgaagccatggagaattcagtgtagagggccaatcctaggatggtaggatttctgagatccaaggcggctcaggacttgtggggctgccaggggcagtgaccccgagtgccccaccttgcagcaagattcagcctgggaccccagca

SEQ ID NO: 190885 - DNA, 359 bp, Homo sapiens
tgatgacttaacataacatacatctatacagagttccaaaaaagagagagaatgggataatattctaagagataatgatcattttttcagaaccactgcaagatccaatccagattcaagaaacaacaaattccaagctggatacataaaaagaaatctacaatcagcacatcacacagttcaactacagaatatcaaagacaaaaaggatctttaaaacaaccaaagaaaaaagattatcttcaaattggaaaccattaagactgatagatgagttttgaaaatcaacaatggaagccagaaaatattgtcagtaagaatataattaggggctgggtgtggtggctcatgcctgtaat

SEQ ID NO: 190886 - DNA, 446 bp, Homo sapiens
tatacaggaagatttttccagatgatgagtaaacagcaaactttcaagatcattctttggcagagattctactgaggtaggaaagtggcaggacttatttgcggttgtggcccagttgatcagagcaggatctggtccaaacagggtgcagtaaagaagctgaccaaaaccagcagatggagacaaaagctacctctagttgctctcactgctcattagcataaagacactcctttccagtgccatgacagtttataaatgccatgtcaacatgccatggcaatggccaggaagttaccttatatgcttctggaaactcctcatcccttttccaaaaagttctgaatagcccacttcctaattagcatctaattaaaagcatctaaataaatacagctagctagcaacccacacactgcccatgggttagccttcctccacgagaa

SEQ ID NO: 190887 - DNA, 239 bp, Homo sapiens
gagtgacagtgaacagaagtttgtcctgagccccatgagcagatacaagtgatcccttccatccaagaaataaacagagctaatgaggatgcttcacattgttcactctgaccctttcacagcacaaattccaaaactgagaatttttggttctgcaaatggaggcattaaaaggaaaataccagtttaaagtaaaaccaagttttggaaaatttggaaagggatttttaaagcctttg

SEQ ID NO: 190888 - DNA, 494 bp, Homo sapiens
aatcccagcgtttttccatcctgagcagtgaggctgcatcatgttccttctctgtcttccctccatccaggaaaaggacatttcactatgcagccccacagaccacagtgtgcaagtagcatagcttgaggaattgatatgacaagaaaaccttttcaactactattgagctctgggcaaacacaccataaggaagattaagacacccctttccccccaaacctcaccaaataacaaacggggggaagaggaagagaaggatgctccagaggcaacaaaacagggtctgactgcatcctcgctcctgagcgtagcagtcacgggaaaggaggatgtttgcagggcaagcgtcagagaggggaccctgacagcacagggcaggatggagaggggaccctgatggcacagggcgcgccagagaggggaccctgacagcacagggcaggatggagaggggaccctgacggcacagggcaggatggagaggggaccgt

SEQ ID NO: 190889 - DNA, 759 bp, Homo sapiens
cacattgtttgcatgtgtctgcgaatgtgcatgtctatctgcgtgcctgtgtgtatgtgtgtgtgtgtaaatgcgggtgtttaccagcgcatgaatgcccccgtgtccacgtgtatctgcgtgcatgtgcttacacgcgtgttcgtgtgtatctgcatgcatgtctccgtgtatgtgcgcgctcgcccgcccgcaggctctgtggtgagggcattccgaggcggagtacggctgtcaggggacctctcccactccactgcagtcccttcccactcacagtgaaccggtgcgctgcctgaggtgcagcctagacgcttcctgcaaagtgttggctcggcacggtagaggcgcaggaaccaaccggtgagccctctcctaagagacccaggggaagacccaaaggcagcaaaaacaagagtccctctaaagcagctcaaaaggaaccaaccggtgagccctctcctaagagacccagggaagacccaaaggcagcaaaaacaagagtccctctaaagcagctcaaaagaaagcagaagccactggagaaaaacggccaagaggcagacctaggaaatggcctggaagctagcaaaagcttttgcagagaactgaaactgtgtcacagagcaccagcactgtatttgttatcattttggccttcagttttattaatgcttgtttgatgtgttaagcccctagctaagacaaaaagacagaactttagggtttttgtttgttttagcagtaataaagtctaga

SEQ ID NO: 190890 - DNA, 679 bp, Homo sapiens
gcggacgctggtgatcaggaccacaggaagccctatgggaagaaggctgtggcgtcagtaaggcaatggcttccggacctcagtgtgtgcaaaaatcaagtggtgagctgttcaaatgctcatccgcaggcctcactccaagagagcctacgtcactaggtttggagtgaggacagaaatctctcttaaataaacacccacaacctggatgcaggtggtgcctgcaagacccgtggagaaatgactgcactgagagctgcaaagggaccgagccgagtctcagcgagccggggatgggagactcttgtttagccttccagcttcatttccatcaacactaaaaatgttataacattgtaacaagtgcactgaaagactttcctttcagagctaagaattctctatacagtaaaagcaaaatggtttcttagaagattctaagatcgggtgacagaaggcaagtgagggagcctcagctcatgatgaaaaatcaaaggacatctccaaacaccaaagcaggtgttttctgattaagggaaaggcagtcagaaaccaaagaaaaagattgctaagaaaaggaaaggtgaggggtgttcttttcaaaatctaccagttcctcctggtataaccaattcaataaacccaacaaaagaaacagttctacatatctgaggatcag

SEQ ID NO: 190891 - DNA, 413 bp, Homo sapiens
tgagatgcagagatgttaagttacctgcccagggtcactctggtcagatttctttcactgtcatactttttctatgtcaagtttttctcactgtcataattttttccagggcactttcattaggagcaatataaacacagtggttctgagaatgtcttctggagccaggctgccttcacttcaaattcttgctttcacatcctccttccctggctaagtgaccctgagcactgcatcttgcttccaacctccaagcttcccttgtccattcctggacataagccaggctaaatatgagaggagtttagttccaagtctaagtgtgaaacaaagatgatagccctttcccgagacaaacctcttcctttcttggggatcagacctccttagcaaagttaacaaattaggcacga

SEQ ID NO: 190892 - DNA, 514 bp, Homo sapiens
ttctggaaaggagttgtccaagcagagatgacttttcctagcctccctgataatcatatggagtcagggactgtgtcttgcttattgtttgttttctctgcctaacatagtacacagctcagaggatgttctcaataaataagtatgagataaattgatactttacctctctggttgcagcttgtctttttgctaattacacagatatgggaaggttgtaggattcaaataaattttacaataagctgtttcctttttaaacttagagagcatctctcaagtctaggggcatgtcacttttccatcagcttccctgctatgaacactttgtgaatcatcctaaattacatcaaaagaaaagacatcatgttctcttctgcttggtgatacaagagggcttttccactggaaaaaatactaaattttctatttcctgtgtgttaccagcaaaaacttttttcacaagctgctgctttctgggttagagtgaataagtaactaaccaattagctcg

SEQ ID NO: 190893 - DNA, 467 bp, Homo sapiens
taatcccagcactttgggaggctgaggcaggaggatcgctttcatccaggttcaagaccagcctgggtaacatagtgagacccccatctccacaaaaaaataaaaaattagctgggcgtgttggcatgcacctgtgatcgcagctactcaggaggctgagatgagaggatggcatgagcctgggaggtcaaggctgcggtgagtcatgattgcaccactgcacttagcctgggtgacctagtgagccctgtctcaaaaaaagtagaaaagaaacaaatgcacttattccccctggagctggtcactgaggtccccacaagcctccttagggaaatcttctaagattcactcctccccagagctgaaggggtggttgaacagtttttccaatttgcagagactgacttcccccagtgcatcagtcaccataacacacaccccagtgaggacggcatataggtgtgctc

SEQ ID NO: 190894 - DNA, 164 bp, Homo sapiens
ctggctatttttttgttatattttgtagagacagggtctcgctatgctgcccagacttgtcttcaactcctggcttcaagtgattctcactctttgacctcccaaaatacagggattacaggcatgagccaccatgcctggccattatttttatctttaaattt

SEQ ID NO: 190895 - DNA, 417 bp, Homo sapiens
tataatgggtttgtttttagctttttaattttctaccatccccttgacctcttggaaatgaggccgccatctgctgtagtagttgcactcaaggtacagcctggagtacgtcggggagtaatgaccatccaggtagatctgaggttgtcatgaaagaatagagggatgctcctggctgaggggacatttatagccagaggattcttttgagtagtattaataaactctggtcttgctacctttatttcttgcaaatggtacatctccactgccccaactgaacacaaacttctttctaggagcagaagcagcagttaagtgttgcctctgtgaagttggttcgaggtgttttgtgcttgaaagccaggaatagttgcaatgcagtgtctttccctgatcctcatggcttataaataa

SEQ ID NO: 190896 - DNA, 201 bp, Homo sapiens
cattttccaaatttgctgaacatatgtaccagctcttggtgggggtggttaaaatatagatcttcagcctagcccgcagagattcagggttagagtgttgattatgggcatgtttgggaaaggctgccttaagtagaggtggcctgttgttctttagcatctccagatgtttttctctctccccaggtacacatagaacag

SEQ ID NO: 190897 - DNA, 390 bp, Homo sapiens
ggcatgagccaccacacccagcctatttgcttatttttaaggcagggtctcgctatgttgccaatgctgatcttgaactcctgggcttatgcacttctgccttggcctcacttatgcacttctgccttggtctcacttatgcacttctgccttggcctcgcaagtagctgggactacaagtgtgtgccaccacacccagccattttttcaatgtaaagactaccttgaaacattagatgaaaatgcttacatactccaaaattgcttttaccccaaaactgctttcacttgtttttcacagtgactttaacattgtagacactcaataaacaaaggatctttgagtttaggattttaggtaaggtaatgaatgatgtttgcaaagaataa

SEQ ID NO: 190898 - DNA, 374 bp, Homo sapiens
gctgcttccatgaggatgactttctgtgggaacgtggagagagtgcacagtggggaaaaatcaggtcacagggagagtggtttggcagccattccactgtctaacccaaggtggtgccatggtttaggaaggcagaagcagatggcacagcaattctgaaggtagaaccaacaggatttgataacacatggatatgggaagcaagtaacagggatgtgtctaggatgatgccaaggttttttagtgtggccacctggacatgggagttggtatagctttgaacagaaacaggaaataaatttgcttgtagggcagccactgctggctagatccccacagccattcacaactcccttctccctagtctgtacctt

SEQ ID NO: 190899 - DNA, 396 bp, Homo sapiens
gcctcccaggttcaggcgattctcctgcctcagcctcccaagtagctgcgactccaggtgtggtggcggtcacctataatcccagctactcgggaggctaaggcagggaattgctcgaacctgggaggcagaggttgtagtgacccgagatcgcactactgcactccagcctggacaacagagagagacttggtctcaaaaaaaaaaaaaaaattgttttgtttgttgtttgtttggtaagagacaagatctcactgtgttgctcaggctgcagtgaagtggcatgatcatagctcactgcagcctcaaacccctggcttcaggctgtcttctgcgttggcctcccaaatgtttggattttttttttttttgaataaacatttattttctttcttt

SEQ ID NO: 190900 - DNA, 709 bp, Homo sapiens
cagctcccccacacacctagccaacaacccactctcaaggtgggaaacaccattctaaggactcgcattaacccatctgaataaccctgggtaatctggagcagaggtcgaaaccactgaatggctcaggtacggtagaaaatggcctctgattgattgttttggacatcgctgctattgcaacagagaaagatcaagccccatcacctagaagggatttcattctttgcaacaggaaagatagttcagaatccagcgccaattattcccagaaaaaaaataccatttgaaacattacaaatgaaattgagttatataaaccgccttcctcatcccttccaaggagggtggattctgcggatgtcaagggtgactgtggcagactggaagggtgggaaagagatcaaattagagaaaaccaagggaagagcaactgccagccacctaggaaaaaggagagaggcctaggtgacaggaccccaagttggagagaaagacacacagaggggtgagtcagaggaaagctacagaagggtgtgctggggacaggcgtcaagaggtgaggctgcctcagggagaggaagcacgggaggagacctggcccaggagagtttcagaggctccacccagcagcgtgcaatagtacctcctcccccaagaaatcaggattgtgcaggaaacactctcctacttctcagtggccatctgg

SEQ ID NO: 190901 - DNA, 446 bp, Homo sapiens
gtggtgcccacagcttagtgggagagataagggaagtaaacaaacaacacgagacaatacaaagtggaaagttcttctggccccaggagaggtccggaggctgaggcaggttagaatggcttgaacccaggaagcggaggttgcagtgagccgagatcataccactgcacttcagcctgggtgacagagagagactgtgtctcaaaaaaaaaataataataagtaaatacatacaaaaatgtaaattcttgaactgtattcacatattttaggctggtacagtgattgccctttggccttgtatattggcattttacatgaatcatgaacctagattgtgatcatttatttcatttttttaggctgtcatatttcaacctagaagtctgagaaaaaaagttgaaaacacttcattgtacttggatactttactgtttcaatcacct

SEQ ID NO: 190902 - DNA, 393 bp, Homo sapiens
gagggactctgatagttatgtttgtttccaagtcttcccatgctgctcaagatggcaaagtttttcagtaaccttgtgtatcactccagacatggcagcagcccacacatacctggaatttaaatgccatacttccttgggatccagtgtgccagagacgcatgtcctcacctgaccactgtgttggagaggtccttcctcctttcaggctggcctcagcaggtggcagagatcagagagaggccaccagcggtgatccagacagccacgccatgtctctccctgttcccactctccctgtcctctcaatgcccagggcagccggtgctcctacctccagttccagctgtggggggctccagctgtctttctcttgcctttgttcctggagct

SEQ ID NO: 190903 - DNA, 450 bp, Homo sapiens
ctgtacacaggttttaaaataaccctaaatttattatgtgtgggtgagcaactcataaataaataaagtgcttccatctctaaaatgtcaaggggaaaaaaggttttacttacactcaaatgacaaacactgaaaaacaatagtaggccaaacgcagggacttgtgccggtaattccagtgtttgcggaggcaaaggagggaggatcacttaaggccaggagttcaaggaacaacctgggcaatatagtgagaccccatgactaaaaaatttaaaaattagctaagcatgatggtacacacctacagtcccagctacacgggaggctaaaatgggaggattgctcgagcttgggagttcaaggctgcaggatcacaccgctgcactccagcctgggcagcaaatcgagaccttatctctaaaaaaataataatcataataaatttagggt

SEQ ID NO: 190904 - DNA, 846 bp, Homo sapiens
gtgggaagaacaccattcagctaaaatgcagcttttattctgatcttaaacttttagcgtgaagcgttgtaatccaaataccccagggcacaatggtcagagaacacagacaatttgttgaaaaagaaattaaagtgtcaagattatatggaaaaacctttaccttcactgttataataaacatacaaattagaagaatgagctatctatttttgcatgtcaacttgacagaaattaaaaataattttcaaccagacagataaaaagacaatccagtttaaaactgggcaaaggagagctgggtgtggtggctcacacctgtaagactagcactttgggaggccaagatgggcagatcacttgaggtcaggaattcaagaccagcctggcaaaaaaatggtgaaaccttgtctctaccaaaaaatggaacaattagccggacgtggtggcatgcacctgtagtcccagctgctcaggaggctgaggcaggagaatcacttgaacccaggaggtgaaggttgcagtgagccaagatcataccactgcagcagtccagtctgggtgacagactgagaccctgtttcaaaaaaaaaaaatgggcaaaggatctgaattgatatttcttcgaagaagatatacagttggccaataagttcatgaaaagatattcaacatcattaactgtcagggagacacaattcaaaaccacgatgtgagacagcacacacataaggtagctgtaataaaaaagatagaccagcacctgtattggtgagatgtagatgaattggaactctcatcctgttagttgggttgtaaaattgtataaccactttgaagagcctg

SEQ ID NO: 190905 - DNA, 605 bp, Homo sapiens
cagggagggtgactgggaggcagccacttttgaccttatactaggatccttaaaaggtaatttttgcaaaaatattccaaagcagcgtcagtgtccccaggccctttcctaggcctttgactttcagatgtactgtttggagctcctgtgtcctcagcctggctggttttctgttcctcggaagtggggctgcccgttgctggggcttcatatgacttgagcaggtcccccgcatctcttgtaagatttgcagttttacttcacaagaccagcgaaaatgtcagtgtgcaggatggctgcacgtggtgggcggggagggcgttgatgaggagccgatttcataagtggccactttgttcatgaattttgtgttgtgatgacatttgcttcctcacgctgaggccgggccaccactgccaccctaccctgtagctgataaagctgcaggtacagtagtaatttatttgtgtttcttttataacaataaggaaatgtttgcttcaattttttaaaaagacgtgcaaacgaaagagaattaaaatgtatgtgatcctcctaagcgggtaccgagccgaatcgtatctgcttcttttcccgggaggaag

SEQ ID NO: 190906 - DNA, 123 bp, Homo sapiens
tgttatcagttggtttgcatattttgtgcatattaaactcttctctagtttaagaaggatttaagggtaataaatttgtatgtagtagatggtttggaggagagctttctgaattattgcttg

SEQ ID NO: 190907 - DNA, 941 bp, Homo sapiens
gggctggcccacctctaagaccacactgacttcttcctggggctgcaagtttctggaggcccccgggagccttccagacatctgcattccttctggactctccaagtaagcacaggcttctgtcctactctgtaaccctagagggcacctctgctgaggtcagacatctccttgatgtctgtgatcaaaccatgacaggatgcaaccacaacacacggctatgatcatgacaaccacggtccccaccacgacacaatcacgttcacaaccacaaccacgcagccacagctataaccagcccgagtctaccccacatgaatgcacagcccagttacagggcttcaagcttcggttcctgcccactcctaaccattggtggtgagtctccggcttccagggatctccaaaggtcttcctatcagtcctggagaatcagagcaggaagccctttcaacctcattgtgtagcagggatgctcaaggcctgtgaggacaggaggcatctccaggcctggtcctcatgtgctgctttccctgcacaaccacaccacctcagcatgcctgctctttcaacagggcttgcttgacactcctcccaagccttcccctgctgtgaagataagagagcagggtggccaggtgcagtggctcacgcctgtaatcccagctacttgggaggctgaggcacaagaatcacttgaacctggcaggcagaggttgcagtgagccaggatcatgccactgcactccagcctgggcaacaaagactccatctcaaaaaataaacaaataaagagcagcggcagagagagcaagggccaagctgacagcaaggctttgttgggggatgcaggaaccacccagcagggggcacggtggtggtcaaaagcgtgggggtgcacagctgggacctggccgctcctccactgctctgggccaata

SEQ ID NO: 190908 - DNA, 408 bp, Homo sapiens
acctcctaccccacgacctcctacccacgaagaaacatgcactttaaaaaataatataggatacatacattgtctcagggctgcattttattttactttgagtaaaacagtttgtctgtccaggagtcatggtcttgctaacattttgacaatttgtatgaacctctcttgagtttactagcttgctcagttccagagtgggagtagttcccacatggaggacgtgtgcatttgcccctatgtcttgggcttatcctacttctgatcaattccttcttattctctgtggtgggatgggagaagtgccagcctgtgtcctaagaagcctctcctagaattctaccttattctatgctgcaaatattgtcccaccctgacaatatgcttttcttctctgaaacctttctt

SEQ ID NO: 190909 - DNA, 402 bp, Homo sapiens
tagagaattaaactcacttaagattgaagtagtagtcatttcatactttgtgtatttatccatgttttgagctaattccagaatgttgtcagtcatattgggatgcgatatagtaatttggtttttaagtatgattttggaactctaagttactaaaatagtagcttaatttttgttcaccaaaagaatttataactgaaacttccattagagattatatgctttttatttactacttttagccattaaccaattaattataaaatatagagattttatgttttcatctacatatacaaaattaccattaagatgaaagtaattgaattgattgcatattcagttatagaattccaaatttaagtagacacagaaagtcataagtttacatctaaaaattca

SEQ ID NO: 190910 - DNA, 235 bp, Homo sapiens
agaggcatttatgaggaaggagttaatggttattttttgctgggcacaagaataactttacaggtgttgcatttgggcttaaataagattgccttatttagtttcgaaaaagagtgtaggtgtcaacattcgagcagccacaaatgtgtgagaaagtaaagggtatgagacatgacggaattaaaggtgtttgctatgttgttacaccgtgtgtcaggctgcaagctccctttgt

SEQ ID NO: 190911 - DNA, 485 bp, Homo sapiens
ttgagcagtattgtgctgctcctgctttgcttccacatgaataaaagctccctgaggccttcctggaagctgagcagggccatgcttcctataaagcctgcagaaccatgagccaattaaacctcttttcaaattacccagtctcaggtatttacagcaatgcaagaatgatctaataccttgtaccattttacattctcaccaatagtgcacaaaggttcaaatttctccacattcctggcaacacttgttatgttttttttttaaattaaccatcctattgagtgtgaggtgatatctcattgtgtgcttttttgtttgtttgtttttgttttcgtttttggttttgtttttcagactgagtctcgttgtcactcaggctggagtacagtggtgcaatctcagctcactgcaaccttcgcctcccaggttcaagtgattcttgtgcctcagcctcccaagtacctgggactacaggtgcatgc

SEQ ID NO: 190912 - DNA, 364 bp, Homo sapiens
caaaatgttcagacatttcccaagaaaaaggaagttgatctcttcagtgtggcctcaagagggcagaactagcatccctgaatccttaatcccactctcaccgagggaggaattctaacaaaacagctaataaggggtggcttcagcaagacgtgaacctccttttcactggcacgtggctctcagactttaacctgtttgttgagcacttacggattgtttttgcaaagcagatactgaagaaccagttccagagattctcggtcagtacgtctgaagcagggccctggaagctgcatttgtaagcaaatgctcctgtgtgaatctgacacaagcagtccaggatcacacaggagaaatactg

SEQ ID NO: 190913 - DNA, 335 bp, Homo sapiens
gtggatgtgcattaacttgtacaactttctacactaggagggagcagagcaaatagtaactgtaaaaactgtgaagttaagtggctattgctaagtgtcactgaaaggctaaagagaaaatgacagggccagggtgtttcatcaccagttcaaagccaagtgttgcctctttggaaacatttatttcctttagatagagaactgatgatactaaagaccaggcctagcactaaattgtaagtgtgacagaatttaagaactctgaatcccaggcaagtctcttatgtcaaaataagagttatgatatgaaaaaagtgaagtctaaaggatatctg

SEQ ID NO: 190914 - DNA, 405 bp, Homo sapiens
gcttatttgtatggtttatactaataggttaccttgtacttctgcttctggttgggctttgtctcggggatccctaggaagagatcaaaaggaagaaggagattacgatcaaggtatttactcctccaggctgcattcttgtgtgctaacttcaggctggccagatctatcaacagaaggccactcttactctaagggctgcaaattcctgtcacctctttcccttagggtccagtagccattccttcccttcatcccttctggctcaggtggagaaacagcttgcttgctacatgcccttggttaatgcactaaccttttgtttcccctataatcccacctatgctttttgtaaagagttcttttataaataaaacttcctccaattctctttgttcaatgtgt

SEQ ID NO: 190915 - DNA, 370 bp, Homo sapiens
ctcatgataaagtggtttcattaaagttaaaacaaacaagttacagtcttttaaggccatggccagagagatcaattcaaatatttggactccatgttagatttcacagcagtacagtttaagtataatgaatagttcatgtattttgttagatcatgagcctctcttatcactcaagaaaacccccgagtcttatttattcaagattactttagaattcccagtacatgttcagtaactattaatgatcacagtggtaatagagaacgaatgggaagctgggttgccattgcaatcaagtttcttctagatttgttaatgtacctgattgatagaattaactgaggaaagttttttttttttttttttg

SEQ ID NO: 190916 - DNA, 548 bp, Homo sapiens
tcctccaaaagtctgaaatattcttaatagaacaaaattaaaagacatggtttatgtcaaaggcatgcatttgcacagaaaatatctgctttcatgaactaaataaattctttcttgaccttagtatcagatgctagatccagtggctatgaccaccttcaagagctattcacaatggggctggccaagttctaccttgaagggcctcataagacctataaaatgtgtctcatgccacaaacactgtgacctccaaaccatctctcttctccaagtgatctgtcccacatacctttggaataaaaagtgaatcaggcttcactatatacatgctagagacacacacctgaactcataagataatgtacctcaattttttattttgaccatgactcgcagtaataactacattttcaaatctgatattgtatcctcatgcatgtgtacttataaaacagaaacaagtttcattaaacagcatttgcctttaatacactgaatacactacggtgtcttttttttttttttttaaggcagagtctcgctct

SEQ ID NO: 190917 - DNA, 163 bp, Homo sapiens
tggtacccatcggaaccaatgagctccttcccatatgttcttcactcagatccaccagtctctgctacatgtgctttatctttttctatttctcggtatactgagagctgcagatgtcacattcagtctttttttctttttttttttttgagacagagtttcg

SEQ ID NO: 190918 - DNA, 298 bp, Homo sapiens
tactttatacagcaggcaggtgtcactgttccaaagctatgaaagtgaacaggctctcaatcacttcttttcgctttatcattcacccatccattcattcaacaaatactcaaaagttatacgccaacaaactggataactcagaagaaacgcataaattcctaggaacatagaacctcccgagattgaatcatgaagaaacagaaaatctgaacagattaatgagtaaggattgaatcagtaagtctctcaccaaagaaaagccatggtttcactgctgaattctaccaaacatatg

SEQ ID NO: 190919 - DNA, 301 bp, Homo sapiens
aataccaagattaccaaaagttctacaaaatagaatcaaagcattttttttagttctgcaaatatttatcttgtttctagtttataagtaaacctgaaatgaaatagacattttctcttttaaaaaatttgacaaattctaaaattgaaaaaaggtattagcttttttggcgtgttaaatttaaatttacttgctgaataaatattcagtggctgagttgaataatctcttctagtcagcaaggcatgtaattgtctaaaatgctttcgttggctgatttaaaaccttatattgtgctcat

SEQ ID NO: 190920 - DNA, 446 bp, Homo sapiens
aggccctttccattcccctgtgtgtggctaaaatggaattaaagaaaaggaaggaggagagtgctgaatatagagtacctggaaaattgactcaaggaaaacatgcccacagtgggaaaatggtctcacgcagtaatacaatctagaaggaaatacccatggcaaccatctcagaccccttgcttccaattcctcacttgctggtcagctcttgtactgacttatgtttctcatagcaagtcacttccaggcctcaggctccagctattaaaaaggggatgggtgtaaggcactggactggacatctaaggactgtttaaagacaatatggaagaacaattctcatatgagcagttatagttttcctgctgagatttcctagcaaggaataattgcttagtagttagaactagcagtagcagtttcagtttcaacaccagaggaaa

SEQ ID NO: 190921 - DNA, 260 bp, Homo sapiens
agatgtgactttgctcctccttcgcttccaccatgattatgaggcctccccagccatgtggaactgtgagtcaattaaaaaacctctttcctttataaattacccactcttgggtatgttattagcagtgtgagaacagaccaatacaaatatgaagtatgaagttacataatttactacttcataatgtagacattattatctactactgaggacctagagctatatgatactgatgacatttttgtcaattacaatgt

SEQ ID NO: 190922 - DNA, 386 bp, Homo sapiens
tgaaaacagggctcccatacaaggagagaggacccaaacagggttgcccacacctggctcgaatgcctggggtttatagcctgatcattgtccctccctctgtgctctcaggcaatatatgatttgactatttctttacctcctgcttttagcccaatttgtattttagtgagccctctttactacctgattggccgggtgtgagctgagttacaagccctgtgtttaaaggtaggtgcggtcaccttccccagctaggcttaggaattcttagtcggcctaggaaatccatctagttctgtctctcacttcctttgattttgaagtaaacaatctcttaactttgggatagcctgagacaccacctctgacttctaaatgactca

SEQ ID NO: 190923 - DNA, 524 bp, Homo sapiens
cagtagaggagtttgtgtcaggcttggaaccatctttggaatactactttcaatcactgctgtaggttttattttctctatggaattctggttcctttgaggcccctgggacaagcagatggagagctttgctgtggcccagagctcccagctgatggctgggcaagcttcagaccctgccactcaacctcctgaaaaggtgggatgggggcaatggattctgggatgcggctgcaaacactcagagccaccaagggaattggaggaggttgtggtgtggtcagaatgcaggaagctcttagcagtcaccttccgattggggttgattgggttaaggccttctgggatggtgtaaaacagttctgaactcaaaggactgctgatggaaggatgatgaatcgaaagaaatacaataaacagattccttgtcatgttgttggccttgtagcaaacatgttttctccttgggattacgtgaacatttgcttttctttgatttctggttgttattttcagtatttctt

SEQ ID NO: 190924 - DNA, 173 bp, Homo sapiens
tgctttctgtagttccagaagtaaatatctaaactaaggtctacatcagcttgaggggaatacaacaagtttctgaaattatatgcagaaatgtggccatatgtgtttccccttcccagaacaaattatatagctttctatcagattctaaaaatgttaagcagaataaggat

SEQ ID NO: 190925 - DNA, 419 bp, Homo sapiens
tctaagcaaaacacaaaacaaagacactataaaggggagatcgatatttttaagtacataaaattaaaattttttgcaaagcctagagactgtattacacaaagtacaaaaaatagggtggaaatagttatagtacgtatgacaaaagattagtattctcaatgtataaataattcttataaatcaaaagacaaccccagagaaaaacagatgaagaaatgaatatacactttctctactattctttccttccctttccctcctcctttaattttttgagacagggtctcactctgttgcccaggatgatctcgaactcctgagctcaagtgatctgcccacccctggcttcccaaagtgctgggattactctttggccgggcatgagccacctgcctggcaccccccccccccaattt

SEQ ID NO: 190926 - DNA, 439 bp, Homo sapiens
  misc_feature (22)..(22): n is a, c, g, or t
gactccagagtatcctcacctnctaccccacggggggatatttcagcatgttcctatgcaaaaagtgaagtgtcggtgtcgagggacacactaaagataaaggaagaatgggagtggggctgggttgggggtaattgatagatggaggcccctgaaggggtgaggaagaatgagctctagagcacagatagaaggactgacttccaatggacacccttcttctgtattaggagaaatcaagagggaaagataaaatggcttatagaggggatgagggggaaggaagctgaagcagatattgacagatggcccctttttgctctgggaggccagaggtcaggcactggctgagagcagaaggggatggatgaggtctaggcctgagagagcggcaagcactgaaagcagtggctgcaaggggtggaagagaggggaccaa

SEQ ID NO: 190927 - DNA, 480 bp, Homo sapiens
cagtgctggttgtgtcagacttccttagatgggaaagcccctgaggccagtctccttgtctgtcttcattgctctgtaggttacctagaacagtgcctattcagattactggttattcctgaaggttctttaaggcaaatactctaggcccagaccaagaactggagggcctagactgaggttttagcctggataggatctggccttattgatgagtgcatcccatcagattcaccagagatgctcctctcactcacccaacctgggcaggtgggccccatcttttaagagaacatctccggacaatgctgctcacactttgcctcccttttgctcttcttatctcccttctgagaagccatagtctgggaggcaggacacgggagtcctagtctatggctgccagttgtatgaccttggggaagtaatttcagctctctgggactcggtttcatcatattaaaatgcaagggttctacg

SEQ ID NO: 190928 - DNA, 165 bp, Homo sapiens
gttacaaatacagggttcatcgataaggggcttatgtccaaatgcaatgtctccccaggcccaagtccaacgcaaaccagccaaaagattccctggcttcctattctcctttctacgctctgtttctggtttcctctccaccttcaggtttcatgtcgttttgta

SEQ ID NO: 190929 - DNA, 129 bp, Homo sapiens
ttcattagttaagacttttgcctcaaggaaaaccagttaccaaagagttacttgtgcctcaaggggtataaatactacagctgtttgtgtaactgtcacattcattttttctatcaactgtctaaaata

SEQ ID NO: 190930 - DNA, 166 bp, Homo sapiens
gcacattaaaaaactaataaataaataaagtggataagcagtgttgttgcccccatgtactttctgcatctgagaagtacttatgactaaaagcttttagatattaatcgatgcttttaaatgaatttgcattttactgatcacaactacatgcacatacatctgt

SEQ ID NO: 190931 - DNA, 265 bp, Homo sapiens
tcacagctgagtttccttgacatgaagtctggtgagtgtggaatgaactagggaactgggagcctaaatgcaattctaagaaataaaaattacttctaagatacagtgaatggtttttaaagtacccaatgtaacatttgtttagttatattaacattgatctctgccagaaattagaaagtttaatgtttctagggccgggtgtggtggctcatgcctataatcccagcactatggggggccaaggtgggaggatcgcttgagc

SEQ ID NO: 190932 - DNA, 703 bp, Homo sapiens
ggtttctcttgccctgcagacgtcatccgtggcgagtgcccttgaacactgtgtggcctcttcccgcactcagccctagctctgcacctgggtggttcctacctgtcattctcttcactgtagtttgatgtctgtattaatctaattatcatattttaaaatgtaattatcatataattataaataaaattcaatattacatttctgcagcctttgatacttggaaaacagagtccttgctactaaagaatttattaaatattaaataatttattgaatgcatcctaaattatgcttgagcacaattcatatataaccaaatacaaactgtaagtcaggcaattttgtaattatactaattatccacagtgatttaggataagtgcagtgtagatcattgttagctgtgtgtgcaacctcactgtatgatctcataattgcattgaggcacttaacaaaacaccagtgtctagaaatgttcacgtaaagggctagcttgtatgttgttttcgaatgtgtggtaggaatttacctcttttaggaatgagtttgaggaatgtcctgtgagcacagcccaggctcactctctgccctctcacagcaggcctgggctccagctgcactgctgcctccccctgccacctctgtgccagcacgggaactcttcctcccttctgccccgtccggccctggtcctgtgtga

SEQ ID NO: 190933 - DNA, 253 bp, Homo sapiens
cagggaagatgtcatgtctgtaatgatgtcttaggaagcacatccatgaaatgagccctttactccgttgtcacttggaaactcaggccagttgtccttcaggctggcaccagaccagctcagtattatagtttagagaccttgaagtcatttgctgtgtgctattggagctcaaggtcatgttgaatacttaacgcgatgaacagccgtataccaccaccaaacggccggtctgtgcagtccaaaacaaaac

SEQ ID NO: 190934 - DNA, 498 bp, Homo sapiens
tgccacccctgagcttgcaggaaggcttcttaaataaatgcaatgtgtgaactgaagggacacgtggattagttcaatcaggcataagcaaaacacaaatacctgccgcctctcgtctggtgtatggaggccgagtctgagcccagggtctttaggggagtcctgggtgcccacctttgagactgagggtgttctgagcctttggcatttccccaaggggccttggtctgggaccaggatggacctcccactgcagtgactagcagacaccccattaggcttgggtgatgaccccaaggggcaatcgtgcgaaatcaggtgtcaggaagggctccagcttgggcgtggtgagagaaggagcagtggctcccagcacatgctgccaggctcctcccatcagggtggatggaattcgccaagggagcccatctttacagcaccccccaggctggcactggggcaccatgcctgccggggtcctctagagtacctcagcac

SEQ ID NO: 190935 - DNA, 626 bp, Homo sapiens
aacttgctttcacttcacactgcgggatcaccctgaattctttcttgcacaagatccaagaaccctctcttggggtctggattgggacccctttcctgtaactatcatgccactgcactccagcctgggcaacagagcaaggccctgtctcaaaacaaaaaaaagtaatatgacttaatacattcattttggagggtaagtctctcaaaataggcctttcactgggggaaaatggtaaaaatactccctggtaattcaagaattgcagactcctgagatgctgctcatatcagctgaacacttaccaatacttcactttcttccatatatactcaaggaacaagtgctatttaaagtgtttcactctgctgtgctaggtgcaagactataaagaggtgtgaggatcaacacttttatgaaaaccaatgtcattctgaatatagtttcagatgctagtgcaaaggaagttcttggtatatggaagaagtattcaacaataaattaggcatggttgcttccattttctgcctcacatacttttttttcgtggttaaagtgatacaatgtctatgatattttagattggcagttgcaaactagtggtcctcagcgtgctttttatgaca

SEQ ID NO: 190936 - DNA, 158 bp, Homo sapiens
gcaaaaacctcaagtcagcagtcattattattggaagtgtcttatgcacagtaggttcttgataaatattaacttatatcatccctcatttgtgtagaggatcctgaagcactcgtgcttcctgatttcagtccatgaatcgtggactgaaatccatg

SEQ ID NO: 190937 - DNA, 472 bp, Homo sapiens
aatgattgtgaaacttacagcacacgttgctgactagtgaactgagtaaccgccattgattgtgaggcagtgacttctatgtcctcttccccatctcattacttacaagtcatgtataagagtctcctttgttctataatttctctgacagttgtgattgaaattttcaatttttgtcaagctggctaatgtaaaacatcatcctgttctatgtttaatagcatttccctgattactaatatgaagcattatatattgtctattcatgtttcatattttgtataatgtctatatcctttgttcattatttaattgtgttatttgtattctttatgtattattctttaacacattgctgtttatatgttggttatattttacgttttcttctagtttatgggaagtctttttcttttcctaaggcaatctgttgataaatataacctgtgaatattaaagttattaaagttat

SEQ ID NO: 190938 - DNA, 530 bp, Homo sapiens
ctcgaattcgacggtttctcaaaaaaacaaaaacagatctgccatatatccagcaatctcactgctggatatatttccaaaataaaggaattcagtacatcttggccgtgcacagtaaaaaatttttatgaacttggatttggttccttaattataacaaaagtactgtataggcaacaaaagaaaaaatacactgggcttcattaaagtgaaaacttttgtgcatcaaaggctacttactatcaagaatgtaaatcatatacctgataagagataaatacccaaatatataaagaactcttacaactcaataacaaaaagacaacccaattaataaaagggcaaagtcactggacatttctccacttaaatgtatgattaaaagtggtaaaaaactgcaaattttgctatatatatttaccacaattaacaaaaaaattgtttctgacacaataacttactaatttccataaagttatgtaactacattttgaaaaacttaaaaaaacaaacaaacaaaaaaaaccaga

SEQ ID NO: 190939 - DNA, 1000 bp, Homo sapiens
cgggcgacttgagatccgcgggtctccctgctccttttccgtctgcgtcgggagctcccgggcacgtgaggccgtgccgcgtttactggcgggcgggacggcctagccgggcggcgcctcggaggaagccgcggaccccttaggtgctgggcccttggaaatcggcgcgtggggggcggtgctcgagctgagcgcgagagggcgggagagctcgtggggtgcgaggggagcaggacgcccggccgggcagcatgagtcagcagcggccggcgaggaagttacccagtctcctcctggacccgacggaggagacggttcgccgtcggtgccgagaccccatcaacgtggagggcctgctgcccctcaaacaatacaggacttaacttctacgaacgagtacactgtaccaactactgtgctccactgagaacaagctctagccacgtgacagagacctcgcttctcgactgctactcggcatgcgtttactcttaactcggaaacatttactggactcttggtcagatctgctcccgggggtattcttgacttaaacaaggttgcaacgaaactgggagtccgaaagcggagagtgtatgacatcaccaatgtcttagatggaatcgacctcgttgaaaagaaatccaagaaccatattagatggataggatctgatcttagcaattttggagcagttccccaacaaaagaagctacaggaggaacttgctgacttaccagcaatggaagatgctttggatgagttaattaaggattgtgctcagcagctgtttgagttaacagatgacaaagaaaatgaaagactagcatatgtgacctatcaagacattcatagcattcaggccttccatgaacagatcgtcattgcagttaaagctccagcagaaaccagattggatgttccagctcccagagaagactctatcacagtgcacataaggagcaccaacggacctatcgatgtctatttgtgagaagtg

SEQ ID NO: 190940 - DNA, 910 bp, Homo sapiens
cgggcgacttgagatccgcgggtctccctgctccttttccgtctgcgtcgggagctcccgggcacgtgaggccgtgccgcgtttactggcgggcgggacggcctagccgggcggcgcctcggaggaagccgcggaccccttaggtgctgggcccttggaaatcggcgcgtggggggcggtgctcgagctgagcgcgagagggcgggagagctcgtggggtgcgaggggagcaggacgcccggccgggcagcatgagtcagcagcggccggcgaggaagttacccagtctcctcctggacccgacggaggagacggttcgccgtcggtgccgagaccccatcaacgtggagggcctgctgaagctctaaaagtgaagagacctcgttttgatgtatcgctggtttatttaactcgaaaatttatggatcttgtcagatctgctcccgggggtattcttgacttaaacaaggttgcaacgaaactgggagtccgaaagcggagagtgtatgacatcaccaatgtcttagatggaatcgacctcgttgaaaagaaatccaagaaccatattagatggataggatctgatcttagcaattttggagcagttccccaacaaaagaagctacaggaggaacttgctgacttaccagcaatggaagatgctttggatgagttaattaaggattgtgctcagcagctgtttgagttaacagatgacaaagaaaatgaaagactagcatatgtgacctatcaagacattcatagcattcaggccttccatgaacagatcgtcattgcagttaaagctccagcagaaaccagattggatgttccagctcccagagaagactctatcacagtgcacataaggagcaccaacggacctatcgatgtctatttgtgagaagtg

SEQ ID NO: 190941 - DNA, 738 bp, Homo sapiens
tgcgaggggagcaggacgcccggccgggcagcatgagtcagcagcggccggcgaggaagttacccagtctcctcctggacccgacggaggagaccccatcaacgtggagggcctgctgccatcaaaaataaggattaatttagaagataatgtacaatatgtgtccatgagagatctgctcccgggggtattcttgacttaaacaaggttgcaacgaaactgggagtccgaaagcggagagtgtatgacatcaccaatgtcttagatggaatcgacctcgttgaaaagaaatccaagaaccatattagatggataggatctgatcttagcaattttggagcagttccccaacaaaagaagctacaggaggaacttgctgacttaccagcaatggaagatgctttggatgagttaattaaggattgtgctcagcagctgtttgagttaacagatgacaaagaaaatgaaagactagcatatgtgacctatcaagacattcatagcattcaggccttccatgaacagatcgtcattgcagttaaagctccagcagaaaccagattggatgttccagctcccagagaagactctatcacagtgcacataaggagcaccaacggacctatcgatgtctatttgtgagaagtggagcagggtcagaccagtaacaaaaggtctgaaggtgtcaggacctcttcatctgagagcactcatccagaaggccctgaggaagaagaa

SEQ ID NO: 190942 - DNA, 241 bp, Homo sapiens
gccatattggatagctcagcagcaggccctgcagtcatcctgtgtgagtcccagtaattttcactcagtaggtttttcacttgggtcagttaaactgaccatctatttttcattgtcatcagtaacactggatagcagtctcttctttgcggagtaatctaagactaaataatttaatatctaggaagcatggactcagtggctggaatttagtgtatttatgcatccaataatgttgact

SEQ ID NO: 190943 - DNA, 229 bp, Homo sapiens
tccctctgtagcaacctcagggtgttatggtgaggaataaggatagcactattcctaaaatgccaagctcggctattccccttctaggtgaataccccaaagaactgaaaacatggactcaaacaaatacagccaagcactgcataacaacgttctggtcacgatggaccacatttatgactgcggttccataagattatgattccatatttttactgtgccttttcta

SEQ ID NO: 190944 - DNA, 378 bp, Homo sapiens
tgatcaccctgacataacactcatcattactgtggtccatggaccaagatgcaggatgtggccctgagaaaggcccttgtcatgatgatgctctgtgtttgagaaacagaactttaaaagttaaaattggctgggggtggtagctcatgcctgtaatcgcagcactttgggaggacgaggcaggcaagaaccaccatgtccagtcctgtgctgtcttttaccttcattctcttgaatcatcacacatggacccaagatgagccctgttttacagatgtagaaaattgaggcactgagatgcctttggtccacagccccgtagttagtaagggcagcagtcaagaccggacatggtggttcttgcctgtaatcccaaca

SEQ ID NO: 190945 - DNA, 308 bp, Homo sapiens
attccatcccagcccttgtgcttagcaagggatttcaagatgaatgaggcagctctcagagttctccctctatggggagaggcaggcctggagacagataatgaggacactgtgggataaaggctgcaacagcaagaagagagagtgacgagcagatccacatggctcaggctgacccaggtctgaatcttgaagctgccaccttgtagctgggtgaggatggacagaggccttacctctcaagcagataagccacctccctaagatgatgatgtgaggagagaagtgagacactgtggataaaaaac

SEQ ID NO: 190946 - DNA, 376 bp, Homo sapiens
atgtatgtgatgctgaatttacttatctcagtaggcagcacagcctcaccaagagtggttatgttttaggctttgtaagaacaagatgtcaggggttttgctgttgcatcattctgcaacaccttatttcaactctgtgctgagctggcaaaagctctaaatcaacccagctctgcaacccagctcgcttagcttacccttcagatgttccagtagtaggacgactttgcaatattcactggcaacgtgacacactagtaacagtttgtctagtcatcacacgctttgaatgtctccctggtatttctctgtccttgtccctctgtgctgcattttccttactaaatatttctgataatattttcaaccaaaggac

SEQ ID NO: 190947 - DNA, 359 bp, Homo sapiens
aactaaaattatcttgaacctgatgaatatttttaacagattgacacagaataatgtgtaatatctttgtgaaataacttatattccactttcctcttcaatgtgtcattatttggttctactttataatagtatacttccctttaaccttcattttttttttcacgtattataacaaaatgtaaaacagctgggaggcatgctgtaatatctttgcgttttcagtgaaagagaaattcaggaaaatagctttgtacaggatactctgagaccagagaagagagcaacatctgacatgttagagtgtggtggggaccaagtaaagtttacttgggagttgatgcttaagatgtttaaga

SEQ ID NO: 190948 - DNA, 360 bp, Homo sapiens
catgtgccccataaatatgtacatctactatgtacccacaaaaattataaattaaaaagtttttaaagataaatatcactttacacctacccagaataataaaacttagaaaaactataaagtaagataataccaagtattgataaggacataggaagacaagaacccttatgtactacttgtgtgagtgtacactgaagcaactattttgaagaacaatcaggtggcaatttttaaaactacatatacatatactctgtcatccatcaatcccacttctgggtaaatacttcacaggatgctgttaaaaattagccaggtgtgggccaggcgaggtggctcacgcctgtaatcccagca

SEQ ID NO: 190949 - DNA, 257 bp, Homo sapiens
agtagctgggactacaggcatccaccaccacgcctggcttattttttgtatttttagtagagacgggatttcaccatgttagccaggatggtctcgatctcctgacctcgtgatccacccgcctcggcctcccaaagtgctgagattacaggtgtgagccaccgcacccggccaaaaacattaattttttaaaatggcagagccataagcatttttaatagctgatgggaaggatctagttgagggagacattgaat

SEQ ID NO: 190950 - DNA, 168 bp, Homo sapiens
ctccccataccactgacccttctccctctatgccagtatcactgcccaacacatgcacacacatgcacacacctgcacatgtgcacacacacacacacatatgcgtacacacacccccatgcctgctgttagatggaaattccctctgactcctcatcctttccctgg

SEQ ID NO: 190951 - DNA, 289 bp, Homo sapiens
tgccatgttggccaggctggtctcaaactcctgacctcaggtgatccacccacctcggcctcccaaagtgctgggattacaggcatgagccattgcgcccagcctcatacacttatttattaattctataaatcttcttaatttggcgaagtctaagaccacgtaagagactgagcttgtatgatgtttctgatttctacacttacaagacataaatgaaatttgtagatttagaatgacatattgggaagtgccttgtttggaatcacaggaactgccacacacaggc

SEQ ID NO: 190952 - DNA, 177 bp, Homo sapiens
actttgagggatcagcagctctgactcctgtttcccaggctcatgcaggtcggatttggaagttctactttacaactacgatttaggcctctgtggaattagatttctttactgcattatgggtagctgttagtcattttaagtggaattgcttcagttaaagaaggtgttataatg

SEQ ID NO: 190953 - DNA, 264 bp, Homo sapiens
cattgttttctaggcattttattgggagagaagttagtatgatataatgtctttggctgatattaactcttctaagatgcattgtttctgagaacaccattgtctgatttcattcagggaaatttcacacaagccagtagagtcaatacttttttcaagacctgttaattgatatatataaaaacttgccattgtttacatgcccatttcagatcctttatgtgacctaagctagaaatgcattttaacagcatttgtttttcc

SEQ ID NO: 190954 - DNA, 341 bp, Homo sapiens
ctgctgttcaccgcggcaacctcacacccagggaagtgccaggcatgtggcgatcactgactaaatacatgctgaataatgacactgctcatgctaaaaggggacaagacaggatggaggctcccagggaaatgtggagctcaaagaaaccttccatcaacatttgatccaaattcttaattccaaacagcaaaataaaagtttataccagcgattccaatctcaggactcctccacgggggtcctcagtctatttttcgaagggtcaagaagtctaccagaaatttcaccttcctttccaataagaccacggttgtcacctaaaatatcaagcttctttg

SEQ ID NO: 190955 - DNA, 208 bp, Homo sapiens
attgcccatcaggcactcaagccaaacacctgggaagtcatacttttcactagttcccaactcttctttcctcaacatctattctttctggtcatttctcattttcattgccaccactggactccagatgctcttcacctagctggcagcaatggcttagtttcctacatttgctctcaaccctctctaatcaagccaattaaaagga

SEQ ID NO: 190956 - DNA, 365 bp, Homo sapiens
gaaaaggtttctcgctctcaagaaagtctattcctctgggttatctgaatgttagaaaaatgatgatgcacaagttgagtccttaacttgtgtgatgtgggaagattttttagtacgtaacctttgtcctttggtctgggaagcagtcactctataaggaacaggcatagaagattcttgatatcctgaccctggattccttcataataaacattactgagaaaatcgtaaatatatgcatgctccactgtgtttcacagcattccaggtgggtgaagggaaagattttgttttgcaaagggctacactgtcaccaaagcaatatttaatatttacacaactccaaaccccaaggtattttataa

SEQ ID NO: 190957 - DNA, 293 bp, Homo sapiens
ttagggactggggtgttccaagccatacccctctggtgacccccacccattccccctgccttgtcttaaatatccttctgttttgcttaaggttacctgtcattggatttcaggcccatcataaatctaggatgacatcatctcgagatcttcacttgattgcatctgcaaaagacccttttttcaaataaggaaatattcatagcttctagatgaacatatcttttgggagctaccattcaacccactgcaagtaacgatgtctcttacacttttctaactagttgttcaat

SEQ ID NO: 190958 - DNA, 455 bp, Homo sapiens
ggatggttcgttatggattcaaaaggttttaatgggagggccttggaacctgatcttgattaatggggaaatgtgtctgagttctaaacaaatgtttattcgcttgagggaaagaacccatctgtttgtctttgactccttgagagtactgtacatgcctcgaatcaaatgcagtgctggacagaagtctgatatgcggtggatgctcaaaggaacattaagtgagtctggcaatgactgttcagaactcgttttgttatttggaggcagtctgaagtattcttttaagcatgaaatgccataaaggagagtgatcattgtcatcattaataactgcccaagccaaatctctaatgaatatggacaaatcaacacagattatagaatctaaatcatttctggaggggaaaatggagagattaatgggtgaaaggcccaccttgatgccttccatc

SEQ ID NO: 190959 - DNA, 382 bp, Homo sapiens
cctgacagccattgtagtaggtaacaatattgtactatcttggagacttggggaagccttttttccccttttctaatatctgaaattaatctgtattataactatgcatcttctgagcccttgcctcttgtatacctgctaattacattaatatttgagccagcatgagaatcagacagaaaacaggtatctcctatccacacttttgtgagaaatcaggcgcagaaaatcaggggccctctcataggcacctcaaacccagcatatctcaaattgaacatgtttccaacttctagctagttatccctctttttatgaccttcctaactaaagacactcatccatctagtcacccaagccagaaacctggatgtcagccatg

SEQ ID NO: 190960 - DNA, 525 bp, Homo sapiens
cttcatagtagtctctactatgtggagaatcttagaaatgttagcagtcatcattgaagtatagcttaagactgtgtttggttaattgaattttctggttatctgagtttgttttacatggattatcattatcgtttttcaaaatataagagaatatgattcagaccattagaagattatgaagataataattattaacatgtaataattattataatttatcatgtgcaggcattgttgctcactttacaggcaatctcatgtacatacaactttatgacatagttactgttattatccccaattatagatgaagaaactaggttttaaataggttacatgacttgaccaatgtcacataacttgtacaggtgatatctgaaccaaagagtctgaggccagaacctgcacttctaaccaccttactatatagcctcaaaaattcagacatcatctgatcagcatcatcagttaattagtatatgcaatgttagccttaaaataaaaatgatgatttaagattca

SEQ ID NO: 190961 - DNA, 688 bp, Homo sapiens
ccatagaactaacgggcatggctagcattttatttacaaaaatagcagcagccgtggtttgctttagaagttagagttggtgagtggtcagtgtagtctgactcaagaaatctgaactggtcttaaatgggatgtggactcttggctttgttcttttcttataacaaaagtaacaccattatttttacagtacagatgtgaatatcagtaagtccaacatcatcctcagcttcttccctgggtaacccccgttaagtgtgtaaatgctttttaaaaggtaatatgtggcatatccataaaggtccggcagtgtcttataaaggtaaatatatacccacccctgagccagcagttctactcttaggtgtgtttatccaagagaaatgaaaacatacgttcacaaaatgctcttgtacaaaaatattcatagtagccctattcataatagttccaaactgggaacagttcaggtttttatcagctaggcgatagataaacttgcatgtctacacaatggaatactactcaatggtaaaaaggaatgaactacagatgtacaaaatgtgatgaatctcacaggttgactgcgaacgaaagccttaccaaagagagtacatactatatggttttatttatgtgaaattctaaaataagcaattcttacctatgctggaaaaaaaaacccaga

SEQ ID NO: 190962 - DNA, 378 bp, Homo sapiens
ggtgactcctagaggatcccactcgatcccctgagccagcagttctactcttaggtgtgtttatccaagagaaatgaaaacatacgttcacaaaatgctcttgtacaaaaatattcatagtagccctattcataatagttccaaactgggaacagttcaggtttttatcagctaggcgatagataaacttgcatgtctacacaatggaatactactcaatggtaaaaaggaatgaactacagatgtacaaaatgtgatgaatctcacaggttgactgcgaacgaaagccttaccaaagagagtacatactatatggttttatttatgtgaaattctaaaataagcaattcttacctatgctggaaaaaaaaacccaga

SEQ ID NO: 190963 - DNA, 530 bp, Homo sapiens
agcataaaactaatgctctgacccacctgcccatgtgcatgctgccaccacaggtgaaaatgctgctgctgaaaccccaactaaggttgaagccaaggaagaggggggggagacgcacgaggatatggcatttggtctcctggaaaagcattagcaaagggcagaccatatgcaactgcaacgttatatcccgggctcctgtggagtgagactatgatactaggacaatccagggtttcaatcctttccgtggcttcggaatgccctgcacttccagctatgaacacaaaacctctccaggcccactcgctgcttttctgaaacatctcaacaatgatttcctcaaaaggaaataatgaaataaagttctggcatacgttaatcttccgcgtcaagttcacagtgttaaacacactgaagccagccacacaaacaaaaccaaactccacaagattaggttgggctgaagttacataagacagactaaactgcggcttttctcctgtcattcctcccgccttcctgtgaac

SEQ ID NO: 190964 - DNA, 548 bp, Homo sapiens
accatctcttttcagtttccttctttctctttctcaccttcttgatgtgaataattctcttaacagaatagttcattagtagtccaggaatgtcaaatatgtagcaacctaccaatacatggttgtgtaaatcagatgattctgagaaaactcacgtgggcctgggagatagggaactgagtgagtagtcttgctaccctctcagattacaaaaaccttgtcctgtaatgttagattataaaataatctattgaaaataagtttttatttatttatttatttatttatttatttatttatttatttatttttgagacagagccttgctctgtcgcccaggctggagtgcagtggcgcaatctctgctcactgcaacctttgcctccagggttcaagcgattctcctgcctcagccttttgagtagctgggattacagatgcgcgccaccactcccagctaatttttgtatttttagtagagatggggtttcaccatgttggccaggctggtcttgaaccctgacctcgtgatccacctgcctcggcct

SEQ ID NO: 190965 - DNA, 773 bp, Homo sapiens
ccccagagcctttgagcccacattcatcggtgtacagcagcagtgggacaggcctcagtcgaccctccagcaccagccacgcctctgccacacctatgccctcaaggaggcatctggcagcctgggcctagctctgcaggtggttagaagagccctagctctaccacttacttacctttgaaaccttgggcaggacactaactggaggttcagtttgctttcagtaatagggggcccgtaagcaggtcctgttgaccttcttactggaggaggagagggagggggtctgaaaaggcgcagagcaaattccagatcctgtcctggatggctgatccctcaccccagcccagaacctgaagtggatgctgccgggatggatgaatgagcattattatggaaaatacttaatccaagcttactgtctagtatcaaaaagttaacctacttgggaagctgaggcaggagaatcacttgaacctgggagacagaggttgcagtgagctgagatcacaccactgtactctagactggtcgacagagtgagaccctgtcttaaaaaaaaaaaattccttgccttcttccaaaaatgattttagtcaggttagagacacccagaaagagctgggagacagctgctacaacacagacaagagtccctcttgccacagatttgtctcagcttcctggcagccaatgcaaaggattctccgagagaggacagtcatttgtggaaagagaatgctgctgcttagctccattaaagactctgagaa

SEQ ID NO: 190966 - DNA, 391 bp, Homo sapiens
ttgcaacagtcaaacacatcaagaccatttttcagatccaggtttttttcctgaagacatcctgtccagagcctgctctaagatgtgcctgttgctctctggactgctgcagggttcttctccggtgactttcctttgcctatcttttgtggtgaatcccgtttcccagacttaatttctttcttagtgcaagtccttcatcttgctagagttcctccttcagtcacttcctgaaaaaaaggtgcatcgaaggtaaatttttgagatagtttatgtctgaaaatgcccctattctaccctcccacttgattgatagcttgattgggactggaattctaggttggaaataattttgtctcacttttggaagcatgacttcattgtcttgtag

SEQ ID NO: 190967 - DNA, 968 bp, Homo sapiens
ctgaattattttctgaaataggttgtatgtagataaatacaaaatagaataaatgctaccatttaggaaaattttaaaacacatgaacctatatattattttgtctttatcctgtgttatgttttcctgaaagatataaacacatttaatatttttgtgtgtttcacttgcttgctttttcattgttctgtaactttttcttcttttttgaaaaacattattgttttccgtaagatctttctcttactgattcttgtattttgatgtttgtttactagaccacagcagtttacgtttcaagattcaaataattctgttgattcatcagcttctgatagtgaccctatgagacagagattttctataaaagcacactcacggttaccctacctcgttatatctgatggatatatggtcacaacccttcgatttcttgatagcctatctccatcagtacacatgagatcacttctacttgattcaacccagaggcttgagaaaatatatcaaagtgtgatattgtctaagccaaaaggcaaaggactgaacttgcgatcactgaattccctaaggtctagcctgttagaacaccaaggaaatgaaagttcagccgatttcactgtccccaaattcttgcaggcagaagaaacaataaatgaaaatgcagcagattttcaggattttgaagcagaagaaactaacgaaggcagacactttccagacaacttatgtcctttttggaacaaaagagatgatgtgctgtgtagtagtatgaaggaaggaagattggaatttgcatctatgtttgatacgatacatgcaaaggatgatagtgaggagacagatagaaccattacagaactgcattctatccagaaaagtctacttgcagcgtggactataggaatttcaaaaactgtgacagaaaaaaatttaatgttaaattacatagtagtttgtatcactca

SEQ ID NO: 190968 - DNA, 413 bp, Homo sapiens
atgagaatcgcttgaacccgggaggttgaggttccagtgagccaagatccaccactgcattcctgcctgggtgatggagtgagactgtctcgaaaaaaaataaaaagaaaataaatcaagtgatggactttaggcctcacagctggcagagctatcatttaacaccaggtctgtgacatatttcaatgtctgctctgacgctcatgatgctagagtgtgcatgcgtgaatatgtgtgtttgaggtaaaattcacataaaatattaaccgtctaaaagtgaacaattcagtggtatttagtacattcagtgtgtgcaaccaccactttgatctacttccagaatgttttcatcatgccacaaacaaaccccacatctattaaacagctactcctcatttccttctcccctccag

SEQ ID NO: 190969 - DNA, 519 bp, Homo sapiens
tctgcttcaacctcctaagtagctgggattacggatatgcaccactgcacctggctttcactgatgcctttaatatttctttacttctatttttttctgtgttccattttggatattttccattgctatgtcttcatgttcactaacctttctctttttttgtattaagcaatgtgctgttaattccattgagttactttttcatctcagatgtagtcttcatctctggaagttcagctcaagctttaaaaagtatgttccatatctttacttaaacatctgaacagcatctcaatatgtaccttattctattctatagagtacagttattaataacttttagtgcccttgtctgataattttaacatctctagcagttctggtttgactttgattgaacagtttctcctcattatgggtcctatgttcctgctactttgcattcctgataacttctgattgggtgccagacagcaagacttttacattatttggtgctggacaagtttatatttctat

SEQ ID NO: 190970 - DNA, 602 bp, Homo sapiens
  misc_feature (446)..(446): n is a, c, g, or t
  misc_feature (561)..(561): n is a, c, g, or t
  misc_feature (563)..(563): n is a, c, g, or t
  misc_feature (586)..(586): n is a, c, g, or t
  misc_feature (588)..(588): n is a, c, g, or t
taaaattctagtaaatgcaaaataatctatgataagaaaacagatcagtagttgcctaaaggggaagaggaaggctaggaagtggccgaaagagccagcgaaggagcaccaggaagtctttggagttgaaggatacattctttattctgattgtgattatgatttcataagtgtacacatataagtgtacaattaatttcttatatatgtgcactttattgaatagcaattatatttcaataaggctttcttggaaaagctgtaaatgaataatgaactctggtttatttttttattgtacttatttacttatttatttttttgagacagggtcttgctctgtcacccaggctggattcatagctcgctacaccctcaaacttctggcctcaagtgatcctcctatctcggcctcccaaagtgatgggattataggcgcccaccancacaactggctagataatgaactcttaaaaatactttgtccacaccccctttcatttactcccatgtattactaatcctgctgaggccgtcttggtgtgacctccttcctcacantnacccctcttttctctctcagaantncttactttacaatc

SEQ ID NO: 190971 - DNA, 461 bp, Homo sapiens
atttggaactgagaaacctagattccaaaacttaaggaactggaggggaaggatcaaatagaaggtggcatttgaatactcgctatgtgttagacactttcaggcttccttacatgtattcaagtttaatcctgaccacaccacggtcttgtaaatcaggaaggaaacttggaggaggaagctgcccacagtcagtaagtttctaagtggtggggagagtgctttgaccacaaatttcctcctcttttcactttaggatgctacctacatgtcgaaattgtgaattcattctcactcgtacacttcatttccttagaaagctaagtttaggaaaggtgcatagaatcactaagccaaggaaattggcttctagaatcactctaaaccaaagctagaagggctcacattcttctaaaaagaaacttagctgtagatgtaacataacatactgtatacacaaa

SEQ ID NO: 190972 - DNA, 441 bp, Homo sapiens
agccagtgtttcagtgtttcctgccaggaacctcaattttctaagccaaaatatgtttgacattaacccaggttgctattaccattagacgtcagtctgagcagtagtccttacttgtctgtgaagtctacaagtatggaaatctcttgtttagcctgtatcttcatctactatgttcacttaaagtttccacgaattgtttatttcattaactgaatatagaaatacccccagacaattttgtgtgtctgtatgacctcacacaaatgcattattttgttggttcacatgtttttcttgagtagaagcttccttgtttagtactttttatccataggcacagatgacttcagtgtgtgctgaactgggaatcagaagaaagttatagccttgactctgttacttggaaccactctctttgccctgaggcaaaaaaaaaaa

SEQ ID NO: 190973 - DNA, 515 bp, Homo sapiens
tcaagtcccgagcttgctttattacatcatgctacagtcttaggaagatacaaaaatcaacaattccataagacgttttattcaccaactcttacaatcagttcagtctccttgaacagggaggaaactaaacagaaggccagtgtgctttatttcttgcttgacgtggcagtgactcacccacttctttgtgagactacctatgttgtcacaagaatggccacccccagggctctgactcaggggaagaggaagagctatgatgagtgggttctaggatcccgcagagctccaaacctctgcttttgtagaaatcaatgcatccataagcattagttcgcttacaggaacagtcctggctgtgaggttatcagtaccctctttatgaacttttagcctctcagcatgaaagcttgtcacagcccccagcttgatgttagtctgttagtagtcctgttgaaagaagccactgtctcttacagcacagccccccactgctgatgtaagcaattgtg

SEQ ID NO: 190974 - DNA, 360 bp, Homo sapiens
gcatgcacatacaaatacacaggtgtgtacatggatgtgcacatctgtagacacaaatttagattacacgtttgtgcacacatgcatgtgaggcaagagaatagggtctggaggcagggaacctaaggccaattcgtgctgacttcctagaactgaatcaaaatgaaaaccccacctctccatgcctgaggaacaaaaggttcagcagctactccctttgctataccccctttccactgcatctcagatgaaaatggaaagtacctcggattggtcccctcccgcaaccaaccagactggtcatcggccaagtcttcatgtgtaactttgtaacttcccttcagcctctgattggttgcc

SEQ ID NO: 190975 - DNA, 482 bp, Homo sapiens
gaatgaactcctttgaaaacaaaggcttagagggggctaaatgtcttctatagcagagtcacacacctggaggagcagaggcaaccactatggggacccagaggctttgatcctaacctgtctcctaaatttaacacctcactaggttttacttcttcaatacaggttcatgctatgagcactttactgcatcatttattattgtctgttatataaatttcttccaaagagcgcagagctcagtgaacatcaggagaaatgctgaagatcgcagtaaagttcctttcatgggaagccttttaaattataactttagccagactgacttagataggttggatgctctgtttggagacagggacagaaatctgaaagtttatcccaaacccaggattctgtgatcatctcactgtttcccaaactttcgttttttctttcttttttttttttttttcagatggagttttgctctgtcacccagg

SEQ ID NO: 190976 - DNA, 105 bp, Homo sapiens
gaccaccaggctgaggtggtatttaacacatttctccactgtgaaattaatgtggagtacagttactccacatttgccacaggaaagttaatattcctgtttgtg

SEQ ID NO: 190977 - DNA, 298 bp, Homo sapiens
aaaaaatttgtaggaataaactaaccatatctgttaacatttacacaaaattaactctgacatctgatcagagttgataaaatgatcaactagcagaaaacatggttctgctagttgtgcagtatgtaggttaagactggaatttgaagtagaatttggaaaggacactaagcacttctttaaaaggtgtctagagtttagagctgaccaacatcacgtgccgacatttctaaaggcccttctcattactttagggctggacagtagactgcctgtgtttcacaagtacaaggaagtt

SEQ ID NO: 190978 - DNA, 463 bp, Homo sapiens
gtgacacaatcatggttcactcctgtcttgacctcctgggctcaggggatcatcctgtctcaacctcctgcgtagctgggactacaggcgcatgccaccatgctcagttaatttttaatttttttggagaggtggggtcttactgtgttgcccacgctggtctcagactcttacctcaagcagtccttctgccttggttttccaaagtgctgggattagaggcataagccagcatgcctggcctgtatatcacattttccttttttttttaaaaaaaactttaagttcaggggtacatgtgcaggtttgtttataggtaaactcgtgtcacagggtttgtttataggtaaactcgtgtttacctatgtttattagggtattctaataaacataaaaatcttaatttttatgttctcatacagattttctttaatggttcatgctttttaattttcttaaatca

SEQ ID NO: 190979 - DNA, 476 bp, Homo sapiens
caacttatcttcactcttgaacatctatttcatcacattaatctgttgttcaaaaaaatctttcatttttcttaaccaggaccttcttctctaacttggtgggtctacttacattttttcattgtactttctcattcctatgcttgcccacaataaattccacagctagaatacacatcctcctaattatcatctccaaatcctgactgttttcaatggtggttcaagtccagtgtctgcagtgaagctttctgttgtggtcttgaatttacgactttacttattcaccacctttctttgtgcacaatttccaactcctttatatattagccttctgaatatatctgtcttatcttcttggtgtggctataggaaccaaatcatacatgtctttatcacttctgaaactatcccaataactacattacattatttattatatatttttaaatgaggcatagtaggagaatattgga

SEQ ID NO: 190980 - DNA, 373 bp, Homo sapiens
gctatatagagttttaggctttccaaagcatggttactaatgcaaaattgtcattgattgattgggttgagtttaaaactggttctgatggtgacttgttaccaaaatcaaagaacaattcatttccgttcttaaaactagagtacaagaactttttcatggtaaacaacatttaagattatctattgagaactcccaagtgccagctactgttctagacagtggggattcagccataagcagaacagataaagcctccattcttgcaagttcatctgctgagttttgagatacaaaccgtaaatgctacaaaaataagaatcaaagtagttgtagtggatttcattcattcattcattcattcattcattca

SEQ ID NO: 190981 - DNA, 599 bp, Homo sapiens
aattcagttattacttttctagaatgcctcaagtcttggtgaaattataatgcttctgacttttcaagagaaagcaggttttcctctccacttagcacaacttgtcagctcttttgtttttgtgccgatacctttcttttccccgctgggtagtgttttttttcttccaatccaaatctttaaaaatatagaattgtcagtctgttccatattccagattattttttttgtttcttaatacattccgtgtgtgtgtgtgtgtgcgcgcgtgcgtatagcctttgaaaaatgacttcacctttgtctcttcatctttagggtggagggtggtggggttgatttctgcattccgttatgcagtgactactccacctttacttaaaaataatggaaatcagagtagaatgtgcttttagcctcttgggtggtgttggctggggagtcctagaaatggctataaattcatgacatgatttgcaaagaacttcccagttttgttccaagaaggtcatattctactgttttgtcattagtctgttgtgtgtcacaactgtataactctttgtatgtgtattggcgggggtgggtgtgtataccaa

SEQ ID NO: 190982 - DNA, 187 bp, Homo sapiens
gactctttgtagccataagataccaaattccaacctgactctatcaaatgacagataaagaaggaaatcaaaatatcttacccccaaatatgtttcttcaccatattttgaaactgctttttgtatctgtaaatctattaactagctctttccccttccaagtcctcccaccttgaagagagttatg

SEQ ID NO: 190983 - DNA, 421 bp, Homo sapiens
attttttctctcttactacgctgtttcaaattcttggcagattattggaaacaaggaaagtcaagaattctcccagtgactacccatagaattaaatcaacaaaaactgttgatcattgactgtgcatatggcactgtggcagcttcccagatctacaaagcaagtgagacagtatctgttgtttaagaggtcataatctctttcggattaaggtgatacaaaaataataacacagagaagctgaagcatcatggagaggcacacaaggaatgcttattgaggtctgaatttttaaaagactggacacgtctttaaaatacatttggtgttcgttaaaataatctagtgtgataacctctggaaatcacattattttaaatggagggaactagccttctttaattttttttttaaaaagca

SEQ ID NO: 190984 - DNA, 369 bp, Homo sapiens
gagatggggtttcaccatgttggacaggccgatctcgaactcctggccgcaggtgatctacccgcctcggtctcccaaagtgctggaattacagacgtgagctaccgtgcctggccttacatttatttctactttttagagacacggtctcgttctgtctcccaggctggcaagcagtggcacaatcatagctctctgcatactcaaacaccagggctcaagctattctcctgcctcagcctctcaagtagcggggactacaggcatgagtaactgtgcctagactaaaattatttctagatattaaacaatattatttgcagactgcagtgaatggtcaggaaacttcatatatttgctgcactgact

SEQ ID NO: 190985 - DNA, 657 bp, Homo sapiens
tacagcctccagaaggaaccaactcagccaataccttggctttagactgctggcctccaaagctgtccaagaacaaatttctgttatttttagtcaccctatttgtgataatttattatggcaaccctacaaaaaaaagtttcaggtaaaaaccagtcatacttaggatcactaaacacatcttaaagttctataattaaaaaacagaggcattaattaccatttatattattcaaaaataattagaaactattagggcattggctgggcgcagtggctcatgtctgtaatcccagcactttgggagtacaggcaaccgcaccacgcctggctaattttttgcattttttttagtagagacggggtttcaccgtgttagccaggacggtctcgatctccagacctcgtgatccacctgcctcggcctcccaaagtgctgggattacaggcgtgcagccaccgcacctggcctttcatccacttttttagttttactttattctaactagtatattggaattctacattgtgtagtagggaagtgtgtatgagtgtgtgcgagaaagatctttgtttccttcatagattctatctcattctgtatctatacaagtcatgtctatgagtatatagttgtcatcccccaaagcgaattcg

SEQ ID NO: 190986 - DNA, 435 bp, Homo sapiens
tacatccccagtttacacatcacccagctttaacattttgctttcctagagacattttctaatgagggtaggcataaagcatttgagtttcatattaccttttccactccttgacattaggttttaagcaaaattgtctccagatttacttcagcaaatttaggtacatactagttactcccaagactagttgtagagaagtgataattgaatttggtctttcgttagaaatgtactgagtgtaaaaaagattgttgttagagatgtcctttacgaatagattaagtttattatatatcactgttaggctcaacgtagccaataggggacctctactttcttttttctttttttgagacggagtctcactcttgttgcccaggctggagtgcagtggcgcgatctcagctcactgcaacctctgcttcctgggtt

SEQ ID NO: 190987 - DNA, 693 bp, Homo sapiens
cacagatcaaaaatactgtattcaaaaaaattctgtattgaacatataagactattttttggccattatttcctacgcaatagagtgtaacaagtatttacaaagaatttacattgcattaggtattactagtaatctggagatgatttaaagtatatggggggatggcactggttatatgcagatactgtgccattttatatcagggacttgagcacctgtggagtctgatatccgcaggaaggcccagaacaatcaccctcagatacagagaaatgcctgtatattctttccaatagacctcagacatgaccatgttaatacagtagacaggttctaaccacgttacacactcaaaagaaataagtgctgtatccacaaaaatacatatatagaatgttcaaagcagctgtgctcataatagccaaaactgggaaaacctaaatttgagggacaattgagtagataaatcatataatctacagtggagtattgtatagtaaccaacaagatgcctgtccttccagagggctccttgaacccctgcaccatctgcccacctcttcccaagtgaccagattcacattccaaaggatcttgggagaggtggcctttgaaggaacttaaaaggtctttctgtgccctttccctgaggcccaactggacttctgattttacattccataactgaga

SEQ ID NO: 190988 - DNA, 374 bp, Homo sapiens
aaacctttaagctaagaggtcaggataatagcctaggtgttgatagctgctgccatagcaaaacaacatattaaataaagatggtttaatatatgcggtagcctgaggtggagagatgtagaggaggggaggggtaacctttatcatttgtgtgttcatgtttagtcttctgattttaattaaataagatgcattttattttagaaaaggctgagaaatttaccttataagtaagagttttagttcaaggactgaaaactacaaggatgtagtccctttcttggcccttaactattctgaagcattagtttttgctctaggagaaaattctgccctggagatctgaacacataatctacactaatgttgtacaa

SEQ ID NO: 190989 - DNA, 1023 bp, Homo sapiens
  misc_feature (122)..(122): n is a, c, g, or t
  misc_feature (124)..(124): n is a, c, g, or t
  misc_feature (127)..(127): n is a, c, g, or t
  misc_feature (131)..(131): n is a, c, g, or t
  misc_feature (136)..(136): n is a, c, g, or t
  misc_feature (143)..(143): n is a, c, g, or t
  misc_feature (146)..(146): n is a, c, g, or t
  misc_feature (157)..(157): n is a, c, g, or t
  misc_feature (176)..(176): n is a, c, g, or t
  misc_feature (185)..(185): n is a, c, g, or t
  misc_feature (222)..(222): n is a, c, g, or t
  misc_feature (562)..(562): n is a, c, g, or t
  misc_feature (597)..(597): n is a, c, g, or t
  misc_feature (611)..(611): n is a, c, g, or t
  misc_feature (632)..(632): n is a, c, g, or t
  misc_feature (635)..(636): n is a, c, g, or t
  misc_feature (652)..(652): n is a, c, g, or t
  misc_feature (827)..(827): n is a, c, g, or t
  misc_feature (897)..(897): n is a, c, g, or t
  misc_feature (943)..(943): n is a, c, g, or t
  misc_feature (976)..(976): n is a, c, g, or t
  misc_feature (988)..(988): n is a, c, g, or t
  misc_feature (1005)..(1005): n is a, c, g, or t
cccgtcaccaaggagggccgggcttccatcgtgcccctggcggtagccagcggcctgtgcgagctacctgtccgtcaacagctgcatgggccgtgtgaggcgcatctaccctcagctgctcntngcnctgntcatncaggtcnatnaccacatcggnctcaacctgcctggctgcntggctcctnccaaggacaccaagaagggtgcacagccctctccctncgtacctgtgcgctgggtggtgaaagtggtgaaaaccctgctactgaggatgggctgctcttatgagaccacgtttctggaggaccagggtggctgggagctcatggagcaggtggagagccaccaccgcggagtggccttgctggcaagggccatggtgcagtactcctgccaggagctgtgccgcatcctctacctgctcatcccgctcctggagcgaggcgacgagaagcacaggatcacggccaccgccttcttcgtggagctcctccagatggagcaggtgcgccggatccccgaggaatactctctggggcggatggcagaaggcctgagccancagaccccatcatgaaggtgctgtccattcgaggnctggtcatcctggnccgcaggtctgagaagaccgncanngtgaaggccctcctgncctccatggtgaagggcctgaagaacatggatgggatgctggtggtggaagcggtccacaacctcaaggctgtcttcaaggggcgggaccagaagctgatggacagtgcggtctatgtggagatgctgcagatcctgctgccgcacttcaacgacgcacgagaggtcgtgcgctncttctgcatcaacctgtatgggaaggtggtccaaaagcttcgggcaccacgcacttaggccatggaggancagctggtcagcacctttggtgcccctactgctgaccatgcagganggcaacttccaggtaagccaaaagtgtgtgaanaccctgggtacnctggttcttactttatnggttgggagttgccaaat

SEQ ID NO: 190990 - DNA, 1075 bp, Homo sapiens
  misc_feature (122)..(122): n is a, c, g, or t
  misc_feature (124)..(124): n is a, c, g, or t
  misc_feature (127)..(127): n is a, c, g, or t
  misc_feature (131)..(131): n is a, c, g, or t
  misc_feature (136)..(136): n is a, c, g, or t
  misc_feature (143)..(143): n is a, c, g, or t
  misc_feature (146)..(146): n is a, c, g, or t
  misc_feature (157)..(157): n is a, c, g, or t
  misc_feature (176)..(176): n is a, c, g, or t
  misc_feature (185)..(185): n is a, c, g, or t
  misc_feature (222)..(222): n is a, c, g, or t
  misc_feature (614)..(614): n is a, c, g, or t
  misc_feature (649)..(649): n is a, c, g, or t
  misc_feature (663)..(663): n is a, c, g, or t
  misc_feature (684)..(684): n is a, c, g, or t
  misc_feature (687)..(688): n is a, c, g, or t
  misc_feature (704)..(704): n is a, c, g, or t
  misc_feature (879)..(879): n is a, c, g, or t
  misc_feature (949)..(949): n is a, c, g, or t
  misc_feature (995)..(995): n is a, c, g, or t
  misc_feature (1028)..(1028): n is a, c, g, or t
  misc_feature (1040)..(1040): n is a, c, g, or t
  misc_feature (1057)..(1057): n is a, c, g, or t
cccgtcaccaaggagggccgggcttccatcgtgcccctggcggtagccagcggcctgtgcgagctacctgtccgtcaacagctgcatgggccgtgtgaggcgcatctaccctcagctgctcntngcnctgntcatncaggtcnatnaccacatcggnctcaacctgcctggctgcntggctcctnccaaggacaccaagaagggtgcacagccctctccctncgtacctgtgcgctgggtggtgaaagtggtgaaaaccctgctactgaggatgggctgctcttatgagaccacgtttctggaggaccagggtggctgggagctcatggagcaggtggagagccaccaccgcggagtggccttgctggcaaggtccccctggggctggatacctgaggggactactcccccttcccacccccagggccatggtgcagtactcctgccaggagctgtgccgcatcctctacctgctcatcccgctcctggagcgaggcgacgagaagcacaggatcacggccaccgccttcttcgtggagctcctccagatggagcaggtgcgccggatccccgaggaatactctctggggcggatggcagaaggcctgagccancagaccccatcatgaaggtgctgtccattcgaggnctggtcatcctggnccgcaggtctgagaagaccgncanngtgaaggccctcctgncctccatggtgaagggcctgaagaacatggatgggatgctggtggtggaagcggtccacaacctcaaggctgtcttcaaggggcgggaccagaagctgatggacagtgcggtctatgtggagatgctgcagatcctgctgccgcacttcaacgacgcacgagaggtcgtgcgctncttctgcatcaacctgtatgggaaggtggtccaaaagcttcgggcaccacgcacttaggccatggaggancagctggtcagcacctttggtgcccctactgctgaccatgcagganggcaacttccaggtaagccaaaagtgtgtgaanaccctgggtacnctggttcttactttatnggttgggagttgccaaat

SEQ ID NO: 190991 - DNA, 233 bp, Homo sapiens
agttcactagttagaaatatttaatgagttcagattttcttagctttcttaagagttttatttgtgcttaaatggtagctttccatttatgatagttttaaagaacgagtaagaacatatctggaaggaatgaatgttaaattggaaaatataatgattagtcctagatgggatgtgtggtttatagaatgttttattatttaccattttgcatgatgctcctgtgaaatctt

SEQ ID NO: 190992 - DNA, 445 bp, Homo sapiens
agaaattgggattgaaaatgtgggatttcataatttataatttttaaaaaatgatggtccggaaattgcacaatcctcatcaggacgttttttttccctctgactctgtggtttttgtcttagctgatgcagcactcaagacaatcaaagataaatctccctcgggctggaccatgatgtcctcgcagccttgcaagaggggtctttgtccaagagtactcgtcattgtacagcctggggtagaaggcagggctcccccagggcgatgtctcaggattccctgcctgctgctgctgtgacccaggtggcacgccaacactgcccacaaatgccaaatgccagggcttccctgcacccatggagaaggccagcaacacattctggaatgacatgacctgagttgatgcttcaagaaggaactcaaaaaagaggccacagtctcctc

SEQ ID NO: 190993 - DNA, 403 bp, Homo sapiens
ggaagaatggcagaaaagaaagggagagaggaaatccacttctgtttatggttacatccactgttctagatgtaataaaggaagacagtatgggattcaagtccaaaaggcagtgaaaaggtatcatggtacaatttacactgtaccgtgccttactgtatgtaaaatataacatacttcttgagggctgagtgaaaccgtaatgagtacgctgtgttaattactcaataataaacatattttgccataaaacattcagactcactgaggtacagagtaaaagacaatctattcatactgcccgctcagacgtaactactcttaactactattaacacttcaatatgcagactgccagttcttttaccatgtgattataaagtttatctttaaagtaataggc

SEQ ID NO: 190994 - DNA, 106 bp, Homo sapiens
ttcccattcactgcctgtcagtctgtaattctattaagtctgtaattttcttgccatcctccctgcctccaccaattctctactccagaagtgttttattttttct

SEQ ID NO: 190995 - DNA, 185 bp, Homo sapiens
agcgctggaggccggcctgcctctcttcttggggggggctgccgcctcccttgcgcacccttcgcgggattagtgtaactcccaatggctaccacttccagcgaccgccaaccctcaagcgaagactgactttggctccctgcctggacggaggggcccctgagccaggggtgacgatcccgccc

SEQ ID NO: 190996 - DNA, 328 bp, Homo sapiens
tcttctcctgacaaatgaaggaggcagttgtgatcattgctggtggaaccatagctcagattttttttttaaagaataatgtattaaaaatggaaatcattttgcttctagattggccagaatcttttaattatctgtatgagaggatttacagtgatacttcacatttgaagtagtgttgtatagtttttcaaaaaaaatctttcacattttattatttgaccctcataataaccctgaaaggtaagcaggacagttatttggtccatttgagagattaggaaactgagacccagagggtttaaatgatcagagcatttcaaagtaa

SEQ ID NO: 190997 - DNA, 576 bp, Homo sapiens
cctttttgctcacaacttgtgggctgttgacatttccagaagccctgactctggagaagatggtggcttgttgtgatgaggtcagaattttttctcacatctcatgggtcagaagaaataaaaacaaacagaatctttctttctttcttttttaagagatagggctggctgggtgtggtggctcatgtctgtaatcccagtacttcgggaggctgaggccaggagttcgagaccagcctggccaacatagcaaaaccccatcttcactgaaaacataaaaattagctgggtgtgggccgggagcggtggcttatgcctgtcatcccagcacttgggacgccgaggtggacagaaacctgaggtcaggagttttgagaccagcctggccagcacggtgaaaccttgtctctgctaaaaatacaaaaattagctgggtgtggcaacgggcgcctgtagtcccagctactagggaggctgaggcaggagaatcgcttgaacccgggaggcggaggttgcagtgagctgaaattgcgtcactgcactccagcctgggcaatagagtgagactccatctca

SEQ ID NO: 190998 - DNA, 553 bp, Homo sapiens
atggagtctctcctcattctgtgtatgtctttgggtgactgtataatatctgtccctccccaagcctgtgtgctccaggaagggtgtggactagcagggactagactcaagagatgtccttggaacgcatgaatgaagagatgctccgtcagcatagcagactaccccgctccatgacatgtccctagtgtcagttcagggccccacagagctgccttggaactcacttccagccatgtgctgcttggagcatctatgcccagatgcctgccctgccagggaccccagcaccaagcaaggctttctgcacgcacaggatacaaggcactggagtctggcagagcagctccactacccactgtctgtgtggacttaggtctcagtcctctcatttgtaaaatggggccaatactgctaatcccacaaggttgttctgaagattaaagaagggaacaaatgtgcttagcacaaaataggtcctcagaaaattgcagtttggccccccatccagtgagttcacaggtgggtctgaccctgtctcacctggatggcg

SEQ ID NO: 190999 - DNA, 159 bp, Homo sapiens
cctgaggtcatagaactgatagatagaagggacgtggtgccaatttgggtctgtctgttgccaaagctcatgttgcttctgttctgtctctgtctttagagcaggtgtctgtgggtctggagcccatgtgtgacctggcagagtttatgccacacccgg

SEQ ID NO: 191000 - DNA, 275 bp, Homo sapiens
aaattgctgtccctgtctactctattctagtccctgcctgccccatatgtaactttacttatactttatacaacattttacattccctgtttttttggctattatccgttggttccctactatgagcaatgctgaaattaagttagtaacttccttctcctgtctctaccccagtattttaagtgatatatttttatttacagtgaatacctataaccagtgagcttattttacatttcatatattctccccacattcttgataattaaacttta

SEQ ID NO: 191001 - DNA, 633 bp, Homo sapiens
ggattctattctcagcttactgttaactctaccccctctgcttgggcaatctcatctattcttgtttcctatccatactactcacatgttgatgattccaaatatgtatctctccttcaagtttacatgcccactcatatctcaaaatccaaatgtccaaaactcaactatcatcttctttcctccccacaatctgctccttgctcctggttccccattgtggtgaatggcaccacccagtcccccaagctaaaaatcctgcagtcatcctagagtcccccttcctttcacccctctctctaattgccaaggcctgccaccttttcctccttaatacttcccaaagctaatctttccttctatcctaactgtggttgccctaattcaagcccttatcttctctcatttgggctattacaatggcctcctaatagtccttccccctactaaccttggcctcttcaaggctttttcacagaacatcctgagggctcttcctaaaatgtaaatctgatcacctcgcttcctgcctaagatatttcaaaggctctctgatttctctataagactctctcctgccctgctctccctctcacctccaaccattcatgaccacgtatgtgatacctccgt

SEQ ID NO: 191002 - DNA, 469 bp, Homo sapiens
gctgctcaagattccttctggcgaatcccactctacaaacactcaacaactaagagtgctactggctcacatggagggctaacaagacctgcaaatccaggctgctctgaaggacggtggaagataaccaaccccgagccacgagatttaggacccgacttttggttaactttcaaatttcttatgccagtaatatacttcagagtggcgcggagggaattggaaaacatcaccaggcaaaaaaaagaaaaaaactctttcacgaaacaagacttccaattagaacacgtgtggggacaataagaaacacgttctaaccacccccaaaattaaaataaaacacagcgagcaacaagagagacctgcgcgcgccccaccgcccgcgcgcggctctccgcagggtcaccgaggggtgaggccgcgctctcccggcggccgtccagggggaggaggccccgcgccccgcccc

SEQ ID NO: 191003 - DNA, 648 bp, Homo sapiens
cagagaccgtcactgccatgagcagtctgcctgatacccatagcaggtaaactgtctggttccaaagtccaggctcagaaccactccagtctttagacacaacctagacccagacacaaggctgggtctccctcaggtttggactattacttgtggcatggaccctaggggagttattttgccttttctaatcctcggcttcctctaggaaactggattaaatcagagaccacacattagacaactccaggaactgggaaaataaggctcagtgcatgaagctggtggaagacgatagagacgatagagagtggtggggactctggcaaaccaatgtgtttatgcactggctacaggtttcaagttttttgttttgttttgtttttgtttgtttgtttgtttgttttttgaaacagagtctcgctctgtcacccaggccagagtgcagtggtgtgatcttggctcactgcaacctccgcctcctgggctcaagcgatcctcccgcctcggcctcccaaagtgctgagattccaggtgtgagccactgtatgaggccagctctaagtgttgggggctagggtactctttggcacagatgttggaaaagtagattaatgcatccttgtctccgggtttatctgctcctga

SEQ ID NO: 191004 - DNA, 151 bp, Homo sapiens
aaaggttatgtttaatggacaaatgcatgccagtaaaaatgtgttttgtcagtgtttgtacattcaagaatgtcctggccagtcacttaaaatgaaatcacttttttaaaaaaagattgtatctctaaataaccaccagagaatggttttt

SEQ ID NO: 191005 - DNA, 427 bp, Homo sapiens
tttgtaaaattacattgccatagtggtatatgtacttaaaatcccaagaagaaagccgtctctctggccagaggaattgggaaagagaactctggaagctggagcatgctttggaagtctcaaagagaagacacctagtttggggggagattccctaattgcatgtatgaacacacaaaggtcctacctactgcatccatgagctacacgtacatggaacagagcgaaagaaacatggcaaagacctagagagctgaactatggtgtaaaccactgctcaaatcccagagttgcccctgagagatgcatgcggaggatagatttaagcagcattgtgaacgctttgaaaactgaaacaacgattggtactgtggcctgttaggaaccaggccgcacagcaggaggtaggtgactggctagtgagcat

SEQ ID NO: 191006 - DNA, 334 bp, Homo sapiens
gcggtacgggagtgggatctggattggttggtttgcatttgaaaggtgtgctttgtaagctagcccagggaagggcagctagccctgggagctggagtcagtaagaccccagatgtcaaaacatcagaataaaaagacatgcttaatacagtgcctaactcaagttccctggctaaccaacagacactaaaagccagggagggaatgcatcctagtttgatcaccacccatccgatgcccacggtcaggagtagctttctcacttctgccaagaactgaagcttcccagaatggggagatgcccccccaccccgttcctccacatccagaacag

SEQ ID NO: 191007 - DNA, 326 bp, Homo sapiens
ggagggggttcccatgacaagtccatggcaggagctactgaagcagaagcacgagtctccactgcctttctttgcctcggtttttccccctgtgaaatgggcccatcaccctgtcctgtctcttggggacccctggtaaggtagcgtgtgtggcagctggaaacagacctactacgtgccagccccgggttgcaacctagggagagaggcccattgctgccttctaggttcccacaactgagaaggcagcgtcactaatcccagcttacagactggaaacagtggggagaggatgagtggcttgcccgaggcccaggacacacagg

SEQ ID NO: 191008 - DNA, 561 bp, Homo sapiens
cacgtgccttagcacaatgtgaatgtacttaatgccattcaactgtaaacttaaaagatggttaagatggtaaattttaggttatgtatattttattataattgttttaaaaagtgctgattaagaaaaagtatgtatgcttatcatagaaaatgtgaaaaaagaaaaaatcatcatcccactacttagacaactttcaatattttattggtttcaatactttgttatattcgtttccagtcttctatgcatatttgcacacagttgagatgttgtgatattaccatgttattgtgtcagctaactgtcatgaacatgcattctgcagaacaagaaacaggtaagaacgtggctgtagagccagaaagcctcggttcaaattctggctccctagttcttgatgtgcaacagtagccaagttacctaacctcctgtgccttggtttcctcatcaaaatcattgcttctcatcaagagcagttttgctcaggagacacttggcaatgtctacagacgtttttggttttcaagatggcagaggggtcaggggtgctcctggtat

SEQ ID NO: 191009 - DNA, 630 bp, Homo sapiens
  misc_feature (604)..(604): n is a, c, g, or t
ccgccccaccagctccttacacagtgttcacagaactacctaagcaaactcctgccacaccatatgtcaccctgtgttctaacctgctgtatcctacagtgtggggtggcactactggcagcccaaatgattttagatggcacatggataccatattaattaacaatgaatcacaaagtgagaaagtcattctctttccagttctctttcaatctctctgacgacaatgaggaagggtcagtatggtgctggtgtattaaggtggtgattaacagcatggcctctggagccagactgcctgggttcaatctctgctataccacttaacagctgaatgggttctctgtgctgtatcccccagatcccaacacacagccaggcacacaataaaaatttgccaaatgaatgagttcagcaaacattcttagaacagaatcaatgggaggcactcctaaggcttgacagaggacagatagatgccttccgagttcatgaacctgaatccaagagagatgtttatagtctaacacagttccttcacgaacctgaatccaagagggatgtatataatctaacacagttccttcacgaacctgaataaacnctatgtaggacgggtaacgagctcga

SEQ ID NO: 191010 - DNA, 666 bp, Homo sapiens
tcattctctttccagttctctttcaatctctctgacgacaatgaggaagggtcagtatggtgctggtgtattaaggtggtgattaacagcatggcctctggagccagactgcctgggttcaatctctgctataccacttaacagctgaatgggttctctgtgctgtatcccccagatcccaacacacagccaggcacacaataaaaatttgccaaatgaatgagttcagcaaacattcttagaacagaatcaatgggaggcactcctaaggcttgacagaggacagatagatgccttccgagttcatgaacctgaatccaagagagatgtttatagtctaacacagttccttcacgaacctgaatccaagagggatgtatataatctaacacagttccttcacgaacctgaatccaagaggatgtatatagtctaacacagttccttcacgaacctgaatccaagagggatgtatacagtctaacacagttccttcacgaacctgaatccaagagggatgtatacagtctaacacagttccttcacgaacctgaatccaagagggatgtatacagtctaacacagttccttcacgaacctgaatccaagagagatgtatacagtctaacacagttccttcacgaacctgaatccaggagggatgta

SEQ ID NO: 191011 - DNA, 459 bp, Homo sapiens
ctaccaacaaatactgattccttctttaaatgaaatagcccaactcctgaagcctctaaattactaccaaattaattcatagagagatcttcgtgcaacttgaagtactctcccagccccctttgtctatttattacactccaaaggcagtatctgattgcttttatctatcttatctgacttccggtgaatttttttttttaaatgaaatttgccagaagtccactagatctgcgctggtggcagctacatggtgcattcatataccccttcaattattattaaaatctttcacagtatttctgtgcagttttgaatatgcattttgtttttcctactgtcatacaatattgtctttataaaagcatcaacaattatttgttttcttatatcccatttttatcagcattactcttcttgaacaatatagaagtaaaaagttttccttctgcttttagg

SEQ ID NO: 191012 - DNA, 295 bp, Homo sapiens
ggctcatcccacaccagtccttcgtgatcctcatagcagggatcatatctcccctcaatgctgaatcacctaaaatgtatgtaaagcaagaaagaaaaactataaactgaattccctcccaggattatgataattttacctggacaggcagcattcttggccaccagaaggtggctttcttctactacatttcttccaccaccctctaatcccacatacaactatggcaggtataatcgcggacattgagaaataattgattgctatgcaacaggatgctgaggggaggaggagg

SEQ ID NO: 191013 - DNA, 738 bp, Homo sapiens
  misc_feature (15)..(15): n is a, c, g, or t
  misc_feature (18)..(18): n is a, c, g, or t
tacttttccacaggnttnccatgtttgcaggtaaaagatttgatacagacaacagaggcgatgatgtttattgaggaagtatgtttaagccttttgcgtcatcctgttttctggaaaattcagcttacccagatgagtcttcagctgctgtgtgtcagtgaagtcagcttaaagataactggtgaatgttcatcttcaattcaccttttagagcacagtgttgaacttctgaaggaggattttcctgttgaactggtcataattggaatagctttactacttctacagactccagcaagtcagcagaagccaatcttaaatctagctttgaagctcctctctgttactgaggatcagaaaatcccaaagtcctctctgctgctagtgatgccaattctgcagatactatcttctactgccttggaagactgtatatctgtggatgaagaaggtccctctaggcagcagttggctctaaaccttttggaaatgatacagcaggaatgttacagagatgaccaccaaaagctctcctacaagcttgtgtgccctgtaaccagtatgtatggtacaatatttacagcctggaggattcttgaagtaatgacagactcgtctgctgcaagtgactggttggcttcagtagagtcattgcttcctattactgctgtgatccctgcgcctgcctttcttctgctggctcacctccttgttgaagacaaaggacaaaatcttcac

SEQ ID NO: 191014 - DNA, 170 bp, Homo sapiens
ttcttacactacgtgaccttccaaaggcaaaaagagttggttaataacacagacatagcatcactgtcttcaaagacagagaaaaatcttccatagccagaaacacggtttgttcacgcttttcctgttgttgagcttggtgcccttctgctgagcccctgttaaaaatg

SEQ ID NO: 191015 - DNA, 562 bp, Homo sapiens
tgaaaacattgcttttctagatcacatttgtttagaacaaaccatatacttcactgccttaaaatatacttttatatcattttgcctaatatatatcttcataattagactaaccttgaggagaaagctgttgtagaattttttggtatcctcatagaacttggttaaatgtagagcacatagcggtatttaatggaaaaggaatgaataaaccaactagggttcatctatgcaatggcatagcattcagtgataaaaataagctatcaagccacagaaagacatggaggggccttaaatgcatactgcactgtgaaacaagccaatccaaaaaggctgcatactgtgtgattccaactatgatattctggcataggcaagactatggagacatgaagaagacagtggtttcccaggatctgggggagacagaggggatgaacacgtggagcacagatgattttcaggccagtgaaactatcctgtctggtactgcaatggtggatgcatgtcattaaacatttgtcaaaactcataaaatgtacaacacaaagagtgaacc

SEQ ID NO: 191016 - DNA, 645 bp, Homo sapiens
cgcgtccaggagagggcccagctcagctgactgttgtttcaggtagctgctgcaagtagatctgtgattacttgttgattttagtgggtggttctctgtccttctggacgaatactctttttctttacttttcctgcagtgagctggagttggtaggtttggggtggctcacatcacagtgcttgcttgtgcatattcacctttcccatggaaatcttccaagtgtgggagggaagtttgtatttcacgcactgtgccttcaccttgatcagcaaggtgaacctgagttcctgggtttcagtgtctgaggttggatagcacagagctaaggaagcgttttctgagtgtgccagcaattctcgctgggctgtgcatgctctgtttcctggaggctgcacatgctgctcatcgacattcgtggtcaggttctttccctgcagcaaaaacccttggttcagacctcatttaactcacaatttctcacctctgctctaggggtacccaagatggtggctgtgtctccccacttctgcttccccatcaggaaatagagccccaccatgggtgtctacacaatagatgaagctggtcaaataaacacgaaatctgactggttttgtgtgggcttccccgctccccctccct

SEQ ID NO: 191017 - DNA, 612 bp, Homo sapiens
ttctttataaaagaatcttagatgtggaattattgggtaaaaataattaattttctaaaagcctcttgatgcatactgtcacactaactttccagaatctagaatacatactaacaatatgtattagttgtctttggttgtcttatgctgtgtacaaaaattacccccaaattgagcttaaaataataagcatttattaatgggtcaggtatctggccgtggcttaactcaattcctctggttcagggtctctcataggactgcaatcaaggtgtctgccagtggtgaattatctcaaggctccactgaggcaggatttgcttttgagctcattcaggtcactgttggcacacctcaggtcctcgctggttcttggccggagaattatctcaaggctccactgaggcagaatttgcttctgagctcattcaggtcactgttggcatacctcaggtcctcgctggttcttggccggagatacctggtccttgccacattggtttctccataggccagctcagaacatggcagctgcttctctcagagggagcaggggagacagtaggagagaggaagcaacatgaaagtcatgggttttttattttttatttt

SEQ ID NO: 191018 - DNA, 643 bp, Homo sapiens
gacctcaaaagatcttggagcatacccaggcaagagaaataaaagggtattaaaataggaagagaggaagtctgttggtagatgacataattttatatttgaaaaaccccatcatctcagccccaaaacgttttgaactgataagcaacttcagcaaagtctcaggatacaaaatccctgtgcaaaaatcacaagcattgggttacaccaataggcaagcagagagtcaaatcatgaatgaactcccattcacaatcactacaaagagaataaaatacctaggagtacagctaacaagggatgtaaaggacctcttcaaggagaactacaaaccactgctcaaggaagtaagagagggtttcaatccctggtggcctcttttcctcatagtgtgaacagagaggagttgtaggctgtgcgtgtgtgagagggcctggtgctgtaggtgggtgggacagttcttctgttcatgtgtaatagctggttggctgagcctgggagccacgcataggaatcctatgtatctttttttctttcataggtatgggaattcagggaacatgaaagcagattttctcattaccaccaagaagtacagttttaagggcagataaaagatattctttcctagaatagcagggct

SEQ ID NO: 191019 - DNA, 282 bp, Homo sapiens
agtgcctcagtgccccatgctccctgctacttcctacaacgcacgtagcttgacaccctgtcaatgttcaccttcacctttctagggtatgctttactccacagacagcctgacctctctaaactccttgcactctgcctccaaatcctagtgatccttcaagaactgctctaaaacccaaacaccctatgaggctaccatcgctccacttccccagcactctagctcataatgagcatttccttttctgaatgactgttatgctctaccagcacaccattt

SEQ ID NO: 191020 - DNA, 463 bp, Homo sapiens
gaagtgccctgtgactggctgataccacgaggccatgttggtgacaccccgagctgctgggaggtatctcagcaaaggcaagcttactgccctactcctttctagggctgtccaagtcacttgttgggagcccaaagccatgagaaaggcagagatttgcattccagcaatactgtctgaacattaacctcaaaccccaacagctgttgggcagtgtgtgagctgtctgtccagcattccacatgagctcagctaattgaagaaccctgatcaaacagtagtatagaaactcccagctcagcagtcaaatcaggttcccctgtcttcctgccgttggcccttctctcagcccccatgggctcagtgcctgtctcatacccacctgaggccccacaggcccagccctagccctttccccagaactttccccatcccagacctagttctgtacaatgtcctccca

SEQ ID NO: 191021 - DNA, 357 bp, Homo sapiens
tacgtaacacaaatgatttctcttcttactgttggtttccaataccccaaagtaaaattagttcctccatccgtggcatttaacacaccacatgaatgcttacatgccatgtccccacattgggcaagtactattctgtatactatttgtataccagaagggtatagtttgtcctttaagcatgcaacttaaaaggatcatctggtttaacaggaatccaataatctacaagccaaaaacgaacaaaaatatagccctcgcatcttcaaagtcatttaaggacaaaaaagttgaaaaaaaaatccatttagtaaagatctaactgacaggtttgccagagcataagaactctgtgaa

SEQ ID NO: 191022 - DNA, 776 bp, Homo sapiens
cctgggggaaagaaaaggatgggtgggagtaggagagggcgtgacgtgggcctactctgggaagggccgttctgctgagtacaatcacgacagcagaagggcagctcccaatcatggcccaagtgcccatctctgccagacacaattctatacaagttacatgcatcgcctcattgcaacttttcaacaacctgtaaggtatgtgctacgccactgcctatgatagagatgagactgaggacacgtgcttcctgaggggaaaggtgggatgagaacccaggctgacttcagatgtctcctggggcagcctgtgggcctccatgcccacccatcctctacatttctgccccctgctctctaggaatagactggtgactgggggcagggctgcttctgtgtgcctgctggaggcttgtctctgcttccttgagccctttcccactgtcaggcttctgagagcccagcctgctggaggcactgtgaccttggtctgtgtccgatgggtgcccctttgcctttgtactcaatgttccacaccgacaagccccctggggctatagacagaagctcccctcaccccaccaaggcccagcaacttcaaaaccctcagacccagctaggcatggtggcacacgcttgtaattccagcactctgggaggctgaggcaggagaatcacttgaacccgggaagaggaggttgcagtgagctgagattgtgccactgcactctagactgggcaactagagtaaaactccatctcaaaaaaaaaaaaaa

SEQ ID NO: 191023 - DNA, 466 bp, Homo sapiens
cagggtcttttcccctcaaaccttgagagcacagcagcctcagagaagatctcagctgtaaccttgtgagaccctgagcctgaggcacccagctaagctacactcaaattgctgtgagataacatttactgtcttaagctaagtttaggataacttgttccacagtatagacaactaatacgatcccaaatctcacaacctgcatcactagcaccctagtccaacctcatcaacagcctaggccatgacttacaacagcttaagtgagtagcctgcttccacacttgccttgcctccttcctttattcttcacagcaacccaccagagatgctttaaaaatgtaaatcagagtgcaaaagtcattaagtgggcccgaggaatgtagacatctgcacttgtatgtgagggagaatgttgcggtagcccagcaagatgtgtcagagcctttgaggggagaagagcctg

SEQ ID NO: 191024 - DNA, 263 bp, Homo sapiens
agagagacctcccttccacctgggaggatcagacaagcagttttggaggagataacatctgatctaggccttccaggaccatgaggattcagaagacagagatgagacagggtacgggtgggctctggaaagaccaaggtaacagttttaaggcaggcagcctctacagaaaagggaaggttagtgtggcagaagctgaggtcatctgaagggaaaagaggttgaaaatacagtctggaacaagtggcacagcattgacagag

SEQ ID NO: 191025 - DNA, 433 bp, Homo sapiens
ccaagggcttcctggagaccaagtaccttgccctacctctggagctgttcttcaataatgcctattctttctgggcaggaattgtagcagggcatgtgtagcctatgtgacccccacagaaaagctggggagacaaggaaaaggcctcttttctagaacatctgccaggaattgaagggacaaagaagctgacttgtgcagtcagcaatgcggtatatgttgtagtgtctagatactctctcaggatcaagtattaatcagacaaatatccatgttgtgggcacaaatcccagcagctgtaattctgttagcagccactcagaagtccaggggcaaagacctcttttgggagttctttctacgtaatgtaagattgtatcccatggacagaggtgcaggagaaacattgatcaccaggaatgtgactggtgat

SEQ ID NO: 191026 - DNA, 264 bp, Homo sapiens
caagtgaggggagacaagtgagtaagatgacagtttgggggacaggaatgcttccatttctctcttcttttttctgtgttacctgctaggtactaccataggccttgggaaggcacatcccaggcacacctagaaacaccttatgtgaaaatggatagtgtcaggcactttatctttaacttaatagaagttgacaatgtaactgacccatggtggagtgaagtgaaaccacatgtgggctggattgaccctcccttgatctag

SEQ ID NO: 191027 - DNA, 346 bp, Homo sapiens
agaatggaatcaaaatggagaatttcctaccttgctcacttcaaccaattaagaacataattggtagcaaaagatgaagagggagatttcaggtaaaagagaacagaaattaaaaaaaaaggaaggggggagaaaggcaacagagacgagatggggaaaagagcaaaggggattaacacatcttgagagggtgagatgaaagtgtgaggaaaaagtaaaaaattatatttgcagataataaagactatgtagaaaagtcctgcagaatctaaaaagagctactaaaactaatcaatgagtttagcaagactgcaaaatacaagttaaaaatggattccattggggg

SEQ ID NO: 191028 - DNA, 184 bp, Homo sapiens
cagttcggttaattgttaaaaataaataaatccaggttttaggtaataaaacctaagaccaataattcatctaagaccaatgctacaacatgttgtcctttgccaactctaaacgggaaatacaagctggcacaagatgggcactaatcaaagtccttacgtatctctaaacacaggttcaata

SEQ ID NO: 191029 - DNA, 127 bp, Homo sapiens
acatgggattgtgctttttggcctccttcacttggcaatttgccctggaaaccagcagacctgtcttgtcaccaggagggcctcagtcatcaaggcactctgcagatgtctgtctaatcttgtggag

SEQ ID NO: 191030 - DNA, 371 bp, Homo sapiens
attccctctatgagaaatgatgtaatgtaaaagccatggtctttatcactgagacctggggaagctttataaagatgccccggcagctgtgaaaacacctgtagagaagaatgcacatttccttctttcagcaagcatccactgatttccaactctgtccacttttatagggtgtaataaagtagaaaaagtagttactgcttttaggtaaattaaaatgtctgcttaaagagctattacctatataagttaactaaggaacagaaaagtagcatgtgtagtgggaatgttagaaggcaaaagatccagccacgattggtgtgactgaactaatcaggactcctaattttcctgactgaaaaaaataggga

SEQ ID NO: 191031 - DNA, 332 bp, Homo sapiens
catggacctctgtttcagttgagctccccaagaagcggaccttgggccaaggattcaaacacacaccctgctcagcatatctaggtctattccattcattgtaatggttgcacagcatttcaccatgtgtctgtatcattatttatttaatccccccaatgtacacacattaccctacctccactccacttcccactcactgacacttaggattgttgggagtgtgctgatgttattgactattgtaaggggggacatatgcgacaaagggaaactccattttccaaaggccatggctgcaagacagggttctgagggctggagaaatgaca

SEQ ID NO: 191032 - DNA, 370 bp, Homo sapiens
gcacattgaattcagactggtgtcatttcaagtgagcaatagtggcccgtggttagtggctactgtgttgcacagtacaggtctggagctcccaaagttagtcaaaaatagtttagatttacacttgctggaggaattctttttcaaaacaagttaatcaacattcctattctagtacatgcacatgggaaacagaatttagtgtacatactcaaattgcctatttcactccatgtatatttttcacgcactcactgtatggtcatggagcatcaactatgttagcatgagtgatggttcacacactggagctctaatcatgagctgaccacgcacagtgtctgttcttcagcttacacctttatgaagg

SEQ ID NO: 191033 - DNA, 417 bp, Homo sapiens
tgggcacaaagagggacaaatcaaacaagagagcacacaagttagaaaaaactaatccatatacagtcacttgatttacaataagcctcctactgcaattcactgggcaaaggatagccctttcaatgcggaagtagatgaaagtttacccctacctcacaccatacacagaatgaattcaaatggatcatagagctaaatatgaagagcaaaagtagcaaaacttctagaacaaaacatagatgatcttcatcgatgttggattaacaacaatctcttgaacaggatgcagaaaactctaaccagagttcccacaaattgataagaaaagcaaacaccctagtgaaaaaaaaaaaagagcagaatatctgaacaggaacttccccagagaggatattcaaatgggcaataagcctg

SEQ ID NO: 191034 - DNA, 167 bp, Homo sapiens
tacttgtcctttcaaagagtggctatttaaggtgtattagagaagaaaaattaactatttctatagtctttgttggttaatttctccaaagcaaatgcagcacccttagactctaggagacagcaactagaggaatctgtataacccctgagtctattgtgtttata

SEQ ID NO: 191035 - DNA, 425 bp, Homo sapiens
ctgtgagcccaacgtatgagaataaccatctccataggtattggtaacatccaggatgtgggatttagaatggagagaaaacagtactgctgaagtcctagagatgggagacacaaaaggattaggagatgaaaacaaccatatgaggaagaggacaatatgttatagaaaataaattccctgcataaaatcccaaagaaggcataattcatacaggatggagggctacagagtcaaatccagcggccacttcttaggaaggtaactgccctttcttgttttgaaattcagggcaaaatgtttgattaatagagttatctttccttctcttttgaagatctaaaaaaaggtatcttctcttatttaatgtagagaaatactctttttttttttaaacggtgtaacagtttcatccttacagggag

SEQ ID NO: 191036 - DNA, 257 bp, Homo sapiens
ctaggatccccggtcaattactacacaaaaggagctcttaatgccttcaaaactgaggtttggggacattctaatgtgtttactttgcaagggacccctaaaaaagaagaatgaagaaatgttgtagaaaggtcatctcatttcatgaaataaactgatatgacacattctggcagcatgatgctataatcttcagcacagcactatgagctctgaaagaaaatgatttgtgggccaggaaaattactgtgatcaag

SEQ ID NO: 191037 - DNA, 192 bp, Homo sapiens
gccaataacattacttttaatggcttctcagtattccattatatagttgtactatgatatactaattaatgcctcattgttggacactgacatttttgccttttaaaattatcattatagaccattctggattttctcaagacaaaacccttagaagtgaaacttctctggcaagggggatatagaatttca

SEQ ID NO: 191038 - DNA, 265 bp, Homo sapiens
ggctttcccttttcagttaggaagggacctgaccctaggccagaactgtcacatggccacacctatttcaaaattcaccttgagatgaaatggcacctcaccttgttaccctaatgcaatcttggtgttcttagtaaggcttaagagggaaatgggtattggtggaacaacagcagtatttgttgtattctgtcacaggtcacctgggttgtcaaaagtgaatttgtgagctgtgtgtggtggtatgtgcctgtaatcccagctg

SEQ ID NO: 191039 - DNA, 474 bp, Homo sapiens
tcctctggctatcctcatatctgacattgagtaaatgtatttcaggttacattttaaccttttttattattttaagttgactgagggctggcctggcaacattctccttggtataaatactccaactataagctacctgctcagtagaggaaactaatcaacagcagggcctagcataggtcaaagacacaagcagtgggaagctttttggggcctggctcctaattgcaaggacagttgcacaggtgtctctgaatgcttagacagcctggcctttcctgacccaatgccccccatcagctttttcaagcacatcttgatcttttgtcattctgttctctggggtgaaaactcatcgtcagggctgtctacaacaaaacagaagtatcaggttactaaaacctcaggaacagagattacggattgggttaagagtgtgccctttcttaaggatggtacgcatggaaaagcagc

SEQ ID NO: 191040 - DNA, 267 bp, Homo sapiens
atccaaacaattggggaatcctgtcaattttacctccaaaaatacaacctaaattcatttgttcttcctaacctgtactcctacctctctaagccctcaccaccttcacttcttatctgagctactgtaatagtttccttactggtcttcttccttctattcttgtatctttagaatccatattgtacacaggattcagaatgacattttaaatgttatacatatcatttaaatcatttaatgatttttcgttgtacttagaataaa

SEQ ID NO: 191041 - DNA, 348 bp, Homo sapiens
tctgctttatatttttcttcccctttttcctttgcctgttaccatatagatggggatgccgaactttgttatgggtgaaatgtcaggcactgtagcatttttttctaaaatggtgatttctcatgtagacactatcataatcttcatgtatggtgctttatcttaaaaatatttcatggctctttttttttctgttgagttaaaagtaattatgcttgtgtattccacagaaagtattaatatttaagcaaatttgaatatcacatgggataataacaaatcttagtgtttagaggctggcacttcctagtctagttctgccattaaaagactgagtatctttggcca

SEQ ID NO: 191042 - DNA, 600 bp, Homo sapiens
tggaaccacttttcccaaacctggcccctaggtctcctgtgacacaacagccacacctcttccttgtgcggtatataactattttgagaaaaagccttatgcactgttataaaccaggtcttctggaaggacagagaaatggaatcttcttccactgggatcaaacctaatggacctatgaagccactgaaccactgtggtagtttccagagggtggtagtttccattttattcagaaatctgtggggataaagacagtattaaccactaggtaatttaaactcattacaaattaagacagggtcgggtacagtggctcatgccagtaatcccagcactttgggaggccaagacaggaggactgcatgtgcctggaagttgaagactagcctgggcaacacagtgagactggctctaccatatatatataaattagctaggtgtggtggcacatgccttagtcctaactactcgggaagctgagctgggaggattgcttaagcccaagagttcaaggctgcagtgagctatgattgtgccactgcactccagcctgggcaacagccagacactgtctctaaaaaaaattaggtggctcgg

SEQ ID NO: 191043 - DNA, 596 bp, Homo sapiens
ccaaaatgctaggattacaggcatgagccactgagcccagcccacaattcaattttcttaaaaacccatgattaatatgtcaccccctacttgaaaatcttcaacaattccctatcttccataaaacaccttgcatctacagtacaatttagctccacctcacctctcagacctcatcttctactgtttcctcacacacactatattccaagaaatctctagtaaactttcatttccaaaggcagcttgttctaactcctcccacatacttgtcaggctgctcctgccacccatctatttggacccagcaaaaaggtcacctccatgactgtttctttcctgatcccagtggaagaggatcccaccttgctgcccttccagaagacctggtgtgtaatggcacatgaggccctttctcaaaatagagatatataacacaaaatgaaatggtagacttactctattatgggaaacctgggggcctgggacaacaggacgttctgcagtagtacaagaccccagagatcaactagcacacatgctttattgggtgcctatagtactttttttttaaatgagccaacatataaaaatct

SEQ ID NO: 191044 - DNA, 569 bp, Homo sapiens
ccaaaatgctaggattacaggcatgagccactgagcccagcccacaattcaattttcttaaaaacccatgattaatatgtcaccccctacttgaaaatcttcaacaattccctatcttccataaaacaccttgcatctacagtacaatttagctccacctcacctctcagacctcatcttctactgtttcctcacacacactatattccaagaaatctctagtaaactttcatttccaaaggcagcttgttctaactcctcccacatacttgtcaggctgctcctgccacccatctatttggacccagcaaaaaggccaagacaggaggactgcatgtgcctggaagttgaagactagcctgggcaacacagtgagactggctctaccatatatatataaattagctaggtgtggtggcacatgccttagtcctaactactcgggaagctgagctgggaggattgcttaagcccaagagttcaaggctgcagtgagctatgattgtgccactgcactccagcctgggcaacagccagacactgtctctaaaaaaaattaggtggctcgg

SEQ ID NO: 191045 - DNA, 648 bp, Homo sapiens
agagataaaaacaacatggtccttactctccagggtgctttcctgtctcctgtgatcattgacactcataatgctaagttacagcaataggatggaagtggctcattctggattgtttcttcagagtaacaagaagccctaattgtcaagagacacagattctatagtccaagagcagagttttcctgtaggtacttttcagcctgcaagttagctcagactcgcctgagaaagttctctgcagataagagggtgcttgaatcttcagtaagtcctattgtcaatttctggatcttttcttacttcaaaataacctcagcccctgctttaataaaaaggactttaagccaacagagtaaacttgatagttggtgtgggggaagaaaatagccctttctttatgagtgttgtgatccgggagctttatataccctaacttaatcttcaaggcattggttgaaagaaggaagtgacttgctatgttacacatttatttaggggtggagttagggattggaactcacgtctggctccgttataccacattccttctctggccttcttatcttaagcccacaaccatctgtatcctgttcagaatggatagttgtgtactaaaggctgatcctgtggtagtgcggtgctttt

SEQ ID NO: 191046 - DNA, 867 bp, Homo sapiens
ggtcagaagtctggtttttaagttcacagtctgagacacatgaagtatgcaactcacagctaaccattaggaaaggaggtgaagtaatctgctggagaagggccaggaatgtaagatgagagatttaaggagagtggaagagtggcttaacaacaacaacagtaacaaagaagcattgttgaggctccattggaaactggtcatgaatgtggtagaaccaagctaccatgtcatgtgacacagaagtaaatagttgggctcaccaaacttcatgctttgtgcaggggtgttggaaccctttgaagaagtgtgtagctaatagcccatacataattcagaagaagtcttcaatggaagacccccgggggataaatggacagtctgtcaagtgggatcatggattcaaatgttctttgaaaatgaaaagtgcaacataactctaattcactttttattggaaacatctccagaaaaatgaataaacgaccatgaataaaaaattatctggccacctgcaagtctacaatacaattttaaaaatgtgaccatcacacctgcatcaggtattataaacactaaccctgcatatgtttgatcatgatgttgtcagctcatgcattggggggtggaattcggtctcctaagactctaaaaggagcatttgttataaatggtagatacttaacttacttttctttcaaaaaatttagatgatgatattctagatcttgtggactaatttaactttagggctccattgtactctcataactgtacctcttgtgtctcccttaagttatgataaatttgaagtgctaacagcagttttgctgaatgctggttttgccagaaactctattaaataaa

SEQ ID NO: 191047 - DNA, 914 bp, Homo sapiens
  misc_feature (478)..(478): n is a, c, g, or t
  misc_feature (480)..(481): n is a, c, g, or t
  misc_feature (516)..(516): n is a, c, g, or t
  misc_feature (614)..(614): n is a, c, g, or t
agcgggatgatgcccctgggccccaccccggggcaggagggcggcgatcggcgcccgggaagcggctgaggggcgccgcgactctcagcgagcgccgcccgagccccagccagcccgggcagcctccgaggcctagggcgccgccgccaggtgcaggggtgttggaaccctttgaagaagtgtgtagctaatagcccatacataattcagaagaagtcttcaatggaagacccccgggggataaatggacagtctcccattggcactgctgttcaatatgttacgacatttggagcaaccacagcagcagctctcaccagaaattaaaggtggagtctcgctctgtcgcccaggctggagtgcactggcgcaatctcggctcactgcaagctccgcctcccgggttcgcgccgttctcctgcctcagcctcctgagtaactgggactacaggcgcccgccaccacatctggctaattntnngtattactagtagagacggggtttcaccgtgttangcaggatggtctcgatctcctgacgtcgtgatccacccgccttggcctcccaaagtgctgggattacaggcatgagccacgccccaggcctatatatntctgaatcttaacatcatttgattatcgcttcctgtacttcacaatcttatcagatgatgtgtgctgtcagtttttacctctaagcttttaaacattttaaactgcaaacccacacttgggaaacatttttcatccacaattcagtaaaaatatttttgccatatttgcatatgttgaatatctatatggttaaaaattcatggactaacactcttattgaagtgtggtgaccactgatatttaatatcctatttcatttttcaaaatcttagtagcagcattcagtcttcccagaccat

SEQ ID NO: 191048 - DNA, 1011 bp, Homo sapiens
ggtcagaagtctggtttttaagttcacagtctgagacacatgaagtatgcaactcacagctaaccattaggaaaggaggtgaagtaatctgctggagaagggccaggaatgtaagatgagagatttaaggagagtggaagagtggcttaacaacaacaacagtaacaaagaagcattgttgaggctccattggaaactggtcatgaatgtggtagaaccaagctaccatgtcatgtgacacagaagtaaatagttgggctcaccaaacttcatgctttgtgcaggggtgttggaaccctttgaagaagtgtgtagctaatagcccatacataattcagaagaagtcttcaatggaagacccccgggggataaatggacagtctgtcaagtgggatcatggattcaaatgttctttgaaaatgaaaagtgcaacataactctaattcactttttattggaaacatctccagaaaaatgaataaacgaccatgaataaaaaattatctggccacctgcaagtctacaatacaattttaaaaatgtgaccatcacacctgcatcagcaccttgaataactctagtttatgtggttgcaagtaatggaacttaccatgagctggcataagaaaacaaaaggaaagtcttaagaaagagggcatctggggaattcagtgctggctaacccaccatggtttatacattactgggtcatccaccatgtaggaagaaaacctctgaccggtcctggatgcatcatgatcctgtgcctgatagagcaggtcgctgcagcagaaacaccacagttcccagaggagaggctgggctgaccacccaatagttggctattgggatggaccttcaaaaactcccattttgagatcattgaagcaccagtttgaaagcacatatctgatcctacctcatcattttgcagatggggagatttaacccttgatatgccatcacctataatctatttgatggaagtatctaataatgaatatataatta

SEQ ID NO: 191049 - DNA, 480 bp, Homo sapiens
ccacccgcttcagcctcctgaagtgttgggattacaggcgtgagccaccacgccctgctctatctcctttttttaagaaagagacagggtcttgctctgttgcccaggttggggtgcagtggcacaatcatagctcactgtaacctcaactcctgggctcaagcagcagtctagctaatttttatttgtattttttgtagacatggggtctcactgtattgcccaggctggtctcagactcccggactcatgctgtccttctgccttggcctcctaaagtgctgggattacaggtgtgagccgctaactggcctcagagtacattcgggagctgtcctcctttctccgtctcattgctgcccacctgaaccaacacccatggtcatcttggtcctggaccgtcatatcagttctctgcaggtgctcttgccacttccagcccatttatttctcacacagcagcaacttcctttcttctaa

SEQ ID NO: 191050 - DNA, 429 bp, Homo sapiens
tggaagaagagaaacaggaaacagaaagtgtagacagatctactgtgaagaaaagcacaaatgtggggaagagttgtttccaaagagtcttgcttaacatgaaaaaaataaacatgcttgattgctgaaggagatctagtagatgaggaaagactgaagaagccaaatagagtggggacactttctggagcaacttcctgaataggtgagagggatgcaagggctactgcaagtggagaggttgacctcactaggcatgtgggcagaacatgcagagaacagaaactaacatatgatgtagtaacagaagaaaagtgaagacgcaggttgatgggtagatgtggtttcaggagtttggagaagctctctttggattccttcaattctgccggtttaaatgggaaacaaggtgaccgtggtgaggaggtg

SEQ ID NO: 191051 - DNA, 1473 bp, Homo sapiens
aagcagtggtatcaacgcagagtgcccattacggccggggactgacttccttcgcactcagcccactcgcacccgggtgaataaacagcctttgttgctcacacttagcctgttcaagttgtctcttcaattagatgctcgcataacatttggtgccgaaagcccgggataggggaactcctccggcagacctctcctctatcctcccggtacccacgttctcccatgcaagagacttccctcgccctcaggacctcagaccagctccgcgagcactccggcctctgtctatggatatgaaatccaacaccggtcacggactcttcttggggagacagccttccttcagtgttcggtcaatgcccgggacgcccgccttggccatttgccagccacacaacccaggacctccaatggggacgcccactgaggatcctagtggttgctcttttccttgtctctttctttccccccagtctttccttgttctatcatgggcaatttcccgccttccatccctctttcttctgtctggcttgtgtcctcagaaacctcaaacctcttcaccttgcacccaatctaaaggctaaacgtctaatttttttctgtaacacgtcctggccccagtataaattagaaaatggcgctcagtggccagaaaacagcacttccaatttctctatttgtgggacttagacaacttctatggaaaaatgggcaaatgggtctgaggtaccctacttccaggcattttttacatacgatctctccctagcctatgcttccaatgtaatccatccccaattttccttatttcccttctgtctacccctccttcttccactggcgatgctgactcctcttgtctgttgacccctccgatctttctccccgaccacctatcgaacctgcttctaattctcccccagaacctatttctacccacaatccaccctcttatgcccctcccattaccacccttcctcacatcctctatggcttacagtttgggcctgcgaccaacccccaggcccctgcctagcaatttcccctcggagaggtggcaggaaccaaaggaatagttcgggttcaggtccctttctccctgttcgacctttcccaaattagtgaacatctaggctctttcccatctggacccaccaaatatatacgagaattccaatacttaacccagtcctataatcttacctggaatgacttaaatgtcatccttacctctaccctcgctcctgaggagtgagagtgggtttggatcctagctcaatcttaggctgataaccgccggtgccgtaagcctggcctccagtaaggtgctagggcagtaccctgtgaagaccccggatggacttaccaggccctgggacccaggcatagtcaggcgggactacatgatctcttgcctagttaaagggcttcagaaggctgcatataaagccgtcaattatgacaaat

SEQ ID NO: 191052 - DNA, 1714 bp, Homo sapiens
aagcagtggtatcaacgcagagtgcccattacggccggggactgacttccttcgcactcagcccactcgcacccgggtgaataaacagcctttgttgctcacacttagcctgttcaagttgtctcttcaattagatgctcgcataacatttggtgccgaaagcccgggataggggaactcctccggcagacctctcctctatcctcccggtacccacgttctcccatgcaagagacttccctcgccctcaggacctcagaccagctccgcgagcactccggcctctgtctatggatatgaaatccaacaccggtcacggactcttcttggggagacagccttccttcagtgttcggtcaatgcccgggacgcccgccttggccatttgccagccacacaacccaggacctccaatggggacgcccactgaggatcctagtggttgctcttttccttgtctctttctttccccccagtctttccttgttctatcatgggcaatttcccgccttccatccctctttcttctgtctggcttgtgtcctcagaaacctcaaacctcttcaccttgcacccaatctaaaggctaaacgtctaatttttttctgtaacacgtcctggccccagtataaattagaaaatggcgctcagtggccagaaaacagcacttccaatttctctatttgtgggacttagacaacttctatggaaaaatgggcaaatgggtctgaggtaccctacttccaggcattttttacatacgatctctccctagcctatgcttccaatgtaatccatccccaattttccttatttcccttctgtctacccctccttcttccactggcgatgctgactcctcttgtctgttgacccctccgatctttctccccgaccacctatcgaacctgcttctaattctcccccagaacctatttctacccacaatccaccctcttatgcccctcccattaccacccttcctcacatcctctatggcttacagtttgggcctgcgaccaacccccaggcccctgcctagcaatttcccctcggagaggtggcaggaaccaaaggaatagttcgggttcaggtccctttctccctgttcgacctttcccaaattagtgaacatctaggctctttcccatctggacccaccaaatatatacgagaattccaatacttaacccagtcctataatcttacctggaatgacttaaatgtcatccttacctctaccctcgctcctgaggagtgagagtgggtttggatcctagctcaatcttaggctgataaccgccggtgccgtaagcctggcctccagtaaggtgctagggcagtaccctgtgaagaccccggatggacttaccaggccctgggacccaggcatagtcaggcgggactacatgatctcttgcctagttaaagggcttcagaaggctgcatataaagccgtcaattatgacaaataaaaaacaaaaacaaaaacaaaaaaaaccactcagaacaaagataaaaatccagctcagtttatggcctgtctacctgccaccctcaggcgatatacagcactagaccctgaagggatagaaggccgccttattcttaacatgcattttattacccagtcagtttctgacagtagaaagaaacttcaaaaattagagtctggctctcagatcccacaacaggaattaatcaacctcgcctt

SEQ ID NO: 191053 - DNA, 1803 bp, Homo sapiens
  misc_feature (374)..(374): n is a, c, g, or t
aagcagtggtatcaacgcagagtgcccattacggccggggactgacttccttcgcactcagcccactcgcacccgggtgaataaacagcctttgttgctcacacttagcctgttcaagttgtctcttcaattagatgctcgcataacatttggtgccgaaagcccgggataggggaactcctccggcagacctctcctctatcctcccggtacccacgttctcccatgcaagagacttccctcgccctcaggacctcagaccagctccgcgagcactccggcctctgtctatggatatggtaagctgcctcggtctctcctcatctctccctctctttttctcttttcaaaattgagacaaagaaccttcctcntatccgtgtttcagaaatccaacaccggtcacggactcttcttggggagacagccttccttcagtgttcggtcaatgcccgggacgcccgccttggccatttgccagccacacaacccaggacctccaatggggacgcccactgaggatcctagtggttgctcttttccttgtctctttctttccccccagtctttccttgttctatcatgggcaatttcccgccttccatccctctttcttctgtctggcttgtgtcctcagaaacctcaaacctcttcaccttgcacccaatctaaaggctaaacgtctaatttttttctgtaacacgtcctggccccagtataaattagaaaatggcgctcagtggccagaaaacagcacttccaatttctctatttgtgggacttagacaacttctatggaaaaatgggcaaatgggtctgaggtaccctacttccaggcattttttacatacgatctctccctagcctatgcttccaatgtaatccatccccaattttccttatttcccttctgtctacccctccttcttccactggcgatgctgactcctcttgtctgttgacccctccgatctttctccccgaccacctatcgaacctgcttctaattctcccccagaacctatttctacccacaatccaccctcttatgcccctcccattaccacccttcctcacatcctctatggcttacagtttgggcctgcgaccaacccccaggcccctgcctagcaatttcccctcggagaggtggcaggaaccaaaggaatagttcgggttcaggtccctttctccctgttcgacctttcccaaattagtgaacatctaggctctttcccatctggacccaccaaatatatacgagaattccaatacttaacccagtcctataatcttacctggaatgacttaaatgtcatccttacctctaccctcgctcctgaggagtgagagtgggtttggatcctagctcaatcttaggctgataaccgccggtgccgtaagcctggcctccagtaaggtgctagggcagtaccctgtgaagaccccggatggacttaccaggccctgggacccaggcatagtcaggcgggactacatgatctcttgcctagttaaagggcttcagaaggctgcatataaagccgtcaattatgacaaataaaaaacaaaaacaaaaacaaaaaaaaccactcagaacaaagataaaaatccagctcagtttatggcctgtctacctgccaccctcaggcgatatacagcactagaccctgaagggatagaaggccgccttattcttaacatgcattttattacccagtcagtttctgacagtagaaagaaacttcaaaaattagagtctggctctcagatcccacaacaggaattaatcaacctcgcctt

SEQ ID NO: 191054 - DNA, 1238 bp, Homo sapiens
aagcagtggtatcaacgcagagtgcccattacggccggggactgacttccttcgcactcagcccactcgcacccgggtgaataaacagcctttgttgctcacacttagcctgttcaagttgtctcttcaattagatgctcgcataacatttggtgccgaaagcccgggataggggaactcctccggcagacctctcctctatcctcccggtacccacgttctcccatgcaagagacttccctcgccctcaggacctcagaccagctccgcgagcactccggcctctgtctatggatatggtgttcaataatagggaagagactgcccggcgacagcgcatttcagaactacagatgcttgcctccgccataagacaaaccccagctgcactgcctacctgcaagaacttcaaggcatctaaacgcaacatccaacagcccctctgggactttgcttcaagcgatgaaaacctggccactgggccaaggaatgcctgcagcctgggattcctcctaagccatgccccgcctgtgcgggccctcactggaagtctgactgcccgactctcatcgccacttccggagctcctggagctcaaacccaaagctccccaccgactccttcccagatctcctcggcttggcggctgaagactgacgctgcccgaacgtctcggaggccccttagacaatcgcggatgccgagcttcgggtaactcttagggtggaggcataaaaagacaggaatgttaggtcctctgagcaggcggcgccatggtcaagccatcgtgacccctgtgactcacacgtacacatccagaaggtctcctggagccagaaagtctgggacgacaggaaaaccacaaaagaagaaaaacggctagttcctgtcttagctgatcagccaaccttgtgacattctatcattgtaacaggctgtaccctaactgatcaatcaacctcatgacactgtgctctgtaaccttatgataatgtaccttatgacattcttcccctgccctcaataaacagctccgaactataaaaaagaaaaaaaaataaaaaaaaactttttgggggcgccgggcccagaaaaattttaaaacctctgtttgggcgcgcggcccgagtatggactcggcaaggcgggccaggaaaccgggcgactgggggggtcccccaaaaaagccggggacggctttgaaaccaggggccgggctcgggtcccaggcccggcga

SEQ ID NO: 191055 - DNA, 802 bp, Homo sapiens
gaactgataaaactagctccaacccaccaccctccactgacttccttcgcactcagcccactcgcacccgggtgaataaacagcctttgttgctcacacttagcctgttcaagttgtctcttcaattagatgctcgcataacatttggtgccgaaagcccgggataggggaactcctccggcagacctctcctctatcctcccggtacccacgttctcccatgcaagagacttccctcgccctcaggacctcagaccagctccgcgagcactccggcctctgtctatggatatgcataaaaagacaggaatgttaggtcctctgagcaggcggcgccatggtcaagccatcgtgacccctgtgactcacacgtacacatccagaaggtctcctggagccagaaagtctgggacgacaggaaaaccacaaaagaagaaaaacggctagttcctgtcttagctgatcagccaaccttgtgacattctatcattgtaacaggctgtaccctaactgatcaatcaacctcatgacactgtgctctgtaaccttatgataatgtaccttatgacattcttcccctgccctcaataaacagctccgaactataaaaaagaaaaaaaaataaaaaaaaactttttgggggcgccgggcccagaaaaattttaaaacctctgtttgggcgcgcggcccgagtatggactcggcaaggcgggccaggaaaccgggcgactgggggggtcccccaaaaaagccggggacggctttgaaaccaggggccgggctcgggtcccaggcccggcga

SEQ ID NO: 191056 - DNA, 1240 bp, Homo sapiens
  misc_feature (878)..(878): n is a, c, g, or t
  misc_feature (906)..(907): n is a, c, g, or t
  misc_feature (964)..(964): n is a, c, g, or t
  misc_feature (1011)..(1011): n is a, c, g, or t
  misc_feature (1025)..(1025): n is a, c, g, or t
aagcagtggtatcaacgcagagtgcccattacggccggggactgacttccttcgcactcagcccactcgcacccgggtgaataaacagcctttgttgctcacacttagcctgttcaagttgtctcttcaattagatgctcgcataacatttggtgccgaaagcccgggataggggaactcctccggcagacctctcctctatcctcccggtacccacgttctcccatgcaagagacttccctcgccctcaggacctcagaccagctccgcgagcactccggcctctgtctatggatatggtgttcaataatagggaagagactgcccggcgacagcgcatttcagaactacagatgcttgcctccgccataagacaaaccccagctgcactgcctacctgcaagaacttcaaggcatctaaacgcaacatccaacagcccctctgggactttgcttcaagcgatgaaaacctggccactgggccaaggaatgcctgcagcctgggattcctcctaagccatgccccgcctgtgcgggccctcactggaagtctgactgcccgactctcatcgccacttccggagctcctggagctcaaacccaaagctccccaccgactccttcccagatctcctcggcttggcggctgaagactgacgctgcccgaacgtctcggaggccccttagacaatcgcggatgccgagcttcgggctagacataaaatctgccaagctgccaatttcctgttacctactccagagacccagtgatatgaagacaccctagctggactgtcagttctcgttaagaacctaacccctcaaactctacaacctctgtggacaggatcctacctggtcatctatagtaccccaanagtggtcagtctacagaatcctccccannggattcatcgctccaggataaaatatgcccatctgacgaccagcctagctcctccanctcctcctggaagtcacaagtactctctcctacttcccttaaattanccgattcctgaaanagaacaataaccctgtataccttttatttacagtagacctttacacagttcaccccactatgtaaagctctgttctactttatgcccctgatcaccattctcaactaggtctaaatggccctgcgtttggtctaatacggcagtcaaggtttcttcagaccatgggagtgaactcatggggtccctccagtgtggacttaatctttctaagtggg

SEQ ID NO: 191057 - DNA, 1258 bp, Homo sapiens
  misc_feature (896)..(896): n is a, c, g, or t
  misc_feature (924)..(925): n is a, c, g, or t
  misc_feature (982)..(982): n is a, c, g, or t
  misc_feature (1029)..(1029): n is a, c, g, or t
  misc_feature (1043)..(1043): n is a, c, g, or t
aagcagtggtatcaacgcagagtgcccattacggccggggactgacttccttcgcactcagcccactcgcacccgggtgaataaacagcctttgttgctcacacttagcctgttcaagttgtctcttcaattagatgctcgcataacatttggtgccgaaagcccgggataggggaactcctccggcagacctctcctctatcctcccggtacccacgttctcccatgcaagagacttccctcgccctcaggacctcagaccagctccgcgagcactccggcctctgtctatggatatggtgttcaataatagggaagagactgcccggcgacagcgcatttcagaactacagatgcttgcctccgccataagacaaaccccagctgcactgcctacctgcaagaacttcaaggcatctaaacgcaacatccaacagcccctctgggactttgcttcaagcgatgaaaacctggccactgggccaaggaatgcctgcagcctgggattcctcctaagccatgccccgcctgtgcgggccctcactggaagtctgactgcccgactctcatcgccacttccggagctcctggagctcaaacccaaagctccccaccgactccttcccagatctcctcggcttggcggctgaagactgacgctgcccgaacgtctcggaggccccttagacaatcgcggatgccgagcttcgggtaactcttagggtggaggctagacataaaatctgccaagctgccaatttcctgttacctactccagagacccagtgatatgaagacaccctagctggactgtcagttctcgttaagaacctaacccctcaaactctacaacctctgtggacaggatcctacctggtcatctatagtaccccaanagtggtcagtctacagaatcctccccannggattcatcgctccaggataaaatatgcccatctgacgaccagcctagctcctccanctcctcctggaagtcacaagtactctctcctacttcccttaaattanccgattcctgaaanagaacaataaccctgtataccttttatttacagtagacctttacacagttcaccccactatgtaaagctctgttctactttatgcccctgatcaccattctcaactaggtctaaatggccctgcgtttggtctaatacggcagtcaaggtttcttcagaccatgggagtgaactcatggggtccctccagtgtggacttaatctttctaagtggg

SEQ ID NO: 191058 - DNA, 118 bp, Homo sapiens
tcattttatgggcatgattttaaacaacattatgtgtagggtgcaccagagatttaacagaacagagaaagaacatgctactttaaaaaggaaggatgaatattttaaggttcaacaa

SEQ ID NO: 191059 - DNA, 547 bp, Homo sapiens
ttgaacttctgggctcaagcaatcctcccaccttggcctcccaaagtgctgagattacaggcatgagctactgcacccagccaaatttccctaaaactttaatgttttattcaaaattttaggtcagaagttccttctttcaaggaatttacagataagtcacggaagacatatgaatcaaactatagttagtgaaatacacttccagcagtctggcaaacactatctgaataacccttccagggttgagaaatgggaacaattacacactgttggtgggaatgcaaattagttcagcctatgtggaaagctgtttggagatttctcaaagagctaaaaatggaattattatttacccagcaatcccatactgggtatatactcagaggaaaataaatcgttctaccaaaaagacacctgcactcatgtttaccacaacaccattcacaatagcaaaggcatggaatcaacccaggtacccatcaatggtggactagataaagaaaatgtggtacatatacaccacggaatactatacagccattaa

SEQ ID NO: 191060 - DNA, 877 bp, Homo sapiens
aaaacctacaaaatacagtttattctataaaataagcagaagcaccaacttaaaaaattagcaaagaaaaaaatacagatttatcacagtgccttgcaaacagcagatgttccagaaacatctgcagatttaaaaatcagattttttggtaaaaagctgaatctttattaagattcttatcaaaatgatctcctttagcagtactttaaacatacacttctacacatagaaatataacaaagtataatcaacaaacacttttactacattcttctaaacccaggatgtttttcttccatgtttgtatggtgccaccaaaatttcagaactctgatcaatcaaaagattttaggcaaaaagctgaaatctttactgtttcttaatacttgaaatagtctccaacagcagtaaggcatacttcaaatatatatttttatacacaaaaatacaacaaagtataataaacattttttactatattcatataagccccattttttattttccccttccctgttcgtctgcatactgtggccaaatgtcagtacgctaaatgatttttttttttttttttttgagacagagtctcactcgatcccccaagctggcctacagtggtacgatctcagctcactgcaacctctgcctccagggttcaagagattctcctgcctcaccctcctgagtagctgggattatgggcacatgtcaccacgcctgacttctttgtatttttagaagagacagggtttcggtatgttggccaggctggtcttgaaatcccgacatcaagtgatctgcccgccccggtctcccaaaagtgctgggattacaggcgtgaaccaccgcacctggcctgctaaatgatttttttttt

SEQ ID NO: 191061 - DNA, 352 bp, Homo sapiens
ggcaaccccagactagctaacgtttgatggctaagtcaagcaacaatggaaagtttccatttgccatgtattggctgtgtgactttggacaagtcatttctcctctcagtgactcatttctttgtcttaaagtaagggtaatattacccatagggttactgtgagttctaagtaaatgaatggaatccaagtacttagagcggcagctggtgacagctgctacagagtaagtaatacataggctgcaattattactatcatttttttattttcctaaagaattgttctgaagattactattgttgttatgtgttgctgttttttctcaatctctgaatgattttataagaaa

SEQ ID NO: 191062 - DNA, 308 bp, Homo sapiens
tcttcacagtagcaataatgatttactcattcaaaacatattttatcagcacttaaatatgcaccaagcatcaacctaggtattgaaggtatagcagtaaacacattagacaaataaaaacaaaaaatccatccctattggagcctacattctagcgaaagagagacaaataagtaaatacttaatgtgctacaaaactaaaaatcctacagagaaaaaaaaataaagcagagaagggagacagggccaatttgtgtgggtgggttaaatgaaaaaggatttcactgaggtgcattaaagcaaaaacc

SEQ ID NO: 191063 - DNA, 593 bp, Homo sapiens
tgcaagtattgaggaatgctctcacccttgagaatgggagactttggtgagagcttaggcccagagaaggcagcaaaggcccgagacagaagcccagggaccactcaaatgtggaggtggggagtgaagccagagagtgggacaccagcaggtgagcctgagaattctcataaaggctgtgcagcctgtgagccagaggtcaccctgaggccaaggggaattttaaaaaaacctaggagtaggtactgtgggggcctctctggaagtgtgaggagagaggtggttagaacacaggtgggcactcaagaatggaatggagggtcttggaaatgggaattctttccctcttagctacactgctcctgcccctggctctgcctggacaccttcccttccacagctctctctagctcacccatgctgctctcaacccgaaattctcgttgcctgtccactgactcatgacttgtgtgccacgaaaagagtctcagaggagggccgggcatggtggctcatgcctgtaatcctagcactttgggaggccgaggcgggccgatcaccttaggtcaggggttcgagaccagcctggctaa

SEQ ID NO: 191064 - DNA, 307 bp, Homo sapiens
catgttaacagtgattgtaactgaattgtgagaccacaggtgattttgttttctcctgtaggcttttctatattctctaaacttttttcagtcaatatatactactataaccagataaattaacagtaattgtgaaaaatatggcatccaaaactgtaaagaaatatgtttattgcaaggcaattaaaaacaagatcccaagtttaaactttcatatgctgtctcattgagctgcacatggaaaacacaactacaacaacagaaaatcttctgtgttaaaagtaagaaaatcttgtctcactgataa

SEQ ID NO: 191065 - DNA, 302 bp, Homo sapiens
tgctgggattataggcatgagccacagcacccagcttattgcgaagtttattgcttacctatgtggcaggaaaataattgacctcccaaagatgtccacacactcatctctggaatatgtgaacatgtgaacttacatgaaaaatggaaattaagaccacatttggaattaaagttgttaactcactttgaaatagggagattatcctggattatccagatggggctaatcacaagatcttaaaagtggaagaggggggcagaagagaaagaaccaaagagatggcagcgtgagaaggcctc

SEQ ID NO: 191066 - DNA, 181 bp, Homo sapiens
tccaaggtagatcatatcataggctacaaaacaagcctcaataaatttaataaaattgaaattatatcaagcactctctcagaccatagtggaaaaaaactggaaatcaactccaaaaggaaacttcaaaaccatgcaaacacatagaaattaaataacctgctcctgaatgatcactggg

SEQ ID NO: 191067 - DNA, 337 bp, Homo sapiens
ttataagataatgtcgaagctattaaaaattaagtgaagaaaagatagtgaaaattcatggttaataaactatctgttatttgtggttgtttggttttaacttctgctaaccacagtcttatactttagaagtcagatcttaaaaattatacagcctaaagatgacacttacatggcatgtacaccaatggccccacactgtaggccaagctatgcattactaaccaatgaaaacaatctctcttgagcctggtaggtagccaacatcaaccaactggagtaaatactcatttcccatccctaaaaaggctgaatattgaatttccaaatcaaagaa

SEQ ID NO: 191068 - DNA, 180 bp, Homo sapiens
tataactttttgcagtagtgccctcaaatacataaattatatgcatacatatggatgtgttaactactgttataaatatgagccacttattacagaaaatatgtcaatttgccttcattgtttctggtcacaatctgtatcttgggataatacaggatatgaaccaaatgtttcaaagtc

SEQ ID NO: 191069 - DNA, 340 bp, Homo sapiens
tggaagccgggcacgctggctcatgcctataatcccagcaccttgggtttgggaatggggtaatcgtgacgaggtatctgtcaccccactgggatcatgtctaagtcccatggagtacagaagtgccacaaataaaactaatctaagaggtgcccagattttgttttcttaacaccatctctactgaaagaaaccagagctccctggagaaatggttgattccatggctggggcaggaaacgtgcaaagtgatcctggaaacccgtgtgccagaaagttagtaagtgttttaaacagtgatggaagccgggcacggtggctcatgcctataatcccagca

SEQ ID NO: 191070 - DNA, 392 bp, Homo sapiens
aagccaagaacaaggaggttgtctattctccaaaccggctgacctttggggctcattttctaggtagaaatcattttcaaatggagatacactctggggattctttcccccagcaaaactcttccccttatttcactgaagctttttacagaggatgtctttttgatacttaaataacaagccagaaaatctaattgagcaatgcctcatttatccagcaccatcaggaaaagaatgagatattttatataaaaaggacattttgagaagaagctgaatcctctaaattatactttttgatggaaagctttctaaaagtatgccctttgctgccttcatggaatactgaatatacattcaaccttttttttctctctctcaggatattagta

SEQ ID NO: 191071 - DNA, 459 bp, Homo sapiens
gagagcatattatgaatctaggaataaagctaccaacttcaggcaagacagttaagacaaatggagagcaataaaataagctatgcagcacagtcaacagggacacagtctttagacattattatcagaatacacatgtaaaagggaaaattctccaaatgtatttgaccatgactgtaaaagaagagagaagaaaagggggagcagagagagaactaagctcttggaggagaatgataaatgcaatggctctatgaaactactggaaatcagaagagctaaaaaaacaaacaaacaaaaaaaagaggacttaaagtgtgaacaattcaaatataaattattagttatagcaatgttaatagtaacactagtattaacagcagtggttgtgccttacatgactcttttctatacacttgcaaccatgatgggtgcataggcaccattatcatccccagt

SEQ ID NO: 191072 - DNA, 450 bp, Homo sapiens
ctatgtacggatttggtccaatgcctcagcctgacctcagggaccttcgggggtctgctccgcgcccacccttacacatctgtgaccccacacacttccaccccagcgccactgccaacagctacacccatccccgtggaccagctcggccccggtgctcggcgggaggtgacgctacccctggggcctggtgagaacggcgggctcgacctgcccgtgaccgtgtcctgcacgctgttctacagtctcagggaggtggtgggcggggcccttgccccctcagactctgaggacccctttctggatgagtgcccctccgacgtcctgcccgagcaagagggtgtttgcctgcccctgagcaggcacacagtggacatgctgcagtgtctgcgcttccctggcctggccccgcacacacacgggccccctcacactcggccccacccgaga

SEQ ID NO: 191073 - DNA, 287 bp, Homo sapiens
ctatgtacggatttggtccaatgcctcagcctgacctcagggaccttcgggggtctgctccgcgcccacccttacacatctgtgaccccacacacttccaccccagcgccactgccaacagctacacccatccccctccaaccgcgtcagcttccagcctcggtccatctgaactcgccgtgccccctcccctgcgcccttccagattcatttgctagggaagcccgctcttccgggtggagctgttcctcatcccctttctttatcattctctccccagggcttcc

SEQ ID NO: 191074 - DNA, 304 bp, Homo sapiens
ggggaggataggacagagaaaaggtatgaatgagtgtcatatatcaaggagaatttggggaaacagagcattagggaaggaatagatggaagagaggcatgcttgtaataaattataggaaagagaagagtttgaaaaagagataagagttcacacaattgtggaaagaatggagtggagtatatgtaaacagaaaagaagctgtatggaatgaggtggatggagggacagaataatgaggaggagatgtggatgggcagaagacagtaagcaaatggaagagaagcaagaggaaggagagagt

SEQ ID NO: 191075 - DNA, 453 bp, Homo sapiens
gcagttcttgcattgctataaagaaatacctgaggctgggtaatttataaagaaaagatgcttaattggctcacggttctgcaggctgtacaggaagcatggtgctggcatcagcttctggtgaggcctcaggaagcttataatcttagcagaaggtgaagtgggagcaagaggaaggggaggtgccacacacctttaaacaaccaggtcttaggagagcttctatctctaggacagcaccaagaggatggtgtaaaaccattcatgagaaatgcaccccatgattcaatcacctcctagcaggccccacctccaccaggcctcactcccagtaggccccacctccaacattgggaattacatttcaacataagatttgggggacaaatatccaaaccatattgcttgcctaatgctgttgaaaaatctcatgttgaaatagtgccacaaatg

SEQ ID NO: 191076 - DNA, 233 bp, Homo sapiens
gcccctggttagcacaatgagtggcatatacatttttataaacatttgctattattttgtgctgaagtctaaaaaaaaacatggaagaaaaagtagaattattatgtaatcatcttttcttggttgttttgtgtgtgtgtgtgtgtgtgtgtgtgtgtgtgtgtgtgtgtgtgtgtgtagaaattgaacgggtcagcgcagctcgcaatgcgtacatctatggaccatcagct

SEQ ID NO: 191077 - DNA, 526 bp, Homo sapiens
ccaccatggcacatgtatacctatgtaacaaacctgcacgttctgcacatgtaccccagaacttaaacaaacctaaaacttaaaaagacatacaactttaaaaatacttaaaacaaaaaaacataaaaagaatgactgcctatggagagggcagaggaacagaagtggagaatagggatgaaaatgaatgaatgaataagagagggtcttgcatacaattgatagtggagtgccatgaatttaagattaagcaatgctctgcacctgaagtagaaaacaaagttgccagaaaaatagttacttggtggcaatgagatacaattcaaagaatgctttgtgggttatgaaatactaaaataatacctgccccaaatccaagttagtttgcagtaataggaacaaaatcatgggagagatggtgaaacaagacccagagctagtatcaggtactagataaagcaggaggtgttgtcaaaattccatggcaattttatgtgaatcttgctgatttatttgccagctatat

SEQ ID NO: 191078 - DNA, 197 bp, Homo sapiens
tgtctctatttagaaaataaaataaaagatggtatgtgtttatccacgcatgtgtgattgtatgaaaaagcgggcgtgtgcagtttctttcaagaagaccatgtgaaaacaagaatctaaaagtagtgaggggaataggacctcttaactttcaaagataccatcaaagtattcttttttttttttttttttttttg

SEQ ID NO: 191079 - DNA, 246 bp, Homo sapiens
cctgccccgcctatgtgttattctgagttttatagttttaattcttatatttaggactttgatccattttgagtcaatttttgtatatgatgtaaagtagggggtccagctttattcttttgctgttggtccagttgtcctagcagcttattgaaaaaactgttcttttctcctctgtaatttttttttaaccatattgaaataggaaaaacaatcaggcaaaatcagtgggagaaaggaaaaagg

SEQ ID NO: 191080 - DNA, 413 bp, Homo sapiens
ttgtgcatccttgtgattaagatggcctacatttgaaagatttggccctttgtctgggtctaaatctgtgcatacctctgttttcctgtggcctgagaaacttctcttctggtgcttctgattctgtcttcctcatgtgccccagagagaaattgtttgctagaggtgagtgtgtgacgctagtagtcgctcactctcagggcgccagtattgcctgggctgtgtgatctggggatgaaaagcagaagatgcttccatttgggagagtcctgtgactatcagtagcagaaggagctattggttgtcttgagaagaggccacattagcctcagcccaaattatctcagtttcgtggttgaagaaattgaagcacagagaggctaagtcatttgcccagcatcacacagttggaa

SEQ ID NO: 191081 - DNA, 292 bp, Homo sapiens
attcaacatcaatgtcttacctaataataaatcaaaatggccacactgtgcctcttttgtacatgatcttactctaatgcttcattgagcatcactctctggttttcttcttccttcctttttttttttttttttttttgggaaaatttttttggtgggccccccaggttgaaaggggggggggggatttttgtctatgggggtttttttttaaagggggtgaaaaagggggtttttttaagggggccctgggggattgaaattttggaatgggccggttttttaaaggggg

SEQ ID NO: 191082 - DNA, 159 bp, Homo sapiens
tacatctggggacatcatagtaaaaaaaaaatgaaaaggcaagagtagttagagaaaaaagattactttcaaagaagcagcaattgattgagaaccgattccaaacagaaatgaagaaaaccaggagacaatgagacgacagctcacccatgctgaaag

SEQ ID NO: 191083 - DNA, 382 bp, Homo sapiens
tcagtactgtggtgcagtattagcccaaatctgtgtaatgggtaatattagcattacagaagacacacacatcacatagaccctcagaagacgtaaacatcacatagaccctatttgtgcatcattttcaagtttaaaacaaatatttgtaatgaacagaaaacaatttgtaattaattatattacctatataatacttgtaaatgttttcttaaccatttatatttggcttatgacatttaacccctaaggagttgtttttctcacttgttattatcaaacctaatggtttttaattttggtacaactccttaaagggttgaaggttgtgacaataactgagggaactgatgttctgaataaatgatgtgaagtaaacaca

SEQ ID NO: 191084 - DNA, 290 bp, Homo sapiens
gggtgaagggagatttgaacttggcgcctgacacaattatcctaaagtaggaaagcctcagttggaagaggatgagtttctttaaatagcccaaaggctgtgatgcgtaaaaaaggacttgacttattctggatagctccagagggcaaaactagcaagtggccagcaggaacacacatactcagagtagagcagagcttgctaataattaggactgcctcatccatagcaaggaacactcagaggctcatctcctctgaactacttccagctgggactcccgacgccca

SEQ ID NO: 191085 - DNA, 279 bp, Homo sapiens
ccttggcttcccaaattgttccgattacatgtgtgagccaccatgcctgaccaaaagtgcatatttattgtatacaacatgttgttttgaaatatggatatgttgtggaatggctaatttgagctaattcacatatgcattacctcacatacttactaattttattgtgagaacacttaaattctcctctcagcagttttcaagaatactatacgtcgttattaggatgtaaactgtgacaccaaatttagaattgggggtggaatgggcagagcagaa

SEQ ID NO: 191086 - DNA, 284 bp, Homo sapiens
cttaagtgatccacctaccttggcctcccagagtgctgggattacaagcatgagccactgtgcctggctaagaataattctgtgaacattcttgtacacatcttttgatagacatatgtactcatttcttgggtatataacctaggaatggaattgctaagtcattgcgtagacatgtgaccaatcagcttcagtaaatcatgccaattttccaatctacactttcccagagttgactccccatcattcggcatttcccatctttttcactgcagccattctgg

SEQ ID NO: 191087 - DNA, 523 bp, Homo sapiens
tcatgctgtagactcctggaagtggtctcagagattcagagatgcccgggggttagtgggtcacactttgagaaccattggaacagattatagttcacataaaactgatcgaatctaaaatgagttctttttgagacagtagctctgtaattctgtagtatgtggtagctgagcagatggcctacaaggaggaagactcttgactaaggatcaaatgttatgtgttgaaatgccattttcacttgaaaaattgtattgttcctcctgtatgtcatcacatggtagatgatactaaccatcagtgtgaggagaggggagctgcagcaggagctcaggcagatataattggaaggacccaggaagtttccatgacagacctgacttagttgattcggagccagtgcccaatccctacacctggcaggcattagaaatgccaggagccactgggaggaaagaagggcctgatatctggcattttaggtggcctgaggcaagagggagcttgagcagaggttgttgg

SEQ ID NO: 191088 - DNA, 284 bp, Homo sapiens
cctgtgagcatatagactggttctgggtattgcaaaatgtatcgtggcccggaagtggagtggcttgtcaagtttttctttattagctaaaggacaggaattgacagggaaataatacaattaatggagaagagtgaagcatgtaagtagggaaagacagaaatgtggtctcagcttcttgaaacacagtcttctctgtagaaatctagattactgtaggttgagacttttaagtttactacagggtctctaagagtcagttattagaagttaacattgactgg

SEQ ID NO: 191089 - DNA, 177 bp, Homo sapiens
agcactgggacagaggccatctgcttgtgaaagcagcttctaagaaaacatacctgttcccctatcccttcctgctccttcccacaggtcacttgccttaatggtgtttgccaagagagccatacctttgccttttctcattgcatttgtttatctgtttcaaattctgtatgcaag

SEQ ID NO: 191090 - DNA, 777 bp, Homo sapiens
agacctacgctttttccatcctgtgtttctgccatctgcagatgtgacttccaggggctctgcaggatgggaacatcaatttgctttgttttattttttttccaggccagaaataagtcacttggcccagcctgaatatcaggggaggctgggaaacggagtttagctatgtgtctagaggaaaaattaaactagttgggtaagaggtagcattgtttttgccacagagaaatgggtgctgctgcctcctccttaggcagagagctccttggttccatttgaaaaccttccttccccttttgctggaattgagagactgaggacacaaagtggtgtgctggagaataaactagagcctatggtgccagactggcaacttggggattgtgtgagtgagggagagattgtgcagagctaatcctaacattgctgatgagtggacagaaaccataggcctcatgaatagtgatttctgaagtcaaagcccagtatgcttaaatatcaacccaagtggtttgggagaggggagcacagcttactgttctgctaaaattctttgaggaattaagtaagaatacgtgtaaggtacgtagcaatggttatttacaaaatggactctgcctgcagattattagtatgtctcagatgtaaaaccagctcaaaagtactaggacgatttgtagtagtatttaattatttgtaaacttacacgtttttcttcacgtttgcagaatacaaatctttgtcagtagtgaaatgtgaatctagtaggattaa

SEQ ID NO: 191091 - DNA, 439 bp, Homo sapiens
tgggcataaaatggaaaacatgtactggaaaattaagtgttatactgaacagatcccttctaataaatttagaagtactgaacagatcctgacactttagacttaggtggcaaagaaaattatatctagatactatcactaaaccttaaaacttaacaacagttttaatatattccatgttatacatgatggatattagaatattcttgttgcagatggttacccagctatggcagaggaactatctctaatacttatatatactctggaaaagaaaataaaagtagagcttcagtttcctgaagaacatccagtaaaacctaatggagaaaccagcccctcttaagttttaacaagggtaatctaggtatttatttttttaattatcaaaacaaacaaaaaatataacccaatgtagaacttactcaacctgataaaa

SEQ ID NO: 191092 - DNA, 514 bp, Homo sapiens
atactcacactctctatcatcctccccatctcttagctctatacctgaccctctagccctaggcaaacactaatctaagttctgtctctacagatttgcttattctggacaattcacataaatggaatgatacaatattccattttgtaatatagagtattgtatgattccatattacaaatatggaaactgtacttctttgatataatgagaaccaggcatggtggctcgcacctgtaatcccagacactcggggggaggctgagcagcgaggatcacttaaggccaggagttcaagaccagcctgggtaatacagcaagacccacctccaaaaacaaatttaaaaaaagaaaaggccaggcatggtggcatgtgcctgtagttccagtgtcttgagatgctgaagcaggaagataacatgagcccaggagtttgaggctacagtgaactgtgatagcaccactgcattccaacacatgcaacacagcgaaacccggctcttaaaaaaaaaaa

SEQ ID NO: 191093 - DNA, 411 bp, Homo sapiens
acaaatatgaatgataaaggctgttctttatcatccataaagaggtttagatgggaatgagaaacatgttccaagaaatcgaatgaaaggtgacccttattataaagtggcaaagaatttcactgaattgtgttcatgtcctagcgttttgtagcaggacggacttacaagcaatgaaatagggtatttggtggaagaactatctaagcaaagcatcgagggtgcagcatggcttctcttgactgcttatagtacgatgcaagtcaggaaaaatgaattaaagacagaattcgtcatccaaatggaggcagaacttaacgatttggaaacttcagcctgcgagcaagaaaaaaaaaacaacgggaaaatatgttcaggagagaacaataagggtgtattcaagtgaatgtt

SEQ ID NO: 191094 - DNA, 134 bp, Homo sapiens
aagtgggttaagagccttggaaagagaaaagaaggccggtgaagtggctcttgagtgctctcagccgggctgacagccctcaggccttgtcaccatccccacagctgcatggaaacagtgccacggcagctggg

SEQ ID NO: 191095 - DNA, 589 bp, Homo sapiens
aatggttagaggccaggaatgctgctaaacaaactgcaatgcacgaaacagactcctgtaacaaagaattttctggcccaaatatcaatagtgctcaagttgagaaactctgacctagaacagctattctcaatcttgagcaatgagcaccacctagaaaacattaaatcacagattgctgagttccatccccagtatttctgactcagtatgtcttgggtggagcctagaatttgcacttctaagaagcttcctgatgatgttaatgctacttgtctgagaaccacattttgtgaatcataatcttgacctaaattactttgatataaacattcagaaaattcaacacttctccttacctacagtatatcctatctataatcataaatgtaatgtctgtcttctcttccagattcttaattccattagagtaaaatctgtccaattcagcactgcatattcacgttaacaggcactcaaatatcgaatgaataaaaaacttccaaatctaaatgtttggaattctgctacagtgtttcacagtccatgagttgtttatctctgaagcatttcccttaccaagtgacaa

SEQ ID NO: 191096 - DNA, 816 bp, Homo sapiens
tgtgtgaatgttttgtttcccttgaaatacttctatggaaaagaaaatcttaaaagcatttcagttgtctacatccaagggggaaggacaaatcaaaagcaaatgtccttcagggatgctcagagatcttaacacatttaactccacttagaaggacataaatgttctgtgcaaagactgttgaggggttcgtgtaaatgtgattttaatgggatatacgtagtcagcatagttgtatgaactgtatatatctccttatatatgttgggcgtttagtgaatatttggtactgtagtttcattatgataatacttgggtatcaaagcagttttcagcatatgttagtactctgaacactaaaatagacatacttctggtataatttagaaagcttttctttaagaagggctgaaacttctcttttcaaccagattaaaaaaaaatatgtaagtgtaatatcccattccatgatcattccacttaatatgcttttcactcttgagagtgcaccttggtaagaggcccataatcttccctccagagtggagattttccactagataagacatggagaaaaagagcggatatttacaaatctgtttattgcagcagaatgtctgggctaccagttccccccagtagcattattaagctttcaccacataagcttattgattgattaaacaaatttagcctttctttacatctcgttggctggatttgaaacctgggtgcttttgtttttacttcagtagtggtttaaagaagggcgacattttctttggtgcttctgagtcctctgatagctccgcctaa

SEQ ID NO: 191097 - DNA, 382 bp, Homo sapiens
gtggtgagataatgaggcataagacaagaagcggagactaaggaggaccaacatttaaggaacaggtggaggaacagggatgggccagtgaaggaaaccaaaagggagtagtcagagtgtcgggaaaaacaaaaccaaacagaagagctgagggactggtcaatagggccagatgcagcacaaaaatcaagctgcatcagaaccgaaaactgcccgttaggttttcttgcaacatggtggcctaaggacttgggctaaacttcctcctgaaaacaactttaaatactagactctatctatctttaaaattaaatgcatccataagctagcaaaaatgtaagaaacacactgaggccaaaaaagtaaatgaaagcaagaagct

SEQ ID NO: 191098 - DNA, 383 bp, Homo sapiens
  misc_feature (357)..(359): n is a, c, g, or t
caccagtatgcgcatcctgccagaggccacacgggattggaggcagtggggggaaggtcacatgaacaagcaagcaggtgaacaggtgaatgagtgagcaggtaggtgtgcaggtgagcaggtgaatgcgtgagcaagtgagtatgcagatgagcaggtgaatgagcaggtgggtgtgcaggtgagcaggtgaatgagtgagcaggtaagtgagcaagtgggtgtagaaggcagtgtgcaggtgggtgtgcaggtgagtacgtgagtgtgcaggtgggtgggcaggtgagtgtgcaggtgggtgtgcaggtgagtgagcaggtaactaggatttttcttgtcttcagccagctccannncccttatcctcgtccacccatatt

SEQ ID NO: 191099 - DNA, 519 bp, Homo sapiens
  misc_feature (493)..(495): n is a, c, g, or t
caccagtatgcgcatcctgccagaggccacacgggattggaggcagtggggggaaggtcacatgaacaagcaagcaggtgaacaggtgaatgagtgagcaggtaggtgtgcaggtgagcaggtgaatgcgtgagcaagtgagtatgcagatgagcaggtgaatgagcaggtgggtgtgcaggtgagcaggtgaatgagtgagcaggtaagtgagcaagtgggtgtagaaggcagtgtgcaggtgggtgtgcaggtgagtacgtgagtgtgcaggtgggtgggcaggtgagtgtgcaggtgggtgtgcaggtgagtgagcagggtgggtgagaggtgagtgtgcaggtgggtgagaggtgggtgtgcaggtgggtgagaggtgagtgtgcaggtgggtgagcaggtgggtgggcagatgggtgagcaggtgagtgagcaagtgagtaagcatgcagcagtaactaggatttttcttgtcttcagccagctccannncccttatcctcgtccacccatatt

SEQ ID NO: 191100 - DNA, 404 bp, Homo sapiens
atttctagttctcagtaagtgaaagagtcaggggactttgagaacatccaaacctagcccagctgtggcagttggtttattgctttcagctggtacttgaacccaggtcctggtcttggaggctttcccaggtttaatccccagagctttctctgcagctgtatgacactgcgctgaccccgaatgaggataggaaaatagaaccagtgccaagccagagtctctttttcatttggagtctggctgtctgcccatgaccagggttacataatgggaaacatagctggggctctggagagcccgcgtttcaccaggctgcccagaccttcgcattctgatgctatatatcttcctaattgtagctcggatgcatttatcacactgttggattggagtactgttta

SEQ ID NO: 191101 - DNA, 202 bp, Homo sapiens
tgaaggaggccctgttcacaggatgatgtatggagtatgacagagtaggtgagtcatggctccttggctagaccccaagggtgggatgatctggaaccacctgagttaatgacactcctgaagccttgcaggtatccctgcatagacaagctggatagcctacttccaacatcaaaagcataacagaatgggagactcctta

SEQ ID NO: 191102 - DNA, 219 bp, Homo sapiens
gacaccttgtggtttctgattattgaccatttttaagcccagtagggttggctcaactcttcttcctgcaaggcccagtccccatgcctgtatcatcctcataaatggaccctggccctctctccacttccaagtgctacctcaggttcaacaccacactatgccaggaactcagaaagtgagctgaccagcaggtggtcacactccaccttgcactta

SEQ ID NO: 191103 - DNA, 920 bp, Homo sapiens
tgaacaggctgctcttggaattgcaaatcttatagttatgtctatggtagaaaatggcctgtcagaacaagaggcacaaaagaaaatctggatgtttgacaagtatggtttattagttaagggacggaaagcaaaaatagatagttatcaggaaccatttactcactcagccccagagagcatacctgatacttttgaagatgcagtgaatatactgaagccttcaactataattggagttgcaggtgctggccgtcttttcactcctgatgtaatcagagccatggcctctatcaatgaaaggcctgtaatattgcattaagtaatcctacagcacaggcagagtgcacggctgaagaagcatatacacttacagagggcaggtgttgttgccagtggcagtccattgggccagtgaaacttacagatgggcgagtctttacaccaggtcaaggaaacaatgtttatatttttccaggtgtggctttagctgttattctctgtaacacccggcatattagtgacagtgttttcctagaagctgcaaggccctgacaagccaatgacagatgaagagctagcccaagggagactttacccacggttgctaatattcaggaagtttctatgagcatggctattaaagttacagaatactatatgctaataaaatggtttcgataccagaactgaggacagggcaaatatgtgaagaaagacatggggggtgatatagatcctgtgcagatgtgttgaatggcagaattggttaaggctcgggtaagaataaaatcccggaaaatttggggcaggaaccttttgaaagaaaaaaagttcggttaggggggtgggggccgaactgggggtttcccggccttcgggagtggttgcgcgccttatggttagccggaaaggggtca

SEQ ID NO: 191104 - DNA, 428 bp, Homo sapiens
tagaatcgagctccgtaccagatccacctttccatcccccctaataacatttttaaatttcacgtagtaaaattgatttgttcttttgttttgttcatggaacattcaattccatggatgttcacacctgtgcagatgtgggtaagcaccatacctgggagacaggcgagccctgccatctcagaagactgttccactttccccatagtcaccaccccgacccgtggcagccacacacctgtcctccaccactgtagttatgtctttccaagaaggtcccataatggagtcctacaatgcgtggctgggagcagcgagatctgcagaacgccgctgagactgatcaggatgcgtgcatcagcatttgttttctctcttttttttttgttttttttggagtagtgctctatggatggatcagtttgtct

SEQ ID NO: 191105 - DNA, 312 bp, Homo sapiens
gatccttgatcctttgtaggtgacctgttttttcatatccagatgcttataggagcgtccctctgtccccagaactctatgatttcacagtgatgagctcaagtatgtgtctgcttccaccaatgaggctgcacatctctcaggccctctcaatctggaaacttccatcctgggaatttgtcttcaaatacttccttgatgggctgaacatggtggcttacgcctgtgatcccagcacttttggaagctgaagtgggaagatcacttaaggtcaggagttagagaccagcttggccaacatggtgaaacccc

SEQ ID NO: 191106 - DNA, 888 bp, Homo sapiens
ctgtatctcctccacaataaacaacttgtcctcaaatcctcacctcaaggtcagcttctaggggagccccaccccaaatgccatgtcgcctaggctcttctacacatggagaccacaactgcatctggacgtggaggtttgcatggctgtgatgctgtacgtgaagtgctggcctgtagtacttggtaagtgctaactgttttcactgtggttactcattcattcacccagaagttgggcagctttcttaaacaatgggcaaagacccgcatgcaggagttagcaagacacatgcaggcaaaaaacgcacaagctagtggggaagagagtatgagaccctccccaccacatacccagcacctggcccctgccagaggggcgatgcaaagtgggggtgaccacaggggagggggagaagcaattgggttccaacctacaggtttagttaagaaggcattagttcaggatttcacaacagattcactgtgcttggatcaatcaacacattgagagatgtcaggttcctagaggactcagcctccacacccttcatctctctctgcgggaaactttcaacacaattgatctaaatggcacagtttttgttgatgccagtttgctagttcataatcacgaacccttagatgactcagatgaaacaagaggttttttttcttcttcttctttgtagatgcacaaggaaccgcatgggcaagtatagattttctaaactatcctttccctttggggccctgggaaagcccaaaaatcagggaacaacagacactgactccctgcgtaagctgattgtaaaagccagtcctgcttctttcctgcaggactggggattttacaaacatacggacatgagagactcaaacctcgatc

SEQ ID NO: 191107 - DNA, 329 bp, Homo sapiens
ttgctgttgtccacatctccggtggctcagacagggagaggctcatgtatgacagtgatgagttggcatctggaaataatgcctcattaaagagccttctttctaaaaatggacgcgtttatcatgaaagggcttcaggaggaggaaccctcggggctgcctgagtgttgtaaatgtgcagatgggaagcggagcccccaagcccatggcatgtcacatgcaccctatccatgcccccactctagcatattctagtgggttccctagtgtggtgctcagacaagtgcccctcaccacgtgcctccgtttcccgcctggggaggtggagg

SEQ ID NO: 191108 - DNA, 183 bp, Homo sapiens
cttgggggcagggtgtggggaaagccccacagagagagctggctttggagaagatggcctggaggtgaggccatgggcggaggagggcaggcgtctcaggctgtggatgcaaaaacaattctgagaactgtagcgaaaggaagatttcattttaaatgtgttgaaaaaatcaccatttggcta

SEQ ID NO: 191109 - DNA, 372 bp, Homo sapiens
catggaataaacaaatgtgaaccattggaggtgaaaggcgacctgatagtactttgggagtgcagttcccagtaggattttgggtggcctggagcacagcagcagctggaggctggggaccatccagttttaggactctggtgaccaagacctgagagaaagtggaaaggtcaggaagggtcagacttgtctcccaagagtttgtattatcatgggattctcttgaaactctggttcatgtggaaaatgtgcttatcctagaagttgactagggttcttggggaatgatggtgaagccagatgcctctgtttgatccaggttctctgcatggtgaatcaccccagaaggagggtgtgaaaggtgcctggcca

SEQ ID NO: 191110 - DNA, 325 bp, Homo sapiens
gctgactgtatttcaggtagaaactgtactattgctgactttcatggggtttaggtgaacttctatgattaagcaatagtatttccctaattctgtccatttttcccccctggatgaatccttcttggaaatcatatcagtttgcttcctcctggaagccttccctgattccctcaaggcttgatgaggagccctttttctgtaatcctgccatagcctgtgctctgtccctttgcgtttaagtcatcagttcagttggctgtgtcttcctaactcgagtgcagggtctctgcctcattcacacttggagctgtggtgcaacatg

SEQ ID NO: 191111 - DNA, 169 bp, Homo sapiens
ggtaggttagacacagatctgtcctgtccccacatatgtgccctaacctaccaccaacccgtttattagcagagactgagctatgggctcagcccactccagctaaaaatgtgaagaaaacgtaagtggccaagacaagaatgatcaaataagtgtttaaagggatgca

SEQ ID NO: 191112 - DNA, 345 bp, Homo sapiens
aattattctttgaaatattactgcttaggaacctgtaaaggctatatatctcctcaccaggcccaaagattttttgggggtttggggtgggggcagcgggagtgtggagtggttggaaatatagtgtgagccaaacatttattggatgtgaataatataagcaatactgagattcttcataatacaaccaatatatttatgttttatcaactttagggcataattactgggctctgtaccttggctaagtagtattttgtatatatatttagttttctttagggctaaattcgaccgagaaaccctagtgctaattacccaatgtagatggcagtcactgttaga

SEQ ID NO: 191113 - DNA, 247 bp, Homo sapiens
tctttcaagattggaaaattaaaaaccagggttcaatggaatctggctaaaaaaatcaatttgtatttcaaaccttgtaagccgaacctcttattacttgtaataagttgcaacttgtaagttgagcctaaattactatgttgtcctgccttagtaaatacagtatcatgaccttgatttaacaggtggtgattcagattcacccctgggtaactgctgggcactgcagcttctctgtaagaacaca

SEQ ID NO: 191114 - DNA, 686 bp, Homo sapiens
aaagatggccactgagcagatatttggtttattgttgtattgtggaaatacataaaataaaggcattattcaaataatgaggacagactatgaaacagataagtcaactgattaactatttggaaatacaagattaagttcctattcccctcaatgaacccatataaatttgaaataaatgaataaaatgtaaaagttaagaggcacactagccaagagatggaagcaacccaaacggtccattaactaatgaatggataaataaaatgtgatctatacatacaatggaatatttaaaaggaaatccagtcacatgctacaacataaatgaacctcgagaatagtatattaactaactagtaagttattatttttaaaaagaggtatgtactaaattacttaaagccactttttaaaaaattactaaactataaaaagatcaaataaaccacttactctaacttctttctaacatttcagtggccaataaggttaaaaacacaacatataagactaaaaggaaaaaggatgcacataaactgaatctgtaaaatgagtatctttacaaaactgatgtaaggaaaaaatatttacagtttcttcaaataaatttgaaaaactaacatgaataatcttcatagaaaatataaattaaaatattaatgaaactaaaccaacagtgcatt

SEQ ID NO: 191115 - DNA, 169 bp, Homo sapiens
aggggaagggagcccaggaaattggcctgtgattcttctccagccatttatgcagtaaacacaggacatctgctgtgtatgagacaccgtgattgtcatccatacttaggaattcaccagaccatttgtttcccagcttttcttttgaattaaaatcttccacaagcca

SEQ ID NO: 191116 - DNA, 593 bp, Homo sapiens
catggtcttttcccctcaaataattctctctctgttgctaatttcctgctagcttgagaaagcagacacccattgttttgtatttgttatacacttaacttcgattcatgctttgattaaatgtttctatttctgccctccctgtttcctacacatacctgtggcaagtcagaatttacttcagcaaactgaaggggaagagtctgtatctgagattttccctccagatattaaaaaatatggctgtttacaagttaagtgctcactgataaccattacaatggtacttaggcatggatatgcctgatactcacattagttactatttactgagcacttgctctgtgctaggtaggtccttcatatacaatctctaattcttctacaaccctgaaagaccagggctcagaacctgcacaggttacaccagtaatgagtggctgagatctgagatttgcaacaagctctaactgcaaagctcatgctccttctactttaacacactgcttccttcccatatggaactacttattccccagttgtcccttttcatgtcaaaggcagcacctcttcccactttgaggaaaaagatc

SEQ ID NO: 191117 - DNA, 106 bp, Homo sapiens
ctgcccagccggtggaggagggggaggaggagcctaaattagctcctgggggagtcagggagggctgcctggaggaggcagcactcagcttgaaagacaagtgctg

SEQ ID NO: 191118 - DNA, 401 bp, Homo sapiens
tcccaggttcaagtggttcttctgcctcagcctcccaagtagctggggttacaggcatgcaccaccacgcctggccaatttttgtatttttagtagagatggggtttcaccatgttggtcaggctggtctcgaacttctgatctcaggtgattcgctcaccttggcctcccaaagtgctgggcttataggcgtgagccactgtgcccagcccccctgtctactttaaatcactactagattacttcttatgtctactagcatgtaaatgctatatagttagactgtattatttgtattttttttttttactgttgcgttattatttttatttatttacttatttatttattttttgagacggagtttcactcttgttgcctaggctggagtgcaatggcgc

SEQ ID NO: 191119 - DNA, 338 bp, Homo sapiens
cagatagtcaccaaataccttgcagcaatataaaataaatgcagattttggttatcatttgtatcattcatatatccaatttgactggcaattcttccttttctgaacaaatttcaaccccttaattttctccagtttcatggtgtgtctatgccttgctacaacctgctgaatctcatacatatttgactggttaggtcttccagagccctgcagttccaaaaaagatttaatgaggcacttgtttgtgaattcactagccagtcatttgattaaattaaaatgaaatttctgtgtttcgcttttctatattttaaatatccccctattttctatat

SEQ ID NO: 191120 - DNA, 257 bp, Homo sapiens
ttttttcccagtaaaagcaataaagcagtaaaatgtttaaagataagaaaagaatgcattcaagtctaaattaatttacaaagttgaaataaaatacaagataatgcttatgttaaactgctatttagaaaatcaggtctgggcacggtggcttacgcctgtaatcccagcactttggaaggccacagaaggtggatcacttaaggccaggagttcgagaccaacctggccaacacagtgaaacccccatctctacc

SEQ ID NO: 191121 - DNA, 240 bp, Homo sapiens
aaatcactgtaggaaagtgatctatacacttaaaaaaaaaaactaaatattgctaaacatttcaaacctattttttaaatattctaactttgtagctcttaagcagttttattggatttttgagaaaggtacaaccatacttacatattataaatgatagcagaaggtatttagctactagcattagaaggccgggcatggtggctcatgcctgtaatatcagcactttgggaggctgag

SEQ ID NO: 191122 - DNA, 496 bp, Homo sapiens
atcccagctacttggaaggttgaggcacaagaatcccttgaacctgggaagtggaggttgcagtgagctgagatcgcaccattgcactccagcctgggtgacagagtgagacttcgtctccaaaaaccaaaccaaaaacactcaagaatcacctggcaagttatttttttccctgagtctcaatcattccctcctcttttttggtctagatttaggcacaaaggttaggatattcaatcatgatttacagacatagtataatagggtggttctaagcctgggttaaaatcatgctctaccactcactagctggtgactttgagcaagtgactaaacccctctgaacttccgcccttccttctgtaagacgggaataatgaaacctacctcatggtgtcaatgtcacggttgaaggagatgcaccgtgtaaagcaatgattatggtgctcaacacagcgtaagagctttataaatgttagcttttattattatttaa

SEQ ID NO: 191123 - DNA, 444 bp, Homo sapiens
tgaatcgagctcggcccagtctgttctaccatatcaacagtcatttggccactctcggttttctccccaacacattttttaaatctttatatgcccaggctgtgaattttccaaatctttacattctgcttctcttttaattataaattttatctttaagtcatttctctcctcttgcattttaatagaagcagttaagagaagcactacaactctttcaatattttgctgcttagtgttctctgagccaggtggatgcctctcttcctccatgcatcctttctccacctcccaggaatggccaggtgtccccactggctcctgggccaggaggcatccaaggttctgtgaagctgctgaaggagcctgtctttgtttgtgctgctatgatataaaatttattttctctcagttctggaggctgggaagttcaagatcaaggtg

SEQ ID NO: 191124 - DNA, 552 bp, Homo sapiens
tctgcagagcttcatttgacatctagatgactgggaaagtgggaggtgaagaggagagaagcagcaccttcatgttctcagcattggagacactgtcagaggcccctgctaggaaatgcttccaatatgtaatcaaactagaaacacccaccatcaccaacaagagacccagtgttccaattttatgagaaagcatggctttcttttgcatttactaagaagcggttacctgtgtatagcaactttgggagatgtttttggaaataatcccgtgattggattcagatggcagattttgtgcagcccagacttctatgtcaatagcactctgcacagggtttccaccaccccctcccacacgactgttttgtcgcatctcggggtgtatttaatagaaccagtgtctgaggagttatgccctgaggctgggaggccttcatggcaacttgcacatttttacaaaacaactctggtggattgagggtgccctggagagcaaggacaaggagctcaggctgtgttcagctggactccagcattccctgtggttgc

SEQ ID NO: 191125 - DNA, 304 bp, Homo sapiens
accagtcgtgtctaccatatccagccaaaaaacatttttaatacaaaaacaatcttttaggtattcatcttttctcaccacttcttctccaaataaatggccaagtgtgccaagaatgcagaaaagaaactgttggagaaaacaaagtagctataggaaagttggaaatagtcatctttctccctgctaaaaaataaaaacaaagtaaaaaacaaagtagctataggaaagtaaaacgaagttaaaaaaaaaaaacaggtaaaaaaacaaagtagccataggaacggttgaaaattagtcatct

SEQ ID NO: 191126 - DNA, 140 bp, Homo sapiens
gggtcagaagacctagatttatttttggctgtgcatttgggagctgtgagatcctgggaaagttatttcacttctctgagcctatcttgtctaatttgtacagtgggcatagtactaatacttacttggtatgatatttg

SEQ ID NO: 191127 - DNA, 217 bp, Homo sapiens
tattggctaccatactgaattcttatttcattttaattttttctaaattaacaaccacaaaaacctaaataaatcattagttttaatttttatgccacttttcataccatctttcttttgaccatctttgtaactccaaaacataagacaatagcccataatggttttggttttttgttttttaatagagattgagtctccctgtattgcccagggt

SEQ ID NO: 191128 - DNA, 257 bp, Homo sapiens
cccagtgacctcctgaggcagcagactccacaggcttactgcagggctatacaaaaaggtattttatgtccttagccttataaatcaattttaattgtaacaacagaaacatcagcagcaaaatggagccaaatgggcgggggcctttttctgcgctttttaaccatctcagattaaatgctgaattgtattttggggtctgagttttgtcatgcaaacgaagaaaaacaacttgctttccaatttccacatgcata

SEQ ID NO: 191129 - DNA, 178 bp, Homo sapiens
taaattaagatatacacagaacacatctgtagttttaaaagattattctcactacagtttcaacaattctctgaagtagagaagttcctacttgcaaaagaaaaaactaagactctgcaaagctaagtaacttacttcaagttatttatttaacaaacatttgagtgtctacgatatg

SEQ ID NO: 191130 - DNA, 477 bp, Homo sapiens
  misc_feature (461)..(461): n is a, c, g, or t
ctcccttgagctctgatccagaattcaaaagcaacaagcttcctacgtgtttggaaaaattgctcttctgactggtagtccaactcttgaatttttgaaaattggaatgtaggtaagttctgattaatagaatttgagtcctgatttgtgggagtgggggagcggcatgatgcttaggcctctactcttaagtcctttggcttttttacttacgttgtacaggtatcagagatctgtgatttctgtgtgagaatcctgcacaaaaggcatatactcactctataaacccagttctttgggaggctaaggagggaggattgcttgaattcctggcctgaagcaatcctcccatctcaacctcccaagtagctaggactacagacacgtgccactgcgcctggccttccaaatacttttatatttaaaagggaattctagggccgggcacggtgacagaggtngactctgtctcaaaaa

SEQ ID NO: 191131 - DNA, 666 bp, Homo sapiens
ctcccttgagctctgatccagaattcaaaagcaacaagcttcctacgtgtttggaaaaattgctcttctgactggtagtccaactcttgaatttttgaaaattggaatgtaggtaagttctgattaatagaatttgagtcctgatttgtgggagtgggggagcggcatgatgcttaggcctctactcttaagtcctttggcttttttacttacgttgtacaggtatcagagatctgtgatttctgtgtgagaatcctgcacaaaaggcatatactcactctataaacccagttctttgggaggctaaggagggaggattgcttgagcccaggaattcaagactagcctgggcaacacaatgagaccccatttcctcaaaaataaaaataaaggcagagtacggtgggtaatcctagcattttgggaggtcaagctggggtggatcatgaggtcaggagttcaagaccagcctggccaacatggtgaaaccccatctctactaaaaatacaaaaattaggcaggtgtcttgacgcacacctgtaatcccaactacttgggaggctgaggcaggagaattgcttgaacccgggaggcggaggtttcaatgagctgagatcacatcacagcgttccagcttgggtaacagaacaagactccatcttgga

SEQ ID NO: 191132 - DNA, 1848 bp, Homo sapiens
gtggagacgcgagcacttccggtgtgtgagcctgcggttgctacataaccgcgtagtttgagccatttctgcgtctggcgggtccttctgaacttgtcaccttcgcttggggtcgcaacgacccgatgatcgatgatccaagcaagggaaaagaagccttggcggagagcggaggcacaattccaccttcctttgtgctccattactcaagacactgaagactccaaaaagtaggaggaaaaatgaccacattcaaggaggcagtgaccttcaaggatgtggctgtgttcttcactgaggaggaactggggctactggaccctgcccagaggaagctgtaccaagacgtgatgcttgagaacttcacgaacctgctgtcagtggggcatcaaccattccaccctttccacttcctaagggaagaaaagttttggatgatggagacagcaacccaaagagaaggaaattcaggcggcaagactattgcggaagcaggaccacatgaagactgcccttgccagcaaatctgggaacaaactgcaagtgacttaacccagtctcaagactccatcataaataattctcacttctttgaacaaggtgatgtcccctcccaggttgaggcaggactatctataattcatacaggacagaaaccttcacagaatgggaagtgtaaacagtccttcagtgatgttgccatctttgatcctcctcagcagttccactcaggagagaagtctcatacatgcaatgagtgtggaaaaagcttctgttacatctcagctcttcgtattcaccagagagttcacttgagagagaaactctctaagtgtgacatgcgtggtaaggaattcagtcagagctcatgtctgcaaactcgtgagagagtccacactggagagaaaccattcaaatgtgagcaatgtgggaaaggcttcagatgtagagcgatacttcaagttcactgcaaattacacacaggagagaaaccttatatttgtgagaaatgtgggagggccttcattcacgatttccagcttcagaaacatcagataattcatactggggagaagccgttcaaatgtgaaatatgtggtaagagcttctgccttaggtcaagtcttaataggcattgcatggtccacacagcagagaaactgtacaaatctgaggagtgtggaaaaggcttcactgatagcctagatttgcataagcatcagataattcacacaggacagaaaccgtacaattgtaaagaatgtgggaagagcttcagatggtcctcatatcttttgatccatcagcgaatccacagtggagaaaaaccatacagatgtgaggagtgtgggaagggctacattagtaagtcaggtcttaacttgcaccagagggtccatactggagagagaccttataattgtaaggaatgtgggaagagctttagccgggcttcaagtattttgaatcataagaaactccactgccggaaaaaacccttcaaatgtgaggattgtggaaagaggcttgtacaccggtctttctgtaaagaccaacaaggagaccacaatggagaaaactcatccaaatgtgaggactgtgggaagcgctacaagaggcgcttgaatctggatataattttatcattatttttaaatgatatgtaagttgtacatatatatgggatatggtatgaaattttaatatgtgtatataatacgtaatgatcaaattgatgtaattagtgtattaccttaaacaattaacatttctttgttttgggaaaattcaaaatccattgttctagcgatttgaaaagaaacaataaattattgttgattatagtca

SEQ ID NO: 191133 - DNA, 759 bp, Homo sapiens
gtgtgagcctgcggttgctacataaccgcgtagtttgagccatttctgcgtctggcgggtccttctgaacttgtcaccttcgcttggggtcgcaacgacccgatgatcgatgatccaagcaagggaaaagaagccttggcggagagcggaggtttggtgggggcggggaatggggtttttttcccgtccacggaagctttctgggatgggggtgctgtgctcgcatcccgggggttggaattggcggggtcctctgtgccctgctgtgagcgtttccaggactttgacctcgctcagcctgcctctctccaccctacctgtgcgaccgctttctcgcagtgtgacgtggagtgttactcaatgtccttatactttccattgctgtttttggtaatggggacattagaaccatcctagtagaatcgtttttgggaactgaaagagataacgcaaatgagaaccttaaagcagtccctgtcacttggtgactggtggtctcttgttaacttcccgaagaggtcaggtccccgggtggagtcatagcttcagctgcaggggccctggtccttctccctaatccctgcaggacgctggatgatcccgggaggccttctgacctctttttaggaaagcgagttgcgtccgcttccacgaagggcggggagcatttaacttttatgggggaccgcgatgcagtcagggtatttcacaactttcgccttccccagcctgacctttctaaaagagctgcagggaggg

SEQ ID NO: 191134 - DNA, 2027 bp, Homo sapiens
gacgcgttctcctgcctcagcctcccgagtagctggaactatgggtgcccaccaccacgcccggctaatttttttgtatttttagtagagacggggtttcaccgtgttagccaggatggtctcgatctcctgacctcgtgatctgcccacctcagcctcctgagtagctgggactacaggcatgcgcaaccactcccggccaattttggtattttttgtagagataggatctcactgtgtcacccagggtagtctcgaactcctgggctcaaacaatccacccacctcggcctcccaaagtgctgggattacaggcgtcagccactgcacccagcctatattaatgtaactatacataacattatattaatataataaaatatgtattgaatcctgtgaggcacatgggaagagtgtggctgagaaaagtgaaaccagtgcaacaaaaatataaaaatatatccttagtctccaggagcttagagttataaggcagatccacactatttcctgtatgttttatagcaaggagtaacagataaatcctatgagtttagaagtaacaagaaggattcagatgggcagaattgggagagcattctggactttctggattgatgggacagtgtgacttcagtcattctgtttgggggttggaattgtttttagcaccagtgctgtgtgaccttggacaacaaagacacaggtacagttcagaggtatggaaatacagagatgaataaagagctgtacctaacagtacttgatgtttagagcttttatatcaaagatgggaccaactttctcatcatccaagcatttattgagcattactgtttgctcagcatatgttaggcattacctgggggataacaaagaagtttaaagcatgttttctcccttgaagcatttataatgtcattgagaagatgactaatacatgtgaaaaaattagtgagaagtatggtacaaaatagatattttgatagttgtgtggtccagactcagtgccgtctaggagttcaggaggaataagagaggaagattaagtacagtggaacttaagccagaccctgctggagccggatcagggtcttaaactggggtccatagatgtgcttcagggagtctaaaattccctctaaaatggtatgctgctttgtgtgaaagcacagttttaaggcagagaggtcttaatacctttcatcatatttgcaaaaccttttctgctcccctaaaatgttaataccagtatctatgtgaataaggagacagcgcttgggaatttagtatggcatttgtagggcacaatgagtaacctgccaggagaagcctcccctcccataggaaacacctagcacacaattacagagagatttgggtgaaatgatggccctagcgatagagaagaaagattgactttacctcctctaatgcccttcactgtgctgtagcctttcaaaaatttatgtttggtttcctaggaaaacattaatgtgctcaagaagggataatgtatcattctaaatattgtatgagtttgccggcttgctttttaactgagtcagaaaattataaatagacttcaaatgtagaactactttattttgtaacattcaaactgagcctttatgtaatggccggatggtaccttagattcatcttttctcctctaagtaattgatggtgtgtaagaggtgccatattgtgggacagggtcttgaattcatgtctcagcaagactgagggggaaacatgcaccttttatgagatagaggctgatagaggcaatgttttatatcaagaaaggtactgatattttacttctcgttcattggcctaatctttcctcctccagctccagctttgcctttcttcaccccctgtcctatgctttggcatacagaagagccagtagtctgcatatatgatgatacttttcagcaccatgtttttgtttatgcttttccttctgcctggaatatcttgctcatctttgatctgctggttttctctttcattcttta

SEQ ID NO: 191135 - DNA, 309 bp, Homo sapiens
aaggcttaaaaaacatttaaatggaatgcaaaatttgcaggtttggatagtatttagatcctgattcaaacaaaccagtataacaacaaaagaagaagaggaggaggcagaggaaaaagaaaaaataaaacgtggagaaatgcaaatgctgacttgatcatttgagactatcacaaatgtatttttttgtgtgttttttttagtcatggttaaacccacactttgtagcaaatctgagagagatatcctttcatttgtaaacaatttaatatgtatctccaaaataactttttttcaaaactggggtac

SEQ ID NO: 191136 - DNA, 446 bp, Homo sapiens
tgcccagatgtaaggcacctccaaagttcccaatgatctagtgcaggtgtgtttttgatggccctggctgtatcatgctggcaattcagtggtaagccttgttctctagtcacaaataagggttgcagccattgtaaggaacagtaaaaaccagttatgaccacaccactgcattagtggaagctaccaacatggcggtttgaaaggtgacattttaccctttgggatattttctgctcaatggtgagacatagggcatgtcctgggccctaggtatgtgcaatatggggtctcctttttgcctgactgcactgcattgcaggagtcagtggtaaaccctgctaaaggactcagtcagtgcacggattgaaaacaaaccaaaagacagctcagtttctccccaaaaagatgccacacactgccattttggattggaatcaaggttc

SEQ ID NO: 191137 - DNA, 417 bp, Homo sapiens
gcttaatagcgccttagcgtattctggtcggcttggcttcccatcaagtgtttttccgtgtgtgaataatggtttcacctcctaatagttttctgtaaaccctgactctcaaacgcgtgctccatttgtccagcgctgtgtgttagtcgccctttccttctgttgaaggagaaccctaactcgttttgcttttgtttttttcccatttccactgctaggatttctgtagggaccgtgaaggttactggacaacagaaacttccctttgctggcttgcctccagcatttcatcagaacagcctcttacagatgacccagattctgtaggctcatccttgaaacctcagtggctttttgaagacactgttgttttttcttcaggagacttgattgcaaatgtggattttcagtatcgcg

SEQ ID NO: 191138 - DNA, 440 bp, Homo sapiens
ctcgactctttaggatcccctgaccttccgcccctataacaaccatttcataaatgaagaatctaagattctgagtttaattataaagtacaaaatttcacaaactagaagactgtcaagtcacgagcagagttcatgtctgttttactctaaatctcaagctcatattctccactccacaagtactaaaaatgcaagttaaaatcatgttaagattttgggcgtgtgtgtgttatttttccagtagttaaaaaaacaatgaaaaatacaggcaaggagccaggcgcactgcagacaaggaggtgagcacagtgtcccagctactgggaaggctgaggtggaaagatggtttgaacccaggagttcgcagctgcagtgaactatgatcacatcattgtactccagcctgggtggcagaccaagaccccatctcctgggca

SEQ ID NO: 191139 - DNA, 527 bp, Homo sapiens
atgaaacataggtgaatcccaaaaacataatgctgagggaagagtacatacaccaggcgggtggctcacgcctgttatcccagttacttgggaggctgaggcaggagaattgcttgaatccaggaggcagaggttgcagtgagctgagattatgccactgcactcctgggcaacagagtgagactctgtctcaaaaaagaaaacaacaacaaccttgtcacaaagaaaactccaggcccacaatctaagacagtaaactgtgcccagcacagggtgggaggagagtgctagcagcacagcttggaaggcaggcagctcctctggctatgaagtcgagttcacttccaggctaacttggacatattgcaaagagatgtttgataaatttgaaactacagttaaatggcagctaacagcctctcacccatctttccctaaggaagtacttcaagatgtccaacaatccagtagggctttcattttattttcttgactcaaatgtgagcctggtgggtagacgcatctga

SEQ ID NO: 191140 - DNA, 410 bp, Homo sapiens
ctgcttgtcccgctttgcaaagcaaaacctctccagctaaatctcacttgggggtgacagctttcagcgaggggccatgaagacaggctggggcagaggcttctggtgggcacttttcttcctttttcctccggcctcagctcggatgtgcttggtgtgcaggccatggatcaatacggcctccagggcgctgcacattgtgttggcatctccgtcttcactagtgaccaccatgtccagggacacgtactgcttcagctcaggtacagaggggtgtgactgctctggatggttaatgcactgttttcccaggatgcctggcattgcttcagctctggcctagaggggcaggacaagcagagcctgaccaatatggtgaaaccctgtctctactaaagaaaatacaaaaa

SEQ ID NO: 191141 - DNA, 1328 bp, Homo sapiens
atgagctcgcacccccctattgcccaaggcccaaacaaaaactgtgctatgccagaaacccaagttgccaatgagcaatagggagcagcccagtgatgactcagctccccagggagaaagctgtctcagcagcccatacttcagggtgttagtcctgccccctggcagctggttatccagctagctccctaaagtgagtactagagttgtttggcctgtagtgtggggtgtctcatctcatgccctgctttgtttccctggaatgtgaaggcccatgccagctcagcccagtattgcatagctactcagttcaggcaaggcactgcatccccagagggtaatgtgcctcgtcagctcaggtctagggtgtgtgaccttaggttggcccaggcaccattttcctgggatgcaggaagctgcttcagattaggtactggactgtgtgtctgcttgggatggccaagacactgttacctggaaggcagggtggtaggtagggtgctgcttaaacttaggcactggggaggcatgactgctctcgatggccaaagtactgttttcccaggagacaaggtactgcttcagctcaggtacagaggggtgtgactgctctggatggttaatgcactgttttcccaggatgcctggcattgcttcagctctggcctagaggggcaggatgtagcagcatctgggaggggtaggtggaggagcttcgccaaggcatcctttcctcaggaggcaatgtgcagcttcagctcaggtccctggaagcagggcagttttgggagaagtagactgagaggtagacagtgagaggtggatgttgcacatctgccagagcattgttttcccaggagggagtgcacagcttcagctctagtcgaaggtgacaggacacagcctagcatagggacttgaggggtaggtggtgcagctctcccactgcatggccctacatgggaaggtggaaaagctgcttgtagatgttgggccaccaggtgggggtggatggtgatggcttatcctcagggatgaagaggtgccatggaaccagacagaactccagccgttccaaaataacagcacagtagctgtatgggccactgggggcaggacagtgtcagctccttcctcaggagcacagctgtatggactccaggcgggtccgtcagctaagcttagtgcctgtgagggctgtaggggaccccagtggtgagtactgtaggtgtccaaggtggtgatgtacgctgctggtatgctattgctcactttttccacatacggagaaattccttctggttttcagctgatcttggctgggggat

SEQ ID NO: 191142 - DNA, 395 bp, Homo sapiens
tttggtaacctgaaccattcaggctcattggcaacttgggtttctggcatagcacagtttttgtttgggccttgggcaatagggagcagcccagtgatgactcagctccccagggagaaagctgtctcagcagcccatacttcagggtgttagtcctgccccctggcagctggttatccagctagctccctaaagtgagtactagagttgtttggcctgtagtgtggggtgtctcatctcatgccctgctttgtttccctggaatgtgaaggcccatgccagctcagcccagtattgcatagctactcagttcaggcaaggcactgcatccccagagggtaatgtgcctcgtcagctcaggtctagggtgtgtgaccttaggttggcccaggcac

SEQ ID NO: 191143 - DNA, 592 bp, Homo sapiens
tctggcaaaactggtaggctccatataactgtcattacttcctgatgttttatagcttgttaaggagacaaaagccttttttcttctcctagtattttaacatgttagtaccagatattatctatgcttaggtatgaattttggctcagagattttctcagcatcacaccaatgataagtttcatgatcctagaatgtactttccctgtattctttctcctctgctggtgttctgtgagtccacgtgtatgtgtgtgcaggacaacacttaaagtggttattctttcttcaaagactcagttcaacacacccctggtggctgttgtagctcagggttgagtagtgatcctggtattaaagatgagaaatttgttaggtagccgctatgagctgcaaggtttcctgaggcagaggtatccggaacagagtcagggaggccatggggccagaggccttcctgattctggacacacagagtaccttggtttccccaccctaccttaaaaatatattcggattcacttataccgattaattacttagagagagtgaatgtattatagttatgtgaacttgtactccctggctgtct

SEQ ID NO: 191144 - DNA, 374 bp, Homo sapiens
gcccttggcaacatctaacctactttctgactctacagatttgcctaacctgggtatttcatataaacacagtatgtggtcacttgctatcaatctgaagaactttatttaggatttcttataaggcaagactgctaacaacaaattctctcagtttttgttgtccaggaatgtctttattttatatttattttagaaagctcattttgctggttataaaattcttagttgaccttgtggtatttttttttttcctttcagcactctgaatacattagcccactatcttctgacttccattgtttctgatgagaagtcagaggtcagctcttaatcttattagggttccttttgaaggagaaatcgggtcattt

SEQ ID NO: 191145 - DNA, 204 bp, Homo sapiens
actggcttctcctctttccttataaggtcctgcccttctagggggtttcttccccctttctgtagagattttgccctatactctttttcttttttttagaaacagtatctagctctgtcatgccggagtgcagtggtgggatcattagctaactgcagcctccaaactcctgggctcaagtgagcctcccaccttagcctcctg

SEQ ID NO: 191146 - DNA, 412 bp, Homo sapiens
ttcaggggctcaaggagggaaccactgtttcctttactttatgagtcatggttctgttctgtcatttcgggaagggcctcaggcccctcaacagtgtcaccactgtgcaattatcttgagtgaaggcacacagcaaagcgcatttcctttttaatgtagttataaatgtcgcatcacttggagatttaggaatccgatcaggaattccatttcctagtcaaatagggtataattagagtgggactctgggcccatccctcaccaggcactgtaactggggaagaggaagcaaggagctattctgcttcctttggatctgaggggcatctggaaaaggagaggcatcacctaagctcaaagccatagaactggtttgcttccccagagaaatgaggcctgctctccagagaaa

SEQ ID NO: 191147 - DNA, 520 bp, Homo sapiens
tcttctcctacaggaaagctcttcttagcagctgacagaggggagaggccccgtataaggagactgtatgtttcctagagtccaaaggcagtgaccacactttaaagaggctgtggtttatgtcacgtgctgcccacctccatgcttttgtaaagctttattccagcttcaggaatagcattggtcttcccaggagaaccagcacacacaggccatagcacaggacagttgtcaacctttgacagtaaagaatgtgggtgtaaatggcagagccagtaagactgagaaaacttctggaccagcttcctaaactctatggaaaaactcagtgggggtctttcagggacctggtgggagagagacctaagctgagattccttctcggccttttattagcagctgttaatttactttgagctttaatttctttatctgtaaaatggagatattactgcttactggggttattatgaggattaagagataatatgcaaagtgcttaatgcctgcctggcatggg

SEQ ID NO: 191148 - DNA, 655 bp, Homo sapiens
ggctctaaaagtcgaaggtagaatggatgcctctttcgcaggctaaatacacaaagagaagagctgttggcattggattgttcaccacagtgccatttcagtggccctctgctcatcaggaaagttttccagaaactgtccctggagcttaatttgaaatcagaagaccatttctaagtgactcttccatttattttactgcgattcttcttcttttttggctcaggtctctgaaagagcaagcatcacttccccactctggatttttactttctctggaaaaatatcccactgaagtaggtagtatagtcacagagtcatcgtcttttaaggctgataatgtcatataattatattttgcaaataaaagtaatatgactttttttcatttaggattcatcttaaattgggtgttgttaagagtaaaaattggttacagaaagagttacttagtgttatagccagaaaatggagatgtttaatttgataaacattttctgaactccttttaatgtgcaagccactgcgttaaatgttgtggaaggttcagcagatcttgtgcttcagcagcttaccagcaggagatgtaacctggtgaggtactacccagccctaggagtctactattggggatgtgaatatgttactcatcatt

SEQ ID NO: 191149 - DNA, 408 bp, Homo sapiens
ccggctcgctgctccatctcagggctgcccttcccttcacctttgtccagactggggcagcacacctgtgcgctggtggtggtttctttttccaaagcaccactccaggtgtatttcttttcctttccagggcctggcacgtgcaaaatacagtgatgacaccaaatacaccgctggcctgcctgcggccgacctgatccccacaacgctgaagaccaggaaagtctgggtcatctactcaggcgaacaacccctctacgtgaacgatgtcctgaaattcgaccagtcccaactacttggctgaggcaggagaatggcgtgaacccgggaggcggagctttcagagagctgagatcgcgccactgcactccagcctgggcgacagagcgaggctccatctcaaaaaaa

SEQ ID NO: 191150 - DNA, 331 bp, Homo sapiens
ctgggacactgggctaggaactgagatccagttttgctcccggctcactgggggcctcgggcaggccacgtgcctcttcatctgcgcagccaaggagacggtctccacatctcccgtcacgcttcaaaggctgcactctcattctctaacttcagaagcagcttatcaaaaaacagagggtagtgcaaaaacgagggagagagaaccatggtggaggaaaccgagaaagccccaaacagcaggtggaggccagggcccccgggactcacagggaacagatgtccattctgttggcaaaccacaggtttcagtcatttccactcccgggcaa

SEQ ID NO: 191151 - DNA, 552 bp, Homo sapiens
tactgtagctgttctatgtttacatatgtttagatacacacaaatacttaccactgtgttacaattgcctacaacattcatgtacagaaacatgctgtacaggtttgtagtcttgaagctataggctgtaccatatatcctaggtgtgtagtaggctataccacctaaatttgtgtaagtacactctattatgtttgtacaatgacaaaaatcacatttctcagaatgtctccttgttgttaagatgtataactgtatttgccttgtgaacatggaaccagcagaaagcattacaagttactgattgacatagttgattttcttattttgggttttacacaatccctaaaaccctgattgaagaaaagatttttaaaagagaaatctgccaaaaaaaaattaaaagagttttgataaagcacctgtaacttaaattctcaataagacatgatttgcccctaaatatcctgtggaaagtaagtcattttttaaacatctattcttgtttttaaaatataaaatcttaatggtcatgccataaaattatctgaa

SEQ ID NO: 191152 - DNA, 468 bp, Homo sapiens
cacttcggtttacaaagcacgtccacgtgcatcacctctttctgattttaattttcctagctgctctgaaaaggctgtaggatgatgtatcaataggcttgttttggagatgaagaagctcgggttcagagaggttaagcagccaattaaaggtcactcactgatatgcagcaaagcctgactttttgactgtgagcacagggcatatgcactacatcgtacgttatataatcatccgttccgtagaactcaccagtaacatgtaacaacatcctgaaaaaagttaccacgtgagtccacctagcgatttaactactcttggcaaatttgaggtgaagcacaccgaaaggtcttcccaagtgatcagctttttacctaaggtttctgattgtcaaaacatgaactcctgacatctctcccttggatgagtaaggttccagggtctctgccatggccactaccaagaaa

SEQ ID NO: 191153 - DNA, 223 bp, Homo sapiens
ttgactgctcctaacaaccccaacaagataaatcataacaattagcagtggtgtttacagcattccaattccttaggtgcttttctcacatggtctaggctttcaaagtcctttgcatactggttgttaggcagggttttgagaaattatcagaattatatccatgtgataagtaattgtttttacagcaagggtacgaccttttctatgttcaatgcattat

SEQ ID NO: 191154 - DNA, 525 bp, Homo sapiens
agactagaaccctcaggtactgcaggtgggattgtaaagtggtgcagtcacttggaaaacagcatggcagtttctgaaaactggaagcatagagttgccacttgacccagaaattccactctcaggtttatacacaagataactgaaaatgtacgtccaagaaaaaacctgtacgtaactgttcatagtggcattattcatggtagccaaaaatacaaaacaactcaaatgtctgccaactgataaaaggataaataaaacgtgacatatccatgcaatggaattctatttagcattaaagaagactgaactatggataaacacaatgatatagatgaacttcaaaaacattatgctaaaaagccacatgcaaaaaccacagtgtattattctatttacatgaaatatccagaaaaggtaagactatagaaacagaaagtagagtaatagtgcctgaggctagtaaagagcagtgactgtaaactggcatgaaaaatccttttgggatttttctaaaattggatt

SEQ ID NO: 191155 - DNA, 359 bp, Homo sapiens
aggccctcaactcaaagtggcaggacagggctggggggtggtcaggctcaagcccagccagtcggaaagggagaagcttgtggtgctcagagaaggggacagggcagcgagctcccaaggcacctgcctttctgtgccatcccacgggtgggaggagggaacctgggcccacttctgctgccaactacaggcatcccagtggctcctgagccaagacattctgtgccacgcactgggtcaaccgctttattcaacctgcagacagccctgggtcaggaggtggacactgttgtgaatttctcagaggagaaatggaagcccatacatccccctgaactcccaccgggcgttagaaccct

SEQ ID NO: 191156 - DNA, 230 bp, Homo sapiens
acacttgtatctcattcttacaggcatgtgtactacccctcagggtccatagctgttcagtatggcaaagggcagacttgctttctcttccactttgctgccttgatgaggttaacatactggaatgaaagaggagggcaggacatctgccaaagtgcaaggaataagagttattgaaacaattgggaaaaggattgacacttcaggaagctgacctcgaagttgacctc

SEQ ID NO: 191157 - DNA, 538 bp, Homo sapiens
cccccccaggaaggccatagctccagtacagcacacgaaggctgaggccagggctcggggccagaggcagtcactggagtagcgggaggagctggtgctcagaagcacttccccaacttgaggggtgggtagaagagcccttcatgggtgaatccagggagcagagcacagacagacccaggagcccctgtccaaatgagccatgtgcagacagtggagatggagggagagagggaaggttattagaggggactctgcaagccagtagtaatcctgaaattccagggcaattaaataactccaaatttgttttgttctcaagattcaatagtaattttttattcttaacagtatagaagagctatcatttgtctaagcgcttactatgtgctcaaggcttttcatgctttatgtctttgaatccacatagcagctctgtgagataaggagtattagtcaggattctgggattgcatgtgacagaaacagacctggctaacttaagccaaacagaatgtattggaaaggtggggctgtc

SEQ ID NO: 191158 - DNA, 204 bp, Homo sapiens
gctaattacacagacagtgacatcatcaatggcatcaacgaacttctcccccaaaaaggaaacaaatgagactttaagagaaataacaattttaataacaacattggctgaaggaatatccaacatttttagagcatgtcagaattgacagcgcgcttccagatgcaggatcacatttgattccctctttacagataaggaaac

SEQ ID NO: 191159 - DNA, 600 bp, Homo sapiens
tatcccagctactcaggaggctgaggcaggaggattgcttgaacccagtagtttgagtatagtctgggcaacatagcgagaccccatctcttaaaaaaaaaagttaaagacagtggttacaggggtaggaacttggcagatggggtcatgaatgagatgaagacttcagtacattttttttcctactatgaacattctgctaaacatgtgactgtattaagtattcaaaaaattaaacacattgagtaaggaaaaaaacaagttatctacaaattggtacaattctcaattacacaaataatttaagtatttagtttactttaaaaagctttttaatatttcatgaaagaaactttccaacatagaattctacaccaaactaaatggtcaattaagtgtaggtataaaatgaagccacatactcaaaaatgttttactcacatgaagttcttaggaagccaatgaaagaaaggcatacgtcatcagaatgaggaataataaactaggagagcaatacatgcggtccaggaaatgggatgcattagaagagaagaaaaaccatgtagagtacaattcgaggattccgaggttggtgaagat

SEQ ID NO: 191160 - DNA, 153 bp, Homo sapiens
tgactcagaaatagaaagaaatagaaagtcaaaaaccacatgttctcactaaccacatgtttagcagaagctaaacagtgggtacacatagacacacagagttgaataatagacattggaggctccaaaaggtgggatggagttaaggagttg

SEQ ID NO: 191161 - DNA, 409 bp, Homo sapiens
gtagaaggatgtgctaatttggtacagtttgtcacctggttgtttgcttgtttcagagaatgagagtagatggatttgctttccctgacctgctgctacttaaattccagtaagccaatcagggactaaggcagcaggggcaggtaggtgtagcttagcagcaactaagtcaaatgagactgaatttagaaactgtcatgtgagctgactgtgtgaaaacagtctgcctaattttctggtcttagtttccccatcgtaaagtgggagaaattcctgtaaagcggtcttgttttgatgaaaagaagggagtcaaaataaatgatccatacgtttactttcttcttttttaggctctgcctctacagctgtgggaaggtagagtaaaaagcactagttccataaaggaaaa

SEQ ID NO: 191162 - DNA, 228 bp, Homo sapiens
ttctcaaaatgctgggattacaagtgtgagccaccacgtccagtcagtgttttagatgaaaaatattaagaccaagacactaagtgatttttttcaactttgtacagttagcaagtactgaaccattatttaaactgaggcttattaagtccattgcctttttttggaatggtggtataatttataaataataagccttgcatatttaaagtgtgcagtatcgttttt

SEQ ID NO: 191163 - DNA, 432 bp, Homo sapiens
tttctcccagcccagcccagtcatgagtcatttgacctctagtttcccctcacactctgtctctgaatctcctttcttcctgaatgaaacgggtagcaatacttccttttaggtactcataacatgctcagaaattaaaacgaaaagtaactgcatggtaatataaaatacagtatactgtgttataattttaagtgcgtgtaatcctactgattcattattttaagcattcattcccttgaatgattacaaaatagtttagtacaatgatagttgtatcatcttccttaacgtggcctcatcagttattagtcactgaaaaattaacagtgtattccttgttcttagggtaaatcaaattttatatttagggtatatgctgggattacaggtgtgagccactggtgccccgccaataacactttttaaaat

SEQ ID NO: 191164 - DNA, 122 bp, Homo sapiens
ctggttttttaaaagcagatttaatttacaaaaagcaaagattttcacagaatttatctgcagtcctgttcccaacatgtaaagctgagaatattctgaaaaaaggtttctgcaaaaatgtg

SEQ ID NO: 191165 - DNA, 464 bp, Homo sapiens
agatgctacaataatctcctaaagcaccactttgtcacgtcaccactccaccctgcaccatttcataagctcccactgcctgtgaagtccaagctggccccagcctgtttttaggttcatccctaccactcctgaagtataaaactttgaacttctttcaaggcattacacacttccttgggtttagttagttgtagaaaactggactgtaagcatcttgaaaactcaagtggtatcctaagtatctttttatctgctgcagcacgtgatgacacttccttgcacataattagcagccaatagataagcatggaataaactaatggttacattttaagaaggaaatgaatgagtctttaactccctgacactgccctggcgttaacttggattggttatatttactgtttctatctcataagaatgtggtgaggtcactgtataacaattcctcaaggaaccct

SEQ ID NO: 191166 - DNA, 355 bp, Homo sapiens
agatccggaggcaggttgtctgaactcatgtgttggatgaagtcggcatacacctcatccagcggtggttgatattatcctccccaatggatatgaggctgtgaggtctcaaaatagcaacctgggcgtatttacctctgtatcaccagctcaaaagaataatcacctttaataatggcaatcataaaaagtcgattctcaggtgcctggttcatgcccagcaacgagtgtgcttgaagtgccaagattcaattaatcctcacaatcatgccaggtggtgggtactattattatacccactttacagattaggaactgaggcatgatatctattaataagtgacttgctcacctg

SEQ ID NO: 191167 - DNA, 534 bp, Homo sapiens
cggcacgaggctgaggtgcaaaatcaaaagtttcataacagagtggttctgtaaataccaaagactgtaaaacagccctgctagattaccacttgtcatcaggtaagcagtgccagaggatgacatgccatccacaggccaggccactgctggcaacccagagcaagcagagggaggggtgctggttatgcacttgctggccattcgagaacagcttttagttgagagttgttatgtggccttccttctacacccaggtttagggaggacctgccttctgactcttggaacacctgtaaaagcatgaatcctaaagtaggtaaagtgaaacttgctggtgatgaagaaaaagtccttcctccatcaggagtgaccagcaggacctggagaggcacttgggggctcacggcctgcacctgccccactgggttgtgtgagccactccctgaagaggacaatgatctctggctgtctttatgaatggtcagctctccccctggaaataggagaaccactggctacaaaacagggaga

SEQ ID NO: 191168 - DNA, 1790 bp, Homo sapiens
tctcaggaagaagcatatttgccatgaagctaaaaaagcttcagtttcactccccttccaaggctctggggggtggggtgggggcgggagctagcaacgtgctcacatggtcatatatttttgtaaaacttatagaagatatttttgtattctttttcttaaagaagatatccaagattgtataagcttcagatcccagaaatcctagatttaaaaaaaataatcaaccaccaccccaacaaaattaggcacatgcctgaaaattctgctgctactgccagaattctgcgggtaggggcttcatccaaggtgttcctaataataggcagagtccccagattagttccggtgaggcttttgggaggggttatttggcgcggtgttggtgttggtaggatcctggctgtgaggctgaggcaggcctgaggagggctggggctgacaggtaggcagagttggctgggatgtgaggtgcaaggggtggtacttcggaaacaaactttgaagaggagaaggggcagcaagactgtgagtctggactttgtgatacactgtcacccctagtttagtgtgcctggttagggagaatcaagcagcatggaacccctcttcctttttcactaacatttttctgtatagtggttgaaacccagtgttaagagactgcatgacattggaaaagaaggggaggagaaaaagagtccatatgaggcaagaacagaacgcagccagaattagggcaggcagggaaaggaagggagtgagatgtgggagtcgggggggagttgaggtaacctgcattttatatgctagagctacgtattttagatgcaggggcaactgtttcggtccaggagtggaaaggactgtagaagcaatctagcacagctgtttctcacttgggaaaactgaagccctcagaggcagagggaggaatggggagcggccaggccaggacaggactcagcccccagttcctcttctcaggcgtccgattccttctgatctttctctcctgccctctctgttactgcttcctcctgttcttacccttatatacacttgaagttttatccccattttttatgcttatgggattgtacactttctggttctctctcaagtccaaccagtatgtggtaacctgtctcttcccacttcatttgtggcactggtttgcagtggacaaaaggtccgtgctcctcttctaacctaatctggactgggttgcccaaaggttgccctgccacactgccaagtgcctaattagctgttttctctccaacccctccaaacacttatcatgagtaatttctcttgtctttagagttgccaaatctaatctctgtaaatacaaatgtggtgagacttcttctcaggagtttcagcaaatgaaacaataaactcttttttaccctgctaagattctaaagataaccatgagaatactcctaattatccttataaatttgaataagtgtggttgttgggttctctcaccctttttatatcccttcaaaagaaaatacaagtttgaattctataaaatatttttctggccgggcgcagtggctaacgcctgtaatcccagcactttgggaggctgaggtgggtggatcacaaggtcaggagttcaagaccagcctggccaacatggtgaaaccccatctctactaaaaatacaaaagttagctgggcgtggtggcgggcgcctgtaatcccagctgctcaggaggctgaggcaggagaatcacttgaaactggaaggcagaggttgcagtgagctgaga

SEQ ID NO: 191169 - DNA, 576 bp, Homo sapiens
cagccaggtgtgcatgaagtctctgtggagaagggatgggtggagggagaggaggagagcctgggccagagccctgaagccaccagcatggaggctcaccaagagtgcaggagagcaggaaagaggtaggtgggtcccgggacaggagagggtgcagggccacacgggttggcatctgggacagtgacaaggacttcagcctgctggattcatcaactgcctgagctttcctatgacagaggtgggcatgtggatgagagaaaccaaaggcttggcccttacagtcagctgaggggcaaccaggtgttcagagcttccagtgtcttgcaagctgaggtggtggctttgaacttgagttgtttcatattgaaagagatgaacagaaagaggagtgctaaaggtatattaatcttaaaagaacattaatgagtttttaaaaaggggagagcagtttgcccaggctggagtgcaatggtgtgataatggctcactgcaacctacacctcccagctaatcctcccatgttagcctcttgagtagctgggactacaggcggaagccaccacacccagctaa

SEQ ID NO: 191170 - DNA, 312 bp, Homo sapiens
tagctaggattacaggtgcatgccaccacgcctggctactttatgtatatttagtagagatgggatttcaccacattggtcaggctggtcttcaactcctgaccttgtgatctgcccgcctcggcctcccaaaatgctgggattataggcgtgagccactgtgcccagccatctgtgtctttttaaaacataagccttggaggcaaacagacctagcttgaatcttggcttatccacttaatagctggatggctttgggcaaatttcttaatccaaaaatctgcttttgaaaactggtaataagaatagtgc

SEQ ID NO: 191171 - DNA, 345 bp, Homo sapiens
attgctttttacaaatttgagtggagttgaaaagaccagtcaatgactggtatactactacttagtctagtaacaatttacaatggcttgtctcaaagaaataaagcatgtaaaatctatttctatttattttctttgtaagtagaaaaggaaacatcccatctcagtttgctgttggaatgtttgcttcaacccctcatctagtcttgtgcatgaccacagatctaagccctgtaaaaattaattactgagtctgtaggaaagctgatgggaatgtgtatcaatacagtggcaccagacttcgagcaacgtagttttcacctttttttttttttttaaggaaat

SEQ ID NO: 191172 - DNA, 828 bp, Homo sapiens
taagaaaatggcagagattcgaatttgtctgcctcctgagccaaagtcttaactactcttttgggctgtctctagcaaatgtcatgaaattgtggctgaaagagcaaaattaatgaataaatgggcaaagctgttacggatatagtaaaggtgatgagagaagggaagaagaaggaaggcatgtcctgtaaatggagagaaaagaagagaagatgttagtggaataaacagagtaagctcgtatctaaagaaatggctagtagcagagtagttctgtattcctcatttgagaattagcaaaggcacacagagaaggcaaatagagagccaagaaaaagaaaaagaaccaaacaggttgtaagagaaaagccgccatctcaacaagtcagcattatgatcaaattggtgaaagaggaaaaacatttctaggccagacagatttgctgctgatctttgaagactataatgcagagatgccaattcaaggctggataatgtaaagtgtgttacttgagtataggataatatggagtggtggggattgtggcagactgaagaatacatgcttaatctaagagactgtttaacagtttctgttgatgaggaaatgctgggctagagttgctcgaccttctgaatttcttttagaggctagaaatgtgtttccaaactattaaatgttggccactaaattgcaataaaaatatgtgtttggactaatgaaaacatttgtgggtgaactttggcccgtcagttgccatctgctccctatgctttaaagcatgcctttgcatgtcctggtctacctgtctagaattttatgccctc

SEQ ID NO: 191173 - DNA, 889 bp, Homo sapiens
taagaaaatggcagagattcgaatttgtctgcctcctgagccaaagtcttaactactcttttgggctgtctctagcaaatgtcatgaaattgtggctgaaagagcaaaattaatgaataaatgggcaaagctgttacggatatagtaaaggtgatgagagaagggaagaagaaggaaggcatgtcctgtaaatggagagaaaagaagagaagatgttagtggaataaacagagtaagctcgtatctaaagaaatggctagtagcagagtagttctgtattcctcatttgagaattagcaaaggcacacagagaaggcaaatagagagccaagaaaaagaaaaagaaccaaacaggttgtaagagaaaagccgccatctcaacaagtcagcattatgatcaaattggtgaaagaggaaaaacatttctaggccagacagatttgctgctgatctttgaagactataatgcagagatgccaattcaaggctggataatgtaaagtgtgttacttgagtataggataatatggagtggtggggattgtggcagactgaagaatacatgcttaatctaagagactgtttaacagtttctgttgatgaggaaatgctgggctagagttgctcgaccttctgaatttcttttagaggctagaaatgtgtttccaaactattaaatgttggccactaaattgcaataaaaatatgtgtttggactaatgaaaacatttgtgggtgaactaatacaaagaggttgatattcaaagtgatctggtttagctgacccactcaatatctgaagaacatataagaggtgatatgaatagatctgtgattttcccctgtatgaactgtcactgtctatatttgccttttaaaatagacgcat

SEQ ID NO: 191174 - DNA, 414 bp, Homo sapiens
aacgacatagggaatgatgctactgttggtattggtggagttaaagtgtcaatgagaaagtgacattagagcaaatacttgaaggaaagaggtgaaccagccaggtgaatatttgaggagagagtgttcttgatctgggtttctcaaactttaatgtgtatatgaattgtttgggattcatattaaaatgcagagtcttgggtctcatttccagagtgttttgattcagaaagcctaggataaggcctgataaattggatttctaataagctcccaagtgatgctgatgctgctggtcaagataatgctttcaagcagcctgcaccaactcatcttactttcacttacatcacccttcattgatttagtcatgatggttgattaacgtagtcaacttcctcttacggatataag

SEQ ID NO: 191175 - DNA, 392 bp, Homo sapiens
aagaaaaattttgaaaatcaccggaaacgcattattccaagaacagttttaaataacttttcacaatagtacttgttatggatcacattcctaagaatgattagtgattaatcaaagtttcacacagttttaagatcctgaatttgggaaatgggctacctgtttaaatttcatttttagaagagcactgtgattaaaagcatggtcttcagttagttctgagttcacttatgactactgtgtaatttgaacaagttacttacctatctctatgcctgcttcctcacttgtaaaatgaagctattaatagccatttcacagttattgtgaagactacatgaaataaagtttttgaagcatctagttaagtacctggcatgaagtaagtggtc

SEQ ID NO: 191176 - DNA, 337 bp, Homo sapiens
agctggtttgttcctcttctctcaggaatcgctgtgctgattgaagcctgttgtccatggcttcatagattttatccgggttttttattgctaaggcagggggtgaattccgtctctgttattccatcatggctgtaagtggaagttgaatccaaggtcatgatggccactgcctcaacctttaagacagtctgcagcattcctgtgagcagccctgatgcgtcacttacagccttccagctggcccggagggtagtgagacgctgctggcctgttcaccccagagggagctgtgggtctggtgggatgggacttgggttggtgggaggacgaggag

SEQ ID NO: 191177 - DNA, 109 bp, Homo sapiens
ttgataatgttttgacttttaagaaatattttttctttgctgttttaattttgttatgcaattaacatctatttttatatcatgtatatattaataattacatatttac

SEQ ID NO: 191178 - DNA, 410 bp, Homo sapiens
aggcttcagaatcgcttgaactcgggaggcagagattgtagtgacccaagacttcatcattgcgctacagtctgggcaacagagggagactgtctcaaaaataaataaatacaaaaataagtgggagggagtaggataactgaaatattaatgtgagttttgagcttcctgttttttcttcccaagtgtgaagcagataaccagacctttatattcccttgcctcagtagagatctgtaatacagaagaaaagcagaattttcccaaagacttctctcttccaggttttcgttcctcaaaaatctgagctcctaaactgttgatgctcagggtgagctctgagagaaaaggcaggcaagatagagcctattattatatatttggatttaaagaaaataaaataatgctct

SEQ ID NO: 191179 - DNA, 502 bp, Homo sapiens
tcatttgattaatgtttctctcttcctctgcacagcaagggaatggggccgtattggtgtgcatccctaatgcctagcacagagcccagcatccaagagctactcatgtatttgtggaataaatcaatgaatgaaagaactccccatccaataccttttactgtgggactacacccctatggactggagcacagaatggcttaaaggtggggaaaagaatggtttacaggtggcaaagcagaggaccagggcttaaagaaaacaaacagaaaatggctacgagggagttgggagtgtttcagaaccaaatctctgcctctttcagtttctgcctatcaagccccaaacatggaacagctcgtagttcaaagtgtcaacatatgactattgaatctggaaactcaaacacatactttcgtttctggtaaggctacactcctatttgaggcttatcttgtaatgcttgagccaccacaatgtaattgaagtaggaaagcgtctc

SEQ ID NO: 191180 - DNA, 261 bp, Homo sapiens
tcccagaccacctcaacaggagtctctcagcctcacttcttccaagaacctcatcctctagacagagctttagctggtgtttgaaaatgtgcccgggatttgttttactcagggatggaaagtcacaaagacgtggaaatgactgtcatgaaggaagaagtctagaagtaggagagtcacatgctttgtagggccacatggggaagcaccaggccagtcaggaggctgacggagagtgggaaacgtgggcagtggccttca

SEQ ID NO: 191181 - DNA, 763 bp, Homo sapiens
cacatatgggtagtggctattgtattgaacagcacagatacaaaatatttctgtcatcacaacatgttctacttgacaagagctgtgatagaacattataattaaatgaatctgcattctctagtttgagatgatagtttcatttcaaccaagtttcttgtgctttttctattaaaattctcttttagattcgaaagttgtatttcttaaaattttaagcagattttattgtaatatatttcaaataaagtagcattattatttttttcaggtctttgacctgtaatagcatttaaattaagcaatcttcgaatttgattttcaatttaagcattgatattatctgatattttatgctaataagttgtgagatggtattgaagcataatggttaagtgcaatgccattgggagctaggggcagtggcacacacctgtcatgtcacctcccaaagtgctgggattacaggtgtgagccactgcacccagcctattatgtatattgtaacacaacaaaaactagagttgtaaggggagaaaaaggttatgtatgaggaactcttctagattaagagagactgtttagagaaaaccaaagatagtcttatttgtagggatcctggtttgaaaaatcagctgtaaattttgggggagtttgtatgtgttctagtattagaagatattaggtaattattaatttgaataaatttgataatgtagttatgtaggagaaaatattgtagttgtgtaggagaatattaaaa

SEQ ID NO: 191182 - DNA, 212 bp, Homo sapiens
ttaaaatactaaaagcaaagatgttgtgtgtgtactgacccactgtgtcccatagttctatattggaggaaaatgtgcaaagctagttggagggatggaattgacatataactcattataatgctctgatttcacataatgggaggccgtgtgtagtggctcacgcctgtaatccctcctttgggaggccattgcttgaggccaggaattca

SEQ ID NO: 191183 - DNA, 623 bp, Homo sapiens
aaaaactctgagaccgtgagtgggggaagtggctggacaggtggatgctcacataagccctaggacacattgatgtactggaggcagacaggcagagtgtggcccatataaaacacccgaacttgcccttactctgcaggaagtacatggaatgggagacaaaagtcatccaggacttaggaaaactaggttctcttctggctgtcattaaccatcaatgtgaccttagaaaagtcatttaatctttctgtgccttaatttcttcctctgcaaaatgaggaatagtattggccttgctcacctcatggacttattttacaaatcaaatgagaccatggaaatgaaagcgctttggaaaatccttggagttttatgaatgtggggcattaggatgagaaaaaagtgtctggagttctcagattcatgaaagccctgaggctgccagggcccctttttggtaacccccttctctgaagatccatctgcagaaaggacaggggcttgccaggcttagggtgagacgtccttcccaaaacaggcctgggagagctgttttctggcagaggtccaggttactcagtgtggctcgattgactcagagatgacagctccctatccacatg

SEQ ID NO: 191184 - DNA, 389 bp, Homo sapiens
acttcttccaggctttgctcacctcttcatctaacagaccattgacacctgcttggagattgatgacagctacaaattttacttactcctaagattataagttccctgtgatactaaggcctggcccaaattgcaaaattgttaaagcagaaactccagcttgcatgttgaaggaatacgtgaagtaaaagaaagctgtgaaataggctaactcagttaccatagcttatggttaagaaagctgcactggctgattgggaagcagttgcacactctctaggaccattaaggtcaaacttgggtgaaattttgcagcctccattcaaatttatcctgttttgtacaaaaacaaattggcgttcatttttctaacttgggttaggttttgt

SEQ ID NO: 191185 - DNA, 520 bp, Homo sapiens
tgttatctacttaaatactttcagggtattctactcaatcaaattaaatataaattcctgaagaagaaattaatatcttgttgctgatcccataagagaataaaacatataggaaaatgaaggtactgtaaaaaaagacactaaattagaacacagtattagtactagtattcattaagtgcctataaactacaagagaacaaagaccatacatatttcactcaccactgtgaatatataaacccatcaaggcctgacatataggggggtgctcaatatatatttgttgaatgaatcaagtttgtaagcagactgtgttaggttctaggcaatccgtttcttattttcaaggcacgtgtagctcaactgcccatccaagaagtttgcaccaccatcttttgtttttgtactggtggacttagcagcctttactggtggctggtagattcaaagaagtgaaggcctttagaccagagagataaaatgagctcatttttccacaagatttctaatgtttccc

SEQ ID NO: 191186 - DNA, 391 bp, Homo sapiens
ataaggacctgaactaaagttgatgtagtggggatggagtggaaaaaatatttcaggaaggacagagtcattgatttgtttgctgtgcccaggggacggataggtgccaaggatggtttcacatccaaagttcagcacacaggtgggtaccaatgctggtcattatcaaggattagaaacacaggagcaagctgaagagtgactgcatgatccttgacctttgggagaccttagtttgaatactgactcttgtttaccagctacacacatggcttaacctccctgaacttttctcatatgtacctgctgcaacagggttgttataaagaataggtgattctaggctgggcgcggtggctcatgcctgtaatcccagcactttgggaggccg

SEQ ID NO: 191187 - DNA, 417 bp, Homo sapiens
ttatccaagtcccacatttctgtttctgagaggtgttggactattgtctcactttgttactgtgcttatgttagagcagagctaattaaaatccttttgtaactttaattgagtgaccataattctcattgctctagggtttgacatttcaacaccttcaaatgggcctatatatttcctgagactaacctataggctgattttttaaaattgaacttcgtaaaaatttatctagctttggaaaagcaatattcaatagttttttcactcattcatttagtaaatggtctttcactgcctcctatgtcctgagcactgttctaggagcttgatacaggcagatacaaggtttgcttccagtccagtgaggggaattcagacaagcatacagtgtaatggtagaaccgactggtccgg

SEQ ID NO: 191188 - DNA, 424 bp, Homo sapiens
gttgctttgccaaacaaaagttgccagactagactagtgagctgaacaggcaaggaacacagaggtgagatcaaggaaggcagaacaagaatggagcgggatttaggaattaaagcaaatctgcaattaaatataactgaagtaatggtaaatttcaagagaactagactgtaagaactaacctcacattgtgggaaaataaaaattttaaccttttccccctttatttgaaatgttctatgactacttgaaagaatttaaaaatgaaagtatttgtcagttttgtccttgaatatctttcatttgtcatagaatacatattttgtccatagtattttgttttataagtgtgagggtagatttttttattgagagcctactaatatgcctggcactgttgaggtgcaggagatcgacagtgaaa

SEQ ID NO: 191189 - DNA, 417 bp, Homo sapiens
agtgaaaacacccttaaatcgtaaatggtataattcataagggttctgtggctttttgtaaagggcagagtaatttaacaggttaaaagaagtacagtggcgttaaacccattatgttagaatcacagaattttgggtatagaaacccattagaaatgttgcccagtgccttcattatacaggcaaagaaaactgaggcccaagataaggagttccaaactgtgctttcttatttgttattttaaaaaaacaagtttttatttgctaattctctatggccctgcaaatcctttattggaaataaccttggtctcactgctgtctttctgtcctttgtactgcgtaatggggcttgaggattagtgtgctgatatttgtgcatgtaaatgcttctgtatatgcatgtgccttctgaaa

SEQ ID NO: 191190 - DNA, 525 bp, Homo sapiens
cgaaatcatggccactgcactccagtctgagtgactaagactcttgtctcaaaaaaaaagaaaagaaaaaatgtctacaattaaaaagacgaaaagaagtgctagggaggatgtggagaaaagggaacacttacacattgttggtgggattgtaaactagtacagccactatagaaaactgtatggaggttcttcaaaaaattaaaaatagaactaccacatgatccagcaatctcagtactggatccatatccaaaggaaataaaatcattatgttgaagaaatatctgcactcccacgcttactgcatgactatttacaatggccaagatgtggaatcagcttaagtatccaacagcggatgaatggataaagaaaatgtggtatgtaacacagtggaatacataaaactgaatgaaatcctgcactttgtgacaacatagatgaacatggaggacatcatgttacatgaaataagccagacacagaaagacaaatacgatctcactcatgtggaatccttaa

SEQ ID NO: 191191 - DNA, 373 bp, Homo sapiens
gtggcaggaagagtgactgccctctagaaagggaatggaagtggtaaagaaccctggtacaagaggaaaaggaattcagctttggggttgttgtgtttggctgacagtgaagcatggagggggaaaggtttagtactcattgggaaaaaaggagctagaaatcatgtgagacgatggaactggaaataagcgagagtcatcagctcaagggagataattaacgttcctgagaaaacaagcatgaaagcctttataatgcattagcaaatgtgtttttcagttttatagctaaagaaacagaaggcgaggagaccttaatgaaatgacctcacctcttattttagatggaatggaagctagtcatatatttgaa

SEQ ID NO: 191192 - DNA, 268 bp, Homo sapiens
aacagaaaacagaaaagcaggccatctgcccactcacagaggacaagaggaggagatggagacctgaggtgaccagagtagaaaactaggatggaatggactcaggcaggtctcctgggaggctacatattagttatctattgctgtgtaacaaactgtcacaaagttgatggctcaaaacagcacacattcattatttcacagttcctatagctcagtgtgagcctgggcatggcttagctgtgtctatggttcatgaatctcataa

SEQ ID NO: 191193 - DNA, 464 bp, Homo sapiens
tcacatggagtctcgctctgtcacccaggctggagtgtagtggtggatgtcggctcactgcaagctccctctcctgggttcatgccattctcctgcctcagcctcccgagtagctgggactacaggcacccaccaccacgcccagctaagtttttgtatttttactagagacggggtttcaccatgttagccaggatggtctcgatctccagacctcgtgatccacctgcctcagcctctcaaagtgctgggattacaggcgtgagccaccttgcctggccaaaagattcttaaaaaaacaatctactgattctcaaagcctagtctgaaaggtaatttcatttggactatctaatattattaaggcaaaaaaaacacaacattaaacaaaagtttaaatttaaaagtttccatgcctctggctggccattttcactgcctttaagcctttgtgactcttcctc

SEQ ID NO: 191194 - DNA, 332 bp, Homo sapiens
cagtccaccttgctccacctgcattagtcttggcctgttctgttactcacaacccaatccacactctctccaattcaggacctctgggacacgggaaaggtgaaggaataggtaaataacaagactctcatatagttcccaatttaatcctcacaactatgctttgatagcagtactatacatatttgatagatgtgaagatgagactgaggcacagagaagtaccttgtccaggaacttacaactagaaagtggtaaagcctgaattcaaacgcagctgcatgtcaagggccatgctcataaacactatgcatactatctctcctaacaat

SEQ ID NO: 191195 - DNA, 439 bp, Homo sapiens
catgttattatagaggttttcagagatcctcagaaatctccaactgaaatcttacttgaggttaatttgggggagaattgagattttatgataataaaccacccttcccaaaagtatagactgtctccccaattattcttctcatcttatatgttctttagactaatttaaaactttttctttatttttttattaaataaggttatcaatactttatagatttttatgctattgtgaattagatcttatttttgaattctgtttttctagtgagttttccttgtctagagaaatgttcttgattttaatttattcgctatgctgtgtttctcaagagcagaggctgcatctttcgtctctgtattcccagtgtttaaaacattgcatggtaagtgatcaatgaatgtttgtttgttgaatgaatgaatgaatgagcagg

SEQ ID NO: 191196 - DNA, 464 bp, Homo sapiens
aggcacaggtgagcgcaaagtcccagtgcatgtcccctcttctctcccgatgcagtgtcattcccaggtgaacctgccgggctgaacggcctggcccctctattcagtcggagttttactactccagtggattttggtaacttcatttggaaataatttcagacttacaaaaatgttgcaagaatgacacaaagaaccacccttttatatctgccccacttgttttcatgttttccctctttgcacacatgtacaatttatttcagaaaaaactacagacatgatactgcttttcctacactaaaaatacttcagtgtatatttcccaaaaataggagtaatcccttatgtaaccacagtgtaattatcaaaattcacaaatagtgttacaaaactattatctgatctatggaccttattcagattttaccacttgtcccaacaatgcccttctcagaaaaaaa

SEQ ID NO: 191197 - DNA, 594 bp, Homo sapiens
gctatgatcaacgcgttgggagctctcatattgtcgacctgcaggcggcgcgaattcactagtgattatccccggctcctgggtaggataggagagcattcctgattttgaggaggaaggatagagggttttactggtgaatgacgtgagtaagtgtcatgaccgctcgtattctcaggattcttcagtattgggagatgtgactgcagtggacagggcagtgtcagagagactagattttataatagaagcttttaaattacctacccatcaccaacttatcaggagactgacactgtccatctcctccaaaaaaaaaaactgacctgcccggcactttgatgtccaccagttgagctttatgtttatcaagaatagttgtgtaaacttccaaaactgtttatggcaggcacagtggctcacgcctgtaatcccagcactttgggagggtgatgtgggtagatgacttgaggtcaggagtttgagaccagcctggccaacgtggtgaaaccccatctctactaaaaatacaaaaaagaaattagccaggcgtggtagcgggcgcctgtaatcccagctactcaggaggctgag

SEQ ID NO: 191198 - DNA, 394 bp, Homo sapiens
ccccttcctcctcaacagccctccagtgccctggtagccgccagtccccgcctggcgttttgaggttccacaatcaactttggcatgttttgactggcagggccttcaccaacacctatctcttctacggtgcgtaccgagtggggccggagagcagctccgtgtacagcatccgcctggcctacctcctcagcccgctggcctgcctgctcctctgcttctgtgggactctgcggcggatggtgaaggggctgccgcagaagactctgctgggtcagggctatcaggcgcctctcagcgccaaggtcttctcctcatgggacttctgcatccgggtgcaggaagcagccaccatcaagaagcatgagatcagcaacgagttcaaggtgtgtgc

SEQ ID NO: 191199 - DNA, 340 bp, Homo sapiens
tgctgtcgctactttgtgtagtacaactttcaggttataaaagcaaaatgggaagaaagtattaaatgcttttacagtggactaatgaaaacaatcccagagcattatttactttcatggtaaatcatagtgtgaaaaaaaaaaaacagtatacattcctgttactgaccactgtcactaaacaccatggaacactggctctttttatcctcttcctataattacacaagcgtctagatcaccagaggtagtaaatgacagagccagggttaaaatccacctctgtctgacagattctagagtcttagttttcactccctatgctattctatctctctag

SEQ ID NO: 191200 - DNA, 746 bp, Homo sapiens
aaatacatcaacgcagaaaaaaaagattttctttttaggtctcgaagatctgtatacaagatgctggaaccaagtcacactgaaaaagttgacagcctggaaatttctatatgtggctggccagagatgtataaagaatacagtggggcttactggagataacagcacttcccagatgaggggtgctgcagtgtagaccaaggggccacgacactttagaggtggtactggcctctgagaaggcagaggtctctaagaattaaagaactcctatgacttaaggtcagcagagataggctatcttgaaagaaatgatctacctcccttccctgagggagatagaacctcaggaaacctcccttcaaaattagaaccaagatgagaatgaagttgaaggatgaagatgttttatataatatctttacttacaaaaattaaaagaccaaagatgtgctgtaattctgaacttcactggatctacaaacatcaatagtggtcggcagggcgtgggggctcatgccagtgatcccagcactttgggaggccaaggtgggtggatcagttggggtcaggatttcgagaccagtctggccaacatggtgaaacctcgtctttactaaaaatgcaaaaattagccaggcgtgttggcggaccctggggagccagaggttgcagtgagcggagatcgtgccgctacactccagcctgggcgacagagactccaactcaaaaaaaaaaaaaaaaaa

SEQ ID NO: 191201 - DNA, 709 bp, Homo sapiens
gcacaactgcatgcactctgttggtgaaattacttcagtcaatgttcaggactgtaaatactcagggaaaaggtcatttttgtttctatcctgctcagaagaaaataaatctcttctttccctttaatctaataaatcaaaggagcactggaaagcatcttttcagttgtaattttatttcgatgttttgctcaccatgtcacactgtttaagaaactgttatgtctgccaaaaagaacagttattggccttattttgcaggtgatagagccattaccattcaccagaccagtatttaggacatgcatactgaattatttaacactaataatgcacatgggacacattaaagtaaaaaatgggataagtaacttcattgcaataacatttatttcctcctggcttgcccaactgttctcttttgttcaagggcacaccaagaacttcaaagatgataatcctgggtacctaactgctttgcttctttcaaccacaacccacttactctctgctttgcctggtcaaaaacatagttgtggaattgacttccagcatgacagtttaaggagctctgctgtcctgttccacggtgaaactgataaaaattataaaaaccaaacaaaaactattcagagtttcttgaaatggtcctaagggcaaaagagtaaataagaacacatttattcaagaacatttattaaaactcagt

SEQ ID NO: 191202 - DNA, 547 bp, Homo sapiens
attggaacagcagtgcaaggtgaggcacgggcccagtgagtgccagtgcatgctgctcagctatttagctgggtgtaacacagaaactagtaaaagtcaagatcttttgtgcattcacggatcaaggacctactacgcactcagtcttgtgtcggtgctgatactgctgaggtaaataagattgtttttgccctgaagggtcttgtaatctggtagtcatcaaaaatgaaaaattacaacaatatagatgtgtccagggaactgtggggtctcagtggaagatgcacccttcattccaccagagacagatgggaaggcttccaggaaaagaccctaaagtgcacctcggaggacggcatagaaacacccagtccagggagggaggggctcagtgagccctgacgggacccctaggatgaagcacatctcaggggagagtggcaggtgagaggtttcttccacagctgtgagacccgggaacaaccagcagtcgttgagagacagaagatggaggaggccgaggcagctcacatgggccctgcacgtg

SEQ ID NO: 191203 - DNA, 576 bp, Homo sapiens
tctcttatgcagaagagtgatccacaaatgaaattcaccatctctttcctactttaagttggtctgatcaaaggaatttttttgtttgttttccttccgtgtcagaacgacagctgctctgactgtaaattaagtatcaatacttttgaccaggagttacagaaaggaggagggggttactatattgacaactgactcgagggagttttctttctacttccaaaggaaactaacctggctttggacggtgattgttcctcaaggaagggactgtcttgggtttctttctggttctgtaacagtgtcccacatccaggggtgctaatcaacgtgtggtgctggtggacagagcagatggcacgtgggaggggaaagagcacccaaacaggatgcaaaaagaggcacttgaaattaccactttagaaaataaagtgatgtttatgcacagaataacacaatttcttgttcacacatcccacctatgacattaatcagagccttcacctatgggctgaatgtcatgttttccactcctagtagtttacagattttttactttgaagtggaagacacaaa

SEQ ID NO: 191204 - DNA, 264 bp, Homo sapiens
tggtcgctgttgatgtatagaagagctactgatttgtgtacattaatcttgtattcagaaactttgccaagttcttttatccgttctaggatctttctggaggagtctttagggttttcaaggtaaatgatcatatcttcaacaaacagtgacagtttgacttcctctttaccattttggatgccctttatttctttcttgtgtctgattgctctggctaggactttcagtactatgttgaagaggagtggtgagagtgggcat

SEQ ID NO: 191205 - DNA, 421 bp, Homo sapiens
gcgaagatgtagagaaagcagttatcttgcaaattgctagtgagaacataaagtggtgtagccattttggaaacagtctggtagtttctgagaataaaggtaaatatagagttaccatatgatccatcaatcctacctaattccactcaagagaactcaaaacatccatacaaaaacttgtatacaaatgttcacagcagcattattcatcagagccaaaaagttagaaaaaaacaaatgtcctgtccatcaactgatgaatgggtaaacaaaatatggcataaatcagtacttcattccttttaaggccaaatcttgtgtgtgtgcgtgcgtgcgtgcatgcgtgtgtgtgtgtgagacagagtcctgctccgtcacccaggcttcagtccagtggcatgattatggctcactgcaacct

SEQ ID NO: 191206 - DNA, 412 bp, Homo sapiens
gaggtgggaagatgaaggaatcacagcaaaaccttccaatccaaggacccagtctgtggctctagattttcttgcttccatggtaacaggaaactcgggctgagcaaccacaaaaacttggtagtcccaaaagctaagaaaccaagggccatattaacagaagcctaagtcccagtttaaaggaggagcgatcatgagacctgctctcctctgctccctcaagtcctcacttgcagtctgtactgaacaccaggtgtcactttccaacgactagtggtccaagggagggaaggaggcctgagtggagtggggtctggagccccacatctctgtgcccacccagagatgtggcatcctctgcccagctgtgctgtctcatgaagagtgggtggagaacttctgactccacgcc

SEQ ID NO: 191207 - DNA, 139 bp, Homo sapiens
attgcatcaatggcaaaaaagtgagcagacttctttgaatgagtatctggagagctcgctgggccaacagcaatatgttttaccaccactagcttctatctagcccactgaatgctgaaatgaccatgactggtgagca

SEQ ID NO: 191208 - DNA, 559 bp, Homo sapiens
acttatattaaacattgctatacctgtttgttcaaagtatgcatatagacatttaatatggggactcggcatttctctcataactttaaaaaaaagttgaacacagaattatgagtttataacactgattgtccatattaatctcccataaacatctttttcatgttgattatattaaaacattttatatttgttaggtacaataaaaattggagctaaatatttcatttttctagaaattcattttttatttaacgataaagtattagtctacaataaactaggaaaacaaaatgaaaggtggtcccttcaccacagactgagaggtacctgatccagaagagggaataaatgctaggttaatcaaagtaggaggctgtacattactcactggaatctattaagttaatggtcatagttcatataaattggggccaggaagttaaacttttctgaacacagggctagcaaaataataaagcaacattttgtgaaaggacggttttctatagattcaatttccaattttctgctctcacagagctcaaaacatcctaca

SEQ ID NO: 191209 - DNA, 389 bp, Homo sapiens
ctgcgaatacaaacgtgcaccaccatgcctggctaatttttgtattgttttgtagagatggggtctcactatgttgcccatgctgttaggggagacctactttaaacaggagactttttgtttgtttgtttttgttgttgttgtttgtttgtttttggctgagacctaaagaatgatagtggagggaagtgagaatggcatgtgcctggtgcagcaaagaaaaggacatgttagaggagcttaaagcagacctttgtggatgtagcctaaggagcaggggagagagtggcacagggggagttgagataaagacaggagcaagcttattcacagactaaggtggggactcagaaacctttgagattttaatgagaggaatgtcatcatct

SEQ ID NO: 191210 - DNA, 176 bp, Homo sapiens
ggagggacacagttcaacccataacatcaacctcttctacatgttgatgttagttacttcccttttctttgagctcttttcatgatcatctgtttcatcctccccaccccacctctcacaccctttcttctgtttgtatttccttgccggcttttatcctcagcctgaaaataagt

SEQ ID NO: 191211 - DNA, 606 bp, Homo sapiens
ccccataagaccaggagggtagagtctctgctatcagactaggagagtcatgtctccctcgttagactgggaaggtggtgtctcactcattagactaggagggtggtgtctctgccattcgactgggaagacagcgtctcctctatcagactgggagggccacattcccccaacaatgaaccgggaagatgatgtctcctccattaaactaggcaggtggtgtctcctccatcagcctgggagggtggtgccccccccatcagactggaagggtggcatctcccatatcaaactgggaaagtcacatttcccccatcagactggggaggcagcatctcctccatcagactaggagggccacatccccgccacaatgaactgggaaggtgtctcctccatcagcctgggagggtggcatctcctccatcagactgggagggcggcatctcctccatcagactgggagggccaaataccccaccccattgaactgggaaggtgccgtctcctctatcaaactggaaggctggtgtccctccacatccaatcggaaggtggcatctgccacatcagactgggagagaggtgttccctctattatactga

SEQ ID NO: 191212 - DNA, 185 bp, Homo sapiens
cctgttgtggaactgagccctcaatttgtggggtctgtggaaatgttaagtggtgtcagcattgaattattgaacaccagtttttcttggagaattggctcgtgttcagcaaatgctacatatttgctgtcagaagtaatgttagataaaatacaccatgggtcagaaccataactctgaatttg

SEQ ID NO: 191213 - DNA, 289 bp, Homo sapiens
atgtctgataatacacaggaggacgtagaaatccataaaccactggtaggagtataaactagtacaatcatgttggaaaacaatttgacactagtttacaatgatgaaaaggcacatagaaactccactcctagctatatactagtgattatgaaccttggttgcccattaaaatctcctgaaaggcttttctaaaaatcagactgcccagactacactccggacaaatgaagtaactatctctgaaggagggacttagttgtcaattgtttaaacctcccagggtgat

SEQ ID NO: 191214 - DNA, 317 bp, Homo sapiens
atcaacaagctaaagaagaaaaatctcatattaatagatggagaaaaagtatttgacaagatccaatacccattcacagtaaaacttcttggtaaactaggaatagatgggaatggcctcagtttgatgaatatctacaaaaacctatagccatatatttgaatttagagaagctacttctacgctaactacacataagggctatgtttctagtacagaatattgattaaaacctttcctgttttgattaaatctagccacatgattctcctagtgaagggatttaatcttgaaattggtggaatattttagatggt

SEQ ID NO: 191215 - DNA, 529 bp, Homo sapiens
ttggtgatcaactttaggcacgctggcaatttcccaggacaaccccgtcttaggttctgaacatcagaggcaatggctaaggtcccccaaagcactttggaatgagcccaggaagttgacctttgaagcactctcctgctcttggggccatgtcatcaggaagaaactccaggctgaaaacacaactgcaaggccaacaggcaggggagcagctttctcaggacacctgaggtcctgccccaccaggctctggtctttacacaccatctctcactgtcctctagccccaactgcacattgccttcctccttcctgagctcatgcttgcccctccctcggcatctccctagccccagcctgaaggctgacctcctccagaaagcctctccctcaccacgaggccagaaagagtctgtcctgtctctagcttctgagtttcttagtcccaacgactgtccctgctccactgacaccttccatacacagctttgtgagctgtgcgcatctgtgggtaccagagggtaagttc

SEQ ID NO: 191216 - DNA, 399 bp, Homo sapiens
atcgctggtgatctagaggatccctagggtttagggaggcatgacagcaccactcactgcactccagactgggcaacacagcaagaccctgtctccagaaacaaaaggagtccagccatgactcttctacccaccaaaaacataaatccaactgtctcctgaatatgcctgcctggatatcatagtcatctcaagcttgaacaaaactcaattcaatctttcaagcccctcttccatatcctcctcctatactccctaactcatttgtaaataccaccatcagtcaccaaaaccaaaaattcaaatgttatctctaactcctttaccctcttcattaaatcaatcaagtcttaccttgataacacgaaagtattactgcactctctcccaaccattcta

SEQ ID NO: 191217 - DNA, 390 bp, Homo sapiens
aaaaaattagctgggctatggtggtgcatgtctatagtcccaggtactagggaggctgaggtgggaggatcgcctgggcctgggggattgaggctgcagtgagccgtgagagacacagtgagaccccgactaaaaggaaaaaaaggaatgtaggtaaaacaaattcaattttactatatgtgttgttgaagtgagcacataaaacaaattcaaaatgatacagttatgtttgacagtggagcaatagtaaattggacttaaaaaactttattatgaaaaatttcaaatatattcaaaagcagagataatagtaaaatgtactattgcataacgattacccagaatgaatattattaaatcctgtcaatctggttttacccaggtcctcac

SEQ ID NO: 191218 - DNA, 182 bp, Homo sapiens
atggcataactagtatatgtagtagagaatggagaggtggtaaatgaaaaggctactgaaagattctaactaagcaaagtaagacagcttggtagagagaaagatgaaagactggggaaagaataggacaggacagtgagaaaggaagatgagaaactgggaaaaggttttgaggttgatct

SEQ ID NO: 191219 - DNA, 286 bp, Homo sapiens
tcaaaaatatcagaaccaaatcactgttattaatttgttaatcttacttaaaggcctttgtaaaatggtgatacagtcaagtgctgcataatgacatttcggtcagtgacagactgcatgtacaatggtgatcccataagattattatacggtctttaagtaagattaacaaattaatgttctcattagtactatgaaccccccaaatttgagacaagcctcaattaatttagaaagtttattttgccgaggttgaggacacacatccgtgacacagccatttagg

SEQ ID NO: 191220 - DNA, 621 bp, Homo sapiens
ggtatatatacacatatatacatatatacacataggtatatatacacatatatacatatatacacataggtatatatacacatatatacatatatacacataggtatatatacacatatatacatatatacacataggtatatatacacatatatacatatatacacataggtatatatacacatatatacatatatacacataggtatatatacacatatatacatatatacacataggtatatatacacatatatacatatatacacataggtatatatacacatatatatttatacacataggtatatatacacatatatacatatatacacataggtatatatacacatatatacatatatacatatatatacatatatacatatatatatggatttttttttgagacacggtctctgtcgctcagactaattatagctcactgcagtctcgacctcctgggctcaagtgatcctctcacctcagcctcccaagtagctgggacttcaggcgccccaccacgccctgctaattttggtgttttttgtagagacggggtctcgccgtgttgtccaagctggtcccgaacccctgggctcaaacaatcctcccgcctca

SEQ ID NO: 191221 - DNA, 386 bp, Homo sapiens
ctagtggtcctgcaaatatctgcctaccatctggggcttatcttttaagattgtttttggtgttcatgtgtcctggatatagttttattcctaactataattcatgaaatacttgcaatcaaccccatttgatagatgagaaaactgatcctgtgtgctacgttaacccagctgtaatggaaaagaggcacaactcgagcccaggtctctataacccttgcttcctccaagttctcttctaggccatcctctctcttaggtgagaggtaggaaagcatgtctgtaccagcaggtggcaccaggaatggcatgaaaggaaccaagcaagggctattgctagagaaaaagcaagacaaaggcctggagtggtggttcatacctgtaat

SEQ ID NO: 191222 - DNA, 319 bp, Homo sapiens
atctctgtcccatgtttcttgtccctgctccatctctctgtactcctgtccccctacccctctgcatccctgtacctgtctctccacggccctgtccttgtctgtctctcattctgtttttctctatatctcttgcacacgtgtgcacacagatggccagggccctgcacatttctggcttctgagtcacaaccccacgtcaactcaccactaaggatgtgtcccaggcagcttctgcctggcccctctggtcacctcctcccagattccaagttctcaacatctgcagggagggagggaagctaaggaattggccaag

SEQ ID NO: 191223 - DNA, 343 bp, Homo sapiens
ataaggatccccgttcgaccgagcagcgattagggtggtgtagtcagaaaccaaagcataatgccaacagtcaccagaagctcaaggaattattctccccaagagcctctgagggggtgtgccctgctgacaccctgattttggatttctgtcctccaaaactgtgagaaaataaattattgttgttttaagccacccagtttgtggtaatttgttgccacagccacagtaaactaatataggctgggtgcagtggctcaggcctgtaatcccagcactttgggaggccgaggtgggtggatcacttgaggtcaggagttcgagaccagcctggccaacatgg

SEQ ID NO: 191224 - DNA, 451 bp, Homo sapiens
agtcaaaaatattgagatgagatcatcctggagtagttgagtgtacccaaaataccatgataggtatccctaaaataatagacacagaggaaaagatacacatgaaggtgaaggcaatgagaagacagaagcagcgattagggtggtgtagtcagaaaccaaagcataatgccaacagtcaccagaagctcaaggaattattctccccaagagcctctgagggggtgtgccctgctgacaccctgattttggatttctgtcctccaaaactgtgagaaaataaattattgttgttttaagccacccagtttgtggtaatttgttgccacagccacagtaaactaatataggctgggtgcagtggctcaggcctgtaatcccagcactttgggaggccgaggtgggtggatcacttgaggtcaggagttcgagaccagcctggccaacatgg

SEQ ID NO: 191225 - DNA, 149 bp, Homo sapiens
ctcacgtctgcccagctcctgtggtagtcccattcatgcagggaggcctttttacaagttgaggatcatgaggagtactgccctcacctcttaggagaatgggaggaaacagtttacacagacttagatcaaatacaaaaaagcacttt

SEQ ID NO: 191226 - DNA, 535 bp, Homo sapiens
tgtgtgttctgcctttgttctctgttttggttaatggcatcaccaaccatccactcacccaacctaaatacttcaaagtatctgtgtgtcttccctctttgtgtctaatcaggtgctaaaacctgttggctcttctccagagtaccccttaaatgtggtttttctctccctcttatattttgactttagatccaaatggtctctggatctagcctcctacctgacactctgctactcatcttatatcctagatttgtaacctaaccatcattagtatcaagttgatcttgtttttctctttaaaaacttcttgtgactccttgctgcctaaaaaattaagcttaaagacattacattcaagacatttacagactggctggaacccagtctcatttcctgccagtctactagctataaatctgacctctgtagccaaattacgcatttccattcttccataaccttgcttgaactgttcccttgtttggaatactgttttcctttccttcttcttcacacatagaacccttcacat

SEQ ID NO: 191227 - DNA, 117 bp, Homo sapiens
gaaataaatccagatgttcaagatgcatatatccagtgacctacttgacatattcatacaaggaatttgcagatacctcaaacagcacgtccaaaactgaactctcactgcacactt

SEQ ID NO: 191228 - DNA, 207 bp, Homo sapiens
tgctgaaatattataggcaagaattagtgagggcctgcatcattacaatgctggaagggatggagaggagggcccaagttggagaaacacaggccacctgaaaccctgaagaagttgtgacttaccaaagtcacagtcaacagacacgtggtcagaaacccagcctgctagccccttgtgatttccaaatgtcctgggtttgatgca

SEQ ID NO: 191229 - DNA, 546 bp, Homo sapiens
atgagcatcgtaataataccaactcatagggttgctcttagtgcccatatatataaaagcactgagaacactgcctggcccattataagttccttatatactagacaatatttgcactgttctcatcagaacccaagtgtacactgtcagaggagtagacaaacctgtaaattcacacaatcaaaagcgatccagcaatgaaagtgaatgaactaagcttaagctgcagaagactacctataatattgtactatatcaaattcaaaaccaagcaaaaataaacgattaattgtgcagggaaatacatatagagtaaaactttaaaaaagaagatgaaacctaaataaagtgaggctgggatatttgaaggaaacaaggcaaggatgtctagtgcatggcaaatgacgacagctgtaagatgtgacatcaggctgtgcatggtggctcacgcctgtgatcccagcaccttgggaggccaaggcaggtggatcacctgaggtcaggagttcgagagagcctggccaacatggtgaaaccccatctcta

SEQ ID NO: 191230 - DNA, 420 bp, Homo sapiens
aagaagacttggcatctaaaagggactcgataaatagttttggataattaaatactgaaagtttagaaattactccactgatcattgtgaaacaatactgaaacagtagaaaccttcgaagctttggagcagagaagagacagatttataaaactgcttttataatgctagtttgatatagtggaaatgatgcatccgaagagtggaaagagaaggaggacagggaatccaaataggagactactgaaattaatacaggcataatgccaaatctcctgtcacttagaccaactccagaaaaagtggaaagaaaggagagtgttgattgtttgcttttctctaaattctacactccccccaccccaccaatcctgtacttatctgtataagagccaggagatatttcattgtatcaggtgg

SEQ ID NO: 191231 - DNA, 233 bp, Homo sapiens
gctgtatgggttagtagtatcacatatactatcactttcatgttttcagaactgggaagggaaagttgcactacctgctttggtttgcatggcgatagttcagctgattgtcgggcatctttcgaaaacctgtactgaaatcaggacaacttctgaggctccctggagagaactcccctgcctattgttgtccacagaatatgtatttatataatctcaatacttactgcgtg

SEQ ID NO: 191232 - DNA, 973 bp, Homo sapiens
tgaatgatttactttttaaaaaataaagtaaagcaaataaaagaatatccctccaacacacaccattatcattcacacactgttatattttcaagacagatggaagttcagaggaactgtatacataatgctggattcatccatctgagtccattaaacaagtcaacttccttcatatacgttcttgtggaaatagaaaagtgagaattactgatgtgtcttcctatgtactaatctgccctgtaatagagctatttcagagagaaattgtacgagttccataagtctcctggattgcctaagttataatagaaatgaaaaatgtggggaaaaatggccaagtgtaaatgaattggccagggttcatagaagatttccataacttgattcaggtctgaaataaaaagaacaatattttcctctgaaaagtgtatcgaaaacctgcctgagattttaatataaaatcatgtctagggcagagaagaagctgcccaatatattgacataaagactatatctggtacgatgaatggaaattgaatagcatcagaccaaattcgctgtgcttatgccttttctgatttgtactttgtatccaagaaaatattactttatcttatatgagatgttttgcacatttgagggtaatgtgcacaaatgttttgcacatttgagggtaatgggtgtgtgatagtgtatgtgtgttaagagagatacagaaagcatagaatgtaattagctaaaacaaagtacatttccagtttgcatgagaataaaatatttgtgaaagattttgataaaatcaaacgttggatataataaggaaaattgttttttaactttctggagtagaatatttctaaagtgtattctaaaatgacaagttttccaggaaatgctgatgtgtaaatgttaggtgtttgtaaatgttaggtattcattttccaggaaatgctaagatttgtaaatgtta

SEQ ID NO: 191233 - DNA, 290 bp, Homo sapiens
tgatttatttaaaagagaactcttctgtatgtggaatcctgaagattctatatagaaggatcaaaatatcatgctttgagttactattaagtgttttatagacccgtggggccagattaatcaaaagaataatcagtggattataaagaaaatcttacagatttcataaaatcttcactatcaatctttccctctaggttactagttaaatgaataatgtctaatgaagtccctatatcaaattagactgcttagcactgtggcagtgtagagatatttaactaaaggtt

SEQ ID NO: 191234 - DNA, 119 bp, Homo sapiens
gtaccttttgggatcttcagtaaccctgtcttgggatagtctccccaccagcaccaggtcttgccatctgaccatttgccagttcccacctccccttctctaagagacttcagcacaca

SEQ ID NO: 191235 - DNA, 159 bp, Homo sapiens
gagacaggaaagggctcctccacaatagggcctgcatttctttataattcaccccaaaaagaacagcaccccatgaggggctgcttctgacagattctagccatgcctctcggcggagagctacactttggcctttcattctaaggctaatcctccgaa

SEQ ID NO: 191236 - DNA, 264 bp, Homo sapiens
atgcaggtgatctagaggactccccggaatggtggtgttgtgcttaataattgtctttgacgagttaatgggtgcagcacaccaacatggcgcatgtatacatatgtaacaaacctgcacattgtacacatgtaccctagaactgaaattataatgaaacaacaacaacaacaacaacaaaataataataataattgtctttgaatggctgactgaaagcacattcatattatctagtcaaatgaatgtccaccctccactata

SEQ ID NO: 191237 - DNA, 298 bp, Homo sapiens
  misc_feature (1)..(1): n is a, c, g, or t
  misc_feature (12)..(12): n is a, c, g, or t
nagatcccccanccatctaaagtatgttttccttcttaactcttggaaatgggtaacttaacatagtctgataaaattttagaaaacgatttaaaaatgctaaacttctaggtcataaactaatattttcctggtatggaaactattctgtacgttatactttttaggcacagcattgctcatcaaagggtaattcaatctacagacaaattacagtgtaagccatatacaatgttttaagtggtacatgccagagtgcaatagccatgattctgacaagaacctttgtgcctgtttg

SEQ ID NO: 191238 - DNA, 180 bp, Homo sapiens
ctgaaaaagagggagtggtgagggaaggtggaaacacagggccagattctgtaagcccttgtaagctatgttaagaattttagatcttatcttaaatacaaagagaagccattgaaagtctcagggaagagactgatcggatttgcatttcagaaagcccatcacatgtgaatgtgatgg

SEQ ID NO: 191239 - DNA, 711 bp, Homo sapiens
ctcagcttcaactctagggatcaggtcagcctcacttctggaaaacatgtttcactgtgatgtttatcaaatgcaacttaaactagggattcaactacaattacacagtcacattcctgtagtgaggacacatcatctcactaggtagggttctctgcctcttaaagaatgaaaagataaggaaacgatcaccaaatgggttacaccaccatatcctgcaacttgagctctgacggaagcgggagtccgagggcactgaccggactggggcagagggccaactgcaaggtttggggaaagccttttctgggctcctattggaaaggggcactgggtggatcatagccaaacttctttgacacacaggggcagcagttgagagatgatcacacagagctttcagtaactcccaaatggactagagcgtatgagagatgataaaggcccagagagagaggatttgcccttgccttagtccccacccaaactcactcactgatgaagtatccactgagacttaatgtctttgatagtgtaacactccacttaaaagcaaacaagtgctattttcttgaaacctacaattttagttaaaaaaaaaaattgttaaaaaaaataggagtggggatggaggacagatcactctcaaaccagaccctcatctgccctggaatcactactgcattcccactggtaaacatttctgtctct

SEQ ID NO: 191240 - DNA, 425 bp, Homo sapiens
gttaaaaaaataaaaatatgaggcaagaggatggtttgagcccaagagtttgaggctgcagtgatagtactacagtactctaacctcggggacaaagtgaaactctgtctttaaaaatttcaagaaaagaaaaagaaaaacattgggctggctccaaaaaactgactttgagctacatatgacctatgggctgtatactggtggatctttaatagcttctaaaaaagaagttcaagatctaagtagggccttggctaaattttaatttcttccttagaatactttaaacagcacttttcattattaatttctgggtatgtttcagggggcagaaataaggacatttctcgttaactactgtttacactgtctttgggtgaaggaagattagtatgatgaacttagaggaaacacactgtttacac

SEQ ID NO: 191241 - DNA, 484 bp, Homo sapiens
aaccaagtgaggcgaggttccacatcgccggccaagtggctttatgggcctccagtgggatgtggcaggaagtacccagcggctctgccatgcattcttgaccagaaatgttgaacccgagttaattgtgaggaaacggacaaatccagggtgtggggcacgccgcagagagctgccttagccgcttcaacaccatcaggccagagtaggcggggagcgtctcggggaaaggggacagagagacgtgccatccaaatgcatgtgtgtcctccacggggccctgcatccccgcagctaggaaggtcatctggggacagttggtgaaatggaaacagggacgggatgttcggcagtattctgtcggtattcatttcttgggtgtgctcatggtgtcctagtgagcaggctgtcctgattcgtaggagatgtggacggacatggagggagtgccgtgacgtagcccaggagacctttttagcttaaa

SEQ ID NO: 191242 - DNA, 450 bp, Homo sapiens
ggcgcgaattcactagtgattagagactgcgagaaggagctaccaggcttcctgcagctctctggcccagggctgggtcatcagcacaccctgctgctgctgttcagatctgcatcctggtcccgcttggtcccacagtgagaacgctttgctatcacatgggcaggctctgagagccctgccggcctggccttctcaaagaagacctgagagcttgggacccaagcagagaggaagaacagggctcagggtgcttgctccatgctcgctccacacctggggctcaaccctggctttccccggctccctgtgtgacttcagggcaggtcccttgggccctctgggccttatcatcttcatctgtaacagggcgatgcctctgccgtgtctggtggtgttgaggagttcctgtttgtgtaagcagctagttcagtgccagcacgagatggg

SEQ ID NO: 191243 - DNA, 472 bp, Homo sapiens
ctcttcaaggccacatgattccagtacaaccgcttgcggggttccaagccacttcttggctatgtaaatgcagcacatagactagccatgtgagggcagcagagggccactacataggtgcaacctttggcttcaaaattcttggaccattctgacgtgattaaactaaaaacgaatgagtttatgcatatcgagataccctgaggtgtacaaaggatgagtcaaggtagcggagagagagttgaagagtgacagctgagaaacagagataggacatgtccaagaagtgccaggataacccaacaacacaggctgattgaggaaactgccagagattagacaaagtagactgaagagggaaagcaatgtttgttggagattttgctttagtttttgataaatatttcttagtcataccaattgttttaaatataattacgcccccaaaccaaatttctactcttattctggc

SEQ ID NO: 191244 - DNA, 482 bp, Homo sapiens
acgcgacgagctccgaatggagtccttctcctattaaaagggagtgaaaagaactgtttcaagatgaggcccaggatgattctacaagggaatacacttattactttgcatttcaattgctattctaacctattatatatgaaactttttgctagcaaagtaaaaaaagtctgcagtatttactttcatggctaggccaatgagtatgaggttaatgattcattaaagcagcaataaacttgaaaactagcctcagttgaaccctttagggtttatacaaatgctactccaaaagtcgggccccattccattaacacgtgctatggttagtaagtatggattatagggtatgttaacattaatttgcgctatggttagtaagtatggattatagcgtatgtttaataaagtattcttattttaggtcctcttaaatgatgctagttagcaaaggcagcatactggcaaaatactactcctgg

SEQ ID NO: 191245 - DNA, 494 bp, Homo sapiens
aaagactgaaaaaaaaaatctcaggtaagcaatctaatcttggcagtatttttgaggtcttggagactgatcccaggggctgtccaccctgtggtgtccttgtgcttcatcctaagctgtcccagatgcactgggtagctctggcttctgttgactccaaggccccaaatactgatttgtagctataagacttctaccttgcaaaagttgtgagtgaaggttttagcaggcactagacatacagtggtcactccgtacacggccctgtgcttctgacagctggcgtgcatatccaaacagactccagagtttggccatgcagaaaccagtccttatatttatcagaacaagctttatgggaatgaattccaggcttgtaaaatttggcagcacagatggccactcactctctctgcatagaatatttagccagttctgaaggtaattatctgccttggttttgtaactaaagactaccagcaaaggaatcaggg

SEQ ID NO: 191246 - DNA, 358 bp, Homo sapiens
actggcttgctcacggctccgtgtgaccgctgaggtctgctctacctctgccatgcctggtaggatggagttccgactggccacgttggcaaaatggcttgataatccccgtctaaataagccccttcccttccctgcctcactgttgttgctctttgtgatcactgatggggctcggacaccccaggataagcaccttgacatagtgagtatttgacgatgcaggaaactgagaaaaccacagaagcaagaaggtcactttctgacctcattcccgtctaccctgaagtaggtcgtcttcattaacgttcttatctcagaagacacagagaggccaagaagaacccgaacaaacagg

SEQ ID NO: 191247 - DNA, 232 bp, Homo sapiens
tcctggcgtctggaaggagcagggggtgactgacgaagagcaggaggtcagaggggcaaggtcagagtgagcataaaggacagaggtaggagctgatgttagcagggaggcagggccaggtcgcacaggaaaactgggcatctaagtctggggtgaggcaggggaatgacctgatctcttgggttgttgggaggagaatggactggatgggaggggccagagtgtaagctgt

SEQ ID NO: 191248 - DNA, 334 bp, Homo sapiens
atccctgccagtcttggtttcttcagcaagccattttgctgaagtagatgtcaaagtattttgcctagactatcaagcctttctggaaatgctaatgcatgctcaagtttgagaagcactcatttaggctaatgacttagatatatttgcccaaataatactcattttttctttcctcctaagacattttcatgtacgaacagaaaagtaactacaaaaagctaagtattttcttcttagcaatgtatctcacttaaagatttgaaactggggcatgcaaatcaaactcagaaattatcttaatatctgattgttaaaagctattccttatatt

SEQ ID NO: 191249 - DNA, 183 bp, Homo sapiens
aagtgattcaaatagtaatgatgctataataggacacattgctaggtcttaacctatcaggatgaaggacacataatagtatttctgaagacaggggacctcagagaggtacataagctgtacctggttccctggttccttgttcttaaagaattaactacaccatgctttaagactggtcag

SEQ ID NO: 191250 - DNA, 505 bp, Homo sapiens
caacagagcgagactccatctcaaaaacaaacaaaaaaacaaaaacaaaacaaaaaaaaaacacacctccattcctacccaagaagttcagccgagtggatgagacaggaattctgatgcaagaggatgaaaagggctctgttcacagttaacacagggatctctggcagcctattctaaagattggaagtcagggagaacttcctgggggaggtggcatgagttgcatctttaggaagcaaagaagattaaaaggttacaagttgttgtgtgggttgtagaggaatgggtggagacaagctgagtttctaaggcctcatgggcaagggacagaaggacaacaaactgtgtgaaacatacccacccaagagcacggatgcacaaataaaggtggtcttggctctgcccactgcttcacacttgtcatttcagacccattatgaggctgcaatcaggactgggcggcttttctcattcacgagagggcactacattctgctaactc

SEQ ID NO: 191251 - DNA, 164 bp, Homo sapiens
ttcccctacacgtaacagctacatacaaaagagttataaaaccgtccttggtttaacaaggataaatgaaaaacattaaaattctccaattgaacaaggtatacaaggatttttatgttgttgttttgttaaaacagtaaaagcaaaataacttactagaatag

SEQ ID NO: 191252 - DNA, 474 bp, Homo sapiens
ggattttagtgttgatactaagcagcagcagataagggaataatggctttgttttaaaagaaagtgataaatatgtggagggttatagtgaagccaagaaaatatgaacacctgcatggtcgataaaaaaatagtattttaagtagaatcaataggattgaggggacctggtagattcagttactcaacaagtatttagtgtgaagtttctagaatggatgttgaaatctttgcctcctcagtcgggaagagtcctgctaaaaatcaggctaaaaatcaggccaaaaatcaggccaaatgacttgacaaataattgacaaagtggttttcacgtgtgtctatctttgctagcagcttgtatacctcaggccaggtgagctccccatatttcttttttcatttactccagtgagtttctgctgtctttttcaagtatgtaccatatgacttaaaggtgatttggatgcgttgtaa

SEQ ID NO: 191253 - DNA, 416 bp, Homo sapiens
gtactgacaagagtagattcaaatataaaatattggaacaatgctaaaagacgctgaaataatccagactagaaggaagggtctgaatgaaaaggaaagactggaaaccttagggggaagaattagtaggcttttcaaatttttagatatgcaggatgaagaaaatggaggaggcaaaagtgcctgaaaagcttgagttcggtgacggaagacatggtgataccattaagcaaaaggaggaagttggtgattatgttggtttgcagcaatggttttggatatttgagtcaagatgaagttgagtgttcagaaggtgactggaagtatgtgtatgaaggaaaagcaaaaggtaggggctaaaagtgaagatttgggattcatcttcattcaaagagttattgaaatcatagaagaca

SEQ ID NO: 191254 - DNA, 283 bp, Homo sapiens
agcctccctccacagccttccaaaatgctgggattataggtgtgggccactgtgccactctgtgctgcagatttgatatttgacttcagagaagtgacttaacctctctatgcctcagttaccaatataaaagggatagtaacagtttctatttcctagggtggtataaagtagtgtgaggattaatgcaaagagtacaatgccaagcatttcaagcagcacttggaatacagtagcagtcagtaaatgtgggctaatctcattacaaagaatggaggcaaag

SEQ ID NO: 191255 - DNA, 177 bp, Homo sapiens
tatttaagcacatttagtcttgaggtggtggtacacaggagtgtggcagggagcgtggctgttgcagttgcttggtcctacactaggaagtcattactgaatttgtatttaagataaattcctgaaggtggaattgcgtcattaaagggcttgccactagggtttttgaaacatatt

SEQ ID NO: 191256 - DNA, 761 bp, Homo sapiens
gggtgtattttggggagcagcagaggaggtgagcccaaaaatgtacattaggaccagattagaaaagactgttttactaacaagtctgcagtttatttgggggaagaatgggaactttttagttcaaacttttaggaagatcgaagaccctttttgtttttttgttgtgttttgttttgttttgtttttgaggagtctcactctgtcaccaggctagagtgtaatggcacgttctcggctcactgcaacctctgcctcctgggttcaggtgattctcctgcctcagactcccgagtagctgggattataggcgcgcaccaccacacccagctaatttttgtatttttagtagagacgggatttcactatgttggccaggatggtcctgatctctttaactcgtgatccgcccacctctgcctcccaaagtgctaggattacaggcgtgagccaccacacctggctgaagagcttttaattaaaaaacaaacaattaaacaaataaacagtttcattgaggtataattgtcatgtaaattgtacatattttgcatgtataatttgatcattttccacacacacatacctgtgaaatcatcaccacaatcaagatactccatccttctccctgctctaggcaaccactgagctgctttctgttactgcaggttagtttgcattttctaaaatgtcatagacatgtaatcacatagtatagatttttttgtcccgttctggcttccttcactcagtgtagtgat

SEQ ID NO: 191257 - DNA, 567 bp, Homo sapiens
tagagcaacccaccaaatagttaacacttgcctggagagatttaggaacaccagtattccactgagattgctgagagtctcaggaaagaaaggtctaacttaaattgtattttaccatttctgagtaatgaatggattaattctatggagatatattctacagtctagaaagggaaagccaaagataaagactgttgtatttattcattagttgccaaagggaaagggaagaccgattaacaacagaagtgtttctgttattgtgtatattatcctgtttattttaaagatgcttgcttatttacattttcttttatcgctacataataatttacctatttatgggggacgtttgagtgtttgttacatgcatagaatgtatactgagcaagtcagggtatgtggggtatccatcacctcgaatgtttatcatttctgtgtgttggcaacatttcaagtcttctcttctaccttcattgaaatattcaatgtattgttgctaatgatagtcaccctagccttctgtcgaacattaaaacttacttattctatctaactgtatgtttg

SEQ ID NO: 191258 - DNA, 147 bp, Homo sapiens
gaaaccaggaatataaaatttgccttgaaagttcaagattatagaagaagcagtagccatattatgccaaataagtgaatcataacttgttctataacagaaaggcagaaaatatattaacctctgcttagcagaaaggaagaatgg

SEQ ID NO: 191259 - DNA, 258 bp, Homo sapiens
ccatctgctgtctttccagatttccggaagcaccagtgcattttatgctcttaaaaagtataaagagctctataaatgcaagttaataatacaagcagtaatgattatctgaaaacttaattcttacctgaggacccgattgcccgtgaactaccaatcatatatgcacttaagacgttgtacgagctctataaactgcaagttaattatacaagccgtggtggttatctgtagccttgtttcttgccttggtacttt

SEQ ID NO: 191260 - DNA, 516 bp, Homo sapiens
ctgaggatccccgggagtagtccaaatcactgatgctttacatgtgttggtggccttctgtctccagccctttaacttttcattctaggaggagttttaggcttcctaggttatcttatctttctcccctgggttctttcttcactttctgtgattcttgtataattgaatatggccatgctaattttacaagtcaacaggagctcagaaatggtgcataaaaatgaaggtcatgtagctaacgatgtcacaggtgaaggtaggagtgagtcctatatgttttagacttctataagcccagggagaaaactctcttttctaggcctttgacatcctcagtcatttttatacaccatccccacctatctgtattttgcacgccccattatgcttagctggactgatgacagtcttcctagaagctgtaaccctttccacatcgattgcactctttctgtgtcatttctcccaggtagagtcaagttggacttactcccggggatcctctgagtcagt

SEQ ID NO: 191261 - DNA, 389 bp, Homo sapiens
gaaagggaatggctagttgtattcgtcagagctgtagcaggaaaaagatgccatactcaaactgggtaatttgaagagcgtgtaataacagagtagaatggtgcttcctggggctggggggaggaagaaatgtggaggtattattcaaagggtacaatattacagttacacaagatgagtaagtcctacagagctactgcaaaacacagagcctatagttaacaatactgtatcgtagacttcgaagtttgctgggagggtagatttatgttaagccctatcactaataataaataaagagggcagcaggaaacagaggtgatggattatagactgtggtaatgggttcaccagtgtacatttatctgcaaactcatcaagttgtacac

SEQ ID NO: 191262 - DNA, 151 bp, Homo sapiens
cttaactttggactggattcacttataagagtaaattttccaacttgcaactgtctctggatatgagattcagaacatccagtggattgtattcatgtgaaaagaggacaatctttactgtcgtgcaacacgaataagggatcctctgggc

SEQ ID NO: 191263 - DNA, 541 bp, Homo sapiens
cttaactttggactggattcacttataagagtaaattttccaacttgcaactgtctctggatatgagattcagaacatccagtggattgtattcatgtgaaaagaggacaatctttactgtcggctgggtgtgcctgagtgtcaaaacctcaactgtacaatgagcctagttagaacattccctgtaccaaccgaggaatttataaggttcccatgagagtcgcaatcttttgtgactgggagacaattgtaatggtatcgacccataatcgtacctgtggctctatgcccagatatgagagttaacacctctataatgactgggtccagatatgagagttgttacctccctataagctaggcttactaatgagtcaccacctcagctgttgcctgatgttcacatatgacagtcacaatttcaactctgcactgcatccacatgtaagatttaagacctctccagtaggctttgtccatggatgagggtgacaatcttaacaattggcaaagtgtgcatacataaatcacaatcccatct

SEQ ID NO: 191264 - DNA, 542 bp, Homo sapiens
tagtcttttgaaggttttacatgatgttattaaatacgcagaatttgattctcagctttaagctcttaggacctttttttttttaactgattctgtttgttttatagtaaattctacattctgtattgccttactattttttaaatatattttatttgttaatatagtttcttttttaaccattgctgctattttgaatttactatctagttacctctttccttatctaaaatgaaaaaagtggccgggcccagtggccaactcctgtaatctcagtactatgggaggctgaggcagacagatcacctgaggtcaggagttccagaccagcctggccaacatggcagaaccctgtctttactaaaaatacaaaaatcagccaggcgtggtggcatgtgcctataaacccagctcctcaggaggctgaggcagggagaattgcttgaacccaggaggtggaggttgcagtgagccaagatcaagctactgcactccatccagcctgggcgacagagtgtgagactccatttcaaaaataaata

SEQ ID NO: 191265 - DNA, 2721 bp, Homo sapiens
ggcacgaggaagctgctgatgagagctgctgctgaataaaatcaacttttacctgcctacggctccctgagtgttctttctgctcattcacccactcccctcggacttcagcatgggctggaccttgaccacaggatctgacaattggccatgaggatgggatgaggtgagtgggtcttcagcccctgagggctcctgggtcggctatgtggccgcagcaagagctgtggtacctggtggcagtggtgctgcttggatgggtcccagtggaaacgtgggagacggtgcactggtctcccatgagtgtggagaaggagctgaagcacctggaagtgcacagcaccgagaagtatgcctttgccgcagagtcagatgggcgtttgtgactgtgctggtgggaggtgcatgcccagtccctgcgggacacagcacagggagaaggaagaaaccccgttgcaggctcgcccagggatgcaccggaaaatagagcatgagcagctgttgggccccaagggtgggcccagagcccctctactgtggtggagcacacttcctctggtccctgtgcccccgctgagttgtgggagtgaagtaagtaatgtcggcagtcatgtacaaacttactgcaagtcattcgggagaaggacattgctgcgcaacccggtcctgcccaagagttccagttcaaaaagtacccgctgcagctggcggaagtgtaaagccttttctgtttgataagagaactggccgagatgcctggcttgtgcggggcaccagacaaccagagccacatgtggacttggcaatctgctggtccctgaatctgcgtaagttttcaggcagagctgcatttattaatggctataaaggctggtcagtgaaagtgaaacctctgtctctgcatcttagcattggccgcttggctctccgcttatgccctgtgtatgtctctcccatacctgaggacactccgggggcggatgttttgcatggctcggcagctgtgctgtctgtcacggacttaatggaccatttgacaacggaactgagacaatccaccgagagcctggaacagtttgccttcatgggagggcgacaatggacttttacagtgttgctgcggggctatgtgcatagccccatcgtgtgtcatgattttgttaatgacgttatgttaacttccaattatcttgcaggtttagaagcggtaacacccccttttgcctgagattgggatgataaggctgagacagcctttctaaccaaggatgcccatttacactagatgtacatgtaatcacagatagttttggctagggcctatagcagtgcatggaacgcttggaagctccagtgggctgttagtcccaactatggaagggagctgagctctggtattccttaataaagaagcagtttaatagcaggattggtgtgttcatggataaccactacctcggactgggaaagcagttggtaactgtatatactgcccttcaggctcataagagtgtggcgggatgggctacagtcgtcgtgcagatgacttacctgacagcagggtgggtgtgttcatgggttacaagccctcaaactgggacggtacagacatccactttagcgaagtggagcgctatttagagcagtaaagtaccctgagtacaagttccttaccagcagagttacaagagattttagggtctgtagccctaatgcaagataaagccatggggcctgaggcacccctagaccctgagcctttaccataaggaagggcatacccccattcctgatgaggcatggtatacagatagatccagccagagtactgctgctgctgcagtattgacaacagcctagtactgacaccatatggtttaaaaccaggtgtgggtgaagtagctaataagctaaactcagggcagtatgagtggtaatcaccaaggaggagacatctgtggtaatctgcatcaatcaccagtttatcaaagcctatgtgtatgtatcgggcctgtgtgcccaaacctgtgtatcaagcttgcatgcccatagcttgtgtgtgaggcttatgtgtcaagcctatgtgtatgtatcgggcctgcatgcccaaagttgatatgtcaggcctatgtgccaaacctgtgtatcaaacctgtgtgtcctaggcctatgtctccctcggcctagagggtggagtgtaaggtacatgaatgtgctttggtcaaggaataggccaaggcagatgtccaggcctgcatgactcagtgagtttggggcacaggtgcacacctccatttgttatataacctgtttgtgtaagttcatacttggctctgagccactatcgtctgtaaaaggtataattgccttgctaacaccgtacaggggctcttgaggctcggcttggctcaacatggcttaacacagcgggtgcactggcacccagagaaagagagaaagagaaccagagctgtccttcttgtaggtggacagaggggagccacagcacggctcgcactggtgcccagagacagaaagagtgaagctgttgaccctgaaggcaagggagagctggccatgcagctgcaggtgtgggggcggcgggagccacagagccccagcaaacagccgagataaaggtgagcagtgtagagagctagtgtgaggaagctgctgatgagagctgctgctgaataaaataatcttttacctgcaaaaaaa

SEQ ID NO: 191266 - DNA, 2618 bp, Homo sapiens
ggcacgaggaagctgctgatgagagctgctgctgaataaaatcaacttttacctgcctacggctccctgagtgttctttctgctcattcacccactcccctcggacttcagcatgggctggaccttgaccacaggatctgacaattggccatgaggatgggatgaggtgagtgggtcttcagcccctgagggctcctgggtcggctatgtggccgcagcaagagctgtggtacctggtggcagtggtgctgcttggatgggtcccagtggaaacgtgggagacggtgcactggtctcccatgagtgtggagaaggagctgaagcacctggaagtgcacagcaccgagaagtatgcctttgccgcagagtcagatgggcgtttgtgactgtgctggtgggaggtgcatgcccagtccctgcgggacacagcacagggagaaggaagaaaccccgttgcaggctcgcccagggatgcaccggaaaatagagcatgagcagctgttgggccccaagggtgggcccagagcccctctactgtggtggagcacacttcctctggtccctgtgcccccgctgagttgtgggagtgaagtaagtaatgtcggcagtcatgtacaaacttactgcaagtcattcgggagaaggacattgctgcgcaacccggtcctgcccaagagttccagttcaaaaagtacccgctgcagctggcggaagtgtaaagccttttctgtttgataagagaactggccgagatgcctggcttgtgcggggcaccagacaaccagagccacatgtggacttggcaatctgctggtccctgaatctgcgtaagttttcaggcagagctgcatttattaatggctataaaggctggtcagtgaaagtgaaacctctgtctctgcatcttagcattggccgcttggctctccgcttatgccctgtgtatgtctctcccatacctgaggacactccgggggcggatgttttgcatggctcggcagctgtgctgtctgtcacggacttaatggaccatttgacaacggaactgagacaatccaccgagagcctggaacagtttgccttcatgggagggcgacaatggacttttacagtgttgctgcggggctatgtgcatagccccatcgtgtgtcatgattttgttaatgacgttatgttaacttccaattatcttgcaggtttagaagcggtaacacccccttttgcctgagattgggatgataaggctgagacagcctttctaaccaaggatgcccatttacactagatgtacatgtaatcacagatagttttggctagggcctatagcagtgcatggaacgcttggaagctccagtgggctgttagtcccaactatggaagggagctgagctctggtattccttaataaagaagcagtttaatagcaggattggtgtgttcatggataaccactacctcggactgggaaagcagttggtaactgtatatactgcccttcaggctcataagagtgtggcgggatgggctacagtcgtcgtgcagatgacttacctgacagcagggtgggtgtgttcatgggttacaagccctcaaactgggacggtacagacatccactttagcgaagtggagcgctatttagagcagtaaagtaccctgagtacaagttccttaccagcagagttacaagagattttagggtctgtagccctaatgcaagataaagccatggggcctgaggcacccctagaccctgagcctttaccataaggaagggcatacccccattcctgatgaggcatggtatacagatagatccagccagagtactgctgctgctgcagtattgacaacagcctagtactgacaccatatggtttaaaaccaggtgtgggtgaagtagctaataagctaaactcagggcagtatgagtggtaatcaccaaggaggagacatctgtggtaatctgcatcaatcaccagtttatcaaagcctatgtgtatgtatcgggcctgtgtgcccaaacctgtgtatcaagcttgcatgcccatagcttgtgtgtgaggcttatgtgtcaagcctatgtgtatgtatcgggcctgcatgcccaaagttgatatgtcaggcctatgtgccaaacctgtgtatcaaacctgtgtgtcctaggcctatgtctccctcggcctagagggtggagtgtaaggtacatgaatgtgctttggtcaaggaataggccaaggcagatgtccaggcctgcatgactcagtgagtttggggcacaggtgcacacctccatttgttatataacctgtttgtgtaagttcatacttggctctgagccactatcgtctgtaaaaggtataattgccttgctaacaccgtacaggggctcttgaggctcggcttggctcaacatggcttaacacagcgggtgcactggcacccagagaaagagagaaagagaaccagagctgtccttcttgtaggtggacagaggggagccacagcacggctcgcactggtgcccagagacagaagtgagcagtgtagagagctagtgtgaggaagctgctgatgagagctgctgctgaataaaataatcttttacctgcaaaaaaa

SEQ ID NO: 191267 - DNA, 329 bp, Homo sapiens
gttgatcttccatctcattctcttatgagggaagcatttgagtagtggttctcaaactgtggtcccagaaccaggtaccatcagtattacttgggaacttgtaagaagtgcaagttcttagccctgtcccaacctactacatcagaagttttggatctggagccagcaatctggcttaacatggtctccaggtgattcgtattcatgctaaagtttgggaaatcaaaccatgttagaaatctttgggaatcagaagcagctgctgcaattctaggctgcaaatctggtcactgacttgtttccaggtctcttagtttgggcccttccta

SEQ ID NO: 191268 - DNA, 387 bp, Homo sapiens
caaacatcacaatttccatcaacacatttccttgaaggacctcctgctttcctctgggtcttctgggtattctcttcctgatttactcagagatcacagcttttctgtagaggcaacagttcttgagtcaagaatatcgatcagtggttgtctcttttcagacgggataatctacctcagcattattcttatgtatgttctgcaaaaaactagtgagataatcagcaacaacaaaaaggctccatggacaatactcactgcagatatgactctcagtgcacaaacttaattatacagggaaatatcacattcttctattttcatgaatcaacctgattttagctctgatctgccatccctccggattgatgggaaatttcaagtcgg

SEQ ID NO: 191269 - DNA, 507 bp, Homo sapiens
gtcctttagaggaaaagtttgccatcccctgtattatatgcttatctttacccatccataagtgcaaaaggtattctccccaccaagaagagcagcacgtagaaatgctaatgagacatgtaaatcactctccaaaccatgtctctttcctgggtggtccaacagaaacagcataggattccagaaggacaaagggaagccacagcttcgataaaggactcaaaggtaccaggggtaggaagagatgcaatatctcaacacaaaagccctgcaaggccagtgaaaaaaggctagtaagagcaggaagctaacagtgaattagcgccaagtgagtttagttattgctcttatagccccagctgttacagactaaatccactacacactgatggtacttggtaggttgttctggacatttctaatgcctctttgccataacactcatacctaaggatcaagatcagtttacatccatgtgtcaaagccctccaatatgtctgaagtgct

SEQ ID NO: 191270 - DNA, 231 bp, Homo sapiens
ttgagattacaggcgtgagccactgcgcctggccaagaaaaccctttcaatactgttttaaaagagttgggggaagaggtagaaatgaatcttttggtttagttttttaattctctaaggacaacattggggaagtgagctttagagttatatttgcagtatttatttttatcatgaaatattcaagtctaggcccttggtgaattgaggcctggtgagtatttctgcttt

SEQ ID NO: 191271 - DNA, 288 bp, Homo sapiens
ggggattgtgtagggaacgtgagcactgtgcgaggagccttcccacacccaggcagtgacagaagagtgtggtcatggtggccggtggcgctgggggatttattccagggaaggcaagcttcccagcttaacagcctgggcaatcccaccagggggtgctgcccccaggctaggcagccccccagcctcaggcagggtccagggatgagagcgcctttctttaaatatcaccaggcagtgactaaagcatcccccttattccccagagacagagcccgcaatgcacct

SEQ ID NO: 191272 - DNA, 552 bp, Homo sapiens
gtattcctgagctatatattatgcatagtaatttcctttgagatcctaagcttgagtatagcttaggattctccacattttgagtatagttaagaagccacaaacatcaaaacttataagcatgattgtgttttctttttctggaattatttatgtaggaatgaattcaatcaacaaacatttaaagaacagcttctagtaataaggtactttttaggcaacgagggaaatataggagtaaaggtaatacggctttgccgtacaccaactagaactttcttttaacttcattttctatatggaattttctatacagaattgggcactaatttatctccttatgacaatagttgccctcaaacctcgattctaacatgattgtgcatcctgtgttgaatgtcagaatattacttttctaaattttaaaacgttcatagtctatatttttgggggttattatgttacagcctttgaagatgggaaacctcactggacagaaataagttatgctgttctttgccaatgcttgtttcaggcatgtccctctcgtga

SEQ ID NO: 191273 - DNA, 297 bp, Homo sapiens
gttcagccaagctctttcatccaacactgtgaccctgatctaataatcggtgctctttgcttcaattctccagctctaacatacttggaaaagttaaaacggtgaatatctactgattactagttgctggaagacgtaatatgtacgcattttgagttcgttggaagaaagatgctagagaaatgcaaacaatgaaatattaaagcatggcatgacaggtctgcagatatgagactcttttttttttttttttttgacacggagtttcactcttattccccaggctggagtacagtg

SEQ ID NO: 191274 - DNA, 985 bp, Homo sapiens
gatctagaggatcaccggaatgtgtggtgttatgcacagataagtggagccatcatcacaatgaattttagagcattttcatcacttcaaaaagaaaccccaccttctctagctgttaacatcctatagactcatcccctactcaatcctaagcaaccacaaatctgttttctgtctctataaactttcctattctgttttcatctaaatagaatcatacaataggtggccttttgtgcctggcttctttcagttggcataatgctatcaaggttcatgtacgtattggtactttatttctttttataaccgtataacattcaatttcatggatataacattttgtttatccaataatatttttattgacatttgagttgtgttcagcctttggctattttaaatactgctgctaaaaataattgtgtacaatttgtgtttgaacacctctttccaataatctgggtgtatacctaggaataaatttctgggtcatatgacaattctatgtttaatatatttagaagccatcaaattattttacagagtggccataacaccacacaattccggaattgtgtggtgttatgcatgaaaatttaaagtatatcaagttcagccaacactctaagctctagtcacctgctctattcaatagtcctgtcccctagagattatcttgtgtttcaagtatttgcttacttttcatgggctttatacttttggctgaaaatgttgctgcaaagatgtgggcaggattaaatgaccacatgaggtttcaaagggctcccagtaattctccactcccaaagaggctgacacctgatctttgaaaggcttctgcccaagcattggatttgaggactggaaagggtatccgccttcaacctatcattttacagatcaggaaatatttacaaatcaggagcagagagagattctgtaacatattcataacaccaccagtccatgccatggtgaagac

SEQ ID NO: 191275 - DNA, 623 bp, Homo sapiens
tctttaatcatcttgaatagattttgtataaggtgtaaggaagggattgagtttcagctttctacatatggctagccagttttcccggcaccatttattaaatagggaatcctttccccattgcttgtttttctcaggtttgtcaaagatcagatagttgtagatctgcggcgttatttctgagggccctgttttgttccattgatctatatctctgttttggtaccagtaccatgctgctttggttactgtagccttgtagtatagtttgaagtcaggtagtgtgatgcctccagctttgttcttttggctcaggattgacttggcaatgcgggctctttttttggttccaaatgaaatttaaagtagttttttccaattctgtgaagaaagtcattggtagcttgattgggatggcactgaatacttacaaagtaccagacaagttttaaatgttttatatgcattaatttatgtaatcctcataacaaccctatgaggtaggtagtattatcatccctgttttacaaataaaattgagggagttaagtgctgtatgttggctgaggtcacttggaaaaggtgtggtctttaaacacttatatgtacttggcctggtaata

SEQ ID NO: 191276 - DNA, 204 bp, Homo sapiens
agctgttctttcggaatggtcaaggactgaggtcagtttatataatgaggcacactgttggttaagctgatacaccgcttcaacactgcattcagattaatggtttctattgagccacttcttttctctttgcctaaccttgcatcaatagcacaattaccttcgttactttagttttataatatcctaatattacaagcccac

SEQ ID NO: 191277 - DNA, 345 bp, Homo sapiens
aaagctagaacaatctgagcaagaaaataaagtagtactggattataaaccaaagcatgaaacaaatatccatgagtccaattacataaatatatgactgaatacacagacaaatcttaaatgaagaaaaacttatttatgtaggtattttatcttcaaggaagtggaacacaaccttcactctttaagtgtgcactgtgcaatgacttccttccaaagagtacagtatgaaaagcgtgaataaagtagtaacttaacaatgaagaaatttgacaagccctatcttagccaggtaatcaagtttacagtcaacagaaataagtcatgcagaacagcatgtaccct

SEQ ID NO: 191278 - DNA, 161 bp, Homo sapiens
gatcacaaactggtatctgctgtgaaagttaagaagcacctgctatgagggagtataaaaaaggggagaccaaattttagagtggagagaaggggcctaggaaagacttttctgtataaataagatttaagctgagatttgaagagtgcgtaggtgttagt

SEQ ID NO: 191279 - DNA, 552 bp, Homo sapiens [sequence omitted]

SEQ ID NO: 191280 - DNA, 669 bp, Homo sapiens
gtatattcctagtattaataaaatatagcattattttattacatatttattaaccactaacacaccctgttttcccccaactctcaatgatgactctgctttataatgaaatccaagtcaccaaactggaactctctcatttatccaagcaaaggaacaaactttctttaatgtgtactctttcctgagacagtagaggaagtttttctctttctatccaaagcaaatccatctgtttgtgccctcgagttcatgccctttactttataaaagactgagttacttctgataatttctctttctcttgactttttgatgctttagtctctactggatcattccagacagagaaacagtatgctttattagctatcatactttaaaaaatttcctgtggtctgggcacagtggttcatgcctgtaatcctagcactttgggaggctgtggaggcaggtggatcacctgaggtcaggagttcaagaccagcctggccaacatggtgaaacctcatatctcctaaaaattaaaaaattagccaggcgtggtggcaggtgcctgtaatcccagctactcagcaggctgatgcaggagaatctcttgaacccgggaggcagaagttgcagtgaacggagatcatgccactacactccagcctgggtgacagagca

SEQ ID NO: 191281 - DNA, 455 bp, Homo sapiens
actttttttttttttgagatggagtctcactctgttgcccaggctggagtgcaaaggcacactctcagctcactgcaacctccgcccccccgggttcaagcaattctcctgcctcagcctcctgagtagctgggattatgtcacacaccaccacacctgtctaatttttatatgtttagtaaagacagggttttaccacgttggctaggctggtcttgaactcctgacctcaagtgatccacccaccttggcctcccaaagtactgggattacaggtgcacgccgccaccctcggctaattcacattcactttttaattttcgagtatcaatcattaaaaaaaattcctttcatacataaatacatgttgatttccaggatttcaaaccatctacttaagttttatgccttaataggagttgctattcaggactttaaaaagattttcgaacctt

SEQ ID NO: 191282 - DNA, 326 bp, Homo sapiens
gttgctatagtaactgaaacattggaatttcctgagatttgaaggcttttatatccttaaccttaaaatgatgataatgtagattttgactgtggacttggtctttgcttgtgaggaacttacgtatatcgagtattctatgaatgctaaggtgtgactgcacgttccataaatacagttttgaaattcaggtttctaatatcccaactgattttctcgtctatgtgtacaaatctcggtggctaagatgttattaaaacggacagcctttctgtaaagagaaagggagaatttgaaggggaaagcgagagaagtggaactctcct

SEQ ID NO: 191283 - DNA, 236 bp, Homo sapiens
ttaacattcatgggtccacaaagctgaaagtactcttgaaaaataacctttccatttcagaatttagcaagttgtataacaaataatgaagaattgccaaatagaagaaaaagatgaaaattagaaagtctacctgggatgctaaggaagaaaaataatgttcatctttctttcttctttttttttttttgagacggaatttcgctcgttatccaggctggagtgcagtggtgcga

SEQ ID NO: 191284 - DNA, 795 bp, Homo sapiens
gtcatttgtaacctgatgcgtccaccctactgctgtgtccggtttccattggctggaacgggacctcatattctgtatttgtcctgattgggaagcaacttaaaactttttaaaagaggcgaaggcagaagagaacaaaggaaggagaaagtaacttgtggaatggtgagaaaggcatgaggcgaattctcagccatgacaaggctgaaggccagcaggaacaggctctagcgaaatgggtgctgtgtccccttcctgcatgtggcagaaagttgcaaagtttcatggatttgaatgtgaacatctgttccctggacgcactgccaacaacgtggtccaactggtactcatcgttggaactaccaagtcaactaattttttttttttttttgagacagagtcccactctgtcgcccaggctggactgcagtggcgcgatcacagctcactgcagccttgacttccccagggtcaggcgattctgtcacctcaggctccctagtaggtgaagactacaggcagacaccaccacatctgagtaattactttttgtagagatggggtttcgccatattgcccaggctggtcttgaactccctaaggtcaagtgatccacctgcttcagcctcccaaagttctgggattacaggcgtgagccactgcatccagccagtcaacttttaataaggtccttgttaggtacagtaagggacatgagatgaaaaagagctggactgtcttcttggagcttacaggttagttagagaagatattaaaagacagatgagatgggcc

SEQ ID NO: 191285 - DNA, 513 bp, Homo sapiens
ccattggattgttttacacacactgtgtatgactcatgtcagagaccacagaggtggggcctgtctatggcagtcctctgagattggcttggcatgcgtgggtcttagggaacccaggccaagtgtcagggatgagcttcctctatgctcgcatcattccagagtcccacagtcactgacatcacattggattcctctttccctcctttaaaatgtttgtcaatagatggcttctcctctgtgagtcttcatgtggcaggccaggtctcactaatgcaggcctccatgacaaccgtttcagtactgactgagtggcgaagttaaatattaaaagctgatagagccagtgccctatacaaatgctggaatgtaacaaaagcccaccaagagttctgccctggcctttcctgggccttgaagcatgacaagataatgaggaattttccacaggacccgtttgggattatacaggttttattgggggtctgaagaaactccccaggcctccacagg

SEQ ID NO: 191286 - DNA, 465 bp, Homo sapiens
acataaacccagacagtaagcaattgtcatggaaagataaatccatgtgactatatctctgaagcttaagcaaaactagtttacatgaagcaaaacagtttattaaataaccatatctaaagcagccctttgttttgacaataagtaatttaatcatttttccatcactgtggatctaaaaggtatgttaaaatgttatactccgccaggtggattaatatggatttattaaattatgcttagactaacactgcttcctggtcattgtagttccaaattaaagataatgataggtttagagaaataattgtgctcaattattactcaccaaaaattctgagttctcactgcttgatgacttacactagagtaggaaggcagacgatacacacagcacattcataaactgggatttaaccgagtgaaaattgaactgaaagaacattaaggtgtcaggcgagaaga

SEQ ID NO: 191287 - DNA, 842 bp, Homo sapiens
gaaagcatttgaggatgtcatacatattaagaaggtgttgttctgtgaaatgtttgattttatcacggtttcaaatctctataatatacataggatgtgcacacgggatcaagatgtaaaatctatttctcaccgtggagcagggttaaaacctgacagccaccatcctatttccatgtagaaagaaggtgacccccccacctctgagcaagaggatctggaggtaacaagacccattcgaggaatgaaaaagtaaaccaagaatccccggggtaccaggttggaacgaggccttttcttcagctgaaccctgaggtgctaagaggtcatgcccaacaaagggaacccaggaggtcctgacgttgttccctattttacttttgcctgaattacttcaggacaccctgtgcttcctttcccaacttactcatcaactgtgcaaaaatggccaaattgtgtaccctttccagcttctgtccaacatctgcagaatgaggctagtaacacccactttatacagttgtgaggaacagggacaatgtggcaccagccctgtgcagagacgctctcactcacttctttcttcctttatttcttcactctattattgatcaaatgtttacatataatgtaccttgtgtgagatattaaccacacagtggtgcgacatgatctctatccttttgtaaagacaaaaattgaccaaaataaatgcaaatgtgtgactgtgacaaaacctaattttgaaaattaaaattggagtactgaaaatttaaagtgcaattgaggaagtcaaaggtaaattttagaaaaccttccagaacatggagaagaaagagata

SEQ ID NO: 191288 - DNA, 657 bp, Homo sapiens
accctctccaatttgttcctcacagtgcagccaaagtaatctctatcctatggacatttttaaattatggaaaatgtgaaatatataaaagtagtaagttatataatggactttcatgtgcccgtcactcagcgttagtacaattttgtttcttcagtaacttcatctacctctgcttcctgccgcctagattatttcaaacagatcctggatttaaaagagtgatcttttaaaaacttaaatcttgaaactttcctgcattcctcctgtggggtctcattacccttagaataaaatctaaactctttacatagctctaagacttggcctttgctcccttctgtagcagcatcttgtatcattttctagccacattggaggaagctgttggcctcctcaggactttcatacatgcatttccttttgcctggcatgctcccttcttccttggcttagttggctgtttcttatctttacggtgtcatctttattaaagaggcatttcctgatggttttaaccgtgtgtcacatgtttccctttcaatgacaaaaatgttgacaagtggtgcatctaggtgaagagtgtactagtctttgaacttttcactagatttgaaattactgggcagagaaattagtttgaggggaaaagacccg

SEQ ID NO: 191289 - DNA, 433 bp, Homo sapiens
aaaaaaaacacccttgctttgcatatgttggtgacaggaatgttaattttaattaatccttataattaagcattaaaagtgtttcttgctttcttataagtccctaggaaataaatcagtatatctttgactttataatttaccagagaggagttactcaattatatggaatctatacatatgttgattttaggaatttattgaaagaaaaaaaactttctaggtatagtgtgattttatttaattttctggttaagtgaagatcttacgcagatcatactgaaaatgtgctcattcattcatttattcaaaaagaatttattgaaagcctaccataaggcaggaattgttccatgtgtgtaagacacaccagtagacaaaacaggaaaaaattcttaccctcatggagcttacattccagtgggggagagaa

SEQ ID NO: 191290 - DNA, 348 bp, Homo sapiens
tcttttctcaggaacttctgggagccaaatcaccaccagctcctccagaaaagatacctgtgcacacccaaaaccaccccactgagccctgcctggggtctgtaccacatccagcatgtgcactgtgagcatagaatccggccctgaattcatgaccacccaccaacatgcccccaactgaaaccagcaaattcccacacatggcaagcactgaggcttggaggtgctttctcacgaggtggttctgcttccaccatggggtggttgtcactgacactggaagttgctcagcacctgatagtggtgcaggactcagggaccctcaacatcaatctggtgaaggcagat

SEQ ID NO: 191291 - DNA, 210 bp, Homo sapiens
ggaggcaaagcggaagaacacggagagctgatgcacaggggcccaggcttagatgtctttccacactggcccacatgtcaggagtaaatggaataatctgcagaaggttctactgacttaatatgaggtatattaagattaaaaaattatttttttgcttctcactaaaatagagtggagtaaaccatcctttggccgaacggtcaggat

SEQ ID NO: 191292 - DNA, 509 bp, Homo sapiens
aacagtttggtaattaaaactgggttacacaaagccttctgtgtgtgtgtgtgcacatgtatatatgtgtatatttttcttatctatgtatatagcttttcttatataatagaaatgctcccttgaaaaatatttgaaaagtatgaatggacagcctactatgtgcaattgctatgtaatatggtcatttacacaccacacaccctatccttaataggaagtcaatttcttaaggatgggatccacacatgacacttaatattttgtcttgtgtacgtggtagcagaaaaaaatattttctgagaaaactaaatgagatttgggttctaattcgccttccatcacttcttagccatgtgaccatgaaaagacagttaaaactttgggtcacaagtctatcatctgtaatccaggaaaactgtgctgggatttctgggcctatgattaaagggagggccagccatgtcctagagtttctggtgaccctcttccaaagtagcaagacactt

SEQ ID NO: 191293 - DNA, 603 bp, Homo sapiens
atttaatccttagaatctataaaagatctctagtcttgcattggcagtagctttgactgtccattctaattctaccccaatagtttatcttatttacagtttttatttatagtttcttttacttagtagttattacaataaataacattgactcaatacaactatctaagatagggcccttattcaaaatgcctttttaccagctaaaactgtttaaatattgctaacacctgaaactatagttcgaacacaggtatttatgggagcagggaaaaaagaacaaaaaacagttaacaagcatattctgtaaaaattgttaggattttgtttgttttgcttaatacatttttaaaaaatgttcttcctcaattttttactttgaacaatttcaaacctacagaaaagttgaatgaattagtacattgaaaccccatatacccttcacctagattcaccagttgttaacgccttggtgatattttccatatctatgtatatgtgtgggatgtgaatatatttctttttctttccgtttgcttcttggctaaactgtttgagacctcatgatacttcacccccatatatatcagcatgtatctccca

SEQ ID NO: 191294 - DNA, 216 bp, Homo sapiens
atgtcattcatccatccatgtttccaccaactatgttttaggcattggttccagacatctggcgatgccgacttgaattagacatatgtggaccttccccataaagaagccactgtaacaaaacccgccagaatcttcctaatgccagggctcctctttcctgcccccgtgtcaaagttgtggtccaattctcagttatccaacatgaggaagctg

SEQ ID NO: 191295 - DNA, 270 bp, Homo sapiens
ggtgtcagtagccgtgtctcatacgcagttaggttcagttgcttgtttaactactgtgttgtggccacatgttatagctatgtgtgtgtatgtagctgtgaccgtaggcacttggttgcatgtttgaagttgcttctgttagtgcatgctcagaggatgtgacaaagccttaagtggctgagacttcagcaaccggcagtaaaccccgggcctgagctgcaacgtggaggatccgtcttattacaggaagtatgtcctcctctgcctaac

SEQ ID NO: 191296 - DNA, 372 bp, Homo sapiens
ttagcagataaaactcagcaatgtagaaagaatgatacaccacaactacgtggtatttatcacaggtatgcaaggctggttcaacatttgtaagttactcaaccctatcaacacctaatagcctaaaaaagaaaaaccatataattgtatcaactgacacagaaaaagggcatggagaacatcagtcttattcgtcatcactcccccaacacctaaaagcagacacacagaaatattagtgaataaatgaatgctttccatatgtcgtataaaccctatataatagatggtcaaaacccaccctatataatagatggtcaaaacccaaagaaagataaatgaaaagttattaaatgttacagaaaaatgaac

SEQ ID NO: 191297 - DNA, 494 bp, Homo sapiens
tatttgtaatacaaaaagtaaacccaaatcatgaatttctgctgtgctttccattttattcaacagggcatgaaattacatgtcttttttctcacaaccccttacattttgtctagcacagagtagatatgtaaataaatatttgttaaatgaagaaataaattcaattagacaagagaatatgtatttatagattctagtgggggttaggacaaaaaaaggggtcaggtacttcctttacatcatgtgctggaataatgatgttcattaaataaatcacagttaatcatctctgtccttggcagtatatgagctactgacaaattttctgacctaatgaatttaacagactgcaagaagataaagaatgaagtaagctcccaaagctttgtccatttctccaaatatttaattatcagtagttgtaacaagaaaaagggtgcagtctgtaggaacatgaaatcatatgcctcatgactgtcaaagattctgtg

SEQ ID NO: 191298 - DNA, 543 bp, Homo sapiens
ccggttgactctagacgatacaccttatgttctgaaccaactgaaaattatgataaagggttagagcagatagagattaaaacattcacaagctcaccattattactgatggagctgacattagataaggtggttgccttcttttccctagaactgaaaagattgactgctgtaggcatttgtcattaagcttaatgcatagctgagaacagtagaaaatgcaagatttctaagagtaaatttactccaaaaagtatcaagaagaaggggattaacacagaatgtccaggctctacttccaaatacatcaaccaaataaaccaccgcacttcagtagaacaaatgagaaaatgaagatgggcagcaatataaaggcaatggagatttcagcccttgatctagagcaaggacctagagagggaagaagtgttctccaccaacagtagctgttacttacagagagcctaatgttacttacagagagcctaatgtgtcttctgatacgctattctgagtgcttttccctcattagcttatgcagtc

SEQ ID NO: 191299 - DNA, 381 bp, Homo sapiens
caggtcggccctgcacacagttgctgagggaggggccacgtctcttgtcctcgtctgtgtctctggggtcccgcatggtgcctccatgttgagtagatgcttggcgaacatttgttggaggaaggaattcatgattcctttcaaagcagagatctgcctgtaccctctctaggagccctggccatttggtggttctcacctgcccaggtatatagtgaaactcctcagcatgacatataggccccgtgcagtctagaatgttgtccttgttcttccaggcttcttctggtctgaaattctctgctctccttcctgtagttgtaaagcttcatttttggcctggtatagtggctcatgcctgtaatctcagtgctttggcag

SEQ ID NO: 191300 - DNA, 417 bp, Homo sapiens
gcagtgggatcaggaggaagatgaggaagaggggacaggacagtggagggaaggagaagcagagcctggttgcagggtagttgacatttttctcggccgtttgtgggctgccgggaaggagcaagaagacaggaaagggttggcgctccagaggcgagagaggagaaagggacacaaaaacccatggaagcaatagggcgggactcaaagcccacgaggagggccggcccagttgttctctgtctcgttttctaagcgctgcggcagggctggtggtgaattcagataaacaggcacaaagggccagtggggtcgctagcaagatctgggacacgctgaaagttaataggaattggctgccctttgccggcgcaacccaacgtacaaagatgatcttttctgaggctccaccgccgc

SEQ ID NO: 191301 - DNA, 431 bp, Homo sapiens
tagagatagacagagagagacaaaacagtgcacacatgaagagtgagaactccaaagaatttcaaacctctcagtggagtccactggaaattccttcaaacttttttttaaaaaaataaaactattgagatataattcacatgtcatacaatttacccatttaaagtctacaatccggccgggcacggtgcttcatgcctgtaatcccagcaatttgggaggccaaggtgggaggatcactcgaggtcaggagttcaagaccagcctggtcaacaaagcaagaccccatttctatagacagataaaattacccacccaggcatggtggcatgcccctgtggtttcagctactcagaggctgaggcaggaggatcactcgagcccaggggttcaaggctgaagtgagctatgattgaaccagtcagcattaa

SEQ ID NO: 191302 - DNA, 343 bp, Homo sapiens
taggctttggtggatttctgtggatttctactgctgtttgttttcgttttcaggtgttaacagaatggggaaaggcagcaatggagcagtaagatcaaaaatgatttttatgaagatgagggttctattgatacatgatgggggaaaatgatagcaggaaggcacttccccatccccctcctcttagcaagctactgcatttgtacagtatttctgttcttcatgtcattgtgacaaaggacttgagatggccactcagcttactattgaccttcccctgtactgactactttgatgacgggctggcccatcaatgaccaactaattggaactgaaatgagat

SEQ ID NO: 191303 - DNA, 723 bp, Homo sapiens
cctgagaaatctttggcggcagcaatagcacttgtcccattgtgagtggcatttttttcaaagtgtcattggactgtgaaagctacttaataacttgatctcatctgaataatctgagttaatactagcttcacagttgtgaggattaaataaaaaaaaattgtaaagtgtctgcctcaaggcctggcacagagtaaatctcaacaaatgctcgttgaatgaatgaatccatgaatctgagcattaaggcccccctcaccgtttccaaggatcagtgcataacagccccggtaactgagacttgtagactgtcccaactgagcctgcagcctgaggcatgatctaaacctgctgttcctttgacaaatatttgatgagttatggtgtggagggtggacccttccatgaaggccttgttggcctagctgttggaagcactatgcagacagtcttccagggtgggaattgcctcagagagcaccttgcccaaggtcaaggatagcccacattcaatggcaacaggtgtgtaacggcctggccttcttagcttattttgggtcaactctgaagggccattctagcttcagagctccctgtggggttggctgaggctgtcactggcttgtcttgtagatcagcctcttcctctggccactcctgctcattctcattcttccacagctgttgatcccaaaggaggttcttaataaacatccagcacat

SEQ ID NO: 191304 - DNA, 202 bp, Homo sapiens
tcggatggtgcgtgatactggcagtgactcttcttcctccctagattccctgccctcattctggtctctttatagcaacactgtaactcctgtcttctgcctggaaggcctgggatggcttgagcgctacactgggaggtagctaaaggcctcctgcgttctattttcagctcccctgccttgtgcgtgacctttggccgaa

SEQ ID NO: 191305 - DNA, 594 bp, Homo sapiens
ttcaggttctgtcttgtgagcttgaacaagctatttgcttttatataccaccacttccacaaaatgggaaaatggggttaatacaacagtgaccctgctacaggcagcgttcgaggattaaaggagttaaaatatgtaaagtgatcagaatcatacctggaacaaagtaagtgctatgtaagtactggctgttattattattattgttttgtttttgagacagtcttgctatgtcgcccaggctggagtgcagtctcagctgactgaaacctccatctcctgggttcaagtgattctcctgcctcagcctcccaactagctgggattacaagcgcctgccaccacgcctggttaatttttgtatttttagtagagacagggtttcaccatgttggtcaggctggtcttgaactcctgacctcaagtgatccgcctgcctcggcctcataaagtgctgggattacaggcgtgagccactgtgcccagcctagatgacaattttacaactttgtcctcagatcttcaataacctacttccctatccttattcttagttgatgactgtacttcttatttcatttagaacacttaaca

SEQ ID NO: 191306 - DNA, 600 bp, Homo sapiens
tgcacatactccaatgaaaagatacaagaaacaagaagaatcagagaaaagttacacaatcaaatgaacgaactaaatctccagtaaattaccttaaggaaatgaaaatctatgaattgcttaacaacaaacttaaaataatctcaaagcagatgaatgggtttcaaaagaaaacagatagacaactgaattaaactgggaaaataatgcgtgaaaaaaataagtatatttgcaagaaaatataaatgagaaagaaccaaacagaaattctgaaactgtggtatgtattaggggggtacaaaagtaactgtggtctttgccattacttttaacggtgaaaatggcaattacttttgcaccaacccaatagtaagagaactaaaaatttcactattgggatttggcaacagatttgatcaggcagaaaaaaaggatcaacaaacttaaaggcacttgaagttatgcaatcaaaggttcaaaaacaaaaaaaatagtaaaaagagtccagtaagcttgaaaggtagtctaggtcataaagactgcaactcttaggcatgttttagggcaaaactaagctaagacacaatggacccttggtgg

SEQ ID NO: 191307 - DNA, 137 bp, Homo sapiens
gagaagatggtgatacactttctggaaagtcaacctttctggaaacgttgaccgcagggactctgggatcaggagtaccaggcaaagctggaagaggggatggggaattccaggccaaaaacaggggttaagtgaaa

SEQ ID NO: 191308 - DNA, 465 bp, Homo sapiens
ctttgtttctaccaagaaccaagttcaccaccaaaataatattagtctcttaacaacaatcctgctgacatctagtattcattcatatgaaatgtaattattggggtccttaaaatttgagaatctttgtcaattccccaggaccttaggcaaaaaatcaaggaaatgaagtgactcagtccgccaaaagtgggtattctgaaatatcactttccaacttcaagaaacacacttccctacttgtgaaggaaatgaatcttcctctctttttctcaaattacacaattggaaatttagatactctggagctcctccagctggtgggccaactaagagaaaacaggaagtgggagattctagcttggctggaccatatccaggtcttcataaggaactctctttggctgacatgtaaaaaaattctttcagcaggagcattaatcttaaacgtgtgtaaacaccaaa

SEQ ID NO: 191309 - DNA, 220 bp, Homo sapiens
gagtgagttcttcctttgttattgagtattcctgattaacgtgtagtaaaggaagtcaagaagaaaagcaagcttcagtggttttctttggaaagaaggggattgtgagagagtgatggagagatgactagtttagacatattaagttataggttaactacacccacctttatgttgcagtgaacatatatcaacaatgaataaaatgaagcattttaag

SEQ ID NO: 191310 - DNA, 692 bp, Homo sapiens
ggtcccaggctgagggagcttccatttcttttcttactccctcccccactggggaacaaacgtggcgagtcataaactggctcttaaggctcctacccgaaagtgacacttctgctcccagttaattggccaaagcaaggccaggtgtggtggctcacacctataatcccagcactttggagaccaagatgggaggattgcatgaggccaggagttcaagaccagcctgggcaacatagcaagatgccataaagtagctgggcatggtggcacacgcctgtagtcctgactactcaggaggctgggatgggagcatcgcttgagtccaggagttggaggttgcagtgagctatgatggtgccattgtactgcagtctggctgacggagtgagacccggtctctaaaacaaaacaaaacaaacaaaaaacaacaatccccagttcaggagggcagggacatccctgaactaatagctggagctatgtggtgaacagctgtcatgactgccacggtctctgtcgctgtctctgtctctctgtcatcactatgtcatctgcctctctgtttctgtctctctctgtggtccatctccatccatcaactcctgcctctataattttccccaaaaggtctgacctggtttagggacagagatggggcttccaatatttgacactggtccctacataat

SEQ ID NO: 191311 - DNA, 130 bp, Homo sapiens
taacagactccaatgcttacaggacttctgagagatgttaagaaatcaatccccattaggcaaattaaatctaaataaataacacccactctgcatcttcctggaaaaacccatcccaggcccatatggc

SEQ ID NO: 191312 - DNA, 548 bp, Homo sapiens
atcacgaaaccctgtctctacaaaaaaaaaaaaaaaaaaaaaatacaggcatggtggtgtgcgattgtaatctcagctacttgggaggctgaggcccgagaattgcaggttgcagtgagctgagatcatgccactgcattccagcctaggtgacagagcgagactccttctcaaacacaacaaaattatgtggaaacaacaaagagtgtctctaagatctctggtcaccagaaaggtactccacatgggggaaccacaaaaccaagaaactacagaatacctaagggtgttggtgaggaaatgcccaggcggtttccacataatttttcccgttgggagtggctttgaggctagttgtcacgccctgaccagcagaaatctgagcttggtccagcatcaaggttgacctagcactcttttaaatttcattttagcttttacatagaacaataaccaagggattttatatttaacttttttctgttggtttgcatttccttatatatccagtgaatcccactccctgggaggtggattcatctctaaat

SEQ ID NO: 191313 - DNA, 236 bp, Homo sapiens
tccttagaacaggcacatggccattcaaagttctccatgtctgctcttgctttcctgccttccttatctcatcaacgatttcccctttatatttttatttccagttctcacacatctctatccctttctaaatgatggttttattgctaggaaacacttttctttttctctcagcaagtttctatttgtccttcaagtgttagcttaaagatctctttgatacagccatccctgat

SEQ ID NO: 191314 - DNA, 412 bp, Homo sapiens
atgagaagtgaaaggctggagggtaaaaataccagaaggaaacccaaatctgcacagagaactgagaacactcaaaatatcagttaccaacgatatggaatgaaccaagaaaaagggaaggagcaagagagaccttttccagcaggaattggcaaactgtggcccacaggccaaatccagcccactacctgtttttgtatggcctgtcaggcaagaatggattttacagataaacatttgcaattgatgtgatgatacagaacactaattttggatcccatttaagtgaaatgttattccctcaaccaaaggaaaaaaaaaaaactacacttcttattaatagatctgtattacccaaaaatgtatttgatgattaaattttgaattttgtcaataaaaaatgtgaaatttt

SEQ ID NO: 191315 - DNA, 405 bp, Homo sapiens
ttttatttgtttatttatttattatttatttttgagatggagtttcgctctgtcacccaggttggagtgcagtggcagggtctctactcactgcagcctccgcctctcgggttcaagcaattctcctgcctcagcctcccaagtagctgggattacaggcgcccgccaccaagcccggctaatttttgtatttttagtagagaaggtttcactccattgaccaggctggtcttgaactcccgacctcaggtgatgcacccgcctcggcctcccaaagcgctgggatcacaggtgtgagcactgcacccagccccttcattcctgtgcagttttttcaactccttatgttagaacattgacaaactgaacctgaattcccatagcaggtgggagccggagagagct

SEQ ID NO: 191316 - DNA, 342 bp, Homo sapiens
gtctgtactaaaaatacaaaaattagctgggtgtggtggcacatgcctgtaatcccactacttgggaggctgaggcagaggaatcacttgaacccgggaagtggaggttgcagtgagctgagattgtgccactgcgctccagcctggcgacagaaggagactcagtctcaaaaaaaaaaaaaaattgctccagttatgtaacgaatcagcccaaacctaatgagatcaaacacatttttttgtggtaaataaaaactatcttagaggccaggctctgtggctcatgcctgtaatgctaacactttgggaggttgaggagggtggattgcttgaatccaggag

SEQ ID NO: 191317 - DNA, 410 bp, Homo sapiens
  misc_feature (15)..(15): n is a, c, g, or t
ggaccactctagagnatcccctcgtcttttgatagggtttggtgacaggagtcaagagatggagaaatcaaaggtgggaactagaatgacttggagaattgctgtttcactgaccaaaatacagagatgacaacgttgtggtttattaacaattacaccagagagccaaaaggtgcaaaagaggagctagtaaacaaatttgtttattttacagttaaaatccactcttagagtataaaatagaattttttctgaacacaagattttgaggacatgccatttttatcccctaaggatcaggaaatagaaactacagtactatatctatttcagaggcagaaattgaactcctccaatgggtaagaaacaccactcgcctatcaaaagacgagggctccctctagggtcgc

SEQ ID NO: 191318 - DNA, 792 bp, Homo sapiens
aaagaaagaagaaaaaaagaaaaagaaagaagaaaaagaaagagaaagaaagaaaaaaaagaaagagaaattctgggaattctagctttctcttggtgcatgctctcattcgattgaaatcaagcagtttctacatgaggcagacaagttcctagggtatgcagaaaggggcaatatcttggttcttgcttcaaaagagctaactgctgctgggacctacggttgagcaatgactcagggacctggctggtaaagaggaaggaagtggctatggaaagttgctgttaagtaactggagccccaaaataacataatattgaccaagtcatcccacccccaacacctaccattactgagagtaacaatgtggagatagccatgcaggctcctgggtccatttgtcacttatttgagttcccttcgttacaactcttaatgctactgaactctaattacatgacatggaaatgcatgggatgaaggagctggaggggatttgccctcaactccacagtcccatgagagagtgatttgtctttatataaatagctatcaactaaattgagatcataagagttatatctttgaagataacatataattgcattcataagaagtattcaaaatcaccatttcataaatttttccaatatccctatgagtagggattgttattctcattttaccaacgaggagtctcattactaaatgtaggaaaagtacttgatctgagtagcatgataaaaagtacacattaaaacaagaagacatattttgaccatcaaactagca

SEQ ID NO: 191319 - DNA, 432 bp, Homo sapiens
ggccacccagcgtgcggttctgttacagcagccctagcaaactcaggcacccagcaacaacagtcatgaaacacccctagcggggctccttctcttgcacatacagccctgtgcagcagggcagagatgggttttaaacaagtgagtcagacaaggatatcttattcatcactccgacgaacccatgggctgaacccttgaatcactactttatttatcatcgggctcgggctcagaaagtctcgctgaggaaatgagtagaacccaaactcgtcagctgcatttctgaaacatgcctaatctctgaggctctttcccagccacgatagaaattgaaagggaacggggctctgggctgcggcggtgggctggtgtggagacagagccctttgttctgccactccagggaccacgagggcagaagagaagggc

SEQ ID NO: 191320 - DNA, 207 bp, Homo sapiens
ttaaaatttttgtagagatggggtcttgctgtgttgcccaggctggtcacaaactcctggcgtcaatgtatcctcccacgttggtctcccaagagttgggattacaggtgtgagcctgtaatctcagtgtgagcacatactgggcttcttcacatattttatttgaagaaaggcctcctctgctgaatcaatttaaaattttgctga

SEQ ID NO: 191321 - DNA, 537 bp, Homo sapiens
tctgctgcagcaataggcacgttttgatgtggaggaaaccattactgagctgttctgttaagagcatatttgaatgttacctcgctcatcattttacagtttgtaaaagtcttagaacgtatcccgtccaactctttgttggaaaaaacggaaattctaattaaatccgagagagagagagagagagacagagagagagatgcgtgctcaaaactattgcacacccacttgcttgcacaatgttggagccatttccaggagagaaccaggaaccgggtaggggccaaccagcttcccgacttccttgtggggctgccagttccactccttcgcctttctctttgacaaacggctcccaggactatcttttcacccattatacattaaaaagctattacccagcgatttaaattcactctgcagggtcagacagtcccaccgtgccataaaagcactactttgaaaagtgtaaagcgtgatacaagtgtaaggtattgtaaatggcattcttaataaatactgtccatagtttaacct

SEQ ID NO: 191322 - DNA, 205 bp, Homo sapiens
tactctaaattcatcagagaaacactggcaagctggcgtgggagaaatcttacaagaccattcaggttgatgccccatgttcctcaaaacccaggttatctctggggtcagacaaatacaatccttcctagccctgaagattttcctccaactggggcaaaagtcaaattagatccaaaagacagtcactctccccgggatacag

SEQ ID NO: 191323 - DNA, 601 bp, Homo sapiens
ccctctcagggcgaccctgggcctcggggtgagaggtttcctacactaaaagggctgcggcccctcagtgctagaccccgagattcctttcactcgggaaatctcgtaatcgcatccattgtctttttggtaagtaaacggtgacgtgagaaattttgatggggttagctcagtcattggtgattatgtctcagtttagggtagatggtttgagacctaacttagaagtaacactgttttattcggatggcccatcctcttccgaatgttaatttactctgttcttcatattcagatttccatgcctaatttctagctcctacgtctctattgcgggacctaaaagtcgctgtttcactaagctttggaacccgactccaggaaatctcattctttcgtcccaaaatttcaaccgtaaagagaaatccgcgcggcggcctcttcaagcgcccgggccgggagcgcgggttctgaccttcggtcgccgggccggtctcccgcagcaccacgggtaagaggagcctgagcagctcggagggatgagtgcgggacggtgggggctccccctcttcctgccagtaccttgccccaaggagaagat

SEQ ID NO: 191324 - DNA, 215 bp, Homo sapiens
atggaatttttaaaagtaccagcggaaaaaacacctagaaggagtggaaagtgcttgcctctgaagaatgcaagctgcaagccagagataaagaaaagagggtcattgctcttttctttgctttttttttttttttttgggaaaaagttctcctttgtcccccaaggtaagagggcaaggcgcgacccagatgccggggggaaacctcaacctcc

SEQ ID NO: 191325 - DNA, 202 bp, Homo sapiens
aggaagtgcctgccaacctgagtcctccttccagggtgctggttctgaccttcagctcctgactcatccaaccccgggggcctggctgtgagttggtgctcagctcacaccacagctttccaaagccacgctgtcttggagggtgatcacacagcttgcctcggagggctgctgtcaggatgggttgcatgagataagtgcc

SEQ ID NO: 191326 - DNA, 510 bp, Homo sapiens
acaccaccacacccagatagtttttgtatttttagtagagatgaggtttatcatgttggccaggttggtctcaaactcctgacctcaagtgatcctctcaccttggcctcccaacgtgctaggattacaggcatgagtcactgcacccagcctcacatttttctacagtgccaaatctgttctttgttgcttccaacgaatatttgaattccatcaaaatctgtctctgaatttctttatctcgccatattcactttcaccctgagctcatatttttatcttattttattgtcttttaatctcagcttgttctctccttataatcctcccacttctgtttcataagagccatgtcttttgcatgttccctatgctcgtgcagagcatccaaggtgcccggctatccttttctgcatcaattcattatgcagaaggtataggggttagtccttgctatattatgcttggttataatttttcatctttcccttgcggtactatatctatagg

SEQ ID NO: 191327 - DNA, 340 bp, Homo sapiens
tcctaagattcttggtgtacacgttgtataatcccaactagatatgagagctatcagattaagactttgcatctttacatcccccagtacctttcagagtgtgagtgcacacacaccatttgctaaggaatgattgcagtgacaataccaagtttaggatcccttaaaatacctatatcttgggcagaggttgcattgagctgagatcatgccgctacactcagcctgggtgacagagcgagactccatcttcaaaaaaaaaaacagtccgggtgtggtggctcacgtctgtaatcccagcacattggtaggccaaggtgggtggatcacaaggtcagga

SEQ ID NO: 191328 - DNA, 260 bp, Homo sapiens
ggcccatattcacgtggagaaccatctctactaaaatatcaaaattagctgggcgtggtggtgcacgcctgtaccagctactcgggaggctgggaccacagacatatgctgccatgctcaaataattttaaaatttttgtagatggagtctcaaattcctgggctcaggaaatccaccccgcttgcctcccaaaagcactgggattacaagcatgagccactgcactcagctgagaagttctatttattgattcattgtt

SEQ ID NO: 191329 - DNA, 213 bp, Homo sapiens
gtctgaggaggctgtgaaaaagagagacaggaagaacctctcaatattgaataggaaatttatattgttctaaaaacttcatatctcccaaatttgtaagaacaccctggtttaaaataaacaggctccccctcttgagaatagagaaacagtgacaggtgtttccctaaatttccaaacctaacaacccatttagacagcctatatcaggtg

SEQ ID NO: 191330 - DNA, 320 bp, Homo sapiens
aagtgtgtggtgttatgatacagatatgaagagcttaggaagggagacaaaagaacctgaaggtgggcttgaagaatatcttggagtgggagcttagagttggggagaagagagactttaggtgagcctaggcatatcgggggaaaggaaggaaagaaatgggagaagagaggttttaggaagtttttctatgttctcgctttgggtatgtttatgaaagactgcagtaaagattaaattatttgtatgtctatttgggtcagggttgatatacctatgacacacactgaatcaagatggtgccataacaccacacatta

SEQ ID NO: 191331 - DNA, 498 bp, Homo sapiens
cataggtcacaccgtcctacatagtgtttaacaacatactcctgggccaggagtaacaagtccaggcccttgaagaaacaaaagggctgaagccaggtacacaaataaaaagaagactgagaggttgaggtgacagaatcacttgaggtcgggagttcaagaccattctgggcaacatagcaagactcatctctacaaaaacatttttttttttaattagctgggcatggtggttcatgcctatagtcccagctactcaggaggctgaagtgggaagattgctgagcccaggaacttgaggctgcagtgagctacgagtgtggcactgcactctagcctagccggtagccagtagagtgagactttgtctataaaaaacaactgaaaatgaaaataaaaagaaatgatcacttgtaaattacattatcaaatcactctatcaaacttctaaagaagttgttttattcaatcacacgttgccaagatgacaggtagtat

SEQ ID NO: 191332 - DNA, 105 bp, Homo sapiens
tgatgaaactgaggtccagaggaaggttatgcagaagagcatgagtgggaatgagtatggggaagtagacagggcctgaattggtaggaatgtgtattctgcaga

SEQ ID NO: 191333 - DNA, 206 bp, Homo sapiens
ccttgttacaatttcacaccccatattaagtaataaatgaatttactgtttcacagctatttttgcaaagtggctgtaagatcataaataaattttaatctgaatttccattctttggtggtactttataattgttcttatattgtttcacatatccatatttcctcacccttactactaccctatgttttattttcttttttctt

SEQ ID NO: 191334 - DNA, 269 bp, Homo sapiens
ttaggtagaatagtaaaaatcgtagtagcagtcttaaagggagatactacccctttccccatttgtaaagtgagtttgaatctgctttcatggcaccagaactcagctatcatctagagaacataaatgcacagcaatcccagcacctaccactgtgcctggcacctaggaggtcctcaaacacttgctgagagtaaatggatcctgggaaaagcacgcatcagtcaccttattaactgcaacaccaattaattacctggaaactgtga

SEQ ID NO: 191335 - DNA, 445 bp, Homo sapiens
attcagtcttcccaatgaaagacttctataaataaagcattttaatgtaatttctcacatgcaaagataaagatggtacaagatataatggaaagcataatgaactccaggaaaagggaatcagggaggctccaaaggttaataatagtccattcagcagatgggagtgagaacatattccagcttaacacacagcatgtgcaaagcaacaaaggcatgaaacatcacagtgggttcaggagtcacataatattgaagcataaggtatgggatggggaagtgcctgggtaatgagtctccaaagatagctctgtctataaatgggcctaaagtgccatcttaagaaactttgattctagagaaaacagggagtcattgctaggcgggtcctccagcccatcttagcttgtaaggcactgaatcaacaaggatacagaataacaag

SEQ ID NO: 191336 - DNA, 272 bp, Homo sapiens
catctgatataatctgaatttcttctctgatttatttgaatttttttgcattttgaggtgcatatataatttagtaatatcctcttgctgaattgaatccgaatgatgcaccatatcctcctattctcagggtgaatacgatgacctgggagttgtttcagtactcagctcaggaagataataccagattagtagaaagatggattattttccgagaccaaaatttacatatcctagaaactgaggaaactgagtctagctaacagtaggaa

SEQ ID NO: 191337 - DNA, 337 bp, Homo sapiens
ctggtaataccccggtgaagggtcttcaagagcactgatttggcattaacgtaatcattgtatctttgaagcagaaaagttttcaccttatatgcctttgagtgcaaatactctctttgttctattcttttcttcagtaatttctgctgtcctgatacattagatctccattctttgtcctatatgtcactttttctgtcatcactttaatctgtttttgcttttcttctgcattctaggaaggtttctcaagtttgtcatcttgaagaacactcgagtaccgatcgtcgtaccgcgctctcatgcgtcaataacggtcttcctgggttgacattgt

SEQ ID NO: 191338 - DNA, 387 bp, Homo sapiens
ttcagtctcataatgatggtctaaaggagtaacagtagtaactgttggaatgatggctcaagtagtaacagtagtaactgctgtaatgatgatctcaagtagtagttgtggcagtcagccacataaaacatatttttttaaaaattccagaatttttagttactcacagaatgcatacatagaagcataggaatgaactagcaaatatagtcaatagggttataaatttggaagaaaaaaataaaagatgactttctggcttaggatgggaaaccatatacacaagtcagtatccaaacgaatgtttctatctagtggcccattaacctataagcttttcccccccttttcctttcactctaacatataggatctttttaaagcaca

SEQ ID NO: 191339 - DNA, 226 bp, Homo sapiens
tacgtaccatctgaaactttgcaccctttggtccgctctctccttgttctcctttaatcattttaaaatgcaacagtgggcaggcgtggtggctcatgcctgtaatcccaatactttgggattacaggggtgagccaccgcacctggccaggagatgtctttttgagtcataaatagaatcatatcacttcctgctgccccttgctaatgtaagataatgtcgaga

SEQ ID NO: 191340 - DNA, 281 bp, Homo sapiens
gtgatccgcctgcttcagcctcccaaagtgctgggattacaggtgtgagccaccatacccggctgcaaaacaaatattttttaatagtatttttacatttcattttgaacaaattaggaaggaggtggggaaaaggaaataaacaacaacaaaacaaaagaagtgaagaggtaagaggcaaatagtcgaaaccttgacactgaccagaaaatcacctttcagaggtaaacctatatcacaaacttgctatgaaatatttttgttgttgttgttgttgttgt

SEQ ID NO: 191341 - DNA, 174 bp, Homo sapiens
cagcaatgtcagtgtcacctgggagggtgaatctccacccaagacctaccaggtcagaatctgcattttaacagattcccgggtgattcctttgacattaaaaggtgacatgcatgacttagagcttctgaatcacaggcctccagggcctatgcatcatctcccttaaccttc

SEQ ID NO: 191342 - DNA, 623 bp, Homo sapiens
gcagtgtgagatcagactaataaacacccccatgatttaattacctcccaccaggtccctcccatgacacatggggattatgagaactacaattcaagatgagatttgggtgggacacagccaaaacatgttattccattcatggtccctttaaaatatgtcctcacatttcaaaacacaattatgtacttccaacagtcccccaaagtcttaattcattccatcattatccccaaagtccaaatctaaagtctcatctgagacaaggcaaattccttcgcctatgagcctgtaaaatcaaaagtgagttaattacttccaagatacaatggagatacaggcattggacaaatacacccattccaaatgagagaaattggccaaaacaaagaggctccaggccccacccaagtccaaaatccaacagggcagtaaccaaaccttaaagttccagaataatctccttcaactccatgtctcacatcaggtcacgctgatgcaagaggtgggctcccatggccttggactgcttcacccctgtggctttgctttcacaagatggcattgagtgtctgaggcatttccaggtgcacagtgcaagctgtcagcggatctaccattct

SEQ ID NO: 191343 - DNA, 452 bp, Homo sapiens
aggctgtgcaatattgcaggtgggagacggcagtggtctgcacaaggatggagacatcaggatgtgttttgaagacagagtccttaggacttactgataatctacatgtgggaagtctggagaaaatgggatcaaggatgattcctagccaaaatggcagcaggtgacatttatcgagcactttgcacagattctctcatcactccttcattaccaatatccttaccatcttctttatcatcatatgaggcaaatactattattaaccctattctacacagagaaaatcaagaagccaaggtttgggaaggtcaaataacctctctatggttatataagttggtaattggaaccaagatttgaattcaaggagtctggagtcccaagtttgtcctgtgaactgcactcctataccaaacctggattatacacatatgcatagattgaagggt

SEQ ID NO: 191344 - DNA, 392 bp, Homo sapiens
taccaactggaactggagctcttagaatttccagccacagggcagcaaagccattttcctagcagaaccagacctgggatttaggccagtgggaggggattttctgctctctctgccttctgtccctaccctcttctcttactccccagcctcgggccaatttgcagcttcagcagccctgaagcctgacagttccagccatctccctgtgtacctccctcacccgcacccccatgcaggccaagctagaagaacagctccttccagatttatcttcctgggccttggcaccctcatcctgtttggtggcagactggccttactcacattcaatccttgttcattccgattctgccaccaatttccacagcatggtacattctttccacagc

SEQ ID NO: 191345 - DNA, 285 bp, Homo sapiens
tacagcaaattccatcagtttacacaattttgaatctgagtgttagtgcaatgggttataacatcaatcttttcttggttgcaacagtgaagggagagataggacatgacaaaaccttacagctatatttaaaacacataaataggctgggtgcagtggttcatgcctgtaatcctagcacattgggaggccgaggtgggaggactgcttgagaccagtttagacaagcctgggcaacatagtgggagtctgtctccaaaacactttttttgtgtaaactgagct

SEQ ID NO: 191346 - DNA, 248 bp, Homo sapiens
tggagcatgggttgaaccgcagtttattttctctggcagagcacctgtagatgctgtttaatcctgatcatatttttttctagagcctcctctccctcccgtgagagctcactttttgtaaaggaaaagtatggcattttatacttagttgctgcactgtgttcatctgtatgtatcacattatgttgaccatctttcttcaaattgaattgagtgttaaactttctttatagaaacaagggaagcca

SEQ ID NO: 191347 - DNA, 448 bp, Homo sapiens
agtgttgagctcctgaacttgttcctctaataaacattaagtaagcaaggcttcctctgtcaatcattttccctgttccttatgcactaaattgctatttttgcataagttttgcactattttccagcagtaaataagatgaagcccatcaaattttttaataagtgtattcatattctggcagccatttagttgaaatagcaagcagattgatatacactttttttaataagtgtattcatattctggcagccatttagttgaaatagcaagcagattgatatacacatacagatattttggcagctctatttaaaaggcactttgggaagttattcacttctggctcaaattccctctaaatgaccccagactgacctatcctgtttttgtatatctttaagtaggaactttccaaaaactgtggcagatacttaaggctttttac

SEQ ID NO: 191348 - DNA, 461 bp, Homo sapiens
ggtggcacacacctgtagtcccagctgttcaggaggctggggtgggagaattacttgagcccaggaggtcaaggctgcagtgaactgtgatcgcaccactgcactccagcctgggtaacagagcgagaccttgtctccaaaaaaaaaaaaggccaccagcaagcctctgaggccacatggctgtgagggatcagagacatggattcctccaggccctgagccaaaccacgactgcctggcagcgtgacgcccttggccttaatgtggaacagggtgaggacgcagcgggagatggaggctcaggccttaccactcacagcaaacctgaattcaaacccactggggaagggacggcttaatcacggaaagcgaattccagaatacttgaagtcacacttaggtttcggttttttaacttgagcagttcctcgatacgctccagaaggagcacccccaattgc

SEQ ID NO: 191349 - DNA, 830 bp, Homo sapiens
gtctgtcactttcccaaagggtgggatttggcaaatccgtcagccgtacgagaaagcgtaagcattaagagcctctcttaagttgccactttggaccaatagacccattgtgaaagcgggagaccagtgtgagcgccttcctgaattctgtgggccgctggtcccatctaattcagttacttgttttcacccgtcccccaggcgcggagaccaagctcattgctgagctccagctagcccacaatacatagtatttattaagctaagagttaattgtcttaagcgactagataagatggatctgcagttagcataaagttaactaccctgcgaaagaggagttggtctttaaatggtgtttttcacttgaagagaaaagaaggtactgggcaggaacatagcttagcaggcctagggaatgggtggaaggaaaattgcactgaggacttacatagaatgtggtgtttgttcagcaatgattgagtagaaaggtgattgtttcgttttgcttgtttggttggttgggaaataaataggagtgaaagatttcgcctcgatctttatttagagcccaagagttgttgtgactcagttttagctggtagtggcttgtacacgccaggggagttttagaactgttctgaagagagatggcagcagttcttccaccttttcgatgactgttgaaatcctgaagattagctgtccgactggttaggttacacaagatgattcaaacacagctttcatgtttgagaaaataggtaacttgtgattcttagtccttgcactaataaagcaacaggaatgagtaagtcttggagaaaaag

SEQ ID NO: 191350 - DNA, 544 bp, Homo sapiens
ggcgccctctctgaacctcctgcctctcccctgtctagtggggccccagtgcacttgtaaagtggagagacctgacgaccccccacccccaagcgctccactcacgctgttgtgattcctaaaccatcgtgcccggaactcagtgaagctcccagaacgtattacattgtattaaaatggcttgtttatctccacgttgcatcaatgccctcggggccaggatcctccgttgccagacttcccgggaacacttggaatgcctcctccacctcggactagcagtggcctttggcctcagtctccccagttgacaaaggggggtaatctgcacctccaggatcactttgtgaattacttaaggagcgggcttgaggccagcactcccctgcactgctacatctccatccccatagcaaaggctacattttatttactagcatttatatttgccttgtgtttttcccagatctaggtgcaaacagcacctgaaaagcgtttgtttatttcatgagagaaaaggggttccttactctctcctcctctc

SEQ ID NO: 191351 - DNA, 748 bp, Homo sapiens
ggcctggcttctacttggtccatctgtttccttggttctttatacataaatcattgggaaatcctattgttaacaagatttcctcttaaaagcaacctttaaatggaaagaggaaaggaaaaatttgggaggcttctgcccaggtgtgactacagaatgtagtttgactcattacccttaagagtctaacaaacacgcagaggcccccttccttctcttcaagcagcagagctgctacctcagtttgcacttagagcaaatctatgatgttgaatgaataattagatacttaaaatctgtaggcaaaaccagctattattttggaaatctgaaaattaatccttcttaattttttttcttaagcttccagaataaaggtttgcattccgagccaagagtttaatatgactgctctccattccatccctcaactccttctggaaatacaaagtcccatgtggcttttcctggaaatagctagaaaaataaacacttgaacacctgtagagtcaaggtaaaggagagagtaaaaagatagaagcacaggtggaaaaggaagtattctaaacatctgcaaatcccttacatttctatttacatggacaagcccagctaacatcacatccaatcttaatataagtttttctaatttttttattgacaaataaaaagctttgccaagaaactaatcatttcttccttaaatattacattttgaagcatcaatacatatttttccctttgaaac

SEQ ID NO: 191352 - DNA, 140 bp, Homo sapiens
catggaacatactggacacagagaatctggatttcccaaggcatcagtgtgctttggggccatacctagaagctacgcacctcaaattctgtggtttataaagttcaataaattgtctctacctatctgagatagaggaa

SEQ ID NO: 191353 - DNA, 729 bp, Homo sapiens
gtattcaaataatatttgtcatgtgagttaatattaaacattcttattttatattctatgtcttgtcattctacatttgaagactgcatgtatgatttttaccatctcctccttctagtttttacccattgtgccgtttacttttatgttttgtggattttgactctgggtttatattccttggattttatccgtagaaattacttgaggcatagattgacgttaccttcattcagagattatttgtgtttacttttactagttgcctggggttaactacttactcaggaccaaattaatctctctccttgattttttgtttgtttttgtttttaactatgtaagtgggtgacttgacctgcaaacccatgtgtatgacagtatcaactgtggatataaattattgaaagaggaaatatacatatttcctctaccaaatgccaaggtacagatgggcaagtttccttgctcctttctgtgcagcaggtttctttcctgttcatcattgcactggaagtgcagcccctttggggtttgcagctttgttagattttcctgtcttaggcgagcttcagcttgagctgatgtctaaaaatccggtgttcttcagatttctcaagtgtagcctgatttttatgtgaattcagcaatttttaagtgttggcaaacagtttaaaaaatgttttaatgtgctgggaaaaaatcaccgcaggtcatatttgatctgta

SEQ ID NO: 191354 - DNA, 716 bp, Homo sapiens
gttctcagaggtcccggggtgtccgtttagtactgttacaagtgtgagttaagcctttatcaaccatctccaggttctcgtgtatgtaagccttgggaagaggcagtccagcagtgaccgtgcggccgccccgtgcatcttgagagccctgacagtggcaccaagcaccaacacgtgaggccagaggccggaataccggcatcagatgttaaaaaacttttccattaccaatgtctgctccaaatcctgcttccgtctctactaaaaatacaaaaaattagctgggcttggtggcaggcccctgtaatcccagctacttggaaggctgaggcaggagaatcacttgaacccaggaggcagaggttgcagtgaatcacttgaaggaggcagaggctgcagtgaaccgagatcacgccactgcactccagcccgggcgacagagcgagactctgtctcaaaaaaaaaaaagaaaaaaagaaaaaagaagcaaaacagatgcagaacagattcttcctatcttcagtgacctgaaattagaccactgtgtaaccaaatatgttatagctcaatttgaaacttcaagtgaagtcagtaatatcctaacattcaagattagaagagaatttttttaaaattctgagccatctaaatcaaaagcagtaaagcctaatcacagtattacatcaagtgctaaactatgtgcttaatcttttcca

SEQ ID NO: 191355 - DNA, 644 bp, Homo sapiens
gtctaattctggctccaccagctatgttatagcatcaggcaagcttaactgctttgactcagtttcttcatccagtaaaatgccagcttcatgatgtgcctgtgaagattaaaggcaatcatgtatgtaaggagctttgcatactgcctgatatgagataggcattcaagaaatcattacattgaagaaattttcaattttccttctcctataaatccttgtatgaaatcgaaatgagtgttgagatgaacaaaagacagctagttcaaggtgaaaggttggtaatttgcttacaagatgagtctcttcttcatttggcagctgactaaattgttaaaagctcagcctaattgtacctttgccaggacattttaatgacaccatttgtctcttcagttcttaagcactttggggaaccagtagaatacaaagtagaatgtctgtgctttttaccttactcctacatcatctttctaaaatttaaatgtactatcactaaccctgttttgatttagttgaggggagaaaaaaagcttaaactttactttcagggtctaattggctaaagccacttttccttttctgtttccaatacttttttaaaaaaattataagttagtaatatctttctctctgtctacata

SEQ ID NO: 191356 - DNA, 259 bp, Homo sapiens
gtgggttcattatcatgggagtggattccttataaaaggacaaattcagcctccttttgtctctctcttaccttctcactttctcaccttctgccgtgggatcacacagcaagaaggccctcgccagatgctggtgtcttgatcttggactttccaggctctagaactctgagaaacaaatttctattcatcataaattaccctgtctcaggtattctgttgcagcagcacagaagggacttggattccaatcagtagg

SEQ ID NO: 191357 - DNA, 324 bp, Homo sapiens
tatttatcagattaaccaggatattaagaattaaaaagtttaatttgttattccttgaaattatagtactttgagaatgaagacaaacagtgtatcctagtacacaggaatacagtctttgggttcaatggacctgggttcaaatctcagctctgccacttaactgagtctttttggacaagttgcctcggtttccttatgtgcactttgagaataaccatgttcccttcatctggttcttacagagataaatgtgtgaaaaacatttagcacagtccctggtaaccagtaagggcttaataaatggtggttttcctctcattc

SEQ ID NO: 191358 - DNA, 450 bp, Homo sapiens
gccctctgagtgcacctacagcagatttcctcgaggggataaagtggctttgtcagttccatagagtgttacactcaggagagagcctctcataggagctggctcagaacagtgaggaactttctttcctagaaatgcccttccccccaacacacacacacaaacttgccctagagtctgaagatgccacattccactggcacaggcaaaggggatgggggatcacccagatgggcttagcctactcaggcccacccaaccaacttctcgcaataactgtgtgcccttgttagtgttcctgaaactcctggggcacaaattattttgcactgtagcctgtcacatgaggtaatatgagccaatccccagcaggccctcagcatggggtgcagtgcactagtgttgaattacttccccttcccacctcttgacaacttggttccccactcc

SEQ ID NO: 191359 - DNA, 444 bp, Homo sapiens
cactttcctggagatggacccaaatgctcacaatcagctggtttaacatctcttctccataaaccagatgttattgctaaagaaatgtgtaaacatgagtcaaggaagctaaaaagacactttttcaagcctcagctttgaagtctggggcttagatcatctcattggtgagttagcttttaagatgtttaaagtagaaacttaattggaaatggtattcagctgcttatacttcacagagggtcagataaatcttaattaagcaaggataatcactaaataacactaactacagcaatctaaaaggtttactctccaagattcccatccagatcaccaagagaaaatgagaaggcaaaggaaaaagaagaagaaaggtgatgcggcttcatgttttcaggtaaaggaaggcacatgatcacacagcaatattaaataataaac

SEQ ID NO: 191360 - DNA, 641 bp, Homo sapiens
tggagaatccagacaggaacagggatatgtctcttaacactaacctctttccaacaggctgatatcatcagcgtatatttatatctgcacatagcccaattatctgattatatacactgatgctatacgttattcaaacggcaggtgttagggattattctgttttgcaatcctaaattgcggtatgctgattaagatactgaatttcacagagcagacaacataacaaaaagccattggaaagttctgaagataagcagtggttttcattatctaatgcagcgccttgctttatccacaacaggaacaatggataccaaaaagctacacataaaatcatgaaggtaaaagaagataaagatgactattggtaacagaataaataaagctaatgagtagtaagtgtaagcaaacaaaaatgctacaaaagtacttcacaaaaacatatttttccttatataactaggagactgccagtaagaaagaatattagttgggccggatgcagtggctcacgcctgtaatcccagcactttgggcggccaaggtaggcaggtcacctaaggtcaggagttcaagaccagcctgaccaacaagtgaaaccctgtctccactaaaaatacaaaaattagctgggcatg

SEQ ID NO: 191361 - DNA, 179 bp, Homo sapiens
tggagaatccagacaggaacagggatatgtctcttaacactaacctctttccaacaggctgatatcatcagcgtatatttatatctgcacatagcccaattatctgattatatacactgatgctatacgttattcaaacggcaggggctgtcgggctagtcgggggggtaccgagctcg

SEQ ID NO: 191362 - DNA, 329 bp, Homo sapiens
aagagggggtgtaacagccttagtgagatttctgtactgtccacagggaaatttaagatcaacatggccaaattctatttcaataaaaattatgcatctaaattttcaatgaaatttttgacatctgaaaactcatttataaaaataaaaatgcaaaatgcccaaacaaaaaaaaatgtgtaatggccacttgtatacacttgtatacacctctggactctggactgcataccctgtgcctgtcttcatcctctaacataacataatctacttgcacctttgttcaggaaaattttgtgaattttgttggaaatgttcgttccatttgt

SEQ ID NO: 191363 - DNA, 150 bp, Homo sapiens
ttttttaaaaatgcagaatagctggaattcatccttaatctactttatgttgaggatagggtagtagtatttttttgcagccttatttccttgggttgttcaaggcaaggtattggaaaagttaaaaaactcaaataactagatttgaga

SEQ ID NO: 191364 - DNA, 420 bp, Homo sapiens
ttcagcttgctctctagaaccaaggccaacatggaacttagaagttggagtaggggctacttaggcaccccaccccccacagactcctccatggtggctggaacccgatctaacctgccctgggcatgctgttcatcagctttccctgtcccagtggtctgggccatctagaagactctcctgggcttagtcaggtacagggggcttctccctgcttcactccctgggcagcaggctggctggcctctgggaagacaggttcacttaaaccaaaggggattgaggcttaaattacaggccatacacacacaggtgtgtgctaatttctggtatacaggcagtcccccaacaaagaggaagggtctgaggtcctaaggatgaggaggatgaggcctgattctcctttaggcagcctctggt

SEQ ID NO: 191365 - DNA, 829 bp, Homo sapiens
ttttccccccccaaaaggggttttttgcccttttttttttttttttttttttttgagatggagtcttgatccatcacccaggctggagtgcagtggcacagtcttggctcactgcagcctctgcctcctgtgttcaagcaattctcctgcctcagtctcccgagtatctgggattacaggcgtgagccaccgtgcctggccggctttttgtttttaaataaatttagtgtccatataagagtgatttggggtaaatcctttattttcctagactataaaacagggatgataataataggatggaaaagtacttgcacagtgccagcgcagaaggtttgtaaggatagttttcattcctgctgctctcaaattttgtgattaagcaagttcacttagatgctgtttagttgagaatttgtggttttggtgttttagtccaaagcagtcctcattcttaaatgttatttttatattatgttacacttgcattctctttattggtgttatcagagtcagcagtactgaaaagaagagaaatcttttgacagggttaggttgtgtgacagggttaggttgtgtgacagggttaggttgtgtgacagggttaggttgtatgactgttgagaaaaatgcagtgtattgaaggaatgattggctgcaaataaaagtatactattttcttttcctgtcttgatttcttttttggagagagggctttggattcatttcctctaagagaatagtctaatgctgtcaactactgaaccacatctgatattattgatgattaaaaccatagtcttcctcgttagcttccatgatgctgtgc

SEQ ID NO: 191366 - DNA, 779 bp, Homo sapiens
gtgaagcaacaagaaaatttagagttaatttaccccacctctcttatttttatttttgagacagggtgtcactcctatcacccaggttggagtgctatggcacaatcttggctcattgaaacatccgccgcgtgagccaccgtgcctggccggctttttgtttttaaataaatttagtgtccatataagagtgatttggggtaaatcctttattttcctagactataaaacagggatgataataataggatggaaaagtacttgcacagtgccagcgcagaaggtttgtaaggatagttttcattcctgctgctctcaaattttgtgattaagcaagttcacttagatgctgtttagttgagaatttgtggttttggtgttttagtccaaagcagtcctcattcttaaatgttatttttatattatgttacacttgcattctctttattggtgttatcagagtcagcagtactgaaaagaagagaaatcttttgacagggttaggttgtgtgacagggttaggttgtgtgacagggttaggttgtgtgacagggttaggttgtatgactgttgagaaaaatgcagtgtattgaaggaatgattggctgcaaataaaagtatactattttcttttcctgtcttgatttcttttttggagagagggctttggattcatttcctctaagagaatagtctaatgctgtcaactactgaaccacatctgatattattgatgattaaaaccatagtcttcctcgttagcttccatgatgctgtgc

SEQ ID NO: 191367 - DNA, 437 bp, Homo sapiens
aatagtgaaaaatcagaaataagcagaccctcaataaggaactggcaaaaataacaatatggtataacctattgaaataaatgccgctattaagtcatgcatcttaaaatcataatgcaaataaaatgacataaaaactgttcataacatcatgagaaatgaaaaatgagggtacaaaattatatgttttttaaaccttggaaataaaaaacattggtagaaaatataccaaaatttttaccattggttatgtttgaacaattgaaatggcttttcccctacttttttctctgtgttccagtgtaacaagaatatagtagggccgggcgcagtagttcacacctgtaatcccaacactttgggaggctgaaatggatggatcatgaggtcaggagtttgagaccagtctggccaatatggtgaaaccccgtctctag

SEQ ID NO: 191368 - DNA, 581 bp, Homo sapiens
cagcccttttccccaaacacttgtctcccatcaagagagtttcagaaggagcatatggcaagataggatcatttttcagatgttggtctgggcctcagtccttaccaagcagggtttttggtgtcaaggagactcatctcactggctgagggcaccacttccccacatttattccactccatcccttcaccacagcagtaaatatccctttgcctagaacacctgctgctgctggtggtggatgaaagggtgttgcacttccgtcactgagggtagagaaggcactgacgtcagacatcagagctgttggagttacataatcccagaagctgcttgagcatggaataaggccatatttaacctcgggggagctaaaaataggcaaatagaattttatttccccataaactttttagacttaaaatttttttttttttggtgattctaggctaggattgtgtgtggcctcaggcaatttttcaatgttgaattatgatccctgggaaataagtatggtctatatgcagggtatagtcatgatgtgtgtgtgtgtgtgtgtgtgtgtgtgtgcttgtgtatgt

SEQ ID NO: 191369 - DNA, 224 bp, Homo sapiens
aggagcactaggtctagcaagaaataggaagagatgagtcactattattaattctattaagaattaaacatctaaccctaccagggtgaacatctttttttccccccctagaaatataaggttaagggtattgacaccccctccttctttggtgactaaagcagcatttttgtatgtttctttaggataagaattgacccctcccccccgttagctttccttcc

SEQ ID NO: 191370 - DNA, 109 bp, Homo sapiens
gctcctcctggagtcctgcctcaggctggtcagaattcccatgctccaagagtcagaagggacacattagaaagtctgtgtggtctcctcaaaagccacatgcctcatg

SEQ ID NO: 191371 - DNA, 271 bp, Homo sapiens
aagggtgctgcatgagctccttaaaggacaaaggtaacagagccagcgagagagctcgaggggagactttgacttcaagccacagaattggtggaagtgtgcgcgccgccgccgccgtcgctcctgcagcgctgtcgacctagccgctagcatcttcccgagcaccgggatcccggggtaggaggcgacgcgggcgagcaccagcgccagccggctgcgtgaggaccagcagcacggccggcaccgcggacagcgcccgttctagatcgcg

SEQ ID NO: 191372 - DNA, 151 bp, Homo sapiens
agccccccaaccctcataaagtcaatgtaattctaattaatagacatctgaagataagaagaaagaaccggcttagagttcgggaggaattaagtaataaacactcgttatctttttttttctgagacagagtctcgctgtgttgcccagg

SEQ ID NO: 191373 - DNA, 333 bp, Homo sapiens
cagtcagcaaaacctgaagacttcactccctagatattttaaagtcctaccctcgtcaatagcacctccttgctcctttgcatgagcagctagcccttaggtgacctagcctgtgcctaactctccagccttggctctctcatgtcctcctactctgcaccccatggggttctgcactggatcagcaaacataaccaggaggcaaatgacaagctggggacaatatctctaacacatatgaaattccaacagttaacatataacaagctactacagatcaataagaaaaacataagcagtccaaaaaggatgaaagctataaataggcattta

SEQ ID NO: 191374 - DNA, 335 bp, Homo sapiens
gtgagaataataaaacagttattatctgccacaaactttgaggtggcttgtaataaaacaatagataactggaagtaaatgctaaatttttacatggaaaggagcattggatattcatgatggctactgtgactgggcagtgttgacttgaatagagtttagggatgaagaccgagagcccggtaggacagaccatgttgggctttctaagccataaaaagtttagttagtttgcttttctgttttctaagcttgatggggccccactgacctattcctaaaggactgaaacataaaagtgtggtacagaaaggcactttaacactggagcaaaa

SEQ ID NO: 191375 - DNA, 510 bp, Homo sapiens
ctgaatttggaacggttcgctgctgtgatgggcttacaaagttgtgctctcctagcttttaatcagaactgaagaatcacgcagcttccctgctaatgccagagcaactgaaagcactcacaggaacacacttgattaaatgagtagaaagccttcttgagacacctaggtgtgtgtatgctgagctgttacatttgtcatggaattaacaacaataacaaacttgcttaccaaaggagcgcgttaacttctgcaagtgtataagtgtataggctctgctgcttaaacacattcgtaccaatcagaagtttactttctggtctctctggcttctgtgttgtcaccatccctggtttctgtgaaatggaaatattgtgtattcgcccagacggttggaagccgttcatgtaaatatgggccgttgtgatttaactgtcagcctgaaaggccctacttccaagggctccttttaaaccaagcacaatgaggtgtctgttttagatgcggccg

SEQ ID NO: 191376 - DNA, 406 bp, Homo sapiens
tggatggctggacagttagagtagtgagtgagtagatggatgggtggacagttagagtagtgagtgagtagatggatggctggacagtgacatgcagaggcaggggggtagaaagatggataggtggctgggtgaggatcgtcacgcctgtaatcccaggacttagggaggccgaggtgggcggatcacgaggtcaggagatcaagaccatcctggctaacacggtgaaacccgtctctactgaaaatacaaaaaattagctgggcgtggtagcgggcgcctgtagtcccagctactcgggaggctgaggcaggagaatggcgtgaacctgggaggcggagcttgcagtgagccgagatagcgccactgcactccagcctgggcgacagagtgagactctgtctta

SEQ ID NO: 191377 - DNA, 555 bp, Homo sapiens
catctccctatcctttcccttcattttgtcattttgggtattgccaagtctctacagaggctcatttccattttctgctaattcgttacttgagaactaagatatttactgataatggttctagacattgcccttccaagatttgtattttaatgagagggaggagtctctttatgagccaaaagaataaaactgtagtgataagatatggtgataaacttcattgataaaaggaaagtgaaacttaaaacattaacctcacaaggctgggtgcagtggctcatgcctataatcccagcactttgaggggctgaggctggaggatctcttgaggtcaggagtttgagaccagcctgggcaacatggtgagaccctgtttctacaaaaaatacacaaattagccaggtgtggtggtgcacgcctgtggtccccgctgtcttagctacttgggaagctgatgtgggaggattgcttgggcctgggaggcagaagttgtagtgagccgagattgagccactgcactcaagcctgggcgacagagtgagaccttgttaa

SEQ ID NO: 191378 - DNA, 315 bp, Homo sapiens
gtgatagtgagtgagtaagttatcatcatatcttgttgcagcaccctgccacacttcctcctgctccagcaatgtaaaacgtgcctgcttccccttcaccttccacgtgactgcaagttacctgatgcctctttcgccagctttctgtacagcctgcagaaccatgaggaatcacaccccttttctttacaaattacccagtctcagacatttctttatagcaatgcaagaatggactaatacagtatctgtgtaaaatggagatgtttcctaagaaagaataaactccttttggtataagttatgtgactacaa

SEQ ID NO: 191379 - DNA, 141 bp, Homo sapiens
atgaaactgcctttaaaattcatttgagtgcagattagtccccaggatcttagcatagggaatataactgggtgcagattggtggatatgcgcttgtttgagcttgggggtcaatgccagtagccccctttaccccaaatg

SEQ ID NO: 191380 - DNA, 620 bp, Homo sapiens
aaaagggctggagtccccaacatacagagattacagctaaaattacgaccagagctgttaatcaaatcccatcttcccttcctattcacacagtagagatgttataagtcatacaggtttgagacagaaaattgagagcagaggagcatgtgtttaaaccagcatagaaacattcatttaccagaattgctttatttcagccgtatctcaactcgttgcttacacagtaacgcatgctgtctcgtcactcagccaagtgggagacaagttcaggtttctgctccatgggatccaggagcctgcagtcaccgatgagcctggaggaccacaaggtggccagggcccttggagagctgtgctgcggaatcgtaaagctaccatccggagctggccgtcccagagggaaggcttggtcatctcttcccctccacctggtcctcagccctggtcccgcagtttgtcatcccgcagtttgtcagcatcgatgtgggactgggagaggaaggatattgccagttatggttgaatgtcattgtcaggggagtaagaagtagtttgtgattgttttacgtggctctgtgttggtatataattatgctgtcatcttaaaacgccctgat

SEQ ID NO: 191381 - DNA, 537 bp, Homo sapiens
tacatagcatcctgacacataaattcacaacatttaggagacaatcccaaattactcaaattataacatgctaggaaagtatgagccattctcgtgaagaaagacaaacattagatgtcaacccaaaatgacccagatttggagattatcaggcaatgactttaaagaagctattaaaactatgcccacaagttgaagaaaaatatgtttaaatgaaacaaaagagtaggaatcttggcagagaaatagaaaattaaaagtaaattggaattttagaactaaaatatacaaaatctgaaatgaaattagctaaatgggcttaaaaacacaaatgaacataatggaggaaatattcaataagcttgaaaataaatcaataaaaattattccatctgaaaaagagagaaaagattgaaaaataatatgcagaacctcaggagcatgtggggagatctcaaaactacagaatatgtgtaatttttgtccaaaagaagaaaagagagaacaaagaaagaaagattatttgaagaaagaata

SEQ ID NO: 191382 - DNA, 456 bp, Homo sapiens
acatgcacagggggacaatcctgtaaggacaaagggagaagacagccatctccaagccaaggagagaggcctcaggagaaaccaaccccgcccacaccttcatcttggacttctagcttccagaactggggaaatgaatttctgttgttgaagccccagtctgcaatacttagttatagcagcccttgcgaaccagcacatccaagttctccgtctctgtctctaacccctctctcaactgtcggccataagtgagcctctgcccccaacttctggcctcctctatgttctcttccttggtgacctctggcagtgacgctcagtcctcatggccagctctggcctctcccaggctctggcgccgcaatcatctcttccacttgtctctgcttggatagtctgtcagcatctcaaaggcaacatgaataaaaccaaatgcattttttcctcccacaa

SEQ ID NO: 191383 - DNA, 153 bp, Homo sapiens
cctgggtagtgatttgggatttagagtaggtttgcacagtggaggagagcagttagggtggcgacttttcatctaccagttgctatgaaagcttagggggctgttgatatcactcgggtgtaaagagaattatttcattgttcagttggttga

SEQ ID NO: 191384 - DNA, 548 bp, Homo sapiens
gggagtgagccgagatcgcgccattgtactccagccctggtgacaagagcgaaactctgtctcagaaaaaaaaaaatagcttaaagagaagaattgtaatgttcccaacacatagaaaaaataaatgtttgaggtgatagatatcccatttaccctgatttgatcattacacatgtatacacatatccaaatatcacatgtacccccaaaataagtacagctatgaaaaccccaaatattaaagtatctgattaaaacctcaaaaataaagagaactttctatactctgtaaattccctctgctagcagtcctgttcgcctgttaacccatttatgccagaggttgcaattttttaaatttttgcatgagtgaaaaatccgaccttagcaataaccttgagcaataggatataaataactcccacatgcttagcgttccaataatggaacactaggcataagtgggttaaatatattcaacttatgtatttaaaattttgtcagtcagggtacctgtacctttcatgagagttccttcacttccgtag

SEQ ID NO: 191385 - DNA, 429 bp, Homo sapiens
cgcacgtgtgtacatgttttgtagagacagggtttccctgtcttggccaggctgatttcaaactcctgacctcaagtgatctgccagcctcagcctctcaaagtgctggaattacaggcgtgagccactgcgcccagcccgtggagtgcctatttctaagtgcagctaaaggaatgttcatgaaactttatagctggacagctggaaattaacaattcctggggtcactcacccagggagaacaagatttctctagtttgctggtagagattacctacaggctacagaagaaaacagtgttatcttgtttttcctccctttcttttttcctttcattatagcttgacatgatttattgaatgcccatgatcccagttacatttactcttatcctttatcccaaactcctattcccttagtgtagatgtc

SEQ ID NO: 191386 - DNA, 406 bp, Homo sapiens
tggatatggggctcagaataggtaggcaaacaaattgccagaaggagtaggaagtagaaaatgatgctgcttgttgattaattctgtcgccttaactagggtcttatcacttactgtttttgcaggtactgttggactatcataataaagtcactctgctgagtgggagaggaagaggcagtggtcacctgggtcttttctggcagataaatttcaagctgggtgttcagattttcagcaggatgttcaattgaggacacacctctttctttattttgtcttatatactgctgtttaaaactgcataataagttctctgaatgtgttctagtatacgaatcctcctttgtttccagctctgtatgaatttaaggactgggcaagtgttaataatatgcccttatcc

SEQ ID NO: 191387 - DNA, 221 bp, Homo sapiens
tattattttcaacaaattactcaagctctcttattaccaattagcaggaagtccagtgtctccttcagggtgacttttcttgaccaagaattgtcctgtagaactccaagggttgatcttgttcaaaggggttagccctgccacgcggtgggagagctggagggccctagagctacagctctcccagtttgcactcgtgcacccagttcttactccctaag

SEQ ID NO: 191388 - DNA, 178 bp, Homo sapiens
accctaaaacaccctaccactggacctcactcctattagtatacctctcactcactctaaatgaagccataagatctccttgagttctcggagcaggccaggtgagtggtccactttgcacttgatgttactgcttccctagatatctgcaccacccaccctcgccctccatgcaaat

SEQ ID NO: 191389 - DNA, 418 bp, Homo sapiens
ttccatagtgagcagtcaatgtaagcagaaagtgtacgtaattgctgctgtggctcagtaatctagggtgttcagggaaggtgtcatctccttgatggcttaaggctgaaatgaggattccaaggggaataagaaattacagactcttgcctagccaggcctcacagtgtgttgctcaggatgcagggacactcaggaaccttgctgcccctttgcaggctggtgtgccaccattatgacagctcagcagctcttatttctacttatttggcccttcctgacactcactctgccacttgtgactttttctgcattgtgtcctctgctactgccttctcactcctgtaccctctactaacagacattctctatcttccattcaaagcctctgatgatatctgattggttaatagtcact

SEQ ID NO: 191390 - DNA, 464 bp, Homo sapiens
atgatagacttcctgtgtgactggactgaggcacccatttgatgtgagggagaacaaaaggaaaggaggaaaaatgatatggtgtgttgggcctgggtggccagtggagcattgctctcagttgtgaggggagttgaggaggaagctgtcatataaaatgatcggacgtggcacatggagagctcaagtgcacatgaacggacattccgtgaaatgtgtccagcagcagttggatgtgtgaccatcaggctgaccagagccgggagctgcagagtggattgagactgacctgcagaggccaggcgggctgccctaagcccggggaggggtgaggtcatcaggccaaaatcaccagcaaggcaaggcggggaccaggtgcagaaagccttggggtctgtgcttgtggaacagagggaccaggggatggaaagggagctttctgggtagcacagtgtcaggggagc

SEQ ID NO: 191391 - DNA, 248 bp, Homo sapiens
aaaagaagtttttatatctgcatatatggagcagaggtccctgggggtggcgggtcttgagacccatgaacagaagggacaggccagagtgaggggcacaagacccattacgccatgtgttcctgttgtattctgagcttgggtacacctccctccatgaaagcctgtccacaaaggcatagagaaatccactcatggaaagaggtgtaaccaagctcagaatacaacaggaacacatggcgtaatgg

SEQ ID NO: 191392 - DNA, 176 bp, Homo sapiens
tcctgggattaaaggcatgaaccaccgcacctggccctggatgttattttataacctcacgagcttaacttacattccctactttttttatgatctgatcaaaaaatgctccactctgctttaggcctgggccccaggcaggactttctagtcaacagcaaaaacgcagcttggta

SEQ ID NO: 191393 - DNA, 683 bp, Homo sapiens
acggtccatacctgtatcacccaggatagcgtggtggtcaagggtgtcctctcgagttaaacagatacacctggattttggtctggctctttgtcaagtacacaactggtctgagtttcaaagtagtcacttgcaaagtgtaggtacaataatagttctgtcataaagatttgttgggaaagtcatgaagatcgtgtatcataaattgctttaattaattttagatttctgctatgtcgttttgtccttcttctcattcttaatgttctttgtgctgtctcttttttctttgattagtctttcccaaggtttgtctagtgcctttttaaaatcagtatttgggcttcttcattcctctaacttatttgggttttattttaataatgcctgctttttcttttcttatttcctttaaaatattatcatatacttagtttattaatttttggcttttaagattctctttgcagtactaatttctaatgtagttgctctgtggtcagataatatggtctgtgtgatacagaccaggggtcagcaaacttctactaatgaccagatagtaagtcttttaggccttgatcagctagtcagttttggtgttgtaggacaaaaacagccataaacaatagtaattgagtgaacatggttgtttttccataaaacgttacttgtaaaaactg

SEQ ID NO: 191394 - DNA, 576 bp, Homo sapiens
ctactgacttgtgtattgctgtcagaagggatgcctttgtgattcgtggcaaggctggacactgggtgacatcccattggtcctgctggctttataatgatctgctctggaagtacagcactagaaatcactcgaaaggagaaaatgggccaatcatcaggcaatcttcagtgactcattatagtgagccctccattctatgcaaagatgagagttctaacaaatgtgttcgttaagtggcctccagatggtacctatgctattagcatctcaggttactgctctgattatagctgctctgatacggtcagaaaattaggtgtgttacttacccacatgtgctatggtgagagtctgtgactcagcctccatatcaggatttaaaaatatgcccctatgctgcagatgaaaacaatattgattaaggagcttatattaggaattgtgagccactgccatccataagggtaacttagaaggctggtggaaactaagataccatagcttattaccaagataatcctttaatgaaatgcatttgaagtagtgaactgttagtgacaaaacagggcaaga

SEQ ID NO: 191395 - DNA, 435 bp, Homo sapiens
ctggattgtgtcagtggcccgtgtgctgtaatttataatgagcccctgcaagtcctgcaaggcgcattctgattgatgacatttaaaggtactgtcaaggtggctgggtaatgaagttgaccttcctccatcgttgtctcagtttcaagtttgtatgtataaactatttcacctgccatgtttgcttggaactttttatgatatctgcaaaaggaatttggtttactagtagttcttttcttcccattagatcagggattaacaaaatttctctgtaaagagccagatagtgaatattttaggttttgtgggccatactgtctctgtggcaactacttactctgttttttgtcatgtaaaagtatccatagacaatatgtaaatgaatgagcatggctgtattccaataaaaattcatttgtggacactgaagta

SEQ ID NO: 191396 - DNA, 641 bp, Homo sapiens
ggaagttggtatgcagttgatatggtgcaatcttggctcactgcaacccaacctcccatttcaaggaattctcctgcctcagcctcctgaggagctaggattacaggcacctgctacaatgctaagctaatttttgtacctgttttgagatcttttaggcaatttatcagaaatgctccctaaacatcctggcttcccgtccccccaccccttacttcgcagggtcttagcacagaaaaccaagtccataagctgcaccactccaaattgattagcttcacagtacatttagtcgaaagcaaataagcagagtttagtaggaagaaaaaggaagaattcaggtcaggagtggtggctcgtgcctgcaattccagctcttagagaggtcgaggttggaggactgcttgagcccaggagtatgagacgagcctgggcaacatagtgagacacgatatctcaaaaaaaaaaaaaaaaaaattagcccagtgtgatggtgcatgcctgtggtaccaactacacagcaggctgaggtgagaggattgcttgagcctgggtggtcaaggctgcggtgagctacgattgtaccactgcactccagcctgggtgacagagtgaggccccgtagcaaaaaaagaaaaaaa

SEQ ID NO: 191397 - DNA, 119 bp, Homo sapiens
tcactgaaataatgagcaggaattccattaaggctccaggccaggtatgtgaaggaggtgtgattgatacgcaggacttggagattaactgtgtgggacttgctgaggccatgcctaca

SEQ ID NO: 191398 - DNA, 609 bp, Homo sapiens
gggaacactctctgaaagccctgagctgccacataagaagtctggctaccttgagactgtgatgctagagaggccatgtgtagatactccagttgaagctcccagctgagcccagccttctccatcaaagtgccagatatgtgattgactagcccagaccagcccagataccatctaaataccacaggataagctttgttactatcacgtggaaaaaatatatctattaccccaattgagccctgtttgagtttctgacctctggaattgtgagatatatttaaaaacctgttgtttaaagccattagaaagttttgaggaagtttattatgcagcagtagataacaagaaatgaatttggcacaaggaagttgagagtgcttttgcagcaaaaatatgtggcattgacattggtactgggtagtaggcagaagctgaaagagccatgaaaagaccgatggtgaaaggttggagaacaatgaggaagatgttattagagctggagaaaatatgacacattatgtggttgtaagaagttttgtgaacctgttgactttatatcaatactttggattttttctctgatattttgaggggatagatccctgg

SEQ ID NO: 191399 - DNA, 457 bp, Homo sapiens
tgatcatagaatagtaatttgttaaccgttacacatactgaggccttgatgacaccaactgaagtcagcttccaccactgcccttggccttggtaaaagaaggcctgtcattttgctaaggcaggctgtagacccacagtcctcttattgtgacgtccccctcaggcaacttcccagcatgtccagatgccgaaccacctgcgagcttccttccaagatgcctctcctaacctcaaactggccttcaccaccgaaacgaagtgtgtatttaaaaaaggaaaagaaagaaagaaaaaagaaatgcatctatttcacttcctgcagtcccctcaatctgtatagctgtaattaagacattattagaactggaatcagtcattactactcaggaggtaagatattaaaactctttatcttgggctttttgcagattaaaagcctgggcaacatagtgaga

SEQ ID NO: 191400 - DNA, 553 bp, Homo sapiens
agtaagccccaccccagctgaaccacaaaggagaccaggtagaagaagcagctgacttggtcaaggaagcaccatccagaaccttccaggagtcgctgaaccctttcctttcagagtgtgggcctctccttcatcttttcctttctttaaccctgggattttttattagaggtttataattccacagagggactttcagggagacctgtaaacctctaaaaaatacaaacaatatgcaatatatgttttggctgagtgtagaagcccatcctagaaaaatgtacttagatatgtattggattttcagcccctgcccgccttcctgtcttgctgcctcttctgtgggttgctccctctccttcctggaagcccctctctcttctgcctgccctgtcactgacctaggctcttggctggctcaggggagaagcaaataaaagaatgatagtggtcggggttggacaagtgacagtggaaaggagggatcatatttggaaactgctctccccctgtggtcgcttcaagacaggagcaggaaaaacccgggcaggag

SEQ ID NO: 191401 - DNA, 605 bp, Homo sapiens
taaaagaaaggaattctaaaatcagtatgtctcaggaacatagatgcaaaatcctcaaaaaaagaaaaacccaaaaataacaaatcaagcgcaacgatatgtaaaaagaattgtataccacaaccaagagggatttatccccagtacacaagactgttataaacatttgaaaatcaattaatgtaatcaccacatcaacaggctaaagaaaaaaatcataaattttatcagtagatacagaaaaagcatttggcagaacccaacaccattcacagtgaagagtctcagcaaactcggaatagagggtactttctcaacttgataaagaacatcagccgggcgcggtggctcacgcctgtaatcccagcactttgggaggctgaggcgggcggatcacgaagtcaggagatcgagaccatcctggctaatatggtgaaaccccatctctactaaaaatacaaaaaattagccgggcgtggtggccagtgcctgtagtcccagctactcgggaggctgaggcaggagaatggcgtgaacccgggaggctgagcttgcagtaagctgagatcgcgccactgcactccagcctgggtgacagagcgaga

SEQ ID NO: 191402 - DNA, 622 bp, Homo sapiens
cctggcgccaggcacactgagaccccacactgctgtctctggcctgcaaagatgcacaatgccacctcatgtaggcctgcttgcctgccccacccacacccccaactcaggtcataacatcactttcccatcaaagctccagtttccctactatggatgatttcctggtgatatttttaaaatcaaactaagcgactctaaaaggtgaataacaaactcattgacttcccactgtctcacacacaacacacccagcctttgcatctggtttagtgacttgttagcttacatccttggtcataacttggcagccagggagccaagtctgatttgcagttgtgttttaacctggtcagtgttttaaaaatcggcaaagtttacacaaaatcatcgctctctctctttctctctcaggagacaggtgatatggcatcctggggccacagttccacagggtagcagacgaggggctgaagagcaagttctctgtgggctctagttcacagggacacctgccactcctgactgtcatatacacacagctctcattttctttcttttgttttttcagatggagtttagctcttgtcacccaggctggagtgccacggtgcaatctcag

SEQ ID NO: 191403 - DNA, 254 bp, Homo sapiens
atctgaactccctgtggtcactctgaggcctctctgtctctctgtgtctttctctttctaccctctccatccctccttccctctgagggcttgaccttcactgacctccagggcaagaacaaccaagagttgctcccaagagggcttccctcctcctcgttctgtgtggcctcagaagtgagggaatctcagtgctctgtgcaggcatgtgcttattctgagctctgtttgaaattaaacatgaggtgtactaa

SEQ ID NO: 191404 - DNA, 621 bp, Homo sapiens
cagccacatccaagttaaaaagtcacaaatttcatagtgatatgtcaagtctatagtgcttgcactacaaggtgatgtttatcagtcccttggatatcctgggtgaagataagctccctgccttcctctagacctacacacagtaccagggctccatacacttaactattcacctcctgtgaaaccagcccttacccactgactcaactctagtcgtcagctcagctgcaagtctcagaaagcacttataccaaaggcaaacaggttaagacccaccaatctcagcattccacagaatactgtatttttagatagtgtacctatctggcattttgaatataggatataatcaatgtgggcgaaaactttaggcagtaaaggtagacctgaattggcatcattttttaaagttttatgttttttcttcaatctcctctaaaatttccagagccatgaaactggcctataagatttcaactcagtagttttgaagtgtgtacgtttccttgaaaattttagttttaaaaaaaaaaaaaaagctgtaattgtttcagaaacagggtagcatgaaggttactttggaagaacccaacacagcctcagagcctgtctacatgacat

SEQ ID NO: 191405 - DNA, 119 bp, Homo sapiens
gaccctggattctagtcttggggtacacgcccacgtgtaagagtaagcaaccacagctctctagacacactcatgccgccaatctcatgaaataagaggtaaggaccttgcaatgattc

SEQ ID NO: 191406 - DNA, 861 bp, Homo sapiens
acagcttgagctcggcagttcaagaccagcctggacaacgtggcaaaaccccatttctaccaaaaataaaaaaattagctgggcatggtggcataagcctgtggttccagctactccggaggctgaggtgggaggattgctggagcctgggaggtcgaagctgcagtgagctgtgattgcacccctgcactccaggctgggtgacagagcaagaccctgtctcaaaaacaaacaaaaaacaatttcattctctaattcatgtttagaaaagaacattggtttacaaaaaatttttaaagagttttttcagaacaaggatgccacttcctcttcacgtggcacctatctatacttctgagaaccatgaagactctctaattatcttcatattttatatcctcaccttgtttctttggtcccaaacatttatagcttccttccccattcttcttaattgctgcttcattgtgctatgcatagaagtggtgcagaattcttgggatttgttttttctacactacccccttcctttgctctccatctcagaagactagaagacaacttggtaagtgttgaatatattgtttctcagacttcttcactcaaaaaccaaaaccttcatatgacccacatctgctgaggatttacttgatggtgaccaagatgacagctgcccactgctaaacaacccaatgtcaacaactctttttcttgtctttctgctctaatgggacatcttctctgttttatttcttgaacagaaatttttcttaaaaccatcaaatgaacagtgaaattggcttggtcattaggaatatgaaacagaccaggcatggtggctcacacctgtaatcccaacac

SEQ ID NO: 191407 - DNA, 189 bp, Homo sapiens
gcggtgaattaaagaagattttttattgttgttatagtaatgataattttccagtatataattattgcctgcttaatggttcattggtaaacaaaccaggttttaaaagtcatttttaaaatgtaattttagactatataaatagaaatcttgtgtcaaaagtatgaaagacataaaaatcagactcta

SEQ ID NO: 191408 - DNA, 642 bp, Homo sapiens
gggccattgtaggccttgcagggaggcagtcatgctgggagaggctgatgcattctgatgaattctctggagtagtatttagaaaggaaaggaggacagccagcctggaaaaggatggagggaagcagggccccatccagggagtggggaatgagggatgcctgaggtattgaccttgctgttgtgggtctgaggtactctgcttcaagctcctgcccccaaggtcaaggcatttgtggtctcagaggcccaggggctgccggccacattgggtttttgagaagaccctcatcccctgcagagtccaagctccctccccatctaggactgaggcgcttctgcctgttgggctccctgcagcgggcgcaagccaggcctttccatgcccccagccagctgcccctttcacccccgcaacctctcaggattactcagccttcacagcgtctgtcactaagatgctgagtgcattcctgacggcctctcttcaggaaaagcccaggctgtgtggccttttaaaaaagactctgtgcccgggttaagcctctgattgtggttctgcatgaagaaaccataaaccaaagggaaagcgatggttcagctttggtcttggagctttgtgtcagcgtctgtcctgagtcc

SEQ ID NO: 191409 - DNA, 1164 bp, Homo sapiens
aacacacttgtcaaggccacagggttctgatgaatcttgttttcttcttctgccctgctttcttccaaaaaggattagaggcagcttacaaaaattcataaaatacaataggataaaaatagatcagagagaaaacaacactggaacacatggtacaatgaaccaagagggtaggacacagaaatgttctttggctggggctccacaatcctcaaaggtggactgcaaacaggattctgagcttcgtatcagtcaaaacaaagagggaaatctgccggttttgagactcacaaagtccacaagattaaaaccaaccctggctgggtgcagtggctcatgcctgtaatcctagcactttgggagaccaaggcgggtggatcacatgaggccaggagttcgagaccagcctggtcaacatggtgaaactccgcttaaaattagctgggcgtggtggcagacgcctgtagtcccagctgctagggagactgaggcaggggactcacctgagcctgggaggtggaggttgcagtgggccgagattgtgccactgcactccagcctgggcaacagagcaggattctgactcaattaaaaagcaaaataaacactcaacctagaagcagcgcagctatttctgacactaaagtctgagaggaattctcgtgggacctttgaagggatgaggggtagtgtcccaagcaacaccgtcaacaacagtccttttttgttttagagacagggtcactcagtcttgctccagcctgggcaacagggtgagaccctgtctcaaaaaaaaaaagtcccctgacattgccgaatgccctattaggggctgaaaaccactgctcataaaggaggagtgagccactttcttaaaaggttggtgcaaaagtaattgagggttgggtacggtggcttacgcctgtaatcccagcactttgggaggccaaggagggcggatcatttgaggtcaagagttcgagaccagcctggccaacatggcaaaaccctgtctctgctaaaaatacaaaaattagctgggcgtggtggcgcaagcctataaccacagctacttgggaggctgatgcaggagagttgcttgaacccgggaggcggaagttgcaatgagccaagatcatgccactgcactccaggatctgtctc

SEQ ID NO: 191410 - DNA, 306 bp, Homo sapiens
tccctttcccctagctgcctctggccacactgactccctgcacttgctgatcgacagtggggaacgagctgacatcacagatgtcatggatgcctatggacagaccccactgatgctggccatcatgaatggccatgtggactgtgtacatctgctgctagagaaaggatccacagctgatgctgctgacctccggggccgcactgccctccaccgcggggcagtgactggctgtgaggactgcctggctgccctgctggaccacgacgcatttgtgctgtgccgagactttaagggccgcacgcc

SEQ ID NO: 191411 - DNA, 609 bp, Homo sapiens
ccacacaaaattgaatttccacatccaatcaaagatgccattgattgtaatatgcaccattattttttgcattgctaagaaagaaaaagcagccatttgaaatatgattgatattttcttatttatctatgacttacttggacatagatttttaaaaattcatatactcatgcatatgtaaaaaggaaaatataagcaaagtatttctaaaatgttttcctttattaggttattaattacattttattcaatgttataaaggcctcacttacacaactagagttagaacattatgcccctaattagtattagttcatcaatttcatcaataaattataggaaacatggattagacaaactagttcaaccattgtggaagtcagtgtggcaattcctcagggatctagaactagaaataccacttgacccagccatcccattactgggtatatacccaaaggattataaatcatgctgctataaagacacatgcacatgtatgtttattgcggcactattcacaatagcaaagacttggaaccaacccaaatgtccaacaatagactggattaagaaaatgtggcacatatacaccacggtatactatgc

SEQ ID NO: 191412 - DNA, 118 bp, Homo sapiens
aaggaatgaagcctaataagatctagaaagataaagaaccatactgacattatttgagcatctgaatccaacaaatgcctgaagccaaatgcagccctgctctgcccagtcatgcgag

SEQ ID NO: 191413 - DNA, 466 bp, Homo sapiens
aggctggtgaagtctgtaaaggcttgttcattgactttgactttgtgtagctcagatactccattgataggctcttctaagacaagagctgtttatgcagcaagcccaccagtgccttaaaatagtagggcacgaaagagcaccgtgggtgtcctactgccggaggaaactgtgagggcctgctctgtgctcgggccctggggtgcagggtgcagtgcctgtggttccggggcctcccagactttcacataagcaactctttctttgtgtgacaagcaggtgatgtagtggaacaaacacagtctttgccgtcagatctgcgtggtcccagcagtgccactgaccaccaagtttctctacctttctgagcctcagttttctcacctgtctgaagggagtggggatccttgcttacagagaactgttgtgaggatggtgtgaataaagtgtcttgcacgttgtgtgg

SEQ ID NO: 191414 - DNA, 843 bp, Homo sapiens
catgtaatagttgttctcactgccttcccaaaactgtctcattgggaagttactcagcccaaatctgaacctaaacagccaaaataaagagatctgattctgaagcaatattttctgagtttgaattcatcgagtacctaatattaaataaatacataagctagtttgaagtacaacttatctagagcatgtctttgtagataagaaaatcttcatgtttttcaccgtatctacttgaggtagaatttattggcaaaataactcaactggatagattctcaagaggaaaatagtcaggcaatatttgtgtataagaaacagagccctgttccttagaagagagctgtctgtatctgtagctgggtgaaaaacaacatgacattggtgaactgtgtatcctaaggtgtaataatctgggggaccaggaggatgagccaagagggtgggagataaggctaaaaaaattggaaaacaccagtgacaaaggcacctggtagctgctcaagggtttagagtaggagagccgtctgaccacatttacatttggggtacatatggtggcagaaaaatggaggattgggggatcagaatggtaagactggaagcagggaaatgccttaggttactattagttgtttttatttttaagtaagaaatgttctgtagtgaacatgtattaattttgtaatagaaaatacatagctattattttgtatgaaatatacttgtggaatggtttattatatagtcccaatttaaaaaaatctacaattaaaatcccaattagagattggttattcatgacacttgatgtctttgctcaacaataggattccatcacag

SEQ ID NO: 191415 - DNA, 545 bp, Homo sapiens
cgagctcgttacccgtcctacatagtgttatcgtgtatgaagcatacataaatacccacatacttagagaaatatcagtgaaaatagatcttagtggtcctagcacagtaaagtgacaaaagactaaaaaaaaacctagagttacggctcctggaatccttctgacttttttgaccatagtacttgcgagaacgcgtcccttgtgaatctaggcaatgacggcaacaggagccatgcagcagtgacagaacgtctcatgggattacacaggggatgcagatcagtgaagaaatattggtgcttataaatagtcatgacaggaatggaaaaaaggacaggctgagtgactttaatattcaataaaacaagtaatctcatgtgaaaggcatgtgtttttgaagatgatggaatgctcttattctgacacctgactctagaggtggtttaagtcagtcctatagacaaggcagtgaacttgatggggatatgtggaactgaatggaagaatggaagtgtgaacactatgtaggacgggtaagagctga

SEQ ID NO: 191416 - DNA, 346 bp, Homo sapiens
tcaaaatttaaagccatctgtcagaatctgtttgagtgctaaaaaaaattaaattgaaaaaggacttgtactcttgaccatatgaagaattcctacaactcagtaacacaaacaatatggtgagagatttgaatgacacattatccaagatgatatacagagatggaaaacaagcacttgaaatgatgctcaacatcatttgccatttggggaaatgcaaattaaagccacaataaaatgccactacacaccttcttaaatggctaaaattaaaaactgaacatcccaagcattagcaaagatatacaggaagtagaattcttaaaaactgctagtgggaatagaa

SEQ ID NO: 191417 - DNA, 237 bp, Homo sapiens
tgatagaagcctctgtagaactctcaagatcccattctcttccctcaccagaggtaaccactctcctgaattaggtgtttatcactcccctgctcatttttattttcatactacatgtataatccgtaagcaatatatggttttgctatacttgttttaaaacttatacaaatggtatcaaacgtatcttcccccgagaaacccaaaaacatatcttctacagcttcctttttgtta

SEQ ID NO: 191418 - DNA, 237 bp, Homo sapiens
tttgtatatgcacatttgaagttcatgtgattctgctactctgaaaaatgttttgcattttttgtttaaaaaaaaaaagtagatttccttttctttacagttaaattagcatattagtttaaaaaagtgttgtattttatggttcattaacagaattttacgattttctaacttgccaaggattatggtgtttattcttgaacattgcaagccccattgaaagtttggatgtaacat

SEQ ID NO: 191419 - DNA, 788 bp, Homo sapiens
attggtatttgtcgagcatcaaataaaacaacattcctacagtgttgttttattaaggaaaaacacagaaacctacaagacattgactgtcctttgctgggtgtagaggaaacaagatcatgcttatatttggtagaagcaaaataaggcatagcctgttttgttcacagtcctgtttttttttttttcaccctttccactagctacagagcaagaaagtgaaacatcaagtttaggaaaagctatgattttcaggcaaaagagagttgagaaagggagagaaaatattttaggagatttaggttctgtaagtgttctaaggaaagaaaagaggaatgaactgatcttttgtcttctccttccagtgtccccttggagacccacatctcagctacctcgggctttaaacattttacaaacaccctccttcacagatggaagtgacctttcattctttacagccccatctacaccctgaacaaacatgtaacagtgtctgggacaacctattgcatctactcattgagtgcctggttctcctatctcttgggttctttgaggactcagtcatatgtgcatccacaagcttagcacagtgcctcacgtagacaacatggaacacaaagccgcaggcaatctgcttagcagcagcaggcaatctgaataaaagggtcagggaaggctagggaagctggattgccagaaaccatttttacttacgctttgtacttatttgggttggctgagaggagctcatagagattagggagctaattctcccaagccac

SEQ ID NO: 191420 - DNA, 277 bp, Homo sapiens
acagaggaggaaaaggatttttgtaagaaatgtttgaggtgaacctcacagacacagaaagagacggaagagggacaagccaaggatgattccaatgtttctggcttgagttatctcaagttgagttatcctggtattgctgatggtaataccattcagcaatcgaggaataagagagggcctaagacttacagagaggccaggcacagcggctcacgcctgcagtcccagctactcagaagggctgaggcaggagaatggcgtgaacctgggaggt

SEQ ID NO: 191421 - DNA, 457 bp, Homo sapiens
cagggacgctaggcaaataggttaggcccagtaagccactctcatcagttagggtggtgggagccctccccaaatccaagctcccaggtgccagccaagggtcaactttgcaagcatgactttctaaagatagcagtctccggcctgcagtgtgaagtctttctgcacagggaattatatatacctttctccatatttctaggggttattttgtttgttttgttttttcttttgttttgtttttggagacggagtctcactctgttgccaggctggagtgcagtggcgcgatctcagctcactgcaacctccgactctctggttcaagtgattctcccgcttcagcctcccaagtagctggcattataggcacccgccaccatgcccagctaatttttgtatttttagtatagacggggtttcaccacgttggccaggatggtcttgatctcctgac

SEQ ID NO: 191422 - DNA, 292 bp, Homo sapiens
cagattaaagtgtggttggttgaatccatcattaagaatttatcttaatgaaacaattttatctctaattgattcgttgactttttaatagacccttaacatttacagttacattcatgtctcaaaacacttgcaaatgtggcctgcagtttctctctgctaaagtttcacatctaatcccttatttagatgtgataacatcagacattcctgggcagttttcaggtggttctgtggttactgattacgaacaggaaaacagcatctctatgtacatatcatgacctgttca

SEQ ID NO: 191423 - DNA, 406 bp, Homo sapiens
atccaagttcatagtagcaggtctcattcatgatcatcttatactttaaaatgtctttccttcttttacactctgctgtgtatggctatgcatttttatatgtgtgttacttttgcatatattatttaaatgataaaattatgagcctgtaatcccagcactttgggaggccgaggtgggcggatcatgaggtcaggagatcgagaccatcctggctaacacagtgaaaccccatctctactaaaaatacaaaaaaattagccgggcgtggtggcgggcgcctgtagtcccagctactcgggaggctgaggcaggagaacggcgtgaacccggaggcggagcttgcagtgagccgagatgatgccgctgcactccagcctgggtgacagagcgagactctgtctca

SEQ ID NO: 191424 - DNA, 315 bp, Homo sapiens
gtccgttcccacactgctataaacaactacttgagactcagtaatttatagagcaaaaagttttaattggctcacagttctgcaggctgtacaggcttctactttgtaagtttttcgggaaacttacaaccatgatggaaggcaaagtggaagtaggcacatttttccatatccagcaggagagagagagcaaagggagaagtgctgcacactttcaaacaaccagatctcaagaaaactctatcacaaggacagcaaggggaagtccacccccacgattccatcacctgccaccaggcccctcctccaaaactg

SEQ ID NO: 191425 - DNA, 431 bp, Homo sapiens
gactgggaaggcagtcatgaacaagttaacaaataatgagtaaactaattatagatctggaagagtgctttcaaacaaataaataggttgatatgacagttagagacagggttcagaagtctagtttctgatagtcattaggaaagcctaaaacttgtaagggagtcagagacagctattcagaggtgggaaacagcatcccagggaacaacaaaggcaaagatcctgacatgggaaagaattttgaaggatggtatacacttagcagatcttcaatatagtaagcacatgatgaataataggtaatatgtttatagacaaggaggcatctatttgattatatgccatggaaaactaacctaataaaattagtcttccattttttacatacagcacatagaataatattttaagtggcccatcttacaaac

SEQ ID NO: 191426 - DNA, 364 bp, Homo sapiens
aagtgaatagaatgtgagtgttgggaggagaacagagcaggactggatattatgtggaaaaagaattgaaaaatgcctgaattgagacctaagagacctacgctccagtcttgatttcaacactagttgtgtgaacttggagaatttacttcatcttcctaaatcttgatttcctttgctttattctgaaaaataaaacccaaacattgagatgacacattggactagatagtatctaaacttcagctctaaaattttgagatttgtaggataattattgctaaagattctgggggagagaggaagggacgacatgttcatgcccattcagattgcactccaaggaccatcacactaataaagt

SEQ ID NO: 191427 - DNA, 334 bp, Homo sapiens
ttctatcttcacccgttctgtggcctttcagttttagtcatgtcttgctttagccagtgtggctagatgtgatgctgggtcaattctgagcctaggacttcagaggctttgcatatttctgtcaagaggtgagctgtttttgaaaaagctgagctgccaggtagttaattaagacaataagacaaaatgaaagtgacagtcaagcacttaatcacttattgtgatagtataagcaagaaactaaacaagagtaagtgctggttcctgcaatgttccatttttgcctgtgaaacagcaccaggtgagggtcaggtgtatcagtgcagatagtagg

SEQ ID NO: 191428 - DNA, 163 bp, Homo sapiens
ctctgtttgagatggtatggtgcaacctgggttttggactcatcctaataggactgcttagagttgggaattccccaaaggaagcagaagaaaagagaaaggaagacctgctgggcagaaagaaaccatagttattcactggccactaggatctagggactag

SEQ ID NO: 191429 - DNA, 613 bp, Homo sapiens
aaggtatcctcaaagattatcagcaaagcctaaagctcaatgatatgtcatattaaagagatggttgttgacatcatgaaaaaattttgaagttagggaatgatccatcaaatcgcaaaactattaccttttaactcgacaagtttaagagaaaaaatctatttcccaaaaaattgaaagttaagtataacttctcaaagcaattaaagaatgaatggattgtaaaacaagcttcatcttagttcttaaggtggtctatgacatgttctagagatagagtctaaaaatctatacccatatataatttaattagaaaaaatgtttctctttatactcatatagtcccttcctctttaggacttgaaaagccaaatgtattccacatcaatttgttactttataatgcttgaatgcagacaccaaaaattacgaataatctcattcgtcaaaaagagttttttgtttgttttttttgtttgttttgttttgtttttgagatgggagtgtcactcttgttgcccaggctggagtacaatgacgtgatctcggctcactgcaacctccacctcccgggttcagacaattctcctgcctcagcctcccgagtagctgg

SEQ ID NO: 191430 - DNA, 446 bp, Homo sapiens
tcaaaggttgagagctggtcccgagtatattagttccccagcattttgaaacttcccatagaccaagcatactcctttggccagaagaatctctcaggtagagagagatgtgcagaaactgggagcgggggttgatttgtatacaggaactgtccaccaaagcttcaggtggtatctcatgtgttctgagggaacagggcactgacagcagctgctacaccccctcggccagaaaactcactccatcccaccccaaggaaaccatcagatccaggtctaccccatccattcagttaagtccaattccacatactttccttgaactcaggtgacattccaggcagagtgatggagttgggggtgagagatacaaacttggatcagacccaggctcagcctgcaaggaacttccagtccaacaaagaggaacatgataaatacacaaa

SEQ ID NO: 191431 - DNA, 160 bp, Homo sapiens
caaagtaatcataaattactaaacagcctaccagaacaaaacccaatagtcatgaaagacacataacatgcacaaaaaaattcagatactaaacaatgtaacattcacaatattcagcaggcaatcaacaactatcagacatgccaagaagcaagacgat

SEQ ID NO: 191432 - DNA, 462 bp, Homo sapiens
tttctgtgctatttgctcaatttttatggaaatctaaaactgttatataaaatctattttttaaaaaaggccattctatggcttctagaaaaaatgaagtagacatacttttccctattccctccactaagtacagctaagaattctgcaccgtatatacaaaacatgaaaagactctgaaaagtggaaagaaaacagaagaaccaggaaccttgggatctgaggaatgatatgacagtgagtttcacagattttctgttttgcctcatttatcctaaacttggcactatagaagcaggtttcaaatttccagatactagacacagcaacaggcccacattttttagaaagttccaaaacagcctgctctttctagccataggatcaggaaagtggcagaactgctcaactcgagtcaaacagcatagagaaaaaacagctctatccccattcccatcacat

SEQ ID NO: 191433 - DNA, 416 bp, Homo sapiens
tgtgggatctggtcttgaaaaagtaactccagagctccttgccattgcagctggtgtgactgcacttgtaatgtgccctatagagaagggcaactgtgaggtagctgggctgatcatggtttccaaagtgagttcctggggagttgtggccccctgaggagctgaggtagtggctgtggctgatgacagagatctcccagtgtcccagtcaagagtggacagagaatcaaacagaaaagtggacaggggcgtatttgggtcagtctttgtactagcatgatctgtagaaaccattgaaacaggcacatcttctgcttctgtactactgggagtccaacttgtacttaaaatgtcaggaactgagatgctcatcctctggacacgagaaaaagttgagatgggagtagatgcagttg

SEQ ID NO: 191434 - DNA, 102 bp, Homo sapiens
ttaggattatgtctttggactaattttgagtaattttgctacttttcactttattattattctcttaatgtagttagtccaattctaaggtttcagttataa

SEQ ID NO: 191435 - DNA, 297 bp, Homo sapiens
acatgttagaactgaattcagatatttttataattaccaaaccagcaatgtatatcaatattgacacccatagtcatgagtctgatcattgctaaccatagtgggctgttgccatcttttttgactacacataatattagcccatctgaaaagggagggagaccagacgagaaacaaatactttaccatgttttattcaatttatttgccaatatgaaatttctgaataatctgggaccagacttacatacactacatatgtaatagggttcttcttcttctcttttgctgttttat

SEQ ID NO: 191436 - DNA, 276 bp, Homo sapiens
tgactgagactgagcatattaagtttatggtcagaagttatgtaggaaactcccattaccattcccaagatacttttgcccaggagggcactccatcccagcttgtaaaattgctgggacaaaaatgattatcgtagaggaagttttgctgctggctttaaaatttttattatgaagtgactaagggtctgtggtttttagcctttacttcctataaggtgtaatccacctggagaagatatttctggtcacatttcttttgctattcttaggaga

SEQ ID NO: 191437 - DNA, 341 bp, Homo sapiens
atgtcactgtctcccatcacccccagataggaccatctagttgcaagaaaacaagctcaggactcccactgattgtacattatgatgagatgtataattatttcattatatgttacattgtaataataatagaaatagagtgcacaataaatgtaatgcacttgaatcatccccagaacatttcctcttcctccctcctggtctgtggaaaaattgtcttccaagaaaccagtccctggtgccaaaaaggttggggactgctgctatatgtgtttcctgaacatcaattgtaatagcaaaaatttgggaacaatatgtcaatcatcaggcaggtgaatgaa

SEQ ID NO: 191438 - DNA, 258 bp, Homo sapiens
gccattacaagggcctttactgcggggctgtgagcacagatgttcagctacaactaaagagcagacccccagggaggggctgttttcagtcatgcatttggtcagggagccatgaaggcttctcaggtgatacactaagcttgactaaaaaagaaaaactgagatttgctagtttcagaggaccttctatttatttgttatttgggaactgaagctgaccctacccttttcaaaagatcatcttttcattgcgtatgg

SEQ ID NO: 191439 - DNA, 235 bp, Homo sapiens
tctgtactgtgttagtttgctgagaatgatggctcagcttcatctatgtcccgcaaggacatgaactcattctcccagcctctctttctatatccaaaatttttgaagttctctctacttatcaccacagtgttcaaggcatagatgattttcccccagatcttgaaaaaaatttttattgatttgcctgttcattaacttaacaattggtgagcatatgtctcaggcaggatgc

SEQ ID NO: 191440 - DNA, 386 bp, Homo sapiens
ctgggtcaggaagtggaattgatgtttgtatgtacataggtatattttaccagaatggatgctctattcagagtttcgggtgatggacagaacttgataggaattgctagcaagcaatataaccttctgcctttgcaagccaacttaataaaaaccaattactagtctatatttcgttgattacaaaatatttttcacactgcataataatatgatagtcattagcatttctttagtatttaccataaatgaggcacagtgctgtgacagttaatcacagtgctttagttaatggatgtcatgagcacccccgaaatgcttgtcctgtttttcttcttttctgcattgcccctctccactgcaccccaccaccccactccactctc

SEQ ID NO: 191441 - DNA, 902 bp, Homo sapiens
ggcgacgcaacgccgccggcagcttttcagtttcatagaggttcccagtgccaccttctgtgatgtcattcccaagaggaagtcagacccagaaaataaagcaccccattggtacacgaaagggaccattggaggtgccacccccaacagagaaggactggcctaaagacgatgaacaggatcatgtcctcgtggatccagatgaggagctggattccttgcctcagccttatcgaatgatcaacaagctggtgaaccttctgtttgaccagtcttgggaaattattgaagagagaaacgcactgagggaagctgagagcagccagatccagcccaccgtctaccctccacttggagaaatccagctcaacaaaatgccaaattgtatggctgtttcccaagactatgtgtttattggaggagccaaaggattctcaatttataatctgtacagtgctaaacaaatatatgcgtgggagaagcttaaggttgatgtcacttccatctgggccacagatttagggaatgaaatactcattgctcctgtggatgaaatgggtatcattagactcttttatttttataaggaaggactttacctagtcaaagccatcaatgaagtggatgataccagcaagcaaactacctgtataaagatggagatctctcaaggaggggactttgcagccttcctcctacaaggagccggagatatttggctggatgtgtataaattgcccaaggagacttggctcaagaaactagagcacccccaactctttgcctcaagcagtcctcttgcctcagccttccaaagtgctggtattatagttgtgagccactgtgccctgccaagtctcttttaatattgaggttctgatcctgtgtgtgtagcaggatga

SEQ ID NO: 191442 - DNA, 758 bp, Homo sapiens
ggcgacgcaacgccgccggcagcttttcagtttcatagaggttcccagtgccaccttctgtgatgtcattcccaagaggaagtcagacccagaaaataaagcaccccattggtacacgaaagggaccattggaggtgccacccccaacagagaaggactggcctaaagacgatgaacaggatcatgtcctcgtggatccagatgaggagctggattccttgcctcagccttatcgaatgatcaacaagctggtgaaccttctgtttgaccagtcttgggaaattattgaagagagaaacgcactgagggaagctgagagcagccagatccagcccaccgtctaccctccacttggagaaatccagctcaacaaaatgccaaattgtatggctgtttcccaagactatgtgtttattggaggagccaaaggattctcaatttataatctgtacagtgctaaacaaatatatgcgtgggagaagcttaaggttgatgtcacttccatctgggccacagatttagggaatgaaatactcattgctcctgtggatgaaatgggtattgttcttcatcttcctttttagcctcatttacaggtacctgtagactgttgtcaatttaatctccttttgaggtattggtggggccaggcatggagacttctccctggtcatgtaatagtaactatatgtacagaacaggtatggtgggtcagatactgttctaccatttcacatgtgctagcccatttaatcctc

SEQ ID NO: 191443 - DNA, 480 bp, Homo sapiens
gcaagtggcctccacttagatacatctaagaagacaagtcagaatagggaacatttgtttgaaaagaaggggggaaaaggaggtgagaagccagaagacccattcattcaacagtgtatctctgtctaacaacagtgtatctctgtccaagaataaaataaaacctaagaacccacataagcccttgggttctatctccatcttttaaaaagaacatcctcttgtctttccctacaaaaatcacagtgcatgccaaatatagatgagttaaataaatctgagtccattttcttttgttttgttttgtttttgagacagagtctcactctgtcgcccaggcaggagtgcaatggcacaatcttggctcactgcaacctccacctcctgggttcaagcaattctcctacctcagcctcccacgtcgctgggattacacacgcatgctgccacgcccggctactttttttgtgttttagtaga

SEQ ID NO: 191444 - DNA, 267 bp, Homo sapiens
ccattttattgtgtactttccttcaacattactatttgttacacaatcaatagaaattcaggaagatacagatttcaaaaccaatcctaaggtgctttacaagctttatacaacatcctcaatagggaaaacttttcagggaggaacaaaatgttaactataagaagggtctccataggaaacatttcattatggcattaattaaaagttgctagtttctatcttataggactgaggaattttcagacagataaccttactatttct

SEQ ID NO: 191445 - DNA, 624 bp, Homo sapiens
ttactgttgagggatagagagataagtaatcacagtaagtcccaggacactatatgtggaagggaaagaaagaatgcaggtgacacaactaactctgtcaggagagtctcccccacagcaaggtacgaataaggaccatttgttctagtctccgtagcatcctagcctatttccacttcctcttgtcatcatctgtcctcttcaaagttcaaatggctcaagaggcagagattgcgtctctcttgtccattcctcagcattcagcaagtgttcaataaacatttgtggaatgaatatatcaggttagggacacaaaaacacattacaattccataatagaaatagaaagtgatgatatgcttacacataggaagaagtggctaactctgccagggggaaaaaaaaacaggaaaaatatcttacatacatttatacactcacacacatgcagctattacaatgataacaacaccattaagcaagacttatttgtggaaccctaactattcaacaggcataatcccaagagttaatgctcacaacagacttataaggaaactagtattattatccccatgttacagaggagatggaaacagaggcacagggaagggggggtggcct

SEQ ID NO: 191446 - DNA, 521 bp, Homo sapiens
ccaagcactcctgctactatttgtaggactggctttcctcagccttctgatttctgcttaaatgtcactcttcagtgaggtcttccccgagtgtcttctctaaagtaacccctcaaacactgactctccatcactctatttccttcagagcatttttcacaaaactagttaatattttcatttatttgtttacaagtttattttctgtctgtccaactagaatagtaaactccacgaaggcagagacctgatatctttctcactgtggtaaccccagttcttagcacagagattatgcacaacaagtatctgtgggaggaataaatgacacagtgctaacaagtccacaaacatcaggtgagggagtgaaaggatcatatggagttttagaaagatgactgtaacctctggtcaatatgctggatggaagttaacaagggaagtgcctcatacaacagcaaacacataaatgttcaataaaatagaacaagaagaatttagtacacagcagagctcgaaag

SEQ ID NO: 191447 - DNA, 143 bp, Homo sapiens
taatccaaaaactattattttccctgaaacatatttttaatagttggatttgaataaatgcatctgctgttataataactcatctgaaaccgaatgatgttcaaccatgaagacatgattctggaagtcttcctatttcccat

SEQ ID NO: 191448 - DNA, 241 bp, Homo sapiens
  misc_feature (28)..(28): n is a, c, g, or t
  misc_feature (31)..(31): n is a, c, g, or t
ccccgcagatggaatccaattaaactanagngcttctgcacagctaaagaaaaagaaaactgtattggttggagtaagaaccctgttatttatcaaccttgttggcttcacaaaaaccctccccacactatcaggctgatgctggtcacttgagctgcctccagcatgtgcccagtgaggaataatagccgatgatgagtacgagtacttcccaaggacagttttcagtgacagaaaagag

SEQ ID NO: 191449 - DNA, 627 bp, Homo sapiens
aaagaaaaagagggaaaggagggagagtagggggatgaggggtacctttccctttgtttctctggtgggggagagagagagagagagatacagcaagccagaacactcattgatggatgaagggtcaccttaccatgacaacttcaatatcagatatcttggacccaagaccttgggactgtcccagggacccacaatcctagagagacatgaaccagtagaagtataataaaagaagactgaaaaggcagaaagggaaaggaagctaggaaaaacaggctcccgtagcagcaaatgtgaattggggaagagaggggttgttgttcagggcgtgtccttggagtccctgagacagtggagaactcacccatcagtggagacaccaaaaaaagtgttcaggcggctgcttttctgccattgcagggagtcgtcattaggtcaggggttcagggcctccagaaaaatgggcttgaacaaggcagctcatttgggaccctcattttgagcagaaagaaagacaggaagagacctgttgcagaaaagaaaatttatgattttaggagggactagaagaagttgctgaagtggatggaatgacagagtaaggaaaaaaatgaaacggcacca

SEQ ID NO: 191450 - DNA, 202 bp, Homo sapiens
tgaggacataagagagcaaaggaaggtcacttattccgaagcaagaaaagggatgaactgatgagaaagactaagaagaaactaaacagcaaaaatgatctgaaactgaactacaacactcaggattccacacaagaatcttggtagctcccttaatgtaagcacagacccgtaagtaactattactaattctctctgtgaa

SEQ ID NO: 191451 - DNA, 207 bp, Homo sapiens
ggccaattaaatataagtaacagtcattcttcacttcaggacagaaatactaagaaccaggatatggttctcccaatctactattccctgccaggcaaatctgaaggcatgttgaaaggatgcttctgtcagcctgagtccctaaatgactatgataagcaaagcttccttgccaacttgtgatggacatgtattatgagcaagaaa

SEQ ID NO: 191452 - DNA, 537 bp, Homo sapiens
gcaccatatggccaacaggggatgccagcgacatccctaatttctctggcttcctgataggtcctggtagggtcggggttccaccgggatttgcctagtatggtctacctctgactgaaattaaactctaagtaggtaactggggaacgcctttctccagagagaaggttttgatgtgatctcatcatcggggactggattggacctggagaaatcagtttttctatagtcttgtttctagagtggcaccctggtcttgggcaggtcagaaggacagatagttggtcaccatcttcaacacaaatcatggctggaaaagggccccagtagggagtgcctttctcactcaccaatcaccaaggctagaagatagtctgcagattctttcagatgccacaaagctgtgattacagctgcccattggcaaatcaggtactagtttttgttaatcacattgcagtcttccttcactgtttcttcccctggtcccggaattaaggctgggctccatttgacaagttatcttctgtgcaggta

SEQ ID NO: 191453 - DNA, 656 bp, Homo sapiens
gcaggctgggctcagccctggtacgggagtggggaggtgggagtagtagggaccagaaaaagtggcagctgttgacaactctgccatctctttctgaatgtaatgggaggtcctgtcttttcagcttgcaaggaaggagggtccgaggcaactccgctgttgcacatttagggacccctgaacttaaatgacagaatgccctgaccactctggaaggcactgtgttcatgtttgtgtgcttgactcttgatccgtaaaagggctgtttgtgcaggtcattaactgtgagattcagagagtaggtgcacacgtccctgcagagattccagcaggactgaaaaccagtagaaatatatcagcacctggatcttgcctcctgagtcagtaaggatatgccacagtcacgaaggcagtgggatttcgagggagggaagggaaggcggcaggcggggcatgccctccggggtgcccgaacacacctgctgcatccacatgtcttcagagccctctccctgtgggaggcctttttcaggacagccttggtgaactggaaacggaatcccagcccttggtggccctgcagtgacttggacctttccgaggtcaccctgccactgcgtgcccttcagtccctcctggcagtgggggcacatccc

SEQ ID NO: 191454 - DNA, 115 bp, Homo sapiens
ttttctttctgatttggatttttaaaatttctttttattgcctaattgctctggctaggacttttagtatgccattaaatggaagtgagagtgagcatccttttcttttttccga

SEQ ID NO: 191455 - DNA, 170 bp, Homo sapiens
aggtgcattgactagtgaaatcttaacccaggaccctgcctagagatggcttcattttctagggaaaaggaaacaacctgtaaatcaaagggcagcctttcctccagaaaactgcatagtggaggtctctgaccaatgtggtggaactaaagtccagccttgattgcttc

SEQ ID NO: 191456 - DNA, 542 bp, Homo sapiens
ccgctctagagtatcccctcgtcttttgataggcacttgatgaacttaggagggagttatagtcttcattttagagatgagaaaagcaaggcttgaagagatcaagtgacttgcccaaggtcactcagcttataaacgaagtggtcagaatttgaatacaggtcttctggatctatgtgaaattctgtatttaggcagtataacatagcggttaagagcatggactatggagttaaactggggtcaaaagccagttttgacatttactagctgtgtggctgactttgggaaagttacttaacctctctaagcctcagttcccttgtctttgaaatttatttaataatactgacttcagaaagtgattgtgaggattcagtgagatcaggcatataaaataattagcattgagcccagcacctctagaaacacctcagtaaatgttgttatgattaatattaatacctttgcgtcactacctattagatacagatttcatgttttaatttgtaatcccagctctttcactattctatacctat

SEQ ID NO: 191457 - DNA, 189 bp, Homo sapiens
actgtagtgatacatatatatatatatataatatttaaaatatatttatatatatttcatatcacagtgaaatatatatataccattatatatatatatcacaatgaatagtatatataccattatatccatatattcatatatctttatatatcattatatagtgatatatattctttaaattatata

SEQ ID NO: 191458 - DNA, 405 bp, Homo sapiens
cagggacacagtggatgaagatggatgctgacatggcaaacaggcaggtaacgtgatggggaggacaaagccaagcagacacaggtgcctttctctctgcgggcagtgcattagataagcttctgattgcttctcttttattttgttttttttgttttgttttggtttggtttggtatttttggaatggagtctcactctgtcgtccagggtggagtgcagtggcaagatgtcaactcacctcagcctcccgggttcaagtgattctcatgcctcagcctcctgagtagctggaattacagacatgtgccaccacacccgtctaatttttgtatttttagtagagatggggttttgccatgttggccaagctggtgttgaactcctggcctcaagtgatccgcct

SEQ ID NO: 191459 - DNA, 423 bp, Homo sapiens
gaagttgaaggttgagttgatcaccagtggttagtgttttaatcaagtatgcccacataatgaaaccagcgtaaaaactcaaaaggactggtgaacttctggggaacttacagattcttgagcatgtggaggtgcctgagggtggtgaactgagtctctaataagcttccgtggagggcatggaagtcccacgccccttgctacaaaccttgctctgtgctatcccttccatctgcctcttcatctgtatccttcgtaatatcctttattccttttcccatttgccctgagaatactcacctttggtgcttgcagctggagcatttaccccgagataactttgccatgaacgatctcacttttattattttcacatcgctctagtaggtcgccttgggaaacaaaagacatcattctacttat

SEQ ID NO: 191460 - DNA, 364 bp, Homo sapiens
tgagttgggggtgatcctcatggcttcatggaaatgctccatagcggcctggagacagacttcccctcccaactgcagctctctgaacagagaattatagctgagacccaggcactaggggtatggatgacacagctgtatatacgggctacctaagaggcaggaaattagtcacacaacaggtgtcaataaatattccttggtaatttgcacccaaggcactagtgggggctcggggggtggttataatatagcttaacaataacccaggattcactcctccaatccccaagttctttacctttatatggatagcaggttgactgcgatagtggggtgaatggtgaccccctaaaagttatga

SEQ ID NO: 191461 - DNA, 229 bp, Homo sapiens
cctggagcatgatgaagcttggacttcttccacttcttaggacttttcaatttcatccatgtcaacagccaagccaacacgctgttgctccaatatgtaaaaggcacttctgtagggctggcatgagtcagtcagttcaaggcaacctgaaggagttgaataacatctatccagtgagtcctgcaagacttcaggccctttctcatccagcagctccctgctgagcctg

SEQ ID NO: 191462 - DNA, 432 bp, Homo sapiens
cagaagggtgaaattttgctcagaaatctctgattttagatgcttcagttttccatttaaagttcataatgaatatttactagaattacttttatcatataagagctctttaaaaatgtagagtcagtacaggtaaatgttattagtgatggagcttgtactgctcaaatagccacttcctccataactttgtctaccttggccaggaactgggtgcatgttttcagtgtatctgggtctatatttgagtctggaacaaatggccctaaggtcataaaaggaatcaggacatgtaccattgtgcaacataaggttacagaaaaacctatttatttttccacattattgctgactgtatgaggaaaaaattaaaatgggcattagattacatatagcttttttggttagtcatatgtaaaggtgagtgtatgt

SEQ ID NO: 191463 - DNA, 245 bp, Homo sapiens
attccaagtggacatacgttgggggagggcttggcctcagggtttgtgcttatataatgtctgggtttcaaaagtcttatctcctctgtgatttgaacttgctgaagtactgctagtgctaaattgaatggaaaaaagtttataatggtagtttaacaagatagtggtctagtcttgcctctccgcaagaagagaggctccatttattttcctgaaaactgtttcctacttggccgggagactta

SEQ ID NO: 191464 - DNA, 340 bp, Homo sapiens
aaaatagagtaaagagggaaacgaaaggaaagagagaaatgaattaggcagtctccaaagcacactggctcaactgggaaactgcgaccaaagcaagctccataatagtataatgacctttaatgagtgtcttgggaaacaatacagccctagcataaaagacaaagggcaaaactcatcatggctctgctgacactaattcaaaatgattttcagaacaactaaagaatgtaagagaagtaatctgatccgcccatctgacctcactttgattcaagggcccttctcctgccatttctaattgtcaaaccctctacatttcacatctgttcatatttaa

SEQ ID NO: 191465 - DNA, 92 bp, Homo sapiens
ctccttctcaacttgtgctggctgccaagggaggcttcattagagtcccacttaagaagatgctaattgtgacatttttacatgattaacga

SEQ ID NO: 191466 - DNA, 646 bp, Homo sapiens
  misc_feature (148)..(148): n is a, c, g, or t
  misc_feature (225)..(225): n is a, c, g, or t
  misc_feature (240)..(240): n is a, c, g, or t
  misc_feature (303)..(303): n is a, c, g, or t
gaatgtaaatataaccaggtgacatggacataccgtgtataactgacggtatttggacaatgtgtcccacactttggatgattctgtgacttcgttattgatgccagtggagtaagatgtatattcgtggggcgacctagaggctctnttcttccatacaatcacccgtggaagggggtaatcctggaacaagaaatgaggtgactttttggctggggtaggaanggaacttcctccccnattcgtggggttcgagaaacctcgtgctcctgaggtttggacaagggctacgggctgctcccnatgagaggatgaagtgtatgacatgaacgaggcaggccagcgttgctggcagctaatattttatgggcagcaacaccaacagcgcagagaagtggccagtgtccccacagcggggttgctgtctctgtggtctctctggatgacagcgatgccccttcccccagctccttggcccacctgcattcatctgcagctacagacagctcctagcacactgatggccatctctggccccaaggctctctcctctgtcaccacaggagcacagcctggaagtttttatttcctgcacaggtcaccctcaaccacagggggaaaggagccataggataaatgcccttgc

SEQ ID NO: 191467 - DNA, 325 bp, Homo sapiens
atttaccatgatgttagctccaacaagagtaaatgaccatattttggtcagtgctttactctcagtgaataaactagtgcctagcatggtgtagtgcttaatggagatttttttgagtattaagacctttgttcatgatatgcccattttttaatggatatatttttatagctatgttgaaaatgtgttttctttgaattgttaaattttatgttaggcttttaatgtttatgaagagtgtgtgatactcttcataaaaataaaaaccaagaataattaaactaagattatgctaaatttagtgataggcttttggtgggaaaga

SEQ ID NO: 191468 - DNA, 739 bp, Homo sapiens
ggccccaagtgtgaaaggccagctccaatccccctgcaaaggaacagccagagccttggatgttggaaagtgaatgtccaaagtcatttaagccagaaatcaaattttgtcctcaccttttgagttaaatcctgaaagcactgaagtcagcccatctctctgacgcctcagcctcctctgtgttagacagaaggttcccagcgcccggccgcagcggcttcttggagtagctgcaggctggctgactccccggcatgggggtggccccttccaggcctgagatcttgcaaggcagcctctagtgggccttactttttcttgtaagtcccacaggaaaaacaggccagtctccaacctgtagaacccatgtgtgctggccaagccccttgagtccctgcggcatcagagcaagggggtggctgagccttgctgaggcagcgtgctgcttgcctggactctgacccggtgtgaccgagactcagcaggccgggggcatgtcctctcctgtggacgctgggcccaggcagggctcccaaagttgtgttggggacctggctggtgaggcctgtcaccatagttttgaggccattcttttctcttgtttgaaacttctgattctccaccgtgcggggggccagactcgtgtctgtgaagagtctctcaggaataggcagggatgctgtgtggacctccgtgtcagggacacagccagcagatctctgtccagcactgcctgaga

SEQ ID NO: 191469 - DNA, 566 bp, Homo sapiens
agattcctgtgggggctgcttttgtgtgtttttgtgttgatattctgtaggatttgtcctcagaaacagcaaacatttattgaaccttatgctgaagataatgggaagccattaaagcaagggtttttaatcagggttccaaagattgatatcaaggaatctgtgaactacctgaaattacattcagacttcaaaacttaatatgttaagtgctttacatgatgctaagtgctttacacacattatctgtttggacccacgttgccatcctatgaagtagattcttctgttgacccccaacttaaagctcaggagactcaggattagagaagatgagaaacttgcccaagattgtagttggtaagtgttggagtaaggatttaagtgtaggcagtctgactccagagcttgtacttcaaactgtaatgccactttgccttagcaatgcatgtcccaagacctcttttttatttcagagcctcaaaaactactaaatacctatcttcagctcggatttctatcccatcaactaaatagcttaggtgcctgtaggcccctccagttca

SEQ ID NO: 191470 - DNA, 457 bp, Homo sapiens
gaattcactagtagataataccccggttcctgaggtagtaaagggagagtaaagaactaccccctgagtctgctaagtggtccacgtggtccacagctgggagagtgttctgagacatcgacctgacagacgctgtatattagagaaggaagggacttagagattgtttagaaacatttcacagatgaagaaacagtggtcttaagatatggaatgtacctaaggttgtacaacagagcctaagaggaccatatcccataaataagacccatgggctctctccactacatcacactgctttcttaaaagtaacccaaatatccctggatgccattcataacttacaggaacccagtttttcatcaggcacacaagcaagaaatgaccaccagcacatcactatcaccacccaaaactctgtctctcatcaagtagaggcttcaggatcaggctctcc

SEQ ID NO: 191471 - DNA, 558 bp, Homo sapiens
aatctcatattttcctactcctgtctccctgcttcttttcccttgaaagaatcttttatagctgctactttggttacgttcttttcaaaccaacttcgattcattttctgggatcaccacactttttctgagttttgtaatcagcagtgactcttgctgccaaattttatggttatttctttgatcttatgctgctagacatcttagtggtgtttttcacaggtcagtactatatccttcttaaaacactttcttcttttggatttcttaataccacgttattttttctatccaacttatagcttattcttgggcttctttgatgagtcttataaatattgtgatttacagagttctgtgctagatacctttctcttttctgtgtatgccttccctctgaggcaatatgtagcccctggctttcactgtcatcattatgctaaaaaccatcaaaactgtttggtcaaaactcaaaggagtatctgttccctagatttatatgctgtttctactgatacgtgtaatagtcatgaacaacttagaattatcctgttggat

SEQ ID NO: 191472 - DNA, 322 bp, Homo sapiens
gtagaaggatgagacgaagatgagtgatgaaaaattacttaatggatacaatgtacattattcaggcgatggatacattaaaagcccagacttgaccactatgcaaatatatccatataacaaaactgcacttgactccttaaatttatgcaaacaaacaaacaaaaaaaacccgagaccgacctactcaatctgatcctcagaccattctctggcccagtccaagccctccatccgtctggtatcgccaacccaatccccttcctcagactccacacctttatgtccacctgtctgtgtgacatatccatcttgagacatt

SEQ ID NO: 191473 - DNA, 176 bp, Homo sapiens
ataccaggctatctttcttgtttcttccccacggcccagcaagagtgccccccctttcctgatcaggtaatgcctccatctctggagacccccgtctacagcctcagtgaggctgtgtcaccattggattgcttcaaagcaaacacggctgtgctggctgctccctctggtgccct

SEQ ID NO: 191474 - DNA, 726 bp, Homo sapiens
aaaataaatgtatttgtcttgtgactataaagaatgatttcttgtagatttagctttggacttctacatacaaaagagggatgtgtgatgtggcacagtaagactaaatcctaatgtgtacaagtcacctggatattgtgttgaaatgcagatgcagacttaggagatctgagggagggccttagatctgcatttccggtaagatccccattgatgctaatgcatttgggcctactggccacactttaagaagcaagagtatagaagaaagaactaaggtatatagtattcaagaagtctggctttagttccagtttcatcactaattagccatgagacctcaccaatatcacttaaatatattcctcatgtataagatgatggggctggacttagtcatctcaaaattcctgacacaagaactgggagtgatgacgtgtgcctgtaattccatctactcaggaggctgaggcaggaggattactttctttctttctttttgagactgagtctcactctttcgcccaggctgaagtgcagtggtgtgatctcggctcactgcaaactccacctccccagttcaaacaattctcctgccccagcatcctgaatagctgggactacaggtgcccaccaccacacctggctaatttttgtgtttttagtagagacagggtttcactatgttgggcaggctggtctcaaactcctggcctcacgtgatcc

SEQ ID NO: 191475 - DNA, 409 bp, Homo sapiens
ttgagcgcacacattggctcgacatctactacctgaactccctcaacatactaagtgctaagtaccatcgttggggagaggggtgattttaacgaaatatgagatgtgttcctgttgccttctttgtacagtcaaacttgctataagagaagtttgtttattttttgcattactttgctaaacactggctcctcaactccaactctgcctcaatagtatttatgttcttcaggagctgccctgttgttttcaggatctactcatttttgtgtattctgtacaaatcttcaacaaatcactagaagtaaatttgaagaaaattgcatttggagtcagaagacctggactctggccgggtgcggtggttcatgcctgtaattccagcactttgggaggtcgaggcaggtgg

SEQ ID NO: 191476 - DNA, 679 bp, Homo sapiens
ggtttctttccttggcttgcagatggcgtccctcttgctgcttcttcacaaggtagtccctctgtgcatatgtaccccaggtgtctctctctatgtcctaatctcttcttataaggacccagtgatgttggattagggcccacactaatggcctcattttaagctcattacctctttaaaggacttacctccaaatacagctacatgctaagacactgggtattggagcttcgaacacatacactttagcatggtggggagaatgttattcagcccaggaaaacagttatataaaatcactggttccctgagcttgtgatttaatagacaaacacagtttgccaaaagcagacccctctcacacacaaataaaaatatgaaggtcacttaatgttgctaacattcttttaaacataatttctgatgaacaaatcatctaataatgccatcattttataacctgcattacagcatcataattatcatggaaagcatgaaataaattgaactttatgaaaacctaactacattgttcttatttttgtcattctgctatagaccagtgagaactttatcataaaccagctctagtcactggttatcatctgggaagcaccaatgcataatagtcatttttaataatcacctatgatacacttatttataatactcctgtatt

SEQ ID NO: 191477 - DNA, 410 bp, Homo sapiens
gattgtgaattcctgggaaagagatctttgactttgatattattgatgttggagagcacacttaaaatactgtatttaaaaaaaaattaaaacttttattttgaaataattatagattcatatgcaattataaaaaataatatagggatcccatgttctctttacccattttcccccaatggtagcatatcgcaaaactataatataatataatatcaaaaccagaatatttaattgatacagtcaggatacagaatatttccatcatagcaacacccacttctctcctgttgtcacccctccttaacccctgttcatggtttttagctgttatgaacaaagctgctgtaaatattcatgtacagattttcatgtttttattggtctgggataaatgcccattagtgcag

SEQ ID NO: 191478 - DNA, 192 bp, Homo sapiens
gagccactggaagtccacaggccccgcaaggacagccaatgcaggagggtctggggcactgaagaaggactagtgtggagaaggcagggaatagataatacctgaggaggagaatgaatgggcacatggatagatggctggctgggtagctggctggctggctggctggatgaatggatgaatggatgactg

SEQ ID NO: 191479 - DNA, 515 bp, Homo sapiens
agaatagaagatgtagatcctttttttcaggtgcttacaatctagtaaaataggacatagaccgaggaagagtaaataatgacagcagttaagttcaaagggaggcaatgctgcaaggaagtgcatgaccagtggccacatgagttagctgtaccaaaaatctatgaaagctttgaagaggaaggctcattttagattgagctttatagagtagatgataattgaatcaagtcatcaagggtaggagggatgtggatatatgaaggtaaagaaggttgggtactccaagtcttgaaatcccttctgttaaaatcttttaaaaggaagctggataattttctctgatgatctgttacccatgacccaacatactgatatcagtttaaaactcctctctgcccttcactatttttgcgtgctccctaaatggccagccaactaacatggattggaggaagggagtggtggtcaagaaacaaagaagatgacagaataaagtcctcctgggagacctg

SEQ ID NO: 191480 - DNA, 486 bp, Homo sapiens
tcttgagttgatttctggcactgttcaatgtcaagggcactgcagtttcctctgaacaaaacatcctggttatctgtaaaaatgcagctgcagatgcaggctttgcagtgttagatcaagaaggccagcatttcacagaatcctgaaagttgacagatggacacacagacacactcatacagatgcacatgcacacataatcttctacataccagtctttgtagctacgttattgtaggtggagtatcttgaagcatgtaaggagagccacagtactgcatgtgtgcatgcacaatgtttttggttgtattgacacacagatgtgtcttcaaataccatgcaatcttttcagacactggtaagtaataagtaagtgacacttctattacactgattgacatttcattatctaaatgctttgccttctttttgctttgggaatattagtcatcagttcctcaaagcaattacactgtctgtgttact

SEQ ID NO: 191481 - DNA, 398 bp, Homo sapiens
aaccaagcagagctcagaggtctcctgaagttgaggaggtatgagtttagactttgggaagagcaaggaaggtgaaacatgcaagggagggaatcagagaagagaatcatgcggagaatgagctgcaattcttcaacggcttcacccaagtgctgatcagcgcatgtgtataaggaaagcacctgaggctggagaaagaaccaagcagaaccattctcagagctcatccagggctacgaacagttcacactcccaatagccaaagtggagaaatttcactttgactgtagactcctggtctacaggcttttctataaagggtcacaaaataaatattttaggttttatggattgttgtggaatggaagcagccacggacagtacacaaaaatgagcat

SEQ ID NO: 191482 - DNA, 248 bp, Homo sapiens
agggcaatgtggaggggatgaacggaggcaaggaaaacaaagtagacaatcaaaagcaatggctacatttcaaagcggcatctaccagaaatgactaagattcattttattttacactaatacaaaatgaataaaatcagaaaataccatagctttattttaacacagaagaaaaatatagtggatgcaggaaaaaagagaaattgaataatctgcttctacttgtgacatggcaaacgtttttaaaa

SEQ ID NO: 191483 - DNA, 177 bp, Homo sapiens
tgtttctttgtcctttgttgaataacaagtcctcatagtgggtctaattattgtaattttaaaataatgatgttatttcaagataatgtgcaaccactgtaaatcagtataagagtatttgcaattttttgtgttgataccaaactcacacagaattacatttttggtgtgtggcgt

SEQ ID NO: 191484 - DNA, 243 bp, Homo sapiens
gtgccttcttccatttagctgacgtgacaatggcaggaaaccagcactccgcagcccatgcctcccaccaggatgctaccttgttggcgtccccatccgctctcaaatgctcacactcatataataaatacacgctacttaaaaaaaagaatggcttctttaaaaaccgcaaaggccagccgactgcagacagcctctgaagagctgctttccttgaccccccaaggctataaaataaatgca

SEQ ID NO: 191485 - DNA, 324 bp, Homo sapiens
aatagtctcagctactcatgaggctgagtagggaggactgcttcaacctgggaagtcaaggttgcagtaagccgtgatcatgccactttattctagtttgagtgacacagtgagaccctgtcaagaaaaaataataataacctgtgttctcatggagagttgtctattaccagatgaatgaatctcaggtttttttaggggtaacaagtctggtaccccagatgagacccagggttgagccctgacttgacctcccttataggctcctggcaggcaaagcagtgggatgtggaagcatgcgtgggccaactcacctcagttgcc

SEQ ID NO: 191486 - DNA, 611 bp, Homo sapiens
ggcaacagagtgagactccgtctccaaaagaaaaaaagaaagaaagaaaagataaaagaaaaaacagaggttatatagcttgtgcaaactcatttggaaatgtcaaagctggccaggcatggtggctcatggctgtaatcccagcattttggtaggctgaggcaggaagatcacttaaagccaggagtttgagaccaccttgggcaacatagccagacccccatttctacacaaaaataaaaaatagaaatgtcagagctatgtccgatttcagagcagtctgatgccaaagcctgtgttattgacagcctggctatgctgctagaccaacacggtgtcgtaacttgtcaaccagttcatggcttccttcaatagccacgaatttataatgtatgtgttacttaaattggtcaaacaatacccctaccactctcctggtggctatagtatatttgtttcaaagataagacaagggtcaaccttagtccagaaatcccaagccacataacattccaggtgggtccagacggagccaatgaatgagacaatcctggggaccctgagactgggattttatgagacactcacctttttcgccttacttactaact

SEQ ID NO: 191487 - DNA, 397 bp, Homo sapiens
tagaatcatcaacaggattttatagcattgactaatcctacctctttccccacaaaaaaatcttccagtgtgctctaatgcaatgattcccaaaacactatgcagtgagatatcatacagtaagaaagttctatgaccaaataggcataagaaatgttacaggccaggctcagtggctcacgcctgcaatcccaacactttgagaggcctaagtgggaggaccacttgagctcagaagttcaggatcacctattatcagtagaaaccttgtatctactaaaaattaaaattaaaaaaataggcatggttgtgtgtgcctccactctcagctactcagaaggctaaggtgagaagatcacctgagcccaggaagtagaggctgcagtgaaatacgata

SEQ ID NO: 191488 - DNA, 271 bp, Homo sapiens
ttttccctgatatttaagtaaatatgaatagtttgtgttcagaagaattctcattcaggaagagtcaaaatcagctaaatatggatcatcactctgtttcaatgcctaattagacttgtcactgtcagtccttccttggttacaaatcatcagtagttcttataattatatctttgtaatgaaagacagagtgcttctccctgatgccagcaattccaagcaatatcaaagcaactaagtactcacatggaacttataaaatatcaagggg

SEQ ID NO: 191489 - DNA, 401 bp, Homo sapiens
taatttacctgctttactttgctggggagaggaaagacgactgcagagtaaaatattaaagatttagaacagtagtatggaggcagtctagtacggtgactaggaaccaagctgttgtttggatttgaattctggttctgcaagttactcctagtatgatcaaaggcaggttaatttaacttctctatgcttcactttctacatctgtataatgatgttaataatctcatatacctcatagggttactgtgaagattaaacgaattaatgtatacgaaaggtttagaacaaggacggtcatataatttactctacaaactgggaaccctttgaaaatgaaagagatgactcgtcatttacattaggtatatctcctaatgctattcctccccgggatacag

SEQ ID NO: 191490 - DNA, 368 bp, Homo sapiens
cgcctgtatttaccagagggacccaggtcgctgtggcaaccacacatctgggccccggaatccagatgtgctgtatccagaagccatagcagaacgatgaggcaaacatcaggctccccagtgctggcccccacagctgggaagaggatggagaactggtgtgggaagtaaagggagtgggggaaggaaggaggaggagaggaccaaagtgggggaaaagagaggacataatggaaaggggcaagaaatgtggacgagggagcagaatgggaaatagaaagggggcggcatgagaaagggaggagacaagcacagggtcagcagcagcagcagatgagaagaccaagaaaaacaaaggaaaaagacag

SEQ ID NO: 191491 - DNA, 614 bp, Homo sapiens
tagtggtgactataaatccaaaataagttaaaaaaaatccctgctcctgactcatgattcttagaagaaccaactaatgattaaaactttaaaaagctcaatatatgcaaattgaccaaggggttaaaaaaacaatataaataatctctatgtattcaagatgtgtaattggcaacaatttaagattgattaacaggtggaccctagagggggaaaggaacctttagtgaatttctggccatgccaggaagaatgtaaagtttaagcaattatttcctattagcccttgctaatttcttactacaaactcaataaacattgttaaatccatctactttgagatacatctagcaccaaatgccacaaagtcaatcacttctgccctcaacaagcttcaccacttcaccaactctctgtcctaacttagattaactttttttttttttttgagacagggtttttgctctgtcgcccagactggagtgcagtggcatgatctcgtgatctcagctcactgcaacctccgcctcctgggttcaagtgattctcctgcgtcagcctccggagcagctgggattacaggtgcctgccacgacacccggctaatttttgta

SEQ ID NO: 191492 - DNA, 624 bp, Homo sapiens
acaccaaatagaatcactaaaattaaaaagacaaatgataccctgtgttggtgcaagaaaggggagcaaacattgctcttgtatatcactggtaagaatgttaaacagtacaaacactatggaaaacagattggcgatttcctaaaaagttaaacctatgtctaccctatgacctagcaatttctcttctaggtatttacccagaagaaataaaagcatatgtccatacaaagacttacataaaaatatttatagcagctctatttgtaatagcaaaagctagaaagaacccagatgtttgttcatctatatgaatgaataaaatcactgcggtatatccacacaatggaatactacacagaaatcaaaaggaaaaatattgcaacaaatagccaacatgaatgaacttcaaaatcattatgacgcaaaaaagaagcaagacaaaaagaatacatatgctatgtttccatttatacaaaattttagaaaattcaaactaacctatagggacagaaagcacataagtggttgcctagagagaaatggtggaaggaatggattccaaagaagtccatggaaacttgggaatgaaagcagtgtccattgtcttgattgtggtgatgg

SEQ ID NO: 191493 - DNA, 165 bp, Homo sapiens
aatgtcagctgaaactagcagcagatagagactttattgttctgagcaagacaatctataccagttcattatcagctgccaggtgccaagctaaagtaatctgtgctcgattttcttttatgcatcatcccaaattagatgtaaaataattgccaagagttcagt

SEQ ID NO: 191494 - DNA, 205 bp, Homo sapiens
agggtcagggaattaaatttcataaactaacaagataaaaatagtaaggcttaggcccattccttagaactgatttaatttggaaaaaaatagataaccaggtttgtacaatagaaatgacaaatgtattttgtttgaaaatgggtagctcagcatttcccaaagcctgttttgaggactattattgctctgtgagatattaata

SEQ ID NO: 191495 - DNA, 541 bp, Homo sapiens
acatgcaatgtaacattcattatttcatttattccttataatatatttaggtggagaaaatgtgtaccagatggtttggtgtgaaattatacctaagtttcctaagagacagatatcatcttgtccacattttagttagggaaaccgaaccttagacagttgagaaacacaggatctactggacttcagagcctctgctctcaaccattaagctaattagtcagaagtcatatccagaagattgcctttgtattccatttttcttgtattgtgaaaactagacattttaggcaaaataaaactaccataaagggacctaaactgtgatatgtctccactttcctgtgaagagtatcccagcacaggattcacagaaacctaatccttttcaaacggtgtttgatggaagtgaataccacttttctgaggtgcaacaaacagctaagcggagaaaaatgatcccattgacaatatcaatcaagatgcagagctagcatctgcttggcaacttgactacgatgttctaaaacactttaagtaa

SEQ ID NO: 191496 - DNA, 396 bp, Homo sapiens
cctctttccacagctccttcccacctgacacgggctccgtggcattagtcagactaattaaggacacagaagatgtcggtggaaagactcagagagaagtggagactcaaggagagacaaagatgggagagacagcaagagatgggggagaaaaagggatggagagatgagagacagcacatgagactgtgactcagagaggtgtgaggatggtggctgcagaaaccagatgtgggaggacagaggcacagagacagggacaggacagacggagctacagaagcaggaagggggtgtcaccgctgagagggagagatggagggaggagaggcagggatggtggggaaaatgagacagttctggaggaagggaaagagaaaaatcaggaaacagggt

SEQ ID NO: 191497 - DNA, 222 bp, Homo sapiens
tagtatacacaagatgaaaaatgcagagattgggacacacaccagttactgaagaaacacagagcagggaggaagtctacccaaggcactatttgtgcttcctacaaacaggtttgtcatatggtttcaaagctgagggaaactgcagagcttagagagaaggcaaagaaacaggccttgaaagatgggtggtgtactttacagtatcacgtggaaaagagg

SEQ ID NO: 191498 - DNA, 446 bp, Homo sapiens
atagcgacaccgtactacttatctacccaactaacctgcaaattatctggttaggaattatgtatttattctccattgtttcttagaatagtgcctagtgtgttcaatgaataggtttctccatcatcagttacaagtacaaaacaaaaatttacactgtaaatctcaagtcatgattttgaattctagtttgttgagattgttagaccatattaagaacagcgagaaagttatagtggatatttggaagcagccaagcttcagtactcaaatcagagttaagatttaagttaagaaggaactgtctatgatagggcaggaggaaaaacgccaagaagtaaggaaaccttgtaaaacctgggtcttagtattacctcgcagaaacatttaactgtaagcactatataaatgtcaactggcaaggagaatctgttaaagacaataaa

SEQ ID NO: 191499 - DNA, 241 bp, Homo sapiens
ataactgtgagatagaaattccttttctttataaattatccagttttggatattatgttaagagtaacagaaaacaaatgaagacaatgaggaatgcattattactcagctcattttatagatggggagaccaaggcagagaaagctaacttgcccaaggttgcagaggcaggaagaggtagtgccaggatttgaacccagatacttggttccagagtccatgcttcgtaacccctaccag

SEQ ID NO: 191500 - DNA, 245 bp, Homo sapiens
ccaagatgtgagtcctttctcctgaatatagtcctttaagaacttatgttcacatgtttggattgttttttcctgcagatgactgagtattgtgaacagttggtctgaaaatgaagttcttccactatgataattcagagaaataaataataacatgtttcttacatgttccttgggccttgggcctggcccttaaaattgaggtccaatgtgtctaatgatttttgcggctactattctctttc

SEQ ID NO: 191501 - DNA, 255 bp, Homo sapiens
tgaagcatttcatggggagctaatgtaatgttgtgaaggtgaggagctttctgttcctggaattggtaatttcccagggtcttaggggcttgcccatgcctcctgagccttttcacactgctgtctctaggtaagcatttatctgctaaggtggctgagctccaaaagtatcccctttgattgccagtctctcaggccacttaaatctgtgacacttcccatgggctgccttgtattgtgcccgacattcttatt

SEQ ID NO: 191502 - DNA, 299 bp, Homo sapiens
aaccctcagcgcaaaaaaactcaggagaaagggctcaaaatttaaactagaggtctggggtctactctaaggtgagctaaaaacaaccctaaaagtataaaaccaaaattttgaaatccccctacacccacagcaaaatagatctgaactcagatctattttgagaaatgaatgagtcatgatatcttacctctttttgtagtctgcactttacaaaaggcagttaataaatatttgtcaaataaatgaatgaatgaataaacaaatggaactctggtctgtggtatccgtgcacaaac

SEQ ID NO: 191503 - DNA, 569 bp, Homo sapiens
tcattggcactgggtcatgctgatgccgtctactttgggcatcatgtccatgggctgggcaggacccccttcctgaggacgcctgtggcactggccacagtaggtaagcctggatcccccgaggtggttctccactctcccatcgaaagccagggcagtgacctgtgggggagtttgggtgagagataagcagttaacccttgatgccctcgataaaccagcgcggaccagccacctgtgagcctccccataaaagacacattctaaaaagtttgcaagaccgaatccaaaaaactctattcccgcctcccgttaaaaggacatagcccttccgaagtctcctgtggctcacagttctgctgaggacttgatctcatgttaaaattgaaaaccaggatttagtccctgcgtatcaacaccaacccctaaaccctacttcggatgattctggaactgattaaccagttggggctttgttcattattttctctatggctcctctgctgtgtgatcttttcactgctcactatactgtcatccagagagcgtcaggaaacctcagcagtgaa

SEQ ID NO: 191504 - DNA, 1272 bp, Homo sapiens
agcggagaagctggagaggtggcacaacagagagggccaccatgggggaccggaggccacaggaccggccaaggtcccaaggcatggactccaagccctggtactgtgacaaaccgccttccaagtacttcgcgaagcgcaagcacaggcgcctgaggttcccgcctgtggacacccagaactgggtatttgtgacggagggcatggacgacttccgctacgcctgtcagtctcctgaagatacgcttgtttgtcgccgtgacgagtttttactccccaaaatatctctcagaggtccccaagctgaccgcaaaagcaggaagaaaaagctgctcaagaaagcggccctattttccgagctctcgccagtacagccagcacggaaggcgttcgtagaggaagtggaagcccagctgatgaccaagcatcccttggccatgtaccccaatctgggaaaagatatgcctccagatctcctactacaggtgctgaaacagctggatcccgagaggaagctggaggacgcttgggctcgttgtgaggcccgggagaagacaaccgaggtacccaccgagtctggtaaatatccctgtggggaatcctgcccgcggcctcccgagactccggtgtcccgtctccgtcctcagcttcccaagactccggtgtccagtcgccgcccagagcctcccaagactcgggtgtccagtctccgcccagagcctcccaagactcgggtgtccagtctccacccggaacctccagagactcgcgcatctcatctccgcgtggatcctcccgagactggagtgtcccatctctgcccagagcctcccaagactctggtgtccagtgtccacccagagcctcctgatactggagcgtcccatctctgcccggagcctcccgagactcgcgtatctcatctccacccggagcctcctgagactggagtgtcccatctccgcccagagccttccaagactcaggtgtccagtctctgcccggacctcccgaggctggagtgtcccatctctgcctggacctcccaacactcatcgggtgtccagtttcctactacaggtgctgaaactggattctgagaagaagctggaagatgcacgggctcgttgtgagggccaggagatgacaaccgaggaactcaccaagcctggtaaataccatttttgggaatcctgtccgcggccttttgagagtcggatgccccatctccgcctggtgcttcccataactcgtcgaatggccagtctctgc

SEQ ID NO: 191505 - DNA, 177 bp, Homo sapiens
ggattataggtgtgagctactgcgcctggcctgattccacagatttaacaatcacacttccagttcctctctccacttctctctaaaacccagaccaacccgcttctcctgcccatcaaagctttccttgtccaggtctccatgaacacatggccatatcccaagtgcaatgcgcgg

SEQ ID NO: 191506 - DNA, 386 bp, Homo sapiens
  misc_feature (251)..(251): n is a, c, g, or t
cttactccaggtcacccaggtcataggtagcagagctgtgatttgcagccaggcagtctggcctgagtcctcgctcttggtcatgatgtccatgatctcttgtttgttatatgcccagcactgtggaaagtaccttgcagctgttgtctattactctggtcctcacaataattctgtgaggtaggcactcttttttctccctgctttatagctaaggaaactgaggcagaattgcttgaaccagagaggcngaggttgcagtgagccaagatcatgccattgcactccagcctggtgacagagcaagactcgtctcaaaaaattacataaataataacaataatggaaacataatagaagtaatagccaacatgtcttgaacactt

SEQ ID NO: 191507 - DNA, 273 bp, Homo sapiens
tgctgggattacaggcatcagccatcatgcccaactctttctaccttttctgatataagtatttgaaagtataaatttccttttaaggatttttagccttattctgcaaattttgatatgttgtatcttcattaccatttaattcaaaacactttatttgacctttgaattatataggaagatattgtttagaaatattggattttcccgggtagcttattgttactaattcctaattataattccattttgatcagagaacacactgtataa

SEQ ID NO: 191508 - DNA, 565 bp, Homo sapiens
gttctgataaagaacagtaaaataagagagtcaaagaaaataatagaagatattgatgaaatagaaaagaaacatacaacagagttcttttaaaatgataaactttacaaagatctggtgaaactgatcaaggagaaaagaataagcagtattaggaatataaagaggagctattatgaacaaattaatgccaataaatttgaagtttgaaaacataaatgaaaaaattcctagaaaatataacttattaaaactgactcaagaagaaatagaaaacctgaatgtcgtaggaccattaaagaaattgatttgtttaacatcttcacacagagaaaatctaggctcagatagctttaaagcaatttctaccaaatagtaaagaaaaaaataattccattatattgaatcctgggatgttgaattggaattggaggtattggtgtgagctcatggttttcaatatataaagagagacatgaatatgtacgtaaaatgtgtgtacactcaccttccccccccaccccctgccccacacacacactgtccactgagagagcctcggaac

SEQ ID NO: 191509 - DNA, 573 bp, Homo sapiens
actggaggcaactcaaatgtccactaacagtaggatgggtaagtaaacagcggtgtgctgacatagtggaatactatgcagcaatgagaatgaactggcaattctgcaagcaaagcacagctgaatctcacaaatacaacgttaagcaaacaaagcaagatgcagaagagtatatactgcatgcgtccatgtacataatgttcaaaatcaggcaaaaccaacctttgatgttaggtgtcaggataatgcttatttcgggagtgaatagacggcagtaccaatggggcttccagggtctggaaaagattgtttctggataatacagattctggtgacacaggtgtgtttcctctaaacattcaccctcaatcagtacacttttttggtgcatgccctcctctgcatgtgtaagagtacacgttcaacagctattaaaattactatccacaagtcacttggttgctgctgcataatgacaattctgtcatttcatccatagtccatgggaagttatacagcataatggaaaaaagcatcaggcttgaagaccacccatcttgaattagaatccct

SEQ ID NO: 191510 - DNA, 672 bp, Homo sapiens
cctgctagtctttagcatctgccagctgccatgcagatgactggtgtcgtcaaacaggaatgacagattggtggcaagtgggcacaagagttaaaaaatggtgacaacttagaccagctgctcatctagctgggtgtagagctcactttaaatggaaatggcaattttacaggtcaagtgtgttgtgtatgaatttctttgcggtcctactgcctcccagacaccagcgtgggctcctttctgagccacatgtttagcagcatgcctgggaccctgggagaaggcggcaaacgggctattccatggaggacagatccttgttaaggggctgttccgagtgcacctctgggaactctttcatttggttactaaattcctttctgcttttcatgtagagaataaagctcattagctgtgtcttttaagaaagccaagtgcttcacatgagatacttattaaaatattctcaaatccattctaattctgttcttgtgaagaatcagtttcattccacaccccatccagcatctggcagaagaggtgccctatcccagtcagggaagagagagttgttgggatggtttcattgccctctctctgctcagaacccaggtattgtcttactggggttcaacactcgtggttcttgtacatggagccctttgtcctaag

SEQ ID NO: 191511 - DNA, 373 bp, Homo sapiens
tggcatgcataggtcccaggactgacacgctgctcgagtgagcttgtcctgccttggcacaaattctgagtctggccagggccacagaaggcgagtcccctggatggtaatcctggctgctttctgcacttgaacatgaagtcctcctcgagacggcctgttgtgtgcctcctggtaaccaagaagcccacagtgtcatacgacccctgaggcatggactggagccccaaaggcagcacacaccctgctgctgagcccgctgctcattccctctctgtggctccatttgtagcagagtagttgcactgaggcttgtgcatgctgggcaaggccaagctggctcaaacagcaaccagtcacatctgcaagggtg

SEQ ID NO: 191512 - DNA, 732 bp, Homo sapiens
tgaaaatggaaatggaaatcaaacacacagccccagtcaggtcccaggttagctgacctgctcctaatgcctgctgggctcaggccaggatatcggtggaggcccctggtccgcggcccattccccttctcttgccatccccacctggtcattgtaacaaggggcctcgcacatgagtgtggacacccggggctgcatgtttgagctccaaccatgtccacgtctcagccacagctggccattctcagccgaggcatgggcacacaagtggccccagggaagatgaactcagtgcaggccctggcagctagcaaaggggcatttgggcagagaattatagaaaaggaaggatctgggggtccaggggacatgtccctttgccctgcagacctctttcccctttagggagccacagccagagtgggtgcctcttggaacatatgaccttatctctttggcccagagatgacatcttctgctatcccaagtgtgagccgttttggtctcagaagaaaagtcccctcgtcttcctttcagggaaaagtgctgaagagggcaggagactggtggtttgagacctgccccttagaaaccatgtgaccctgtgccgtgactgaccttcctagacccagccctgtgtgtacaaaatgaagacaaatacctacctcgccaccttgttggcaggactcaaaggatgacaaagtgccaagcaaatggatgttttcttatgga

SEQ ID NO: 191513 - DNA, 243 bp, Homo sapiens
aatgtccctaactctggcaagtactttaaattaggaaagaatttattaaaactttttgttttgttcagattagttagctccctgtactactcattgaggcaaccgagtggctttctgtaattgagtaataaagcctacacatctcagcattaatgtatctgctatttattgagtacctattatgcgcacagcactgtactgtgtcctgtggagactaaaaagaagtgtaatacgtggtgtctg

SEQ ID NO: 191514 - DNA, 342 bp, Homo sapiens
cctgtcccctgacgcgaagtgaaacaagttaggtacatgacagcacatccactcttctctgagcacctcctgaagggaaggaggaagttgggctatttgaggtggaagaataaagacagggagagttctttccctaaaacagccacgttgatggcacagtggctcttcccagacgttcctcgcctttgcagggcttctgatagtcacctgattgattgcctaaaatctggggactttcctgggagctgctgaatggcatttgtttccatatctttggagaagattatcaggcatgagccttaacatcttagcatttttgtaattagtatttctccactgaaa

SEQ ID NO: 191515 - DNA, 167 bp, Homo sapiens
ttcatttctcatctgtaaaactgggataatattgtcgttttgcagagcgccatgagaattaactacaacagaggaatttggaggtgaagtagcatggtgtgtgaattgctgcaggatctggggaacctcatgtgttctgtatgggcagttgtgtagacagcattgat

SEQ ID NO: 191516 - DNA, 383 bp, Homo sapiens
agagggaaacagaaaatcacccttaggcaaacaccatagtaataactgttataggcaaattcattcacggatgataaaattagacagcaaaattgaggagaaacaggatttgcatagtcttaaaatatcactcccaagaagtttatcaactgaaaatagaatgaaagcatctttacagtggagaaacttggcagatataaccttaagcaagtggccaaagttagcatcaccagtaataagacatccactgagaaggacacaacatctctcttgtgttatttgtgccaaacatgcatggtctcattccaaatataagaaaatatcaagcaaaccccaactgagggaaagtgtacacaataactgaccagtattcattaaaagca

SEQ ID NO: 191517 - DNA, 437 bp, Homo sapiens
attttgaaattttgatgatatatcgcaggtagaaaatggatctcttcaactatgatatccacggcatagttaccgatgctagatatgccacggtttgtttttcttaatgaatgtaactctctatcactgctaaagttactgttttgtaagtaggaaaagcagcatcttgacctgtctttccaggcccttctctggtcttggcttcccatgttggccacagggactggggaaagaagctggggacagcacccctgccatgtaacgcatgctaatttcattatgtgccatcatcagaatgggttggtgatttcagaccatcagcaaagtctaaacctccaccgatttaattaacttgactgaaaatcagatgaacagaaaataaaactatcattagaaacaattagcgactaaaacatactgctgccaaccagtttgta

SEQ ID NO: 191518 - DNA, 498 bp, Homo sapiens
gagaataacagaaaccaagccttgttaggaaagtttctttcaaattagcttagagtttaacattttttttctagagccctaggaaaaaaacgcccaatcagtgcaataaaaataggctcaagtgttcagttgggtattttcctctcatatcttttagttctttgaagtttcttccaaattataatccaaaaataagagtgctacaatttttagaaaagttatgttgatgtaacttttatagcaagctacccaaagaatcaagctatattatagccatgctcagttatgaagaccaaaactattttaaaaataccagaacgagaaagtcctagtttatttagtctggcttccttaacatgaaggtcttgttgttctcaaaatattcagctttggctgaattccaaaactgacataagcccacttcaggtgtttggaagacactaaagagaatcagaattgaaaacaagattggaaaataaagccttttatgtgatcaca

SEQ ID NO: 191519 - DNA, 314 bp, Homo sapiens
ggatgagccacaacactttcaaatttggtgtgttatcttaactatatttggtacaagattatatactatgctattccatgtatatgaattaatatacaggggaaaataatcagtgtttctagaaatcaggatgatgtttatccttggaggggatgggatgggtagtgatggaaagagaccaggtggggcctctgaggtgttgggcgataaatcactatgttatccccaacacctgtgacaattgcttcaattatgtttttttaaaacgattttatttttccattgtagttggtttagtgttgggcgataacata

SEQ ID NO: 191520 - DNA, 1112 bp, Homo sapiens
gccacattgctcccagagtaatgaggcaaaatagtgctctgttatagaattgcttgtttcacgatacatcatgacagataaccatacaacatggaatgacacaaacataatatgccacactccagaatatgtaatgctcgtcttccaggggggttcagtctaaggtaatctctaccaggaagaaacgctagatgacttcagacatgtgcattggtttggaccttctaattagttgaatttttacttattttgacatgagagattacatagaatctctatgttgcccaggttggtctccaaatctgctcaaacaatcctcccgcctcagtttctcaagtagctgggattacagggacacaccactgtgcttagcttaaatagttgaatttattgggcatccactgaaaagaaggaagtaggaataaaatctgcaataatatgaataaacctgtaagtgagcatgagcagtggtgggcaagggtatgcagactctggaatccagaaatagaaagtcagtggaaagccaggcacagtggctcacacttgtaatcccagcactttgggaggccgaggtgggaggatcacttgaggccaggagtttgacactagcctgggcaacatagtgaggccttgtctactagaaataaataattttgcagatatactaaataccattttaaaaataagtggaaaagggattagagagatccttgtaaattatgtactcatattcattgttctctttagtcacataattcagtcatgtacgtgacattccacagtatggtgctccataatacatattttttcttttttcgatctcacttgtatatgatccataatatttttcatcattcccttactgatggacatttagattgtttcctattttttgctgtttaacagtactgcgctgaacatctgtacatttctctcaggcatgtgtgggtcttcagatacctcaaaagtagaactgctgagtcaaaagacatttgcatttaacattttggaagatgttgataaattgcaccccaccaccccccccccccgcccacaaaagctgttatttatgctgtgaaacattttaacaatgattttgcaattaatcaaga

SEQ ID NO: 191521 - DNA, 156 bp, Homo sapiens
ggatggatggatggatgggtgggtaggtgaatacatggatggatgagccactgattgagtgggtggatgggtggatgaatagatgggtggaggatagataggtgggtgtatgggtgggtggatggattgatgcatggatggatgggctgcccattg

SEQ ID NO: 191522 - DNA, 804 bp, Homo sapiens
ccgcctcccgggttcaagcaattctcctacctcagcctcccaagtagttgagattacaggcacctgccaccatgcccggctaatttgttgttgttgttgttgagacggagtctctctctgtcacccaggctggagtgcagtggtgcaatctcggctcactgcaagctccacctcccgggttcacgctattctcctgtctcagcctcctgaatagctgggactacaggcatctgccaccacgcctggctaattttgttttgtattttttttttttttttaagtaaagatgaggtttcaccatgttagccgggatggtctggatctcctgaccgggtttcgccatgtttgccaggttggtctccaactcctgacctcaggtgatccattcgcgttggcctcccaaagtgctgggattacaggtgtgagccaccacacccggccctcagaattatttagagttagaattcttagtctactagtcaagtttcaatcaagagacactgtatcagttatttcaagagagaatttaatataaataattgttatccagctagtagagatttaaaaaaaagtagtgataatgagatatcatgaagattttgactgcaagctcccagcccaaggactcatacaacaaagaaaagaggttgaaaatatcaaaactcggaaatatgaaggtggccctagggctgggggttagtcctctgaggaggaggcactattaatggtacacgtggcccaagggctcagagctcaaggtccaggagctggacgcagaattctggagaggggacatggccagcc

SEQ ID NO: 191523 - DNA, 945 bp, Homo sapiens
cacacacacacacatatctatatgaaaccccaaaatatttggaaattagacaatatatttctaagcaactcatgggtcaaagaaggatgcacaagggcaattttaaaatattttgaaatgaatgaaaatgaaatataaaatatataaaaaaacagctaaagtagcagttagaatgaaatttatgactataaatacctgtatcagaaaagaagaaagctctcaaatcaatatcctaaaatttcaccttaagaaactagataaaaaaaagagcaaactaaatccaaagcaagcagaaggaaggaaagaataaagattagagccgatatcaatgaaatagtaaacagaaaaatcacaagttgagtctttgagagatcaacaaagttaacaaccttttagctaccctgatcaagaaattaaaagagaagatacaaattgccaaaatcaggaatgaaaagaggtacagaaattaaaagaattataaaagagtattataaacaatgttataccaacaaattagacaaatttagatgaaatggacaaatgactagaaagacaaattaccaaaactgactcaacgagaagtagaaatatgaatagacctaaaacaagtaaagaaattgaattagtaattttgaaagcatgtaggggtagaagctaaagatattgagaggtggactcaggcccttttagcctctcctaaaaaccctaaagactatttgtaaactgcgggaattggggtggcccaaaagagaaaaaaagacacataaccctagacatgccaataaccaccggcaacaaaacgaagaaacaaacagaacaaagagaacaaataacccaaccgaaaggtggctaaagattataccacaaaacaccctaaggaaactcacacttatgcaagaaggggacaggcacaggagcaatggaacggaaaaaaagtgcaaaaca

SEQ ID NO: 191524 - DNA, 224 bp, Homo sapiens
ggagtctttccagaattttcctcttcagttgactcagttggcattcccctatataattgtttcaatggtgctgccactgggtggttgtcagcctccaccatactcagagaattgcgtggcttcctcctaaagctttgctacattgtgatcttaaatcccagttaaagaacagcacatcctgaggatagtcttgatagttttctaatattttgagagctcatcag

SEQ ID NO: 191525 - DNA, 404 bp, Homo sapiens
ttgtgtccctcacccattcatattgtgaagccttagcccccagtgtgatggtatttggagaaggggcctttgggaggtgattaggtttagatgaggtgaggagggtggggcccccttggtgagattagtgttcttataagaagtgggacaggctgggtgtggtggttcatgcctgtaatcccagcactttgggagaccaaggtgggtggatcacctgaggtcagaatttcgagaccagcctgaccaacgtggtgaaacccctgcatggtggtgggtgcctgtaatcccagctactcgggaggctgaggtcagagaattgcatgaacctggaaggcagaggttgcagagagctgagatcgtgccattgcacttcagactgggcaacagagtgaggctccatctca

SEQ ID NO: 191526 - DNA, 292 bp, Homo sapiens
tcagggagcccttccactaggaaataatgcaaaggtgctcagccctcctactttctagagaatttaccttgttgctggactgtgtcacaaaacacagttaggagattttgaccaggaaagaaaatagctacatgaaacccaggatggcctatgaatacctctgaggacgagaagatattatcttcaaattttaggaaatgacaagccaatttcttctaggtttttgttgttgtttttgtgtatatataaatacatatatttctgtaatatatatgtatactcttgtttatgt

SEQ ID NO: 191527 - DNA, 352 bp, Homo sapiens
atatgtatatatcagggggggcaatgaacaatctggaaatgaatttattattttcacccatagtagcaataaaaataatacttaggaataaacttaagtccaagaggtatacgacaaaaatcacaaagcagtgctgaagaaatacctacataaatggagatatatcctgtgttaacagactgaaagacttcagattaagaaaacaatactccccaagttgttctacagattctttgcaatccaatccaaatcacaggtggttttgttttgcttttatgtagaaattgacaaaatgatcctaaaattcatatggaaatgcaaattaccccaaatagccaaaatgaacctgaaa

SEQ ID NO: 191528 - DNA, 583 bp, Homo sapiens
cctttctcttttgtctattaaaactccactcctaaacccacctcttgtgtgtatgcctacttgatttccttggtgtgagatgacgaaccttgggtatttaccccagacaatgatgccgtttcacaaccacatgaggaaggacccaagtaggcactgagactgcagcagaaagtgaaccagagaaacttaatctccatcgccctcatacatatactcactccagcctgaaatgatgggtttgacgcacaaacttcaacagtgcaaaagacagaagcctactatcagtttatttacataaaaaagggaaggatgacccaagactagaggacttggaaatacttcggttgcagatttaaatacacaagcagtatgtttatactacatctgtcaatcaatgtatgtatttatgcatataggtacatatgtgtatatgaacatagatatatatcttttaatttttaaaacaaatttgtagttaatttgttaactactaattaatgactactatgttaaaagaaagtgtagtttacacactttgcaaccaaaagtgaaatgctaaatcttcagtaaagataatgaagta

SEQ ID NO: 191529 - DNA, 277 bp, Homo sapiens
gttgtggcagctgcagcaagccacctatcccttttcttttgttgttaacttcccccagttatttgaactatgtcagctctctggtacaataaggcatgacagaaactggcccctcaagcagcacactgaaaggcatgggcagtgcaggatgcccccactcctctccttccttcctgggagagaagcctcaggttcttagccttctctcaatctctcagagccttccagctgcagcaaccacctaccctctttcctttgttaactgcccccaggcatc

SEQ ID NO: 191530 - DNA, 228 bp, Homo sapiens
ttgactttatggtagatccattctaagaacgaattcaaatccctgatgtatcataggtctttgcctccagcacaatttatgtactagtgctgcagaggttttcaaatttagtgtgtctaagaattacttgggaactttttttttttttttttttttttttttttttttttttttttttttttttttgtggagggaaaaaaaaaaaacttctttctttctggggggggg

SEQ ID NO: 191531 - DNA, 598 bp, Homo sapiens
attatcactccccagcttaagaatctgtgcagcttacctgatctaatacacactcctcaggcatgttatcacaaggcatccataagtctggacaattgtgcttcattttctatctccaaactatatcctacagttctctaatgtaaactgaaacctctgttccagtcttgccatccctattatccatatgccacgtctcacctttaagccattctctagtcttcaccccttccaagccctatccatctttccagatttggttcaagttccaccatatccatccatgccactttcaacttgtattatcatcttacttttccgaacacatagcacttattgtaattcactacttgagtatttattctttgtgtttcttgctccaacaagagtttaacttattcaaaagcaaggaatatatacttttgggtatgctctataatagtgcttttcaagcttttctaaccatgacacaagtaaaaaagacactttatattgcaaccttgcacacatacatacacaattgaaactcaagtttgataaaataatacaatactatccatgatgcaatctgatattctatttttcattccatttgatt

SEQ ID NO: 191532 - DNA, 545 bp, Homo sapiens
gatttggaggttttgatcgtgactttattttgagatattgtatctttgttagtattgcattgataattagacttcacctggatttcagttcacttctggacaatatacttagagggtatgtatagacaaattaaaagatgtaggaaatcaggatgataaatggggttctaaaccatgttagaagagtcagaggtggatatttgtcatccagcgaaaattcacaggagacatggtagctcttatgcatttgaaagctggccaggtgcggtggctctcaactgtaatcccagcattttgggaggctgaggtcggtggatcacttgaggtcaggagttcgagaccagcctgggcaacatggtgaaaccctgtctttactaaaagtacaaaaaaaattagctggctgtggtggcgtgtgcctatagttccagctactcaggagcctgaggtgggagaatcgcttgaaccctggaggtggtggttgcagtgagcgaagcttgcaccactgcactccagcctgagggacagagcaacactctgtctcaaaa

SEQ ID NO: 191533 - DNA, 557 bp, Homo sapiens
ccattgtctttaaaagagctgtgccccctccagatgtaagcccctccagttctgagctctatgtcttacacttaggctcttagtacgcatttgaaagaatgaattaggtttccttaagtaaataatttccctttagagtttggtgctgaagtagaagtaattagaagtaattaactctcaaccatttcgttcaattgatattgagctctttctttgtacctggagctaagaatgtacagtagtgaacatgatagccccagcccgaaaggagcttatgatctactggagaaaacacagaaggaaatagattttaggacaaggcagagaaggaccgtgataagctggtgccattggagtatacctagtgggcattagtccagtcttgggaggttggggagccctctggggggagatgtctaagcagagataaggctgaagaaagggtagtatgggagcagcacagcagaggaaacaatgtataaaagcttggaggacagagagggacagtgctttcagggaacctcaggtgagtaaagcacagtggctggagcatttga

SEQ ID NO: 191534 - DNA, 283 bp, Homo sapiens
tacgctagataaggagctaaactcttagcggcctcctcctctccctaccccccaccttggagattagcaaccttcactctcagtctaactcccacctgagatttaggacgtggagtactgcaacccaaaaaagctagtttgagcctccccctccacactcctgcatactgagtccatctacctccaccttctctccccaaaacccagccagctggtcccccagcttctgggaaactcagctccccagatttccaactgtccagtaggaactctggggagagag

SEQ ID NO: 191535 - DNA, 208 bp, Homo sapiens
ccctaaaccctactgataaaagcagtgccaacaacataatgctttatttccagaaaccccttaagacccctgctttcgggaaaatgaaagtctcctggcaaggttcgcagaagtagccacatctgggatcggtacctaaagacagcaccatgaacttcacatgtcagctctccatcagcatcctcccaacctcagcaatggtatttct

SEQ ID NO: 191536 - DNA, 543 bp, Homo sapiens
acacacacacacacagtttgaatctgtgattagtcagagtaagtgcttggtgaatagaatgccttttgtctggggatttccctgcactcagcagaagtgcttgttgccgcttgtcaaggcctgagaaagccagattcttaaattggagtagagggtcaatacctcccagtctgtgagcccctaattcttgccattagacaaatatgtggaaatgttcgaaaaggtagatttgcaatccatttttggtgatttagggaattcttcacagaaacgcaatctctcccttcaggatccttccttctctaccaaatagcagtcacttttcccctgtccccgaccaccagcggtgggctccgacaaggaggtggctgtgcagtggtgtcacgtgtgtgattgtgttttaaagctggttattctctcttccccacacaatgtgttcatctttcccttcttccctctacacagcatgttcatcatcatcttcttccctctgcttccctgcacccttgtccttcctgtctccctctggtgtctctagccgtt

SEQ ID NO: 191537 - DNA, 667 bp, Homo sapiens
gtgtcttatcaaatgttttcttttacagcatggtgattgggaatgcctgccttggaaagtgtgtatccctaaatcattctgactaggctctacatctctgggacctcagtcacccactgatgggtgtgttaaagaggatccatgaccattttctgagagaaatcatggccttcctttgcttaggagtggggtactctccacatgctgctgttttgttttcatgaagtaatgcaaacctggttgttaatctgctaattctctgagttcaatatgcctttaattgacaacagagaatatttatattcctgttttttctcggagaccacaatctcaaactctatgccactttgtccttatcaaaacggtctctatgataatatttgcataatatttctgaggaatatgtaatccgttcattctgctagggagtagaccttttcttttaattcaagccacatcatcgtagagttttggccctttgagaattgcttttactgagtggtagtgtggtgtaatcattgacagattgagggtcattaatacgcaatctcagttaagtcattattgcgttgatcgtggtggaatgcttaaggagatggtccatatattacatagtctttgtcttatgaacaaccataggagaaagttcttaactgtcctgtcccag

SEQ ID NO: 191538 - DNA, 457 bp, Homo sapiens
ggccggacccagttacaagctcactcgggtaagacaaaattgaggacatctggttctgcactggacagggaaaggattacttttcgtctgtgtctgggaactacctgcccagctgtttgctgttgtaactggccagttacaacagctcaaaacggtctctatgataatatttgcataatatttctgaggaatatgtaatccgttcattctgctagggagtagaccttttcttttaattcaagccacatcatcgtagagttttggccctttgagaattgcttttactgagtggtagtgtggtgtaatcattgacagattgagggtcattaatacgcaatctcagttaagtcattattgcgttgatcgtggtggaatgcttaaggagatggtccatatattacatagtctttgtcttatgaacaaccataggagaaagttcttaactgtcctgtcccag

SEQ ID NO: 191539 - DNA, 125 bp, Homo sapiens
tgggcacatgggtccggtggagtgaggggagggggtagatgggtgtgttgtgcctgcccagggtctttacgagggtcccatccacggggcagtgtgtgtcctgtgcctagcgcggcgccagcatg

SEQ ID NO: 191540 - DNA, 269 bp, Homo sapiens
tctgtcccaaaggctcttccccaaaacatcctcctacaagtctgtgctcaaatgtcaccttctccattcagccctacaacctgccctccacctctctccctgcactgcacactggagctgcctttcctgcctctgtgttttttttttcgataacactatcacctccttacatactagataatttacatactaactattttttactgtttagcctgccccaccttgacagccagtgtggatgcaggacaggaaagacaaaagaggaatga

SEQ ID NO: 191541 - DNA, 209 bp, Homo sapiens
ctatctagaggaaacctatcatggtttaggttgttgcagctgtaaaattttttttaaaagactaaaggatggtctaccatttgactccaaaaaccccttttctatgtcttgttctacaataattgacttattctcttccaggaaatgcataacattatttaaaaagaagaatgatactaattatataattgcaatgtaacagcgtacta

SEQ ID NO: 191542 - DNA, 422 bp, Homo sapiens
gctccagccttggccagcccagaaaggggctcccacagtgcagtggtgggctgaagggctcctcaagtgccgccaaagtgggagccctggcagaggaggttccgagagcaagcggggctctgaggactgccagcacgctgtcacctctcaatagtatggggctcccggtggcggtggtatctgcaaaagccaagactttcttgagttatacaggaaggaaacaacagtgctgggatttgaacccaggaatgtctcgatctagaatctgtgctctaaaccagtaggcgtcactgcctgagactggtgggagaattgacatgtgctccacagccttgtaggtccaccaacaaactcccagcccacccacaggctcatcaacatcaccttggatcaaagatttccatgaatattggaaagacata

SEQ ID NO: 191543 - DNA, 724 bp, Homo sapiens
ctatgtaacacatccctatgacaaattagaacatttctatcccaccagaaagttcctttgtattcattcctgatcagcttgtattcactcctgattccagcactgctaagctaactttttcaccttagtttgcctaatcttaccttttattttattatttatggggaaaagaagaatctttttactcatggataaagagggctatttaaaggaagtgtctatttcagaatgttatattactgtactgggagctataagatgtgtgtgtgtgtgtgtgtgtgtgtgtgtattacaaaaatatatgacttgttttctcagggagcttaccttcttgttagggaaaagaaacttaaacactgatagcagaatgaaatgtacagatagacatgtcttagaagttttgagaaagacaagattaatgtgtttgggaagggttggggaaggcttcatgaaggatgtgtgttaagcctagaaagggggtaggagtggataactggaataaagtgactgttacagcatcctttatcagattttgttgcatttatgttagaaagaaactttgtggtgccctttcaatccatcttccactgccaccagagctctttttaagaagctcagatatgatcataatattccttcattaaaatcattaatctactctaaaatacaaactttctgtattcatggtgtggtccttccctacttttcccactcatccaaccat

SEQ ID NO: 191544 - DNA, 481 bp, Homo sapiens
ctgttcctccatctccttgatgcttggcatctgtgtgggtcacatattcagcagattgggtaataaagagcatgcgttgcctttgcagcaaggttgcatcagatggctggacgtgcctggatgtgctctgccactggcatgaaggaccctgtgcagacaaggccaatagtgaaggtcagggattccgagaaagcacccagtttctcctcttctccctctaaaaatggtttcttctgcccacattctattgatttgccttaatccttttagctgttaacctttgcctcagtttagtggacacacatggtatctgcagtgggtctggctctaggagtgaggtgagatgaattgaggtaagcctggcagggtccctgctgcccatctgcccatcttgctggggaagacagaatagccttgcgctagtgtaaggtggtaagtatggggtcaggagaatgaaaagggtgccaaggcagccagaagt

SEQ ID NO: 191545 - DNA, 366 bp, Homo sapiens
aggggacatgagatgggataaaatgaaggaaggctgttggacttctggaattctacaaaatgggccaatagcgctatccagctgtaaacatgtcttatccttcaagaaaagagaagaataacccaaaggtagatcataggtcagcagggctgttacttctcccttgggcccagaggcataggcctagggaatgtggctatatcctccagatttcatctagccaggcatctgcttgtgagtgccagagggtgtgggtctgttttctagggctgaggtgagtagggctgctttccagagctgagaaggcttggccaccacctgggtgggctcagaggacagaacactgagccaaagaaatttattctt

SEQ ID NO: 191546 - DNA, 486 bp, Homo sapiens
aggcaaaggcttaggaaatacaacattccagagtcctccctgaaatcaccagtcatgtgagagatgggtccaaatgaggaatagaaaaattagagcacaaaaaaccggcagtaacattgaaaccaattaaacagagttggcaaaagccaaaaacaaggattgaaaaagaatgttgtggcttaaaaaaaaagtgtaaacaaaagttaggtctgtcgtcctgattaagtggacaaatataagtagtgagggcggcaggtaggaggcagaaaagcacacaaaatttctcatgggggaatataaaaacgaattatttgtcactgactttactaatgtgtgaaatgtaaactattttcatttgataaatctaaaggcagccgcgagaagaattaaaaatactttctgccttgaaaatcacgatagaagataaaagcaaatgtgggaaaattcagaaaacaggaataaataaaaactatagaatacgaagtc

SEQ ID NO: 191547 - DNA, 238 bp, Homo sapiens
ttgcttcaagaggacaaactaaaagacgcttccacccaccccattttgactttctaacctaattcggtgaccacaccctatccacacgaaataattctacacctcactgctcactgagttcaaacacaccaagctctttgacgtctgtttctttgcacacagtgtatcacagcagaaccatcattccattctttctctcctcaacccaggcctggcaaattcctactcatgctttaag

SEQ ID NO: 191548 - DNA, 493 bp, Homo sapiens
ccgctctagagtatcccctcgtctatttgacaggttgtattattattcatctgatgactcttatttctagatatacaatgaagaatgtcaaagaaaaggtagcaagctacccaattcatgcaataaaagcaaatgtaaaccttataactaaacgataaatacagcagtcttgtttcaacattatcattatagtggacaatataaacgttatgtaccaggcacagttctaaacctcttcaataaattgtcttacttaaaccttataatgatcagtaagaaaactatattcccattttacagatatggacactgaggccaagaaaagttcatttgcaaatgacaagaagatgattagaatttgggcagtctggcttcagagcctgtggctgtcatcttaaatactactaggaataaactcagttatgtattttaagggtagcctggttgaccccaagggtagcctagtttatcttggtcttgatagacttttgcc

SEQ ID NO: 191549 - DNA, 480 bp, Homo sapiens
gaagggtcccatctcttgcagtgttttcctattgggacacactacccagttcttggcctaggaatggggatcacaggggctgagggtggtctgggctcccaggtgaggcaccaggctctggaggcaggctctgaggctggagtggcaaggaatttctgcgagcaaagccctccataaggtctccaggggcagcttcatggaaagttggtgcctctgtggcaaaggagccagcagggacactccagccattctggggagatgggaggagaaggtgtgctcggtgaaagaagtgacagcgactaggctctgtcacctccctgctggccagcctcaccagggagaaactaagtgtgaccttccacctgcagtggaaacatgactccaataactggatgccaattttatagcctaacccagaggctacagttgctatgtctgctcctcttgggtatgattggcttgttgctggctgcccattgc

SEQ ID NO: 191550 - DNA, 369 bp, Homo sapiens
ttcattttctacacaaaaatccaaacatacccatctgtagtggctttagtcaaaactgccacaaactgaaaacaactcaatgtccttccactggtaaataaacaaacaaattgccgggtgcggtggctcacacctataatcccagcactttgattaccatccacaggctgactctcagatctaaaattccagtttataggtctcccctgagctccagattcaaaagcagcatactatttctgacacacctaagctgagagcaccccacgtgtcttcgaactcagtgtcttctcactttaccgccacacacgtttttcttcctgtgtgccctatggcagtcaaggccattgtcatctatgcagctgcctg

SEQ ID NO: 191551 - DNA, 191 bp, Homo sapiens
ggaggccgtggcagatttggaggctttggcaatggcttctgttaccttgccatgaggtaactcagttccctcatcacttttctctgagaactataaaaccttggaggggtgccttctgcccttcgcttggcatgtatattatgcagggatcaggtcttactccgttcttgattgttagtacaaattagtta

SEQ ID NO: 191552 - DNA, 472 bp, Homo sapiens
aactatccccataacccagtatttatttccccagtgtggcctttccagcccctgtatgtgatcatcatctcttggagtgcttgctaaaatacagtttgcctcatcccagccgtgtgaactaagggagagtctttgggaatgaagcccagaactcttcattttcaattccccaagtattcttaggctactagagtttgagaactactgtcatatagcctctcttcctcaactaaggaacagatctctgtagtttgtagtaactgctgtaaaatggcagctccataggaacctattttccataggaacctgcagttcacctgttcagacagatttagaaaattagaagtctccattttgcatatagctatttataatagttgggtgatcatgcttccttcttctcaaaatatgccactttataattcaaaactgcaataaaactttagaagaaatttccttcctcaaaaatcaa

SEQ ID NO: 191553 - DNA, 497 bp, Homo sapiens
ggctttgccaggcgaaaacagaatttttttccattcacattgctaagatttaagatgagctcagtgagtcagaataatagaactggaatctgagttgactgcattactgttttaacggtcttgctgttataaaaataatacatgttgattagagaatttggaaactacaggaaaggataaaaacaatttaaatggccacatttctactcttcagagaaccattgtgagcattttgaagtttgacttttttcccttttctgttagcgtctgtatatgtaggagagtattttttagtgaatttgggtgtcacactaaacacaagtgtttcataatctgccctttacatggatgctgaagataaacattttctcatatcattgcctgttttaaaataattgttattgaatcccagcacttaggccaaggtgggaggatcactgaggccaggagttcaagactaactatcctgggcaacataacaagaccccatctctaaa

SEQ ID NO: 191554 - DNA, 301 bp, Homo sapiens
tgcacctgacccaaagacagtcactccatgtgctggccagcaaaaagctctttcccacataggataagatggacccattggattccttctctgtgaataattttcactgaaaaataggaataggaccaggcgtggagtagcaggaacagaaaattaaagagaaatgagagactatgagagaccagagagagactatgtgttaattttcctaagggaaaggaacaatcaggaaaacaaatgttgacgtgctaaggggcgttgggagattacttaatatctcctacagtcttcgtacagatct

SEQ ID NO: 191555 - DNA, 442 bp, Homo sapiens
aaggttggcaatgcagcctgagtgcttgtctttgtaatgagctcttgggtgatgtggattctgtcggtctccagaccactctttgagtaacaaggggttaataggtgcttcttcaattatctgtgctatgttttttgtatttccaattaatcccagcaccttatcaataactttattatgacatactatggaatgatcaagttctggcctacattatggtatttctctatttcctttagtaaactccaagttccttgaggctggagccctctttatcactgtatgctgacaacctagcccagcagtttacaaagtgaagatgctgcttgatgattacatgtacaataaacttgaagctgacagtggtctttaaatactcaagtctttaaatgtgaagtgctctcacatatgattttttctgatgaccttaggtacaacaaag

SEQ ID NO: 191556 - DNA, 343 bp, Homo sapiens
ggttatctttgcgtaggtttaaaccagtatcaatcagcccgaatcaacctgcttgtttcctaaagctggcaacatacacaattttgaaaagggtaaacattcagtaaaaactgttgtcaaactatcaaaatattagaaggaaaagttctgaactatgttcagtctgattagttgttctgttaaactccttgggttttttcttacattcacctttagttgtcttgactcactctgcattcctgaggagactgagatctagtattttaacaaaaattacttttgaaggtgattttaagtatgtgcacatgtatagcctgtttgcatgaagaaccaaaggcatctt

SEQ ID NO: 191557 - DNA, 494 bp, Homo sapiens
agagaccaaaacaaacaggaaaagcaacttagaggaaacagggattatccagaaattaagaaaaacttaaaaaatgaaaattaatatccctagcagaaataagagaagatattgtattcatgaaacaagagtagtatagtatatgaaaggaactttcagaaaacaagaactcttagaaataaaaaataaagtgaaataaaaatctcagaagatagaactgaagaaatatccatgaaggtgggaaaaaaagacaaaaaagaaaaaggaccctaggaagcagcaggatattccataactaaattataggtctacagagaaaaaaaggagagaaaatagagagggccataaaaaaaattaagaaaaattcccaaaatggaaaacaggaattctcaaaatgaaaggacccagtggatgaaaacagacctacatcctcaccaaggcagtcatctcaaaattgcagaaccctcaagttagaaagaaaaccctacaactgt

SEQ ID NO: 191558 - DNA, 304 bp, Homo sapiens
tatttttttattttttattttactttattttatttttttaagaaagggggcacaaatgaagagcaggctgcctgagacttgttcaagaagacatcattttgtgtaactgagtcagtgtttactcattcactcattcagtgatcctatgttgcttacctataaagcatctttatgatgcctacaaaaggtggagtttatttcctggattatcctttgatactctaaattggagctttccaacctgtgtgccatgagtgtctggggcctccagactggttgccttatgttactgttctatatgtgc

SEQ ID NO: 191559 - DNA, 351 bp, Homo sapiens
atgatcttgccttccattctacttgtacttcagtcacacactcccactgtcacaccctggaacttgtccttagtgaaaacttcaccttctccattcaaacagggttgagtatcatgctaacaactacccctatttttccagttcgcttcctttcttattctggctccaagaataatataatctgaccagtgcctgcaattcattgatacttaactcgtcagaatcctaaatacttgctgagttgtcatatatttctttgtacaagttaggttccatgatctattcaaaataaccagccaaacaaaaaaccttacttggatattttttctactccactgcccctttctcttt

SEQ ID NO: 191560 - DNA, 1157 bp, Homo sapiens
ataaagtaacaggaaaattaaaatgcccagcagacccattgcctcctgaacaggtgtttgctgctaatggatacagtttccatttccttgaagggatttgcccagaggattactttcacaacttctattgagataatactgctctaacagaaagagcaatgcatgaatctgtatatcagttccttaataaaagggaagatttttttagttcctaaaataccaatgaggtgaagaaaaacatgccacccaggtaaagttactctgtaatcacccgcattatctttttcaaggaatgtgggggaaatttatgtcagtcatcaggcaggtactagaagatgctaggggcctcacagacagcttgttcccggctgttaacatggagcagagcgttccctggggctgagcatgggagcccagcacttcttataggtaggtctttcctactataatattagatgcctacacttattgactttttcatttgctctttaaaatagatttcttctgctggttctgcttagttctaaggagtaaggtagaattttggtgccatacctaaatatcacgtctaaaatgacattggtagcacttttccaagaataaccagcatattgatcaagccattaataaagcctaattatttgctttaagaatgtttttggttgtttcaaactgagttttttccaaagtcataacaaaactaggagaggctgtagattcttaattattcattagattagggggaaaacgaattgctattacaaagaatatcatgcaaaaaataggttttaaaaaatgcattactactgagttttaaaaatgtatactaacattctccatatcaagaactgtttcatggatggtagattttagttatagcagtactggacttacactcagtcaaataattttaaattttctataattgggaatacatggtagctgaatataagcaaacatattactctatgaaataaatgcataagagtttgttatcacaaaaaacagcataacattatttttttgaaacacaaggctctgttttaacactttaccttgtttaatagtaacaaaacccctgaggaataggttgtattgccattttaaacactggagagcaaaggtccagagaggttaaatagctttctgcaggtcac

SEQ ID NO: 191561 - DNA, 272 bp, Homo sapiens
caaacacagattggagaggaaaacagtctatcaagaggagaatctctatctcctaccattaagtggcaaatgtaatagaaacagagcatagtcaaatgtaatctgacttgaaactgttctatcaacctcattacatagcaaaataaatctgttatttgcttagcttggcgggtcatacaaattactgattgcttggctttttctcagtatgagaaaacaatttatagcacagtagataaataaaataattttaggtccaagtgatttgcttc

SEQ ID NO: 191562 - DNA, 949 bp, Homo sapiens
aaatctgccaaatctgcctggttatgttcagcccatgagctaaaaatggttttcacatgtttaagtggttaaaacaattgagaggaaaataaggcttcgtggcacatgaaaatgatatgaaattcatattcgtgtccacaaataacactttgttggaacatagtcatgccttgttttttaatgcattgtctatgactgtttttgtgctaccatggcagagttgaatggctgtcatgtggcctgcaaagcctatctggctctttgtaggagaagtttgctgacccctgtagccactctgaaggctttatggttctatatttgtgataaaatatcaaatatagttcaggttaaaggtatttccaaagtactcagaagtgcttattttaaaaaatacattgaggatggtaattctggtttgcttatttgcctagtcttctgcatcttatgtttgagcaaatgatgacattttgtgaattatttgccaacttatcacattccctacctgaatgcattgtaaatgaatgatgtcaaaattaatgaagaattactgttttatcactttcagaaaaggaaacattagactcctttacatgatttcagtgaaaatatcctgattgttattttgaatttctactgtacagttttcttatgtgcaatcactgttttaaagaaagttcagtataaaatgaataaaacttggttaaaaatctctttacctccaaatgaaagagaaacagtccattataagtaagattcgtatctcaatgtagatagcacactaacatttaaaaaattgtattgcaaacacactgatgattacttaaacctatatttttggtttaagttggatttaaaattaaaattaaatttatctcttattttagtatgcttagcatttttggtgcatttttttgtttttatagtccataacattagagagtaggaagaa

SEQ ID NO: 191563 - DNA, 363 bp, Homo sapiens
tgtcacacacatgcacacacaatgcacgtgctcacagactcacacccacatgctcacacacatgcttgtgcaatgcacccacacgccagattgcacccacacccacccacttgcacattcacacccacatctgccctcacacactgtcactttctcacacacccacacaatgcaccagctcacactcacacacatgctcacacactcattcactaacatgcccccacacactggcacccacacgacacacccactcacatgcttgcacccacccacatgttcaaacccacactgcatctgcttacacattcacaacccactcacacacacctggtcacacccactcatgctcacacctcattc

SEQ ID NO: 191564 - DNA, 203 bp, Homo sapiens
tgtcacacacatgcacacacaatgcacgtgctcacagactcacacccacatgctcacacacatgcttgtgcaatgcacccacacgccagattgcacaagcaggtgtgtatatatgtaggtgtgtatatgtgtgtgtacatggggtgtgtgtgtatgtatggtgtgaatatgtgtctctataagtaggtgggtatatgtgtgta

SEQ ID NO: 191565 - DNA, 531 bp, Homo sapiens
ggaatttttctttcagtctgttgtcatgctcaggttgccttacaattaattcatagaaggaaaattattaagatatttaaagaattgagcagaaagaaagctgagagattacctattccagtgaacacatcttgcaggtgaggaaattgtgtcctacagaactctgaggtccataagaagagaaaaacaaagtgaaaaggaaaaacccccggaatctagaaatttcatagtaacttagttccaggggtatgttgggctgactctctaggttcatgagagctgactgtgcatatctcttcccaatttcaagattagtgacgtcatattggtagcttgaaatcagtcatggaggcaacacatacaccatggaagtcagcaaaaacaactataaattagagggttggttattaaacatttaccagcacaccagtgctcagttcacagagtcgagtatgatatttaatagacatactgtcagcactatctaagtacacatacaaatagtttaggcatgttttatttgctgctaaa

SEQ ID NO: 191566 - DNA, 380 bp, Homo sapiens
acttgttctctgcccacatgggctactgtgacatactgctgagtttaacaccgatgtgatgtaactcttcagcctcagccatgcctacctgggacatggtgatgcatctctgcacccatcacccaggtgatgtgactctgttttcctgtgtgctctctgctcaaaggggaagattgctacctgttgctgggtccatcacctagctgatgtgacttttctcatctttctaagttctgcctgcaagggagatgttgacattttaccttgcccaacaccgaggtgacattaacctgttggctttgtcgtactttcagaagacattgtgacatattgctgggcccagcagcaaggtgatgtgagtctcctgcctgggccctgtt

SEQ ID NO: 191567 - DNA, 191 bp, Homo sapiens
gggaataacattacactctcacctcaggagagttagaagccttgggcatattaccagtggcagaccctaatttctataaagagctgagactagggcatgatggtgagaagatggaaaaattgctctttctattcctcagggacttaagtctctctttgagaagactggttatttgttctgggaacaaaact

SEQ ID NO: 191568 - DNA, 299 bp, Homo sapiens
atgggatagcaggactgggagaacagaggtagagagccatgtctgcagagacttacatgcagctctcctcatgagagtctcctcatgagagccccataccaatactacctccacttctctgcaggcccctaattctacaagccctgggtatgttgatggggcagctgctcaggccacccagtcagatgcttctgggcctcctacagctaatttctatggggaatgggatcaagctgttattctctggtgaatcagctgtcctgctcagaaaagctgccacacaggtctttaaagcatga

SEQ ID NO: 191569 - DNA, 474 bp, Homo sapiens
  misc_feature (5)..(5): n is a, c, g, or t
  misc_feature (58)..(58): n is a, c, g, or t
ggatnccctttccctgatcgctctcgtcgggaggctgaggcagagaactgcttgaacntgttaggcagaggttgcagtgagccgagatcgcacgccactgtactccagcctgggcaacaggcgagactccgtctcaaaaaaacaaaacaaaacaaaacaagaaacaaaacaaaagcctggcatggtgtcacacgcctgtaatcccagctactcgggaggctgaggcagaagaatcacttgaacccaggaggcagaagttgcagtgatggttgcagatttctgatttgcttagaggtttttttttggtgtgcgaatatatttacagtcatcttcagtgatatgaaaatgaaaggtgtcatctttatctgagttgtctcaccaacttgtgtgccgaatttgaattgtctttttaattgtaatttgtaaaattgaattttacaagtcgataaacttgtcagtgagcgatcagagaaa

SEQ ID NO: 191570 - DNA, 231 bp, Homo sapiens
ggcttgttcaaccagatgactagctcactgggatacgggaccatagaaaccaagttaggagtatcagtgagtgtggggagtggggagagcatgaactcatgttaagtttggatggctttgagaatcccaggaggacaaggcaagttgtgagttgtataatcgagtttgaaacctgaggacacagagccttgcactggagatataaatttgtgagtcctctctgtgtggatg

SEQ ID NO: 191571 - DNA, 233 bp, Homo sapiens
tactcttctccctagaggaggcagttcccaaaggtggaggggagatgtctattactactttaagaactaatcggccgggcgaggtggttcacgcctgtaatcccagcactttgggaggccgaggtgggtggatcacctgaggtcaggagttaatgaccagcctggcaacacagcgagaccccgtctctacaaacattcgctgggcgggtggtgtatgcctgtaatcccagcta

SEQ ID NO: 191572 - DNA, 408 bp, Homo sapiens
aaacgacccgaagacacaaggaggccattcaaagtcacacagattatcagctgtggacatgaggcaggagccagggctaattttctattagaccactatctggagtctagggctcctacaaaatataagagccaagactttaaaaacttaaaacctcatgcaaacactctctcaaaaaagaattagcaagctagaaactactcccatggaaagagccgttgttttattttaacagaatatctaagagcagaaatatggaaaggcatgaaagtttaaaaaagtaaaaaacaaaaataactctcaaactcctacactccttgtttcccagttactcagacacaggtgggtcagtggctccaggctggctggggatgactctgtcaagtcttcgggtcgtagggagctctc

SEQ ID NO: 191573 - DNA, 282 bp, Homo sapiens
tgctgggattatacaggatcctactcgatccgctgatccagcaagttttaacttggccaaaatccaccaatcttaaactttgtgcacccttcccgctctgaagaacagtgagccagccggccagggtgcgggtatctcctacctaccctggggcccctcactgtatgttgactattgacaaatatttattgtgtgctggctgtgaataggacttgtatattgagcacttaggtgtcatgaaccatgctggatcagcggatcgagtgggaactctagggtcct

SEQ ID NO: 191574 - DNA, 372 bp, Homo sapiens
ctggggcccctcactgtatgttgactattgacaaatatttattgtgtgctggctgtgaataggacttgtatattgagcacttaggtgtcatgaaccatgctggatgttttgaccatattatcccctttaattctcacgacccaactctgtggggcacttttacagctgggaaactgagggttcaaggggttaggtatgggacttgcccaaggtcataaaggtatgtggtagccagagtccctgttcggcacagacctgttctttgctgtcctggccagtgttccaggccttggggacatagctggggctgaagcagggctgtttctgccctcaggcagtttacatcctggcagaggggagagctgggcaaca

SEQ ID NO: 191575 - DNA, 964 bp, Homo sapiens
ggcaatatctccttcctcttccctccagtgaaccctgcttatgtaggtgaaagtggtcctgtccatgcttatggaaacccaccattgtctgaatgtgattggcacaagtcaccccaaggtaagtgatatggtttggctctgtgtccccacccaactctcatttcaaattgtaatccccatgtgtcgggggagagacctggtgggaggtgattggatcatgggggtggtttcccccatgctgttctcatgatattgagggagttcccttgaaatctgatggtttaaaagtgacagcttcccctgcacccactctctctcctgcccccatgtaagatgtgcccttctttcccctatgccttccaccacgtttgtaagtttcctgagaaatgccccccagccatgaggaactgtaagacaattaaacctcttttgtctataaattatgcagtctcaggcagtatttttatagcagtgtgaaaacagactaatacagtaagacttaaaggacagtgaccaaaaagtcaaccctggagaaggaacatgtccaagacaatccacccattgccatttcctttgacctccagtgtggttactgatgcagaacctgcttaacatatcataatggagttttcttttagatgtatagtaggtggtcttctggggatcagggtgtcttcattaggaatcttctggttgcaagtgacagaaacccaactcaaacaggcattagcccagggggaattcattggctcatgtggtagaagcgtatgggggaaacttaaagaaatgaaagtagaagtattagtaccttccagcacctagtacagtgcctggcacgtagtaggtattttagggatatttgttagattaatttgttgaatgagtacagaaatcaggacctcagtctgaggtcagggaactcaatgtcacctggactctggtttcccatccatttctcatcttt

SEQ ID NO: 191576 - DNA, 852 bp, Homo sapiens
ttgccaagcacttggagagaacctgattattcagatgctgagaatggtcatgattatggctcttctgagaccccaaagatgaccaggggggtgctcagcagaacatcttcaatccagccctcatttcgtcacaggagtgatgaccccgtgggcagtctttggggagagaatgattaccctgaaggcattgaaatggcatccatggagatggcaaactcatatggccactctctgccaggtgctcctggaagtggctatgtgaaccctgcttatgtaggtgaaagtggtcctgtccatgcttatggaaacccaccattgtctgaatgtgattggcacaagtcaccccaaggacagaagttaatcgcatcccttatacccatgacatccagagacagaattaaagccatcaggaaccagccaaggaccatggaagagaaaaggaaccttaggaaaatagttgacaaagaaaaaagcaaacagacccatcgtatccttcagctcaattgctgtattcagtgtctgaactccatttcccgggcttatcggagatccaagaacagcctgtcggaaattctgaattccatcagcctgtggcagaagacgctgaagatcattggcaggcaagtttggaaccagcgtcctctcctatttcaactttctgagatggcttttgaagttcaacattttctcattcatcctgaacttcagcttcatcataatccctcagtttaccgtggccaaaaagaacaccctccagttcactgggctggagtttttcactggggtgggttattttagggacacagtgatgtactatggcttttacaccaattccaccatccagcacgggaa

SEQ ID NO: 191577 - DNA, 1040 bp, Homo sapiens
ctcctgagaaaactcctcaggggttagatgcaggagttatgttgtgatttgtgtaggggtggctttggtgagctcatcctggcattttaaaaataatgtgaatggtgtatccctttgtgatcatcatcactttttccctgcgagtcccaatcaatgcgggtgtgactgctgtatgaagtctcaggaagcccaccccagtggagaagaaggcttgcaggaggcaggagatgctgtccgatgaccacgtgaatgaaatcatcatacaggttgagaatgtttcctctggggtccaaagccacccatcctcaaatcagatttttcaagaaaaggtgctgctagactcaagcatcaacatggttttgtcaatatctgacattgatgtgatagactctcagacagtcagcaaaaggaatgaccaaaagggtaaccaggtgctgcggttttcaacatctttgaatgagtcgatgtctcagacccttcatagcctagaatgcatgggcatagacactcctggttcttcacatgaaactgttcaaggacagaagttaatcgcatcccttatacccatgacatccagagacagaattaaagccatcaggaaccagccaaggaccatggaagagaaaaggaaccttaggaaaatagttgacaaagaaaaaagcaaacagacccatcgtatccttcagctcaattgctgtattcagtgtctgaactccatttcccgggcttatcggagatccaagaacagcctgtcggaaattctgaattccatcagcctgtggcagaagacgctgaagatcattggcaggcaagtttggaaccagcgtcctctcctatttcaactttctgagatggcttttgaagttcaacattttctcattcatcctgaacttcagcttcatcataatccctcagtttaccgtggccaaaaagaacaccctccagttcactgggctggagtttttcactggggtgggttattttagggacacagtgatgtactatggcttttacaccaattccaccatccagcacgggaa

SEQ ID NO: 191578 - DNA, 446 bp, Homo sapiens
atccatcattttggattttagggtgctcagcagaacatcttcaatccagccctcatttcgtcacaggagtgatgaccccgtgggcagtctttggggagagaatgattaccctgaaggcattgaaatggcatccatggagatggcaaactcatatggccactctctgccaggtgctcctggaagtggctatggtaagcatttgttaagccaggatcatatcctgggaaaaaactgaaatcactggatttaggggtgcaatcattaaggagacttggcaataggagaattggtgtatccttccaatctcagagacccttgtttttacatacaaaagttgagaattcagtgtttagagaagccaagttaattgtcatcaattataaaaaaaatgctaggtaagagttgtggaaaatggggacctgtgcactctgttcctaccagagttg

SEQ ID NO: 191579 - DNA, 769 bp, Homo sapiens
ctcctgagaaaactcctcaggggttagatgcaggagttatgttgtgatttgtgtaggggtggctttggtgagctcatcctggcattttaaaaataatgtgaatggtgtatccctttgtgatcatcatcactttttccctgcgagtcccaatcaatgcgggtgtgactgctgtatgaagtctcaggaagcccaccccagtggagaagaaggcttgcaggaggcaggagatgctgtccgatgaccacgtgaatgaaatcatcatacaggacagaagttaatcgcatcccttatacccatgacatccagagacagaattaaagccatcaggaaccagccaaggaccatggaagagaaaaggaaccttaggaaaatagttgacaaagaaaaaagcaaacagacccatcgtatccttcagctcaattgctgtattcagtgtctgaactccatttcccgggcttatcggagatccaagaacagcctgtcggaaattctgaattccatcagcctgtggcagaagacgctgaagatcattggcaggcaagtttggaaccagcgtcctctcctatttcaactttctgagatggcttttgaagttcaacattttctcattcatcctgaacttcagcttcatcataatccctcagtttaccgtggccaaaaagaacaccctccagttcactgggctggagtttttcactggggtgggttattttagggacacagtgatgtactatggcttttacaccaattccaccatccagcacgggaa

SEQ ID NO: 191580 - DNA, 411 bp, Homo sapiens
agaaagcaggtggcatggccgcagccgcacctccgggaaaggagcagccacgggcgctgacggaggaaacagccaggtccaccttgggatgaagggggttgcgtaagctttcctacttgagtcacaatacatttaacgccattgtcaattttttaacaagataaaaatgggtcacgtacagaaatacagatgctgctcaggtacaaaacatcaaacactgaaagttggcctggccagatgcgcggagggaccccacggccatatgacgggctctggccttgcctcctcgatcctgcctcacccgtgcccaggtgcctgaactccgcagaagagaggagcaccagcacgtgggggaggcacccagtctttggtgcttggcctctgctgcgaagccagaggcacgtggctggt

SEQ ID NO: 191581 - DNA, 398 bp, Homo sapiens
gatgagattgtcccagaccaccccctttaactttgcagcctccatcccatgcctgagctccttctttgatgttcttcacgctatttacattttattgatttcatttctcccctcactgtcaaaaaagtaagtggtgtgagggcagggacttttgtctgtttcatttacggctgtatgcactatgcctggtttaaaatctgtcagtcagtacaaatttggtggacagatgacagaatgcgttggggagttgcttccgacaacacgtgagcagctgatgcccaaggccccttctgacagcccctgatggctcgtggccgccagccagcacacagaccatgttctgatctggggagtaaaacaacagcagtccacatcccagagacctgctcccccctgct

SEQ ID NO: 191582 - DNA, 472 bp, Homo sapiens
tgaggcctccatgagatgcaagttttactcttaggatgacaaagcagagaaagagaaagagcttgggccacagggtgaccctggggaacagctgtgaccctgcgttcctctgtccccacttcctcttatgtgagaacagtcagtccccatgtggtaaagctactctagacaatgttctagacccggtctctgtcactgaacgctatctctaacaaagtttgtgaaaccacaaatgtaactattaatagaatcataaataagatacatacttgccaaactacttcagaaggaaaagccagaaaaatgtctaacagcagacaacaaaagaaatatctgatgatgataacaataaaatgataataagtccacatgtatcatgcatgacaataagcagaggataaagattgtttttaagtaaaatcaaatctctctatcacctggttccaagtcactcctcaataaataaccaaca

SEQ ID NO: 191583 - DNA, 290 bp, Homo sapiens
catgcaaaagaatctttgtctccattccttccaaattcatttgaaccagctcaaaacagttgagacccagttaaaatttttgattaagtggcatggcctgcacattatttagtagactgtttaccttttgcagaactgtataatttgagaatgaaactggagcctcccaatctcattgtcatcaaagtagagtttaagttgttggttgtctgcagttgtggctaacagtatggagattagtatatactgtatgttctccttcatatgcaggtaatgtgtagaaagattga

SEQ ID NO: 191584 - DNA, 401 bp, Homo sapiens
gtggcatcatcaccctaaatatattatgaaattgataacattcagatttcttctttactgtatattaatgtgattattcatgcatactcttcctttctgtcagtctcttgggtataaggctgttgctattttctaaatagttaaataggtttgagtgtaagttagctaattcttaaaatgtaccttaaccaagccatcatatttgtcttctcaaatatttgtacatgcagattttacatatttagtttttgactttttgcagatttgagataaggctaatacttatacattagcacttcagattgaaagcatgatcgtatttagcttttaaaagagattaccttatttgatgctacttacataataaatttagggttgatggggatcctctgagacagcct

SEQ ID NO: 191585 - DNA, 307 bp, Homo sapiens
tttagataaattgagaagcgctagtttagacatcgtaaaactagggtgttttttgtttttgtttttttactgcagtgcttctctgagcattgtggctctctagggggaaaagtaggggagatggaaaagggctacttaaatttctttaaccacagaactttctttttccctaggacaaccattgtgagaacttagtgttccatcaaaggcagtttgggaaatgctacaatagatgacctcttcagatttctttcctcctgaacatttcaccattccccagctagaagaaaccgagcagatagccagg

SEQ ID NO: 191586 - DNA, 377 bp, Homo sapiens
ggtcccgcgcgtccgggaggtcaccatattgatgccgaacttagtgcggacacccgatcggtgtagcgcactacagccctaggaattgcctgggcttcaagcgatatcccattttacagacattgaaatcaaggttcagaaacgttaatgacctgattaagcaacacacgcttggtacctcaaccctacttaggttttatgccccacaccttggtgacagatgagcaggggtaggtcttcccaaccaggccctccttcttgaatttggttgggctggggtttggcagggcatggagcaggggaggaactgggcacaccagttgaaacacaccctggattaaggagggtgacttgaaggcatttccattggtttggcc

SEQ ID NO: 191587 - DNA, 891 bp, Homo sapiens
ctactagtttagtttatatttataaagtaaataaaatacaatctacatataaggaaagcttaattttgttttcattttttagataaaaatataaataggcatgctgatagtttcctcccatgccctaaaggactggcagtatatgacataaacacaataatcttgcacacttcctttaggccataggctccctgctctcccaactccaagtcattgatgcaaatagcagaagttgatggtgaactgaaaatacacacctgaatccctgtaacataattcagttttcactcaggaagcaatgccaccaaagtacagtggagactgtgctggagagcagcgttagaggtagattgtctatattacggggcagcagtggagatgtggaagagggaattcactaagcaaaggaagagaagaagggctacttccagagggcctgtataggggccttagaaggtctggaaattagaaccaggaggttgggtgttgggggaggtgagagtacagagtgacaataagacacatgcaggccatgcagctcttggaatgtcttcatgtcatggaagtgagcatgtccagtggaaggttacagagatgattctgaagcttgggagagacctaaggtctggagttcaagaccagcctggccaacatggtgaaaccccgtctctactaaaaatacaaaaaatagccatgcatggcagtggatgcctgtaatcccagctactcaggaggctgaggcaggagaacctcttgaatccgggaggtggaggttgcagtgagccaagatcgtaccactgaactccagcctgggtaacagggtgagactccatctcaaaaatatatatatgtcagagaagaaaaaaacagcgttccaaaatcaatgttaat

SEQ ID NO: 191588 - DNA, 223 bp, Homo sapiens
gtttctgcttttgtggagactcactctacaaaaaactcactgttgcccaggctagtctcaaactcctgggcttaagcagttctcctacctcagctctccaaagtgttgggatttcaggagtgagccactgtgcctagctggtacctttctttttacagaggagtaacagccttagaaactgaataactcataatatataattggatctgcactcaggtgtgtc

SEQ ID NO: 191589 - DNA, 440 bp, Homo sapiens
cagaattctgcttgtgctgatgagaatgtgtattctgcagctattagaaaaaatgttctataaatgtctgctagttccattaggtctagagtgtagtttactgtttctttttgtcctaatgacatgtacattgctgaaaatgggacactgcagtcgccttttattatactgcagtctacctctccctttaaaccaattaatatatgttttatatgtttaattactccaataatggttgcatatatatttacagttgctaattcctcttggtaaattggccactttatccttacattgatgttgtctctaatttttagtttttgacttgaagcctaatttatctaagcatagtagctacttctgagatttttgatttcctattgcatgaaatatcttttttcaaccattcactttcagtctatgtgtgtccttatagatgg

SEQ ID NO: 191590 - DNA, 223 bp, Homo sapiens
catgtattaaatattagatctacatgtaaatctaaaactacagaaattccagaaaaaaacatacaagaaaatctttgtgaactcgggttaggcaaagattccttagacacaacaaaagctataaaagctaaaaagagctctccctctccctctcactctcaccacggcccacggtctccctcttcctctctttccacggtctccctctatggtagaaccgact

SEQ ID NO: 191591 - DNA, 495 bp, Homo sapiens
gagaatcgcttgaacctggaaggcagaggttgcagccagccgagatcgcgccattgcactccaccctgggcaacagagcaatactccatctcaaaaataaataaataaataaagaagccaggagagtggttacctctggaaggagacacatggaggcttctggggttgaggaaacgttctgtctcttgatctgggaatggacttcgtgaaaaggcatcagacctacactgggtacatttctaggcagatgttctaatccaataaaatgtacatagaagtagccccagccgggcgcagtggctcatgcctgtaatcccagcactttgggaggccgaggcgggtggatcacaaggtcaggagatcgagaccatcctggctaacatggtgaaactccgtctctactaaaaatacacacacatacacactcacaaaaattagccgggcatggtggcgcgcctgtagtcccagctactcgggaggctgaggcaggagaat

SEQ ID NO: 191592 - DNA, 341 bp, Homo sapiens
tcagccttccaaatagctgggaccactggtctgcgctaccacgcccggcaaatttttaaattttttactagagatgaggtttccctatgttgcccaggctggtcttgaacttctgggcccaagtgatccttgaactttggtctcccaaaatgctgggattatagatgtgagccacctcgcctggcctctggttctgttattatcccaatttcacagactggggatactgaaactgtgcagcagaaagattattaacttgggaggcagataggcttagactcaaaccctaatcttccatttacttaccaactgtgctatcaattcctttatgaactgaagat

SEQ ID NO: 191593 - DNA, 358 bp, Homo sapiens
cccactcttctgaggcttgctgtctttgcgcagcacgaagcatgtggctctcttccacgctgatgcctgtggtgccagttcatctcctctgggtgaacacggcgcaactctgccagtgtgcactgggtgcaccgaggtgccggtggttagggatattcagtcctctcctgccatgcacgtgcacattagacagagtgcatacctaggagtgcaggagctgagtcacagagcagcgtctcttcaaactggacttgaatgtgctgtactgttttccaaagtggctgcacatggccaggcgtggtggctcatgcctgtaatcccaacactttgagaggctgaggtgggtggatcacttgag

SEQ ID NO: 191594 - DNA, 337 bp, Homo sapiens
catcacccaacacataaggcacagaacaatgtgtactttttaattatcatatacataaatgcatactgttttcatgcagtatacataatgtttatgtatatagtgtatacatgaatgtattcaggtattttgagtgtctgtatgtggcatgcaccgttctaggtgctgaatattccataggtaaaaagggttatttagcccacatttttttcgttgtatgaagagaaatggaaaaaaccaaacttacatagttcggtttgagcaagttaaatgcatggatgatgtaatgtgggagcactttccacttttcgttgatgtttgtgttgggcgataaata

SEQ ID NO: 191595 - DNA, 659 bp, Homo sapiens
gataatctccaggcattatctgcattaactatactagagattatcctaccaagtgtcaacactgaaagaaaacattggttagaagcaggatcactacaggaaataaaaggagagataaagcagaaagcaagttaaactgattcacattacgcatacaccatgaaacaaaagtattttgagtacattacagatccacttgcagaatcagaacagatgaggtccagtcagagtgaaaactcttggtgagatatcagcagttgtttacatgacaaaaaggaatgagtatgacaatttgaggttaaaaaggaattccaaatacattaacttcatatctgttttgttttttcgtttttgttttttgcttttgagacagagtcccaggctgaagtgcagtggcgcaatctcggctcactgcgacctccacctcctgggttcaagtaattctcttgcctcagcctcctgagcagctgggattacaggtgcatgtcactgcacccgactgatttttgaattttagtagaaacaaggtttcgccatgttggccaggctggtctcgaactcttgacctcaagtgatctgcccacctcagccttccaaagtgctgggattacaggcgtaagtcactgcactcagttaacttcatatctcagataaacaca

SEQ ID NO: 191596 - DNA, 309 bp, Homo sapiens
gcacaacaccacccatggagagagagggcagggccggacggtgcagctaagagctgtaatccttacagagaaggcggctgccgttagtaagctcattaaccatggagtcacatatttgagccttatgtccccctaatcagatttaaattccacatgaacactctggatgtgattcaaagaggtgactatgatggaaacttaacttaggatgtccaagcttctggtcctttccagactgagtttatgaaaacaggttgagcataactagaaggcaaatcatttaaaatgagggaacaacgttgacctagt

SEQ ID NO: 191597 - DNA, 557 bp, Homo sapiens
aactcttcagccaagccatatctaacagaactatcttcaacttttcagagtcctcctttgtcacccagcctgaagtgcagtggtgcaatctcggctcactgcaacccctgcctcctaggttcaagcaatcctcctgcctcagcctcctgagcagttgggactacaggagcatgccaccatgctgagctaattttttgtagaagcagggcttcaccatgttgcccagagtggcctcaagctttccttctgcctcagcctcccaaagtgctaggattacagacagggcctcactctgttgcccaggctggagtgcagtgatagaattatggctcactggagcctcaatctcctgggcacaaacaatcctcccacctgagcctgtcaagcagttgggagtacaggtgttggtgaggatgcagagaaaagggaaactcatacactgctgatgggaatgcaaaccagtacaacttctatggaaaacgatatggagactctcaaagaactaaaagcagaaccatcattccgtccagcaatcccaccactggtcatctacccaa

SEQ ID NO: 191598 - DNA, 537 bp, Homo sapiens
aactcttcagccaagccatatctaacagaactatcttcaacttttcagagtcctcctttgtcacccagcctgaagtgcagtggtgcaatctcggctcactgcaacccctgcctcctaggttcaagcaatcctcctgcctcagcctcctgagcagttgggactacaggagcatgccaccatgctgagctaattttttgtagaagcagggcttcaccatgttgcccagagtggcctcaagctttccttctgcctcagcctcccaaagtgctaggattacaggtgtgagccactgcgcccttttaaatgtaaatggttatttcttgacgttccctctgacccctgctttttgctgtatcccattggttctggtatgttgttttcatttttatttatatctaagtattctctaacttcccttgtgatatctcctttgatctattcattgtttaagagtgtttttaaatttcccatattggtgaattttcacaaatttgttatttgtgaataaaaatagttttccttttgttattgattttt

SEQ ID NO: 191599 - DNA, 254 bp, Homo sapiens
ctgttcttgagtatcccggtcattgctacacctgtgtgtatgtatatattattatgtgtgcatatatatgcatgtgtatgtgcgtatatttgtattaactgtagaagataaagctagacactagtaaaagtggtaaagcagattttaataatatactattgtaatagggaagaaggtacctcgtgaacggaactgaactttgtgcagaagtgactaggtgtttaagagggaggaggagggaatgtgaaggggat

SEQ ID NO: 191600 - DNA, 668 bp, Homo sapiens
  misc_feature (627)..(627): n is a, c, g, or t
ggcaaaacattcctgttcttggaaagtgaagtacacatctttgttaatccgtatgcttcttctcccgataatacttaaagccatcatgcagggtaggccaaaataaagaaagcacacaacgctgcttatgcctctttttttgagcaaaaatttgttgttactgggcctcagttatatcaaagcaggagctaatgtgcaccaatgtcttacacccaatggtctgaacacgtgtaatagtctcacctgacaatcatcggacaatcaaaacctacttccccagcatcatgcttccccagacggcaattttcctccataaaggaggtgagaaaagaaagaaaagttggaacagtaaaggaaacagaaaaaatgggataaaatgatgatcagctgaggattctctccttgaatccatcctgaggaagcaaaggcctctggactgcgttcctttgaaaggtgatcccgcgaccagctatcagccccagcagtttcaggatgaagactcagggaacagagcccacacaccgcccaatacaagatgtcaacttcaagccaggctgagggcaccgcaagtgcccatccctgtcaagctagacacagcagctagagtatggtactgggtctatcacncctgagtgaggtccccctgagtgagggctggggatcctcta

SEQ ID NO: 191601 - DNA, 174 bp, Homo sapiens
ggaaaaaactctgtgtacctttgtcataaatagaaggaaactgtaaaaacaaacacataaaaaaaacaaaacaacttgattcagttccagctggatataacttcctgtggaagctctgagctggaggcttattctctttttgttaaaaaaggagatagatgagtataaaggagg

SEQ ID NO: 191602 - DNA, 520 bp, Homo sapiens
tcacttcatacacatgcattatgtaataagtgcacttatgttggttcctcatttgtgcatactagagtgggtgttactgggattgtaaacaaaaaagtaaattcagatgcagaaattttattgtttttctctgtcatctagatgattgagaatatgcttgtgttggtttttttaaataggttattataagaattaaaatgcaaaacttaaaattcctagagggaactcagactcctttccctaccactgtgatagtggacagcaacttgagaaatgctcttagggtaagcagccaattgagtcatttaaaaaccatatagaatgtcctccaaagagaagaccattttgcccttggagggcaggtaaacaggagtctggaaacaggaaccactttacctttgttgctgtcttctgttagtcctatctcctgaagctgtggacatgtgaaccctggtttcctgtgctgcagtgttgtgcagctatatccccaagattgggacctggtgttctaaaaaaaaaa

SEQ ID NO: 191603 - DNA, 177 bp, Homo sapiens
ttcttttgttttttccctgcaaaattgtaagatttaacaaggcccaaggtgtaagttaacaagggagcagatatatattaagagccttaactaattggacaataaatgtgctaagttttatgagatgacattaaatgtcatcttatttattcttaatcctcaagttaatacatgaaa

SEQ ID NO: 191604 - DNA, 280 bp, Homo sapiens
tgactagaggatccccctcccaacggatgagcattgatacacaacatcctggtagaatacccctcctctaccctccccaccacacaatccacaacatcctggtagaatacccctcctctaccctccccaccacacaattcctcatccttgttgaataaatgccttggaccacaggtgccaggaattctcccacgcatctctccggcctcccatctcagagacctaccatcaccagtgtggggcccctctctgccagttcctgctggtggccctatgtgtt

SEQ ID NO: 191605 - DNA, 452 bp, Homo sapiens
tgcttcttggtttctacatccagagaaataatacttctctaaaaatcaattgtccccagcaacccacctacacagttcttggaaaatatgggttaaacattctgccttacaaagaaaacaaggaacaaagagggtgaaggaaattcatcaccatggtcctgcacttcacattattcacaccaaccatttttccagtcaccgagttcaaatgaccctgtcccttggggctgcaaaactatttgtaccaacacttgccattaaggaagcttcacatgctttaataaacgggattactcagtaccaagagatgctaaatggcttcaagagactggaggttaggggaactgaaaatggcatggaaggaagatgccagaataatcaatttctgacacaggagaaggaatggctggatgccagtctgctgcccagaacaccgtcggagggactgtgat

SEQ ID NO: 191606 - DNA, 220 bp, Homo sapiens
aaattaaaaacccagggataagaagaaggggagagaattggaaagcccctggttagctttaagggcctctcagtgcagcagaacccatgctggctctattcataactttgctctctggatcaatattctgaaagttggtacattcttttcatttgtgtctttcacagagggcagtaaaatttagctctaattatatttagggcatctggattctagtcag

SEQ ID NO: 191607 - DNA, 444 bp, Homo sapiens
atgcattggtggaaaactaatcatcttttcttcactaagtagacagattaatgaagttaagaatacaaattttatatgaaaatttcaagaagatttcaggtattacctcttcacttactaattttttgagcttggacaagttttgtttttttaacctttttaagcctaaattttccagtctttaaaactttattactaataatatccgatatacaaggtttggaggattgcataggtaatgaagataaagcagtaagtgcagtacttactcaataaatgtcagctgttaacattattagtattatctaatacaaattatttgaaatgtcatgacatgaataggaggaggagatgacaacatagaaaagtacacttcaaataatgtgaagttgagaaaaaggcagaatgtaagtctgtgtattattatgtttgtttgcaactaca

SEQ ID NO: 191608 - DNA, 522 bp, Homo sapiens
  misc_feature (5)..(5): n is a, c, g, or t
acgcnttaggatccccttcgacgggtctggaacggaaagcatttttgttttcccttgagatgctattctttctaacatcaaatgcaaactgccattatatactatacatcttctaaaaattgaaaatcataatatccatacttaaattttcaactttccagttttccaattacaagcaaagtaccaaattcatacctgctcagtgttgcaaaatgattttaaaatgtaatgatgtttttgtttgattttgtttcatagtattttcctctaccaatgtacaaaacactcccttgtaacaaataaactaagagaatcgcattcccagggccttgggaaataactttaagggtgtctctgttcacttacatcatgaacccagctcttatgctcctaaagttacaaatggccactcttcgttttaatagcagatttaaagaaacctaatgttagttcaacacgggtaaacagtctctcacacagtataaataaagaattctttgagttgtaaatagtagttgctca

SEQ ID NO: 191609 - DNA, 600 bp, Homo sapiens
atggtcgatctctgaggatccccccaggtagacctaacccaggtagaagaaaagtagctagtagtgagtttatcctaagaagaaaaaggaatgtttaacattttctggaacggaaagcatttttgttttcccttgagatgctattctttctaacatcaaatgcaaactgccattatatactatacatcttctaaaaattgaaaatcataatatccatacttaaattttcaactttccagttttccaattacaagcaaagtaccaaattcatacctgctcagtgttgcaaaatgattttaaaatgtaatgatgtttttgtttgattttgtttcatagtattttcctctaccaatgtacaaaacactcccttgtaacaaataaactaagagaatcgcattcccagggccttgggaaataactttaagggtgtctctgttcacttacatcatgaacccagctcttatgctcctaaagttacaaatggccactcttcgttttaatagcagatttaaagaaacctaatgttagttcaacacgggtaaacagtctctcacacagtataaataaagaattctttgagttgtaaatagtagttgctca

SEQ ID NO: 191610 - DNA, 215 bp, Homo sapiens
ggagttgctgaccaaagctttcccactagaggaaaaccatatcaagtgtaatagtccagactttaatagcctcactatgctgagcctgtggctggaagcagtgttggggtgtcatgacctcagcatgaaagtggagcagctggaggctgtttgccaactatgcttctcacagtggattcccttaaagaggattcgagcaccatcccttcatagct

SEQ ID NO: 191611 - DNA, 203 bp, Homo sapiens
tcttccatggttcgctactattgcctacttagtgcagaagagaaagtcctgttcaaagaatttgctaaacctatcagacaagactttttacatctctaatttacccgagatagcatcaactctcactattcataaacaaatcagactcctagccttttatgaaaaaaacattttttaacatttttatttcaaaatactgccca

SEQ ID NO: 191612 - DNA, 659 bp, Homo sapiens
aaaatgtcccaataaactatttttaaacctaaaaaaaggagttcccttaatttgcttatagttgatgttatgccctggctggttccagtctgcatacccctcctcactccatagttacggcctcttgaaaagtcttgcggtctcagtcttatcaacttttcttgaacagatattgccctttcttagcaggtttgatggagctgcaatccactaccctttagctcattggtgggttgtgcctgctgcaagtttgggttttattttatgacttcaaataactagacttctcttttatattaaaagctcttggccccacattctgaaaagtagatctttctactctatctcagctgttgctttaggatcctacatgaaatgtaggatgagactttatctgacttaaagtttctctcccaaggattgaaattcagcctctgaaattcagtctgcttcccgggactttgattgatgctcctgggcttttctgtgacatgagtcttcctcctcatgcttcaacaaccctctcttgtctgcttttggacttctgtctctatttctagaaggttgtcctttatttgttaccatacttgcaagcagtgtgttttctgactgggctccctgtcttgtcgcctttctgacctcgagggctggtctagttc

SEQ ID NO: 191613 - DNA, 637 bp, Homo sapiens
acctgaagggcgtgtctccagggtcaccagctggaggggagaggcatactatttcaaacctggccatgcaaaatgtagatttgctttatggaatggagacttttgaaaaactgaacctcttgtccaatttcccaacggaaatggcaaccaaatgccctccattcctttatgctctcacttcaagaaggaatctgaaggttttccattagccttagtggctgcaaactgaacagcatgctctatcagctcacctagcattggcgttttctataagctgtgcaaaattgctctccacagttactttgttaaacagttacattgttaaacaattaaacagttacatacatactttgttgaattgttactgctactgtaacaatgcaaaagaagtgatggttatactgctctgctccctcctgcctcactgcagagaggaatattggaatgattaaatgttggggtgaaaacaacattggcttttcagaagcctcaaaaaagtcttggaggccagacacagttgctcatgcctgtaatcccaacttctggaaagccaagatgggaagattgcttgaggccagagtttgagacaacatagtgagacctcatctctagggcgaaaaaagtgaccggacatggt

SEQ ID NO: 191614 - DNA, 367 bp, Homo sapiens
ggacttttttcataagggaattaataccattgatgaaggttttgtcctcatgacctaattacctcccaaaggcctcactcctaacaccatcaacttgggtgttaggatttccacatgtgagtttcagggggacacagacattcagaccatagcaagatgtgtgttttaatatgaaactcaccctgtgctggccttgaaattttgcagtgtgggtgttgggagggtagactgagtttttgggttgataaagctttgggggtttgtttagttcagctattagggtagactccccttgcttgatgccttttaaaattcttgctcagaatattgcaaaacagctggctcaactcattccacctgactttct

SEQ ID NO: 191615 - DNA, 699 bp, Homo sapiens
tacaatggggaaaggacagcctcttcagtaaatggtgtagggaaagtgtatatccacatagtagaagaatcaaatcagaccttgtctcataccatatacagaaaagaactcaaaatgaattaaagacattagaccagaaactgtaaaactactagaataaaacatagggaaaatgctccacaacattggtctgtgcaaagatttcataaatatgacctccaaaagcacagacaactaaaacaaaaattttaatttaaaatgggattgcatcaaactaaaaagttaactacacagcaaaggaaacaattgagtaaagcaacaacccacaaactgggataaaatatttgcaaatcacatatgaaataatgagctaatattcaaaatatatggaactccaacaattcaatagcaagaaaaccaagaacccaatttaaaaatgggcaagggacctaaacatacatttctcaaaagaaaacatacaaatggtcaatggacatatgaaaaactgttcattatcacttgcaaattaaaaccacaatgaagtatcacctcatacctgttagcatggctattaccaaaaacaaaaaagatgttaagtgttggtgaggttgtgtacaaaagggaatccttgtgcagttggtgaagaatgtcattaatatagccattatggaaaacagtacaggttcctcaaaaaactaa

SEQ ID NO: 191616 - DNA, 761 bp, Homo sapiens
tccgccttggacttgcaagtgctgggattacaggcgtgagccactgtgcctggcgtggatatgtggtgttattgtgattataaattgtagatggagttccttagtttgttaaagtcttggtcagcgttgtaaaaacatcaggccagttgtggtggctcaggcctgtcagcccagcactttgggaggccgaggctggtgaatgctcgaactcctgaccgcaagagatctgcccacctcggcctcccacggcctcgctgggattacaggcatgagccactgtgcctggcctaaattttaaatataagtaatgtactccccagtcttacagaaattggacgactatagaaaacaaacatcaaaaaaagtgtagaatgtgagtatttttagtttaataagtgtattttataaactatttatttgtattgacttctcggataacaacctgttataaaatctttatccccataaacataattttcctaaaatagctataatattgtgattaatgtttatgctaaagtgactattatggaattaacagacttcagttgcagtttctaaatcttgctttggttgtgatgattatataccactgaagaacattcaggattattttggcttgtttttacccttatcactcaagggctaagctgtttaaaatgcaacataaacatttgacccagttgaatgctgggatacttggaaaaataaacctgttactgtttctgtactaaaggcttatcttttaaagatatgtggtg

SEQ ID NO: 191617 - DNA, 589 bp, Homo sapiens
ggaacaatatttacttagcatgatttttaaagatctaccccaaaacagtaatggaacattagatttattcttatcatatctaatatttacctgtttctagattggagtagaaattgggagggaatttgtaggcataaaaggaaatgaaaaaatatctaaggtaaaaataaatgcagttgagtgcataaatcaaatgaatgcataaattttcatggcagaacactgaaaacaaaaataaaaagccctcacaaacttgaaaaaaatctaaatgtctataaatagagatataataaattatcccattttataatattctccagactgcaaaatattttaagataatttttgatgtttataatagttggaggaagacatatctgcatgtaaaatccaaattgtatgtgcgttattttaagtgtgtctgtgtgtaggaaaaatatataaacaaaatgacgcataaaatgttaccacaattatctcttggtcatgggaatgcaaattgtatgtgtgtgatttttaagtgtgtctgtgtgtaggacaaatatataaacaaactaacgtatgttactatgattatctcttggttttt

SEQ ID NO: 191618 - DNA, 120 bp, Homo sapiens
gtgttttaagacagaaagtagaacagatagatttaaaaagggaattcagtaatggctcaaatctaccaagggaataatctcaattatgctgccctcaggtagaggaaaaggtggtagatg

SEQ ID NO: 191619 - DNA, 348 bp, Homo sapiens
agctaatgaaaaagaaaacaggacaactgggtccccttagtagaggtccatatcagataggccaggaagtaaaaatgtaaaccatagttcaccattttaatgtaggggacaacaacatggaaagtgaaatttagaactgattttaaaactataggctgtatcttgaaagtgatcaaatttaactggaaaattatttggatattccctagtggttaggaataaataaataaatacataatttggtcatggtgctttcctctggaagaagttaagtaaaacttccatttatttaatagttaaaggttttctcttttttttttttttttttggagacagagtctcattctg

SEQ ID NO: 191620 - DNA, 198 bp, Homo sapiens
ggtacagtaaaaatacagtatgatcttaggggaccgttgtacttcggtgaccaaaacgttgtcatgtgacatacgcagtggtgacaccctttacgagcaccgtctctagaggtttaattgctttgtcctttctaaatgaaacataaatggatgtttggaaatcctaaaggcggtgtctacatcatcctatccagcatc

SEQ ID NO: 191621 - DNA, 320 bp, Homo sapiens
cccaaaaggttatcactcccatcaccaatacacagaaaatggaggaaaggctgtttccagttcttggcctttaaacaactctaaatgtcagtactcatagtggcatattacaaagtaataaacagtgcacacttgggggcaaactacatattgagctaatgaagagctcactgtgattaagattagatcaaacaacagcagaacataggcaaattttgtctgaattctgtagtgaatgtacatgctgcaataacattaaaaaagcatggcagcctattccaaaccaaagagaacagttttgggcaaagagtgggtctttg

SEQ ID NO: 191622 - DNA, 368 bp, Homo sapiens
cgtaggagtagaagggccctttccttcacaaccactgctttcagccagtgctggtcaacagaagtagggtacagagaagtgaatggctgcttgaatatcactgtggtctgggtggtccaattataaccagacacacagtgagcccagacatggattaatctggtttggggtagatcccagatatataaggtactgtaggtcagcggtggtgatgtatggaaaggtcactccctgggtaacgggtagggatggaaggaaatctggttcattctctgttctctagactgattactggatcaagtcagcctagaaccatatcctaaccccagcatggaacagggtaggcatgggagagcctagtgtgccca

SEQ ID NO: 191623 - DNA, 564 bp, Homo sapiens
gtcagtaaatgtcactgggtgaatcagcacagtgggtggtaggaacgttcctgaaagtcctatataccatgggacagacagcaatcacttaactacacatagaaatgatcacaaaactcattaatggtgtcctgcaaaacctctaactcgaggtgttccaattcaactgccagattccaaaaacatctagtgcaactctggctaccttatgtgagaacaaaggagaacctgtggtgaaaagagacagcaatttcaaccagtcgctgttgaaataccttattaatgcaaacattttaaaaaatcaccatgaaggtacagcattaggaccctgcctagggctttcaaaggggcttgtgtgccctcagaaagggtcctgaagcttaagctcctgaagctttatggcaaacccatctttgtacactccttttaggagatgtgccagcagcccatgtgataccctgtggactgctttgtatgctgcttgacaatttgagacaagtagctttaaaaataatatatattttgttttgttttaaattttaggtaatccatgctatagtaaaa

SEQ ID NO: 191624 - DNA, 359 bp, Homo sapiens
cccaaccctaccttcctcactcaaaccctgaatctctagcaacagcagcagggagcagggacagagataaagggaacagccttttcaatgtgattttggtggcaaaatgaaaactggtcaatgaaaactagttccagtatacacatcacctctgtgaactggatttctgcaagttggccaagtgcttccatctccctttcggctctgccgcagcttgaaaacgaccacgaccaccatttccaccctagtgtattcctgttctttctagaacacagatctgatcctgtctacctcctgctcagggatttggtgctccctgtaacccggggccagagctgcaggagtggcctagtgggata

SEQ ID NO: 191625 - DNA, 324 bp, Homo sapiens
ttcttgctttattagataaaatttgattttccctgtaaatgattatttatgagataaaacataaactaaaaatgattcatttccatcaagtgcaaagttagctgcaaaacataacattcttcctttatgtcacacagggaaattaatggcctggaaatgtacagctgctcaaccagtttacgagccattagtacctagtgtactggcagtgagccccagttagccatggaaaccagcttgcagctttcttaactctgtataggagaaataattgatgattcagtaacattaatgatcatatttacagcttgatgtttaattagg

SEQ ID NO: 191626 - DNA, 1073 bp, Homo sapiens
ctgtttatctttcattctcattccctcaactccattcataactgtcttgcaccaaacacttgatctccaccatttcttctccagtctctcccatctcagggatactaccaccacccaacccacagaggctcagtgctgaagctgggagccatccctccttcctcctcagtcaggaagcacctctccaacgcaccactcctctacctgcattcgacattgccacccacagatctgttcatgagcccttctctgaggaagaggaggcccttgccctctgcctgccatcctgcttctctagctttcactgctcagcttctaaaaggatttttaaatattcagggccttcatctcctcactgcgctttctaaatcacctgcgctttcacttccactgtcactccccactctactgcagctctctgatgggccaggagcttctctggtgctatcaattctgattctttggcctttgcagcagcaaacaccgacggctgtcccctaatgaatcccctcctccctcctggatggtcattcttggggtcctcaaccctaggcctcttcttttgtccttcaacattcccccataagggatgtgaccctttgtggtgctgatcctcaccagcagatgggagattcctatttctacagttccatgtctgactcttctgctgagttccatttaattcatcttctcttacccagtcactgcatcagaggttctgattctgtcaacagcactatcattctccatctctcggttggaagtcagccctgaccttgccagacctagctataacccactgacaccacgctgtgtgaatcactgtcagctcctccttggaccaaaaatctccttgctggtctccacacttgtagccactccccttcaattattatatgttgtcaccagactgattttcctaaaccagcttatccaagactttgcttcccagcatcaccaggataaatgtttaactctgcaggctgatagtcaaactttcacaatttgggccttgtcaatctttcattctcattccctcaactccattcataactgtcttgcaccaaacactt

SEQ ID NO: 191627 - DNA, 465 bp, Homo sapiens
ctgtttatctttcattctcattccctcaactccattcataactgtcttgcaccaaacacttgatctccaccatttcttctccagtctctcccatctcagggatactaccaccacccaacccacagaggctcagtgctgaagctgggagccatccctccttcctcctcagtcaggaagcacctctccaacgcaccactcctctacctgcattcgacattgccacccacagatctgttcatgagcccttctctgaggaagaggaggcccttgccctctgcctgccatcctgcttctctagctttcactgctcagcttctaaaaggatttttaaatattcagggccttcatctcctcactgcgctttctaaatcacctgcgctttcacttccactgtcactccccactctactgcagctctctgatgggccaggaggaggaggagtcctcctcctctcctcactctgg

SEQ ID NO: 191628 - DNA, 481 bp, Homo sapiens
caggagaccaggaggagctagaatctccagaccaactccttcagcgcatgggttaggcctggtctccatttccttcatgtaactgctttatgggggaacaaaggcaagcacagggggagggggggcaactggggactccagattcttcaaccaaaagtcagagctgtgtagtgtcaaagtggcaggttgggctagggctgggcttgggccaaagatgccggggctgagggcaagtggatcgcttcatcacagcagcagctgctaaagcccgcggagccggcagcttctcaaagtcacagctttatccccaagttagtccctggcacacagaagacacctgggaaatactgacaaaccaaaaaaaaaaaaaaaaaaaacaagctaagccgtgttcctctctttgttcaggagactcccgagcctctgagctctgtgcccatcattcctcatggctctccccgtcttggcccctccccatgga

SEQ ID NO: 191629 - DNA, 688 bp, Homo sapiens
agtaaatgagagcatgaacgtagattgcagcacagcgcccatcatgcgggatgctttcaataactgatgtaaaagagctaatgacacctgttgtaatgagctctctgcaggagtgtcctatgaatctgacggatgtgaattctgggggtaactatggagttctagtgactacacagagacaaagcacttcttgctgccaccatgtgaagaaggatgtgtttgcttcctcttttgccacaattgtaagtttcctgaggacttcccagccatgctgaactcagaagaggaagttggaggcatgtgaggtgcaggaaggattctaagcagtggtgctggctttgaagatggaaggcattgtacctcaatgaatgtgactggtttctagaagctgagagtagccagcccccagctgacagccaacaaggaaacagggaccttggttctccaaccacagaaaatagattctaccaacaagaatgagcttgaaagcagattcttccctcgcacttaaagtctcctgcaactatggtgatacaccttgatccggcatcttccattcacctctccagattcattctccatgcctcagtactctgtgctatttcccagaaggctgatccttaaggactacacctgtgggatcccttgtcactggcaatgggacaatgggaggtgccagcagaaaatc

SEQ ID NO: 191630 - DNA, 329 bp, Homo sapiens
acacatagaaatcattcacaaattatattattaataactcatgggctcaaacaagtcattttaacttcctttggtttaggtctttgatctgtaaaatgaggttagactagttaagttacaagttcactctaaattcctaataattaatttttagtctcctgcaactatggtgatacaccttgatccggcatcttccattcacctctccagattcattctccatgcctcagtactctgtgctatttcccagaaggctgatccttaaggactacacctgtgggatcccttgtcactggcaatgggacaatgggaggtgccagcagaaaatc

SEQ ID NO: 191631 - DNA, 426 bp, Homo sapiens
aaggagtcgggtttcagagcctgatccgcagcgtggctcctcacagcactgcgagccagagcttggcgcgcgcggttccgtgggaaatctgaacactggcggctcagcagcccggtaatcttatcagggccgcaagagaaagcattttggttccagagaaatctgaaggcagctccgcttttctccagtaataatatttaagtctgtggagccagcctgaccaaccctattcaactcattagaatctaaaaatctcagagctctgggtgaaataaaacaatctttaactgccctctgccatatggtaaagggataaaccaactcaccaagaggtatcttgaggatttaggcactattggacttttggaaagccaacagcttgcaatttttctcttacctggggagtagttcaacccaagccttcag

SEQ ID NO: 191632 - DNA, 262 bp, Homo sapiens
gaaggtgaagggccaacacaggcctgaactgactgcattagactggaagctctggcaattgggatctgtcctgggtgactttgtagaccccacagttcctcccacagagtacctccagagaacaggtacatgtgtgactgagggaccaggcagcacagatctaaacaaccacgacacactgtgtattggattgcctggtccaaatcccagagattaaggtcatataaccaaataaaaagcccacaccaggtctcctagagct

SEQ ID NO: 191633 - DNA, 370 bp, Homo sapiens
ggctcccaaagttcttcctgcctgtaatctccccaattcatcccactcacagtcctttcctattagttcccaaaagtacagttcttatcattcaccatatgtatatcaattaccaggacatgaatccctggaggtgcttatgagaatgccagggaaggttttttttttttaaagagtcaagcttcttagcttggcgttaaagccccttcaagtccaggcctcattctccatttctggccatacctcccacttgtcctccttaaatactttgggttctagccaagttaaactactttctgggcctttaatttgttctgcaatttcctacccctatgtccttggttttcctatttaaaaagcatgttcccct

SEQ ID NO: 191634 - DNA, 294 bp, Homo sapiens
tgggcttaaaaaccaaattagaattggtttgggatgtgtccttttccctatctggattaacatagtctattccacttgaactgcaacaggttgtccgaattgtttgttgttctggcttttggtcacacagaacgctacagtacttgggagttttcatctttacacgttgttatgctattatttctaaattcactgtcttcagaattctactctgtaaacagaaaaaaaaacagcatggcagagcagaaagaacattggaagagagctcaggaggcgagattccactcctgcccc

SEQ ID NO: 191635 - DNA, 220 bp, Homo sapiens
aatttatctcaacaaatctatgaaaagagagagaaaaatatttatgacatattggaatgtatcacctttaaactgggagcagatcccaatcaagtgaaaactaagagagctattgtatcgtatgcaacacaatatgctttctaagaagtaaccctcaatcttgacaagtcaacccttctcctgcatcctaagcatccttgtaggtatgggtagtgtttta

SEQ ID NO: 191636 - DNA, 361 bp, Homo sapiens
ccctctctacccaacacacagaccttgtttatcacataccaacataaaaggcagttctggactgctcacccagaactatcttaaaatattctatatgtcatttttttataccattactccattcactccttaatacagtcagcattttgcctcaccaatgtagatactccacccagtggcaaaagatctgtttagataatgaggtttaaaattttttttaactattattgttccccttcaacattaccagctctgcaatggcctcagtgatttcctagtacagcacagtgtttaagaacagattcttgagtaaaaactttttccaaaccttgatccactacttccaaattatatacctggg

SEQ ID NO: 191637 - DNA, 371 bp, Homo sapiens
ttacagtcttccccggtacgggagtggttacctgaactttggaattttaaggttctcttctaaataggaagctgacgatacagaactgagatcaactccaagagcattcctgtctattggctcaaagacctacaaaaaacttagactgtgaagacttgcctgaagctgagacccaggacggcaatgggtggaacatggctagagtcagaagcctggccccagctgctgctgggagaccccagacagcaccccgtctcctttgcagcttccttgtctgcaaaataatggaaccataggcggctgattgacctcagtggttcatttacttacagaatcaccctttttcatattatccctttgttactttatag

SEQ ID NO: 191638 - DNA, 539 bp, Homo sapiens
tagataggtaggaaagtcatatgactaccttggtagatgcgtttgataaaattagtagttcatgataaaattctcagcaagttagaaataggtaggaatgcaaagcacagtggctaacagctgtgatcccaattctttgggaggccaaggtgggaggatcacttgaagccaggagttcaagaccagcataggccacaaagcaagactctatctctacaaaatataaaaataaaataaaaaattagctgggcatggtgacatctgtagtcctagctattcaggaagctgagttggggggtattacttgagcccaggagcttgaggctgccatgaactatgattgtgctactgcactccagcctggaaaacagagtaaaaccttcaaagaaagaaggggtgggggcgggggaagagagagagagagaaagaaaaagaaagaaagagacaagaaagaaagaaaggaaagaaagaaagaaagaaagaaagaaagaaagaaagaaagaaagaaaggaaagagaaagaagaaagaaaaagaaaga

SEQ ID NO: 191639 - DNA, 322 bp, Homo sapiens
ccatgctccatgtagtcctaaagcactaagaagttgaaccttcttggttggtttaggagggacccaaagcttggatcccattgttctagacaaaatgtcccacaaggggccctgaaagtcattcttctctctgtaacctacagctccaggtttcttcagctaacgtggaagcagcccacatctcacctccacagctccactctaggtaaatgcctactagttgattctctgaactctgaaagtatggatagatgactcaatctcaagagtcattcacaatctacatcttcctggggctcacaattcacatggcgtcatcaca

SEQ ID NO: 191640 - DNA, 376 bp, Homo sapiens
ctcactgcaacctccatctcccaggttcaagcaattctcttgcctcagcctcctcagtaactgggattataggtgctcacaaccacacttggctatttttttatatttttagtagagataaggtttcaccatgttggccaggctaatcttgaacctctgacctcaaatgatccatccaccttggcctctcaaagtgctgggattacaggtgtgagccatcctgcccaccctattttattatatttttgagacaggcttcctctgttgtccaggctgtagtgcagaggtacaatcttcactcactgatggggccatgttgctctaatattttgtattcattgtaatctttgattgagctttggacattaacaaaaag

SEQ ID NO: 191641 - DNA, 438 bp, Homo sapiens
gtgtctgtgcataaagtgttaggtattattgtagtcttcaccatctgggcttatttgtagttgtccttcttgaagaggcttttcagatatttgaaaggacttgggtgttgtgatgtaagccatgtctactttagggggcaccacaagacgagtaatgctgtggttcttgcagactcacagaagtgctgccttgatggtcttggacaggatttaggagaattatctggattacctgacagaaactcctgttcctccccttactttctccaaagcaaacagagtctctttctctctctgttctgagtcaccttagctgaaagtggagtgacacacacacccctgtgggccagcactacaatgactgcactggatcagatctgaaacagcacaatactgcatctcgcccatggcctgctgtaaccattccctggctacatg

SEQ ID NO: 191642 - DNA, 175 bp, Homo sapiens
cacgtacaggccctttgaatattcctgagagatgtcacagtagtgaactgcatgcatctcctcggaaaaatccggagggctttgcctcagcagagaaggcaaatccaacccaagatgcatgaacaataaataacaactgttctgagttagcttgaaagctcccagttgcactttg

SEQ ID NO: 191643 - DNA, 397 bp, Homo sapiens
cacttaaagctaaactagatgtttcagccagtttgtaaatttctccagaaaatattgagtatgcagagaacagaaatcggaagagaaaaataaagcatagtagatattgagatatactcagagttgaaaataaacaaaaacaaggttaatttaacagtgtgaacagaaatagactaaaaataattatccatattctacatggaatctctgtttatgttacagttggtataaatgcctatttacctagtactataataaatgtaaagacagatctctaattcacaggcactgagataaaggacaatgtggttaagcaataactgaagactcaatagcacttaaagggatagtttctaagtgctaattccaatgatggaatgaaaatagcagaaaggta

SEQ ID NO: 191644 - DNA, 108 bp, Homo sapiens
agcaaagggcagaaagctctgtactgtgtctcctaaaaggtttggggaaactaaatctagaaactttctctcttaactttcgtgaaactcctgaacaaagcttaggag

SEQ ID NO: 191645 - DNA, 294 bp, Homo sapiens
ggtaactgtttctatgactgctttaccaagacaaaaaatttcaactcccaactgacttttaacttaatccttaaaagctataatattttggagttctttccttgatcagtttttaaaggttcatagccatattcatgtagatgtttcacatatcatttggacattaaaactataccaaggtgctgggattacaggtgtgaaccactgcgcccagccttctttttcttgacattgactttttgaagagaggaggccaggctgttgtcctgtagcatcccatatatgttgacttac

SEQ ID NO: 191646 - DNA, 486 bp, Homo sapiens
tcacatttaaactgtcaaggcctgaccttttacttagatacttttataattcttactaaactagatgtcttagtccatttggattgctataacaaaaatatcttaaactgggtggcttataaacaacaaacatttacttctgacagttctggaggctgggaattcccagatcaaggtgccagcaggttctgtgtctagtgaaggttatttccttgcagatggtgccttctcactgtgcccttacatgcgggtaatatgctccctggagcctcttttataagggcattaatcccgttcatgaaggtggggcccttatgacctaatcatctcccaaaggccccacttcttaataccatcttattgggtgttaggtttcaacatataaattttggggggacatcaacattcagaccatagcactggatgcaatttttaaaattaactttcttgttcctccctggggtaaatagcaaaagcaattagaga

SEQ ID NO: 191647 - DNA, 683 bp, Homo sapiens
ggaacgttgacgctacctacctctggcctggcctctacccactgctgccctggccgctaccaacatgagcctcccggagagtcctcacagccccgctactctcgactatgctctggaagacccgcaccagggccagaggtcccgagaaaagagcaaggcgacagaggtaatggcagatatgtttgatggccgcttggagccaatcgtgttcccaccgccccggcttccagaggagggggtcgcgccccaggatcccgcagatggtggccatactttccacatcttggtcgatgcgggtcgcagtcatggagccatcaaagcggggcaggaagtgactccaccacccgcggagggcctagaagcggcctctgcctcgctgacaactgacggcagcctcaaaaatggctttccgggtgaagagacgcacggcctaggtggggagaaggctctagaaacctgtggggcagggaggtcggagtctgaagtgattgcagaggggaaggccgaggacgtgaagcctgaggagtgtgccatgttctcagccccagtggatgagaagccaggaggcgaagaaatggacgtggcggaagaaaacagagcaatagatgaggtaaacagggaggcagggcctgggccgggcccgggcccctgaacgtgggtctccacctgaaccccctggagtc

SEQ ID NO: 191648 - DNA, 511 bp, Homo sapiens
gcagcaatcaataagtctcactgtgggcagatctcagcctcaaaatccgattactctgaaaaactccaaaaatggggagggttaccagtatcccctcccttaaaagaggggagctcattcttgctagccctgtcttccgagattgaccaggttggtcccccaagctgagaagtccatgctggggagactagccctgggaagggactgaatttgggggggttgtgctgagcttctgtcttctccattgctcagaatccttggcctgcaattcccagggataaaggaaccaggcaaggaaaggagctgcctcttagatcttcccattctgctcaccagccctcagagaataacttctcacagccagggaagggttaagtgtccctgccacagttatggagaggaagctgatgaaatatgggcacttggaactccaggcccagctggctttcctgtttacacttctttatacttcctcccacccattggcctcagagaaacaaaacaaaacaaa

SEQ ID NO: 191649 - DNA, 271 bp, Homo sapiens
ccacctaattctagcaatacccatctactccaaatgattatatttccactcatatttttagaagaagtgactgacttctttaaccagaaattccaatgtacacactcactgaaaatactggcattctggctagagagggaataacgtcagccactgggtaatatgcgggtctgctccaaaggtggcctcatattagccaatacagattccaagaaactggattttttaaagcactcccaagcaacccaacaatgagttgggtagtcacaga

SEQ ID NO: 191650 - DNA, 339 bp, Homo sapiens
cagtactggcaggggggcccttggagtgggctccctctctgggctgggactgggtgatggcagtagcaatggggcacgaagtcttccctctcatttgttaggaagtgtggtctgtgctcctccccactgtctggctcttgggctgggagaagctgcaggctgagtcccacggggtgtgagtgtgtgtgagcaggagtgggtgctggaaggaggtaaagctggtgaccatcagctcctcattctcttgcaccttgcatgttttctctgacaccgcagacccaagttgtggcttgctggttaacttgtttacataaccttcttaagtaactctaaacttta

SEQ ID NO: 191651 - DNA, 406 bp, Homo sapiens
tagctgggattacaggcgcatgcccgccatgcccggctgttttttgtatttttagtagagacggggtttcgccatgttggccagactggtctcaaactcctgacctcagatggtccacccgcttcagcctcccaaagtgctaggattacaggcatgagccaccgtgcccagccactaccaattatttctcttaatggattttcattgaccctaaccctgtaaattccatcacttttatcaaggtgtatattataataagtctataatacccaatcatgtagttgtgtgattattttatttttttgagacagagtctcagtgttgcccaggctggagtacagtggcaccatctcagctcactgtaagctccgcctcctgggttcacaccattctcctgcctcagcct

SEQ ID NO: 191652 - DNA, 366 bp, Homo sapiens
gtggttggttgagaggtttcagtgagctggacgcatgagctaatatatgttcatagcacagtcgataatgcacagtatgagctccgtaaatgttcatttctttactttcccatctcctttccccaactacacataaaataagacctttcggctgctctcagccagaccatccatttcccctgctaataaatgagagttttattgttccttctcagatgttgaattatactgttggtatcactgctactgtatcttaatccttttgctaatgtaccattttaccttgaattgttacacagtgtcctgcccctcctactcctctcctgccttgctgcaaagtcatgagtcaattcttttcaaatatta

SEQ ID NO: 191653 - DNA, 146 bp, Homo sapiens
actttgctggttagtgaaggattttaagtcctctagtggaattaagtgattagatttttgccttacaaaggaaactctcctatggagaacaaactaccatatgaagctagcggcctaaaccaggagaatgtggggaaagaagagag

SEQ ID NO: 191654 - DNA, 375 bp, Homo sapiens
acttcattagtcttctaaatcatgattctaaatcataagtgttacaataataatgttggttaataactaagatgctcctgtgttttctgtctaaacaaccaggttttcagttaatatgtgccaggacattttacatgtactaactaatttagttttaaaaactctatgaggtaagcactaaaatcaacttgatgcagatgaagaaactgagacacaacataatgccccatttttacagatgtgccataatttattcatctgttacgggcaatttacatggtttctaaatatgagctaccatagtgatgaacaatcatatacacatcttttaactgtatatgcaacacctgaaagagttaaaaggaactctaagtt

SEQ ID NO: 191655 - DNA, 327 bp, Homo sapiens
agtgcatatcagttttgctatttttaaaagtgcttcctaatgaaaagttctgatatttcagaaaacatttacattcttacataagaagcagttaaatagtaaacttccattagtagttaattaagaagcattatatcactcttctatatttgttagtgtatgtaacatgaatcaaagccacctgaagtaattcatggggtcataacgtgcacttttagtgtatgatgcatgttatttaatttcaattaaaatgaagtttcagttgttcttcacacaggcctttttcccttaataatacagattcatttccataatactttaggtgat

SEQ ID NO: 191656 - DNA, 231 bp, Homo sapiens
caagacatacaaagaaacaggacactgtcacctacatacaggaaaaacgacaggcaacagcaactgcccttgagaagacccagctatcagacttagctgacctcaaagcagctattataaatatgttcgggccagacacggtggctcacgcctgtaatcccagtactttgggaggtcgaggcaggtgggtcacctgaggtcaggagttcaagatcaacctggtcaacatgg

SEQ ID NO: 191657 - DNA, 120 bp, Homo sapiens
gtgaagcccagagaagaggagaaagaattgtcatctgaaggccatcccagttgatgtctctgaggttgccatgaggacgaaatcaactggtgtatgatttgtctagtagctgccaagaaa

SEQ ID NO: 191658 - DNA, 329 bp, Homo sapiens
tttaaaggtatgggtaaatttcaggaaagcaggagctgcaggcaaaattgtgaatcaatacttggaggttacacattgatttaagcctaaaaggaagcgctgtcttgaagtggggtttatgggttgtaggtagatgcaaagattttctgatttgcagttggttaaggaagaaaagctttgtataaaaatttggggtcagtagcaaaatgataactagttagggggagtgactttctttaagcccttcaggaacaaaccttagaaccttagaaagttatgatggttaactttcagtgtttacttccttttttttttttttttttttgaga

SEQ ID NO: 191659 - DNA, 343 bp, Homo sapiens
gctctcagcggaaagggaggctggaaaggggatgggaaggtgatctttccctgaagctgggctgtctctggcaggcccctctccgaagccgcactgtctgaagatagccgaatttttcctatgctcagctgcttgtatccttgacactcagccgcttgtgttgctctgccagctgaagtctttttatgggcacaggataggggcggggcaggccaaaaaggcaacatttgggctgaaaaatagggtcagctgttttcacttaggacaaacttaagggtggggcttagccaggatcccagcctttctgtcagtttgaccttaaaacctgcagcacattatatag

SEQ ID NO: 191660 - DNA, 590 bp, Homo sapiens
ggggctagatgggagttttataaggctgtgctgctttaggctgaatgcttgcagacaggatgcttgggtccagggggtgctgtgagcagcgtgcatgtaacagggtgcttgggtgctagtgagccatttggggttgacctcatttctcataacatttgccctctacccctgtttctgttcctgctatctaagcccatttgtaattttttattaactccccaggggtccacacatttttaaaattttattttttatatttttgagacaggggtctcgctgtatcgccccaggctggagtgcagtggcacggtcttggctcactggaattctcacttggctcaagcaattctcgtgcctcagcctctgaagtagctgggactacaggtgcccgctaccgggcccggataattttagtaaagctgtggttccgccatgttggccaggctggtctcaagtcatctgcccacctcggcctcccaaaatgctgggattacaacaggcatgagctaccgtgcccgtctcacacatttattgttgttatttaacttgtctgtttggtttctgtatctgatctatcatcgtcatttaat

SEQ ID NO: 191661 - DNA, 279 bp, Homo sapiens
gtgggtagtgtcactgtacgtctcgaagtcagtagccttgcttacctccctttacatggatcttgggaagattggtaagccattttagaggaaaggtgctgttttcttataaatggtaataaattaatgagtgtgatttaaaaaatattagtggccaggtgcagtggctcacacctgtaattccagtactttggaaggccgaggtgggaggatttcttgagcccagcaggagtttgacaccagcttgggcagcatggtaagaccctgtctctacaaaaa

SEQ ID NO: 191662 - DNA, 839 bp, Homo sapiens
gaatctcacactgtcgcccaggctggagtgcaatggtgcaatctcggctcactgcaagctccacctcccgggttcatgccattctcctgcctcagcctcctgagtagctgggactacaggtgcctgccaccacacccggctaattttttctatttttagtagagacggggtttcaccttgttagccaggatggtctcgatctcctgacctcatgatccgcctacctcggcctcccaaagtgctgggattacaggtgtgagccaccgcgcccggccctcagttccttttttaaaaaatataatagtgatcgggtctcactatgttgcctagactggtctcaaactcctgggctcaagcgatcctcccacctcagcctcccaaagtgctgggattgcaggcatgagccaccctgcccgccctcagttactttatagcatgtccagccagaaaggtgtgagtgcccacccactgtatcctcccacagtgtgtacatctcacctgacccaccctctgcccttcctccaggttttcctaagctaacctcccttatcgtgacacttgttgaggtgtgagttccccctgaacctgctcagcctcttcctctctcactgggttcctccaggcctttccaccagccattgctgtacacacctcaacccacttggtccccttcctgttcactgctccctcatcaagccccgcccttgcaacatattcacctcgggtcaggcttggaagctcacactcataatcctagcacatttggaggctgaggcagaaggattgcttgagctcaggattctgagaccagcctggccaacatagcaagacttcatctc

SEQ ID NO: 191663 - DNA, 558 bp, Homo sapiens
acatttagaagttggctgtcctaaaattacagcagtagattctcaaactaacaaaactttgaaaatcccgccatattctacttatgttttgaaatctcaatttcatttaatctactattctcagcaattcagttgtcaaatgttcaagtaaatattaactgtaaagggttgtagccaataatctctttaaactgcaactaattaaatgctgtagatctgattacatgttaaatcgcatatacggagaaagtatgtatgacaaacatcatgcctaagagtaactatcaatacaaatttataaaaatcaataaaaggaaaacacaaaaagggaatttcagccgggggcagtggctcaaacctgtaatcctagcactttgggacgccaaggtgggtaggtcactttgaggtcaggagttcaaaatcagcctggccaacatgataaaccccgtctctactaaaaatacaaaaattagccaggcgtggtggtgcacacctgcagtcccagccattcggggttggggtgggggctaaggcaggaggaccgcttgagcccaggag

SEQ ID NO: 191664 - DNA, 350 bp, Homo sapiens
aaaatagcaagtcatttgtgatttgttataaaagcaaaaaagaggacaagcccaagggctcacgcctgtaattccaccaccttgtgaggctgaagcaggaggattgcttgagcccaggagttcaagaccagctttggcaacataacaaggacacatctctgcaaaaaaatgaaaatagccaggtatagtgttgtatgtctgcagtcctagctgtctgggggctgaagtgagggctgcttgagtctagaagtttaaggctgcagtgagctatgatggggccgagaacataccacagcactccagcctgggtgatggatagagactgtgtctcttaaattaaaaaaaaaaaa

SEQ ID NO: 191665 - DNA, 990 bp, Homo sapiens
tgtagaaagagtaacatcctgttttatgtttagtgttggcattagtcataaggatctggggaacaggaataaattcttaacaattaactatagaaatcccaaacaccttgctggtggagtcactcttctctacctggtaaactcctacagatcctacaagatccagctcatttgcccctctgtgaggccttcattaactccttcccattaactcaagaacattcaattcactccctcttctagttctctcattagttccacccataaacatttactaaaatctatgtgtcaagcacagtgtctacaactatgcagtacacagaggaatgatacgtgcttcatgcccaggaaggactcactagttagaagtggcaggcatgtatgcaaggttattgttacacagtggactagtgctctaatggagatatgctatgcagagaaatagtcatatcatccctcaagtaccccatgaggctgtgattcattcaatcttttccatctcctccagtatgctactgacctctgaagacaggaactgtgctctagttagctccagcttccactgcctagtgaatgcagaacacaccataaacatgcaatatatgtttgttaatgcattaaaaagacaaaaactactagtgctttataattgggtcttacagctccaaacaaaaggtatttgttaactgtataacccaataatttgctacaatgtgcctgtcaacactggaggacctctggagcagatgtacttttgaacattccccctggtggcaggatattccagcccaagtctctttgatgacttatcaaagagaaagatgttaacaggtgacctatgctgaaacttgggctccaacctaaggaaataaacagcaggacacagcccacagcggtgacttagaaggttccctggctgacgttcagcacagctcttccttgtaccccaagtacaactgctctgtctccaggagaatcattttagcccta

SEQ ID NO: 191666 - DNA, 679 bp, Homo sapiens
gcaggtatggtcatgcaccgtggtgcttcatgcccaggaaggactcactagttagaagtggcaggcatgtatgcaaggttattgttacacagtggactagtgctctaatggagatatgctatgcagagaaatagtcatatcatccctcaagtaccccatgaggctgtgattcattcaatcttttccatctcctccagtatgctactgacctctgaagacaggaactgtgctctagttagctccagcttccactgcctagtgaatgcagaacacaccataaacatgcaatatatgtttgttaatgcattaaaaagacaaaaactactagtgctttataattgggtcttacagctccaaacaaaaggtatttgttaactgtataacccaataatttgctacaatgtgcctgtcaacactggaggacctctggagcagatgtacttttgaacattccccctggtggcaggatattccagcccaagtctctttgatgacttatcaaagagaaagatgttaacaggtgacctatgctgaaacttgggctccaacctaaggaaataaacagcaggacacagcccacagcggtgacttagaaggttccctggctgacgttcagcacagctcttccttgtaccccaagtacaactgctctgtctccaggagaatcattttagcccta

SEQ ID NO: 191667 - DNA, 203 bp, Homo sapiens
tcaatgagcacgtcctggtggtaccgcaggtcggcgtaagctgccacgtggatcagggaatcccggggacctgcaagcctccgcagaccctcacttaggacaggccccacgcccacgaccaagacagagatgccattgttcctcagcttctgggcaggaacggctgcatcctctgcgcctctcccgcctgtgagcaccaccac

SEQ ID NO: 191668 - DNA, 532 bp, Homo sapiens
gacaactatctggtgatgattttttcaccacatttgaaaaataaattgaataattaattaacgccaatagaatatcattaactaacagagttactgtagtgttttcaagggtaatttgattataaataacatttgccttctgtaatgtttttagaaacactgatagtcttcctaaggtatacccccattgtacatgtacaactttattcccatacacacactgtatgagttacaaaattgttgcaaaggtgactctcaacaacatggaatccagaactaacacaggcaccttgttttccccccatttttagggtgccaaatgtacccaagtccaccggacagtcctgtctctttatttcctatttcttctttatttcccagatcagtaccttcccccggtacagtaaagtagaaaagactatatgtatagatgtgtttccagagacttatatcaaactctggttgttccagtgggcccaccttggaacaaatgagtgtactaagtttgaggataaacattttctgaaagcta

SEQ ID NO: 191669 - DNA, 554 bp, Homo sapiens
atacataatgctctcgcacacttatacggtatagtgtaaccataactgttatgtacactgggggaccaaaaaagtccacatgactcactttaacgtgatggactggaaccaaaccctcagcattgctgacgtatgcttttatgtcatctccttgtttaagaaacttcagagtctcctctattgccttctggaataatcatttgctacatgtcagcagggctatcccaggagaaggtctttgtgtatcagagttaggcaagcagacgctgaacggttcatggtagggaaactgtagaagaaattcatctgaatttgaggttgaagtacttttccaagctcagttctatttctgtgatgcctcagtgtggctacccatcatcaccttatctttaagttatgtatttgtctccaggcaaactgatgattctccaaatatgtcccatgctgtctcaccttttatttgtacctttggcttgctcttctgagaataacagagtgactccttccatctttcagaagcccatctcttcaggttcagctcaaataccatgtct

SEQ ID NO: 191670 - DNA, 188 bp, Homo sapiens
atcggccttgagttctcgccactccatcaacagactaccccgggggtccagcccttccctacagacatcccgggaaaaggtcgggatggcctccaggtgatcaaatatttgcaccatatcctccttgccatagctcatcagctcctcactgctcctgggccaggcagccaggtcaaacacctggcagg

SEQ ID NO: 191671 - DNA, 644 bp, Homo sapiens
  misc_feature (519)..(519): n is a, c, g, or t
  misc_feature (584)..(584): n is a, c, g, or t
caggtcttttcccctcaaaggaaaaaaaaagatcttagtttacaatatagttgtttccacaactgtgccaaaatcatttctccacatttgaattcaccagtaatattttttcaggtgacagcacaagcataaacaggccagaaatataaaatagctttaaaaatcacaataaaagagggatattttttatgaaatgacatatcaatctctacaagacttaactctcaaactatgctacagaatcagtttaccttcaaaagtctctaaactggacctttttctttcttttctagtaacacttctccctagtcacaaaagtattcatcttctttctactgtcttctcagtaaaaatttctacaatccacatttctgcctaagaaaatggtaaagggaacctgaataatacatacggaaaacaaactcagatgtcgttatcttagagttttgttttaacttaggtggccctcaggaaagttgcttttcactgtcactttcctgttagtaactctaatatggnctctattaaaattcgtgatacaatgtgaatgctgttgatactgctattgctgtgggataaatggntagtgttgatttcaagcagttagtgctgcttagttgtttgaaagaattaatgtgggacat

SEQ ID NO: 191672 - DNA, 418 bp, Homo sapiens
ttaaagacgtgcaatggagtcactaagatattagttgttatgggttgaactatgttcctagaaaagatatgtcaaagtcctaaccaccactcccacctgtgaatgtgatcttatttggaaatagggtctctgcagatgtagttcaaatgaagttttatgggattagggcggaccttagtccaatatcactggtgtctttataaaagagaagacaaacggaacacatagggagaatgccatgtgacagtccatgcggagattagagtgatgcatctctaagccaaagaatgccaagggtttccagcaaccaagaaagcaagaagggatcctcccctggagccttcagagagagagagcaaggccctgctggcaacttgatttcagacttctagaatcctaaactgtgggacgataaatt

SEQ ID NO: 191673 - DNA, 528 bp, Homo sapiens
tgctgtgttgcccaggccagtctcaaaactcctggcctcaagggatcctcccacctcaaagtgctgggattgcaggcgtgagccaccgcagccagtctggtgcctgtccatatgtgagccacctatagagagcggttcataggagaaacccacttcacacagtcctgcatggtaagtgtgtgaagtgaaggggttagaacatgtctgggcctactatgtgctacctggtagcattattattttatttttggagacagagtctcactctgtcgcccaggctggagtgcagtggcacaatctcagctcactgcaacctccgccttccgggctcaagagattctcctgcctcagcctcctgagtagctgggattacaggcacccgccaccatgcctggctgtcagtatttttaaagtggttgcaatgccatcccactgcctgccctgtactccttgcccgcttgaccctgcttggcggttggttggtattggggtaggctgattggtgcttttgctgtcatagttaccaaa

SEQ ID NO: 191674 - DNA, 525 bp, Homo sapiens
gtgttaaaaaagcattattcaaactgcagtatatatgaatcaaagtgcttctgtggccttttgccctatttaaacctataatttgtttaagaatgcaatcaaattgccatgtagtacccatcacttcatttgccacagagttagttttaggtcaacatatgtaataaaatgggatagaaacgaaagaagactatgactattagactataattaaagctgttagcatcttggaagacaactagtaaacaaaatacctgtgacaaaccagaaagatgatctatcaaaaagaaaatgaaattcgatcaaatgtgttttttttatttttttccctttgaggccgggtctcactgtcacccaggctggagtgcagtggagtgatcatagctcactgtaatcaaactcctgggctcaagagatcctcctgcctcagcataatttctaaaaagtttaacagattgttagcaggctaaacttcatcaaaaagaaaggataacctagaggacagaaacctgctacatgcatcat

SEQ ID NO: 191675 - DNA, 839 bp, Homo sapiens
tatttaccattttgtttgaaaggcgggacagaagaaaaatgtgtaaacctattcgagtcatgcagttggaatctggttactctgtttagatgttcatgtcacagaatcagctcaagaatttcttgagaaaaataaaatagggttcacttcaaacaacaccttccacctgccttctggagtgcactaggcttttcagaggtacactcagcctcacagaatcacgtatccatgatgggccaactacacagataaagttctccttcttggtaagctccagtcgccgttcaactttctaagacagaataaaataagtgagaacccattcgtgtaaagctgaaatttcaccaggtgtcttcagccaaaacctccgtagaatttaaaaatcagtgaagatgtgagagggaaatcattgcatctatgttagaaatctggacttgactcagaagaaattccgtgtaactccattgtattctagtcatccgatgaaggaaaattcaaaccagccaccgccttcaacatgttttttatttgtgtgtgatgtagcttcatctggtccagattaaggaccgccacatatatattgctgacttgagtttactgctgaacttggcctagcaggctggtcaccccaggtcttctctcgaaaaccaatgctatgccaaagacagcaccatgtataaaaccacctcctacgccccatcaatcaaccaaatgtgcattttcacatggaaggtgcctgcctgcaaggccagcaaatgacttaaaccttggcaggaaagcctctcctctctgtgattgtcattctcagacctccgaacttgtcaaggaggccaagcatg

SEQ ID NO: 191676 - DNA, 192 bp, Homo sapiens
ccaaggtatttttaaagcaaggaaggaaagaaaatggaagataaaaggaatgaacataaaagtctcaagttgatttttatgtcagacttctgaatgccccaaaacaaaacaattctgtaaggccgggagcctcaggactgtaatctcagcactttgggaggctgaggtgggcagatcacttgaggccaggag

SEQ ID NO: 191677 - DNA, 572 bp, Homo sapiens
ggggagctcaggttcatccactgcacgtccagtattgccaggctaaaaagttaaactaaaaagttaagagtccagaaatttggatttttatacaaaatctccccattttggcaatgaatttacattaaaacagaacaaaacaaaaaatagacagcagtatggtttagaccaaactcatctgcaggctaggtaaggctgggaagtggccagtgttcggtctgtgacccagatcagaggcagggcgcaccatcccactcagtgcgctcccagaacccgttatttctggcagagagagagaatgagagagaacacgccacctgagggcatccctgctgcccgtccttgaggactccatttgatctttcttccttcctctgttgggagaaaagggagaggggagagtccttgggctccccctagagtgagagagcaggatgtgggctcagcagcaattaagctgaatattaaactcatcccccttttggatattgagtggataaatggcaattaatcagcctcccccgaaagattagcattatcattattgtttccttcagacagaatcgccactg

SEQ ID NO: 191678 - DNA, 510 bp, Homo sapiens
agacttgtgggttggaaatgggggtagttgaggaggaacaaaggcagaatagggagattcaaatcatgtcatgaaggctctgaattctgtggtgaaggtttggcactttattggcagcgagggggccactgaagtcctgaagcagataaacgctatgatctgccctcttcttcagaaacaatccttagatgtatatggagggtggacttaagatggggagaaacctgagcaaggagatgggttaggaggatatttgagtatcttgtgaaagtcgatgggattctggattgtctgcttgaatattgaattggcagggcctggtgaataaggaagaggaagatccattcttacattcattcaataattatttgtaaagctcctcttctgtgccaggcactgttttggatgctgatgctggaaatattgaggcaaaaagataaagtcctttctcttaacaaagcttgcattctactgaggaaaggaagagagagagagagagagaaaaaaaaa

SEQ ID NO: 191679 - DNA, 220 bp, Homo sapiens
tttctttcctatttcaagactggtagagaactctgagtttgtcaattgattagcaagttgaattccttggaaacacataggcaaagcctacccttgagaaaagatgaaacctggtactttgttgttgttgtatacttattcaggaaataagttgtatacttattcaggtttagactcaccctgtactttctacacatgggaaactgaaatactcttgaga

SEQ ID NO: 191680 - DNA, 188 bp, Homo sapiens
tagaacagctgggctccattcttcttatataatttttcaaacactcagagagttacttgttcatctattaattctcaatcctccacaaccctattccctgtgaagttattttagctttatattctgatagagtgttttccctaacagttaggcatatgtcctaggcctcaattctcatcttctcctgg

SEQ ID NO: 191681 - DNA, 276 bp, Homo sapiens
agtgattgcaatcttattggaagtcaggtgattcccttttgcagcccttcctaagtgccctttccctctctgtttatttgtcatcattccatctctagattcctggtagatccatgggagatgcatggaagatctctttgtggtatgtttcttgtcctctaccaaatctctccctggcatggtgctgccattcctttttgtgtcatcttctttccttgtctttgtccttcagctattttcttctctccctttgatttccccccttccactcacaca

SEQ ID NO: 191682 - DNA, 358 bp, Homo sapiens
ccttatacagatgtagaaattgagctctcaagttctctgtatgtgctgccttcccataaacattaaacattgccatgacacccagagaagccccagggagcctggtaagcagccatatacctggggaatatagctagagaacttttgttttctgcctcactctcaaaagtgtctggatttgccccctcatttgtcatatccctgttaactacagtcactactctaaacatctactttggctctctttccttacccctcttatctgctcagaacctccttaccagaaaatgtagcaactccacaatcttttcccacccttcaagcaccatatccttttatagtttcactacgacagttt

SEQ ID NO: 191683 - DNA, 446 bp, Homo sapiens
ggcccacgggccagctgcctctttttgtaaaggtttattagaacccagccatggccatacattgatgtggtgtccgtgggcgcttgcgagctataccaacagagttgagtcttgtaacagagacggcgtggcctgcaaagcctcaaatattcactgtccgggcacctccacagtctaatggctcccaacccacagattgaaaataaccctggatttgagcctgccaaggccctttgtgctgcacctctgtgagctgcatcggcccttcacgaagccagcagtgtcagtgtttccctgaaggctgagcaacagaggggttgtatatgatgcaaggcaggtgtgcctaggtgtgtgtgtggctcaggagggtgtcataggctctggtttgtcatagcaaaccagagttctgtttgctcatgaaagcccatctcgaatcccacttcctg

SEQ ID NO: 191684 - DNA, 405 bp, Homo sapiens
taaagacagtcataggaaattataagattattgactggggaagtgataaatgtccatgaaatcttcacaatttatgttcagagattgcagtaaagacaggtgtaagaaattataaaagtattcatttggggaactaataaatgtctatgaatcttcacaatttatgttcttctgccgtggcttcagctggtcccttcgtttgggttccctgacttcctgcaacaattttttggacaattactattgctcaattcctccaactttattcatgaaataggttggatttgcttttattagtcttgggaagtttgaaaatgtatttgcacagaagaaatttctcattcctttttctaatggcacctgtactttaaaaaatacatttataattatctaatggaaaagatg

SEQ ID NO: 191685 - DNA, 457 bp, Homo sapiens
aataaaaacatgaagttaaaaaaaaaaggcaaaacgaacactttccaacacacgcatgaaaatccaagcctacaaatgagaactattcattatttctaattataaaagaaaaacaccagaatagctacaatgtggaaagtggcaggaagatcctgaaatatctataaagaatgttctagagaattcaagatgcacaatttgaaagaaaatgtcaacactgtctaaaacttctgagtgaacttgtctcccctgccacctgctcaatactccccaaaaagccacttaaaatcctaatgcatgatgcactccctcacctcgccctgtccagcctacaagccttttctaatccatacccactgtgttgcagcactggggtcattcttctattttgcccatgccattcctcatccctcttctggcaacagctcctctccccacatcacacggccacacccac

SEQ ID NO: 191686 - DNA, 323 bp, Homo sapiens
agggaggcacaagaatcacttgaacctacaaggcagaggttccagtgggttcgtgccacttcactccagcctgggtgacagagggagactccctctcagaaaaaaaaaaagaagaagaagaaaaaaaaaaaggtgggccccggcagcagagcctactgtcccggaggcaggaggaaaacctgaagggaatcttgaccttgacctagaagccaaggaggaggcatggccaacaacatcaaaggcctctgagcagcgcagtgaagactgacaatagacctttcttaagtttggcaattagaaggtcattggcctcagcaagagca

SEQ ID NO: 191687 - DNA, 358 bp, Homo sapiens
gctacacagaaaattcaaactcagcacattagcttaatctattagcttttcacaaatccacttccccagcagcactacacatcagggctaagaatcatcacttcttgtcaaccaatcatctaaacccaactcattcttggcccccagtcatccaagactcatctttcatcatcctcctcatctagttgccaaggatcctttcatttctaactctcaagagccccgaattcatccttccaattcttgctaagtcatcttaagtatgaagacctgcaaaacttattgctccatggttaccctaacccccttgctctcaagaaaacagaataaaccctctccctctaaatcccttcttcag

SEQ ID NO: 191688 - DNA, 471 bp, Homo sapiens
cagaaagtttaataggcagaagaaaggagagagaagagcagcttcttgtgagagagaggtgtccgaaaaagggaaaagtggcagaccatagcagattttataggcaggcttggtaaagcccactgatccgttcaatcaggtttgatgtttacatagcccacagggaaggctggtttccccaccctaatcttattatggaaatgggctttccacttggccagcgccatcttgtctgctccttactatacacatgactgacaaagagaagggaagatggagccaccattttgaacttgcctagtcccacatagtatttttctattggcacaactgctggcattcacctgtgcaagcttccagcttgcttgtccatgtctgtagctcaattttacaggctgttctttgttagaaaagaaaatgatttgagggctgctttttattaaaaggaaaaccttaccaataccctcaata

SEQ ID NO: 191689 - DNA, 351 bp, Homo sapiens
cctgtagtcccagttacttgggaggctaaggtgggaggatcacatgagcccgggagtttgaggctgctatgagccatgatcatgccactgcactccagactgggcaacagagtgagaccttgcctcaaacaaaaaataaataaataaataacagattcatttatagttctgaaggcagttggtaggagggttggagttagacaaaacagggctttgtttctccatattgtagttgtttgaccttgggtgacatactcaacctctctcattcttaatttcctcatgtgtacattgggattgatgatctttaccagtgaggttgtttagtaactggtagctattgtgaaagtg

SEQ ID NO: 191690 - DNA, 476 bp, Homo sapiens
agaaagggatacaaaaaataagagctggatgtctcataccatttgctagaggtgagctttaaatttagctatgggcttcctagagcccaatacaaaagaaaggaagcatagctgcgtacagccctttggaacacttgctttattgaaatgccatagcaaggtgtaaggaggtgtcaccatccagttgagaagcaccctgatttgtcacactcttgccaattagaatccaatatctgcttactcctgatcacatgccattcttaggtaaaattagtctccactactgactatgtgactttgggccacttacttaattaaccctttgaagtctctggttgctgttcttctataacatggaggttaaaaaatagtacctaaatggatagacaaaatgtggtatattcattaccacagaatataattcacccttaaaaaggagaaattctgacccatgctacaacatggatgaaccttaa

SEQ ID NO: 191691 - DNA, 309 bp, Homo sapiens
tgttcttcttcactttagcaccctcagcacaggtatacacacacacacacacacacatatacatgcacaaacatgcactaccttctgtctgctcttgtctgagcaacgattcctcctcacctttcaagacttctgccagcatttcctaccccagcacacctgccctgaccaccctggctgtgatgtaacaggcttcttcacaggatggtctagctgaatactcactgatctctccccagccaggctgtgagtgccttgagattggagctttgttttttgcctccctgagtgtgtaacatggcatataat

SEQ ID NO: 191692 - DNA, 425 bp, Homo sapiens
gacagcagcgtgtgctccctgattatccattccatctcgacgtagcctcccattccagaagctcccatgccagagctgctccaggagtagaattcaagaagagttcaatatatcgatgtgcatgttatttttatctttagacatggcagctacttcatcttttcatttagcttgttgaaatatagaacgtagttcttgtaattattttcatgccttgagattgattgatatttctcctcgttctgctttattacatgtctgctttattacattttcctgctttattacatatcatgtgatctttgcacaccaaacatcatatatactttttaccttgttgagggctagatattgttatatctccccacatcatctttagcttttttttgggacacagttaaatcccttggaaacagtttgttact

SEQ ID NO: 191693 - DNA, 251 bp, Homo sapiens
tggcaaataacatcttattatcacaaagatagtctgatttcacagattccctaaaaggatgcccagaaccactgctctaatgatttcccatctcagttggtataaaagcccaggtccttacaaagataaacaatagcctacagcatccacacaggctccccttgccctcaccttttttgcccttctgatcaaatgtccttaaccaacctaacctccgtccctggctacaagtccacacaaggaattgctag

SEQ ID NO: 191694 - DNA, 266 bp, Homo sapiens
caggcttttttctgtctcagaaaaatatacatatatatatccatttggtgacacaggtttgttatgtgcacctggaaataggtagatctttattcccctccctcaagtccccttgtttcagaaacacaaggttgacttcggttcagaaaatggccagctcttcccactacctttcctgttgagagctccatagtgctgttgtcttacctactccacagtattacatcttttgctctctcgggtaagacgcttcaaataccagaaaa

SEQ ID NO: 191695 - DNA, 349 bp, Homo sapiens
ttgcatatggcaaggccaaggtcagttattgcacccagtcatgtattcctcattgatgtctttatacaaaatgacaaatgtatacaaaatgacatgctggaagccagccagcattaggatacagggacttatgcccccttttctgtgttctactagtttgctagactttcatctttatttttgatatttttcccctcaaattactggagagactttgaaatatgcaagaggtatctcttttttcaaattccatctcttgccatcagcatgaggaccacttttggcttatggacagtctgtaagacatgtggcatgtgctggtgactttcttggccttgccatatgcaca

SEQ ID NO: 191696 - DNA, 131 bp, Homo sapiens
gatcagtgcattcactgaattcctccttatggtaagcttcaaagttatgtgacagcttgttttgttttattttgtaaagaaaagctgtgataaaaatcctcttaataaagtaattctttttcttgcacagt

SEQ ID NO: 191697 - DNA, 430 bp, Homo sapiens
ggcttacaataaatgcattttaaatatacagacacaactaggttaaaagtaaaaagatggacaaagctataccaagcaacactagtcaaaagaaagctggagtgtctatattcatatcagacatagtagatttcagagcaaagaatgtactaggaataaggaagatcactttacaatgttaaagggtcaagaagcagacataacaattctaaatattcacgcactgaataacagagcttcaaatttatgaagctgaaatggatagaagtacaactacaaaaaaacacagatgaaaccaaattattgtcagagattttaatactcccctctcagtaattgatggaacaagtagacagaaaataagcaaagctacagatgacttaaacaacactatcaataacttgacttaattgatatttatagaatacac

SEQ ID NO: 191698 - DNA, 386 bp, Homo sapiens
ccccttccccttcccttccctcccctccccttcccttcccttctttcttttcgatcacaatatgcaaagaatgtagaaggagcagttcagaagccactggggcctcctggagcacatttccggtttccttgtagaataaattgaaagtaccagacccgtccacctgttgctccgggcagctattgttaagacaaagcaacttcttaaggccttgcctgatttcccactgagctccttgagtgaagctgagtcaccctctcctatgactttcttccttgtatgtcaatcagttgacaatgtttgtttgaacagtgccctttaaactttatcagttatacttcattgaatattttttttaagaaaagtaaaatttcagaagaaaacta

SEQ ID NO: 191699 - DNA, 500 bp, Homo sapiens
tatgaggaggttaatggaacattttcccctagcctttcatttcttaacatccttcctctctttgttcctgtaacttttctttttaactgttccaaagcaatcaaaaacatgactactgtatttttccattagatttgccctggaatcacagaatgccagctagcaccaaaaacagcaatcccaagatattttcgttgtttaatttaagacaactgggtactagagcaagtattaaaagatctgatttctacatctggccacagcagccagtcaaaatcacttctcaaattttcttgctgttgcttgattaataagacgctatttggtaagatgttcttaagcacaaaagacgagaagacaagttatgctttgtcattctgaataggactcaaataacataaggaaaacacatgccactttaaggcacacattcaaaaagacaccctgcacattccacccgcttaaccaaaacagctatgttagaattagtttgtgccagg

SEQ ID NO: 191700 - DNA, 327 bp, Homo sapiens
cattcaatgaggacacaactcctaacctttatcccttgctaaaaaccctaacgcacatcacctcactgctgctaatttagctgttttcaaatattccaatactgtattaccaagcactgagcacttttttcattccacaaactttacttaacatgctcttctggtttgaaaacaaataaacaaaacaccaaagaaaaagacacaacttggatcattcaagctaatagaactgagaataaaagcactttggattattggctctagttcccttatatgaaaaatcaaaaaaaaggaattttttcctctgaggataatgtctcagagatt

SEQ ID NO: 191701 - DNA, 812 bp, Homo sapiens
cgtcgtgactgtcgaaacctgcgcgcattatctctcttgtaaattcttttaacatattttaacgctattttaaaatcactctcatagaggtcacttgtgcatctgcttctgtatattttctgttgagtatggtatggaccactttttttttccatcagggaagttgagtcaaaaggatcacataatttttctttgcatgcttagtaactgtttattatgtactgagcttgggatatatgctgtgatgactgaattgttttcttctcaagaatgctgtgttttgttctggttttaaattactaatggataaccttgatgctgtgagatttgattttaagcttcattacagtaagtttatttccattttgtccttagtgctgaagcacagcctttagttctaggatgctgtcattcttccttaaggcgtggcatttggggggttcaatgggaaacaccaagtatttactcagtccttcttagtggaacttgaatttcaaactctctgtccttgggcagctgcaatcgctgctgagttttttagactttaacttgctttctcctgggttcctttaaataatcacactgcaccagcacaatttgggaatccaccaaggatttgacaggaatatgtaggcagattttagagcttactttctgaggcactctccttcccaaaatttctcttctaattttcaggtgttctagaagtcccaaatgattcctcagcctgtcaaaactgtcacattctacctgaattctatatccaagtgaactgcacaaactggaaattgccctatgggtaaaagctggtt

SEQ ID NO: 191702 - DNA, 339 bp, Homo sapiens
ggatgctctgtcccttgctgtccagggcagggatggcctccagccgcaagaagtacagcagcacctcgacctgccctcgcggagtggggaagaggagagtggctcagaggggggctcacagctgctggtgggaggtctttggggcccaagctcccaagtccacctcaggtgctagaaacccctgctggtgtcatgaaccccttacagtgggacgggggtggggtggggtcctgacaaggcatgacttgttgggtggggggtggttatttattttagagatgcacagggccttgctctgtcccccaggctggagtacagtggctccatcatggatcactg

SEQ ID NO: 191703 - DNA, 532 bp, Homo sapiens
gtaatgtcttgcctacttttcgcaacagggtaatgctatgctcacagaatgaactgagaagtatgtcctgctctccaattttctgaaagagtatgtatggaattgagataatttttttcttaaatatacagtagaattcaacagtgaagccatctgggcctgcagttttgtcagaaggtttacaagttcaatttccttaaatataggactattcaagttacctgtttcttcttgagtaagctttggtagtttgctagtttcaagaaattgtgtgcatttcttcaaaagttgaatattattggcaaaaagttaattataatattcacttattatccttcaaacatctgtgactctatagtgatgtcacctttcttgttcttgatattggtaatttgtacagaatcggatttctatctagtatgatcatccttctgcttgaagaattttaacactgtagctaaggcctatttgcaataaattctttcaatttttaatatgcctaaaacggtatatatctactgggtatagaatt

SEQ ID NO: 191704 - DNA, 679 bp, Homo sapiens
tttaaagtatgtggaaggatgtgcattggttatatgcaaatatgatgccattttgtaacaggaactcgagcatctgcacattttggtctcctgaggggttgggtgtcctggaactggtccccccaggatacctaaggatgtctgtagtcagaacattgttgacttttaatggccagacttgtgttacctgcaagtgaggatattgggggtagggatgacagtgtaaaatagataggatggatttgtggcactgatagattattgagctgtagtactaaaaagagtaagttagaatggtaaagaagtagtggttaaatactaggatagacagagaaacagtatgtataatggttagagcctggatgccagcaacaatactgttttggatcaaattcttgtttgagcaattgtagctgtgaaaccatggacagattatgcctcagtttactcatctatgaaaggggaatgctgagtatctatctcttagaaagtttaccattactaatactgtgtagtggttagaattattagtaatgacaaaatctagggtgggagtatgtaagtcaatggctaaagtagggtagaggccaaaatcattgagaaacaggtcacgaaacggaaaaccattattattggaaggatcatctgtgtggacattgaaatcaccaagaattaagac

SEQ ID NO: 191705 - DNA, 623 bp, Homo sapiens
tttaaagtatgtggaaggatgtgcattggttatatgcaaatatgatgccattttgtaacaggaactcgagcatctgcacattttggtctcctgaggggttgggtgtcctggaactggtccccccaggatacctaaggatgtctgtagtcagaacattgttgacttttaatggccagacttgtgttacctgcaagtgaggatattgggggtagggatgacagtgtaaaatagataggatggatttgtggcactgatagattattgagctgtagtactaaaaagagtaagttagaatggtaaagaagtagtggttaaatactaggatagacagagaaacagtatgtataatggttagagcctggatgccagcaacaatactgttttggatcaaattcttgtttgagcaattgtagctgtgaaaccatggacagaaagtttaccattactaatactgtgtagtggttagaattattagtaatgacaaaatctagggtgggagtatgtaagtcaatggctaaagtagggtagaggccaaaatcattgagaaacaggtcacgaaacggaaaaccattattattggaaggatcatctgtgtggacattgaaatcaccaagaattaagac

SEQ ID NO: 191706 - DNA, 146 bp, Homo sapiens
taaagttgatattttaaaattcattatgtttttaaactgtggtaaaatacgtgtagcataaaatttaccatcttaactttttgggttgtttttgtttttgtttttgagacagggtcttcctctgtcacccaggctggagcacagtg

SEQ ID NO: 191707 - DNA, 343 bp, Homo sapiens
cagatctttaatagttatttaatgagacttgacagagagagggaaatctaattagaaaaaactctcaagtttactgtttacttcctctacaaggttaaagccctccaaggtcaggatttagatctaagacaccagccatttataaatagtagataaggctgaggtagaaagcaagaaaataacaagtagaaaaaaagaaaagaatagagtcctagaatgtttttaaagaccatctactacatcctatagtaagagataaagatactaacattaagaaatcatgacttattccatcaaaaaggtagtaagtggcagagacatcactaagcactaagcttccttt

SEQ ID NO: 191708 - DNA, 592 bp, Homo sapiens
agggatacctcgtctcttcagaaaaaaaaattaaaaataagccaggtgtggtaactcacatctgtagtcccagctactcaggaggctgataagaggattgcttcagcccagatcaaggctgcagtgagccaggatcatgccattgcactccagcctgggcagcagagcaagaccctgtctccaaagaagaaaaaaaagaaaaaaaaaaaggaaaagaaataggttatggaaagggacttttccccatagagtgtctctctgagaattagagtctaaaagggctaaaatggaattcaagaacacacaggaaattcagagcccgctgctgtggcaagaatggcctggggtcagtgctagctgtggcagtggctgcaatacccctggctctaagggcatcttcagtatactgcaacaccctcaaattctggagtggtattaggggttactgagagccctctgggaattataaattattcctagagcaagaccaagccccactttggcttacagttgacctcgaaaactccaagaattcccccaaaagagaactcattcccaggaccctatcgaagaataatttgtccaagtttgc

SEQ ID NO: 191709 - DNA, 141 bp, Homo sapiens
taagtcaactccaccccttcccaataataaagcatcactcaactgtgagatacctcgactacaaaaagcactgtaccacagccctctccccctgggtccatgacaggagcagggagtaaagttgattgcaaacctcatgaa

SEQ ID NO: 191710 - DNA, 287 bp, Homo sapiens
tgcagcgtgtgctgtgggacctgcacttctcttgcaagattcacatccagcctgagagtagtagtattgccattattttgatcctggccttgagctggactgtgcactcagggaggggtcttagtcaccgtatcccccagcatgcacagcacagtgaacagcaaacacgagagttaggtgaggctcatttatacccagagaccagcatagggctttgatgcaacaaatgttcatattaaatgtcccccagctgcaggtttgcaaaacaacaatctgcctaggttctt

SEQ ID NO: 191711 - DNA, 230 bp, Homo sapiens
catgttatccccaacacctaacactggtagtgtgaaagtttgttgaaggattaatgtgtttggggtggtgcgtgcatgtagtccttactactggggaggctgatgcaggaggatcacaagcccaggatttcaagaccagcctgggcaatttattgagacccccccatctcttaaaaaaaacccaaaaaacaaaaatccaaatgaatgattaatgtgttgggcgatagcct

SEQ ID NO: 191712 - DNA, 370 bp, Homo sapiens
gaggattcgagtgttagtcaggcccttccagctgaaaatgattcattttaattaccttccagggtgatccgatacctgagcatatggtctttaagaaataaggttccccaaactgtcagcaagtgtgggcaatggtcagggacctctttctgacaccattgaccagccttggagagcgggcgctctagaaggtgcttattaaaatgccagcaggtgcagcaaaggtccccttctctgtgactcccgcaccctgcttgtgccaggtgttttataagagcctttttcttcattaaatggcattcattaagcacgtccttacacctggcacagaagctgtgcgtcacagatgacttcttcccagtggtgtttg

SEQ ID NO: 191713 - DNA, 353 bp, Homo sapiens
taaccttgtcctgttttcccctcactctttacagtcaagtcacaccaaccccctttctgtttcttgaacactctgaggtcttcaaggctcccaggcctatatccctgatgctcctctacctagaatgctcttcctacacctctttccatagctggctccttctcatccttcaagtctcagtctgaatgtcatgtccttggagaggcctttcctcactagtctacctaaagcaccctcttcctttactctctaccataacctacttattttcttcatgatgcccactaagagtttgatattcatttagtttattgtttgtctccccatcaccaaaacgtaagctttatcagggt

SEQ ID NO: 191714 - DNA, 152 bp, Homo sapiens
gacaaggaaagagtttcataactacttacaaatgaggtctcaacaaaaacagcaaaagaatactttggggatctttacaagttgatactaaaattcataagaaaataaagaagcagaataggaaaattctaaaagagaaaaataaaggatta

SEQ ID NO: 191715 - DNA, 268 bp, Homo sapiens
actttagcaggactagccattcagtccctgaaatgtgagtcatccctttgtccagtgtatccgtgctgtacagtatgtgtgtgtaggaaaaatcatagcatatacagggttagtggcagcatctgcaggttcaagcatctactggtcttggcgcgtaccctcagcagataaggggagagtactgcacatagataaggaggattttggacatactttctctttgacatacttagaagtatggagaaaaacctcatcaaactgaaatgag

SEQ ID NO: 191716 - DNA, 624 bp, Homo sapiens
aaatatcatggtatgattgtctaaaagaagttttccacatggaatgttacacaaggaacagcgcactacagcatggacaaaagcctttattcattcatgccaaataaaagcatactgaacacatagctgtgttttattaaaaaaaaaaaactgttaaaggccaaagacataggattatgcctagcctttaattcactgctctttaaatcattttaattcactgaaagaaaatgctagcaggatcctcacacttggcctcccaggatcctaacttcataccaagatggaacgtaatgtattctgcagaacgttcttcccagagatcatttccttctgttggcttattgagagcacagtgattaaaacctccagaactcttactctgttgctttggtaagttcaataagcaatctcacctggctgaatgcacctgaagttacagcaaatcagagcaagaactaaagcaagtctctgctgctggaaacagcagatacaaaacccaaagtctatgaaatgtaggttctagcggccgggccaggggaggaggaggacaggcaatttgcaaatgagcacgcacatatctgcaatcggtctggtgcagtgctcggaagaaaaataacaaga

SEQ ID NO: 191717 - DNA, 500 bp, Homo sapiens
ttttgctgttgagttatatgaattctttaaatattttggatattaatccctcatgagatatatagtttggaaatattttcttccattttctaggttgcatttccattttgttgactgtttcctttgctgtgcagagctttttagtttgatgtagtcctacgtgtttatttttgcttttattgcctgtgcttgtgtcaaaaaatcattgccaaaatgagtgtaaaggagtttttcccttaagttttcttctaggagttttgtgatttcaggtcttaaatttaagtctttaaatatttcacgttaatgtttgttatggtataagataagggtccagtttcattctcttgcatgtggagatccagtttttccagcaccgtttattggagggactatcctttccccattgtgtattctccttggtgcccttgtcaaagagagatctagtagtttctaagcagcatcatgaagctgtatctttactgatttcatgtacaacaaaa

SEQ ID NO: 191718 - DNA, 604 bp, Homo sapiens
atcgtgccactgcactccagcctgggcaacagagcgagactccatctcaaaaaaaaaaaaaaaagagagagagagagaaaaagaagtacatatgcttttcaaaaatacatagaacatatatttaaaatgataatatatcaggccaaataaaaacttaaaaaaattccaaaggcagaaattgcacaagtcaaattatctgttaaaaacaaactataaataaataacaccaggttaacaaaaagggcaaaatatttagaacttttaaaaatcatttatagaaattattttgggggaaagaggaaattaaaatggcagcttctgtttatgtacaaaacaacaaaaggaaccctacctttcaaaactgataagatgtaaacaaccctgtaatcagaggcaaaattgttatgttaagtgtttctattaagaaagaattttaaaaataaaatgtttcacataaaagaagtatgaaaaagaacaaaatgacccaaagtagcaggtagacagaatcaaacataataaaagcagacattactgaaacaaataatagaaataaatgttaaataaaaccatgacctgggtctttgataagatcaataaaataaaa

SEQ ID NO: 191719 - DNA, 301 bp, Homo sapiens
ttaccccacagaatatatttacagtagcaacacaggcaatgccttagtcttcgttataactttgtcttctgatcgactctgttcagtagcagggacttactatcctctttggtctatagacagtttggagatcaccagataagaagcatacctcaccttgcagtttcattcagtttcatattctcagaagctcttaaagggctaaaattctggcagcagctggagaaatctgcattgctcagggcctgagtgactgtgcccctttagtgctgaaagaccagaggtgcaattgtcccgtcct

SEQ ID NO: 191720 - DNA, 727 bp, Homo sapiens
gacggggcaccccggcgattatcatcatcatcatcaatatattgttgttgtcattatcagttttatgctgagtttatagataaggacagatcttacacttctcaaacacagaaactgcattttactcactctgtaggagattctaacaagctacagggcttatgtatattgaaacctaattgtttgataaataaattaaacgaattataaatcatgattttcataaacagactaaagagtattcattcatgaaggtatggtctggttactttatgggaaatttttcctcctttaatctctatttgtaggataagtcaaaaatagattagataatactaaatagctacctagaattaatgttatcatgagactcaatatgtgggatatagatatattattgatgaaaactaaaaatcttgctagatatataagcagacttcataaaacgaagagattgattcagccaagaacattaaaaaaaagatacaaagtttatcacggtaacctatacatttcaaccataaatatactaacaattctgttttcacaagtgggattagtagagaatcgttctaacattcgaaagactaaatgcattaatatacagaactgggaaaatttcagaaggatgagttgtcattatggtgtataagagatacagtcatcctccacctcctgtgaatccatattccatttccctaaaaagcgagtacccccgagggagtgc

SEQ ID NO: 191721 - DNA, 338 bp, Homo sapiens
caggtgagcccactgtaatcacataaagctcttaaaagcataagaaaacagaagagtcagttggaaagatgtagcagaagagagaaattagagagaaatgaagcctgagaagatctcaacttgctgttgttggagtggctaggtgaggaggaatgcacgtggccttaaggagctgagagtggttccgagatgacagccaaagaactgggacttcactctctaactgcagggaactgaattctgccaacactgaatgagcttgggagctgagccttttccagagcctccagaatggaatgcagctctgctgacacctcaagatcagccttgtaagactc

SEQ ID NO: 191722 - DNA, 345 bp, Homo sapiens
ctgcctcatatttatttctatacggcaatgaggatataaaggagcagaccgaaaagagaaaggaattttaaaagccatggaaagctgccctaaatgtggttggatatagagaggagagtgctgaaggcaaacagctgtgccctctttgcctttttgctgaggaaggggatttaagccaaaagaacacacgtaaacgtggatttcttaaagttctcactgtaattatgtagccttgggagatgaggaattgtaaagtagatgctggcttaaacaaatgataaatccttgaggtgatgggcaccccattttccctgatgtgattattacacatagcattcctgtatc

SEQ ID NO: 191723 - DNA, 113 bp, Homo sapiens
caatcagaggaacactaaaaagtctcccattctctcttttcaaggttgttcattagctgagctaaatctctcagaatcagagccagccaccttcgttcctcttatatatgtct

SEQ ID NO: 191724 - DNA, 420 bp, Homo sapiens
gaagatttcacaggagtccgtgtcttctgtcagcacctatgaacctgtggccaactaactttgttagcttgtaagtagggtaaaatctcagacccttcacggttcttaacaagcatttaggtcatatgaaatgcagggtaaatatttgataaatgttataataataaccattattctttatcagtgatcatttaggcattgtggaagatgatgagttagacataccagttaagaggccatagtccaagatgatgaaaacataaaaacagatattgtcagtgggaaccgaatagagagaagagagaactgagagaaactaatgagacattgacaatattgggggattaactggataggaagaaagagaatcaaggatgacttcaagatttatggttttggaaagaaacagtagccatcagt

SEQ ID NO: 191725 - DNA, 385 bp, Homo sapiens
tggtaactggacatcagcccagaagtgatgcctgaattggcgacagacaataaaaagttagtggcacgcaatgatatttaaagccataccagtgaaagcagagagaaaagaaggctagaggaaccttgaagaataggaatttctaacgcatggggaaaagaaaacagaaagtaaaaggaacaagcaaaaataaaaggtgaaagagcactcagagagataggagtgggatgtcatagagtcttcagagaagagaattggaaggaaggagagtgatcaaatgcagtcaagaaatcaagaagtcttggccgggtgcagtagctcacgcctataatcctagcactttgggaggctgacgggggtggattgcttgagcccaggagttcaa

SEQ ID NO: 191726 - DNA, 422 bp, Homo sapiens
caacactgcaggaagtgagtccaggtaggaaaaaagtgccttccgaattctggggcccaaggtgcctaccctgcagggaatagtaaacagacactctctggactgcgggggccaaggcccgccacccaaggcccttagcagccggcatataccacctgtgggtgaccttgtctacacaggactttgctatccatccgccaggacctgagggaagagaactgccggaccccattcctgccccttctgccaccatttcagacaccccacagggactcattttgggggttcccaaatgagttcccactgacttccaggaaatccataagctgctctatgaccccagcttgggtgaccatctctccttgccacgctgacccttttcccctgacctcacagtgcctcaagctccaggaatggctcag

SEQ ID NO: 191727 - DNA, 515 bp, Homo sapiens
cacaggcacaaccccacggtcccttacctcctgctcatactgggtacctatcacttcccacccgtggcttgctgcttgccttggaggtgtaagggtctgtgggacccacctggtacccacacatgcacaacctagaagtctatgggaattaatgtgccatgaagcaaacctttttccagtgagatacagaagctgaggggtccgtccacccttcctttagatggattgccctggaatgcagttatgtatacatcctcctgggagacagctttaggagaacaagcaaccaactgtacttgcaccaagggcaaccaacttcaaaatgcacccttgaactgacttaatcttccttctcccttcactcacctttcccctacctctgcttcctgagagcacacttcttgaaaaaataatagcacatacgctcttgcctcaagctgtaggttctccaggttctagggtacccaggtatagcagacactacggatgctctactcagcatcccttcagctttt

SEQ ID NO: 191728 - DNA, 202 bp, Homo sapiens
ttgggttggtgggggacaaggaatgctattggaatgttttagtgacttgatgtgacttactttttaataggaccatttgggctgctcagcccatgatgtttaaaaatgcaatcaggtcacttccactgtttaaaacctttcaatggattctggttgtacttagaataaaatctaagctcccttagctattattattatatta

SEQ ID NO: 191729 - DNA, 724 bp, Homo sapiens
caaggtgttctttatttaggtgaatggataaataaactcatacttctagacaatgggatattattcagtgctataaaggaatgagctgtcacatcatgaaaagtcatggaggagcctgaaattcatcttactaagagaaagaagccaatctgaaaagactgcatactgtatattttcaactatctgctgttttggaaaaggcaaaactaagaagacagtggattggaggggagggagggatgaataggcagagcagagaggattttttggggcagtgaaactactctataatgatggttacatatcatcatctatttgtccagacccacagaacgtacaacaccaagaacgaactccaatgtaaattatggactctgggtaataatgatgtaccaatgtgtgttatcagttgtaacaaatgtacactcttgttggggatgttgatagtcggggagacaagacagggaacatatgcgaaatctcttccttctgctcagtttcattgtgaacacaaaactactttaaaaagtaaagtttattttaaaaagaggaggtcttaggacagaaccttagagaattcttaatattgaggaactagccttagaatagttctgctcttccttgtgaaaataattaacttaaatatctgctctgaatataaaactgaacataagctgtttttgagtaaattttctgtaggcaaatgatgaaataattttttttt

SEQ ID NO: 191730 - DNA, 702 bp, Homo sapiens
gacagggtggagagtagttgttgtgaggatttttataaatgagagaatcagacaaacattctcatcctgaaagctgcctgtgagtgactatattacccgttcatccgacaaatacatatcaagtgcctactatatcagcagggcactaggttctggggatatcagtgaacaaaacagacgaagatccccgccttcgtggagcttgcattccagggggaacaaaggacagtaaatgtaataaacgtgtccaaagggagtggcacgtcactgtgtacttggcaccaccctggtgctgggaatggaaactcaagtgtctgtctgctcagggtacatcacatctccacgcctgcccacagtgtcctcactggagtcaacagcacttgaataatggagaaagaccctaatacttggaatattgcccattgctgaattcagtgtccaacacatggcaagcacacagtaaacttgtactgaatgtactgaacagtaaacgaatgaatgcgtcaatctgtgactcaatcaatcacatcgttcacttgaagggcagaaaaatgagggttctagaaagaaaagtgtaccagcaaaaaggggtttgccagcatgaggacctactgtgtatcaggcactccctgtccacgtaagacagacagacacccacatacacacacacacatgcatgcttgtgcaaggctgagcacacat

SEQ ID NO: 191731 - DNA, 181 bp, Homo sapiens
catgacctcatggcacacctctttcagaacagacattttctgctaacaaatattgcttaaaataaaaggtctcaaagctgggaaatgggaatctcttttcaatactgaatttataaaaatagcccgaaaatttgtcttatatctctctttactaattcatgacttcagagctaaacccaaa

SEQ ID NO: 191732 - DNA, 391 bp, Homo sapiens
ggagatggaggcaggagaatggcttgaacctgggaggcggaagttgcagtgagctgcagtcacgcctctgcaccccaccccaggtgacagagcgagactctgtctcaaaaagaagaaaaaaatagtaaatatttttttaaaaaaagattgaagaaaactcaacaaaagtctcagtaggagacaatatcaagcagtccaacattcttgtgattggagttctaaagaaaaggaaaggggcagaaaaagcattgaaagaaataccagcccaaaacataagaaaactacacctatgtgtatatatagtgaaactgctaaaaggcaaaagtaaagagaaaatcttgaaagcaacaaggggaaaatgatacatacagggcaacaatgggaaaaaaaa

SEQ ID NO: 191733 - DNA, 118 bp, Homo sapiens
ccctgttcctgctctggatgcctagccctccagcaggagttataagttcttggtagaaagccttaacttcactgaagaaaatttagaaattatggatgagtacccccaaatttaaaat

SEQ ID NO: 191734 - DNA, 522 bp, Homo sapiens
cacacttggacaagggaggagaaagggttcttatccctgacgcacgtggcccctgcggctgtgtcattcccctattggccagggttagaccgcacaggctaaactaattccaactggcgaatttaaagagagtgatggggtgagcactttggcgggagtccgggcagagcaggtagcaggtaattggaatgagttagggtggagcaggtgatcagaatgagtcagggtggagcaggtaattgaaaaaggttgctttacgaggaagtttgaaagtagaagccaaataattgaacatactgacatatcctttgaaaataaatgtagaactcttatctaacagtcccatacaagggaaggcttgttatctttcgactttttcataatagccaacctaacaggtgtgaggtgacatctcattgtggttttgatttgcatttccttgatgattagtgacgttgagcacctttttatatacctgttgaccatctgtacatttctagggaggcaggaaggaggctttgg

SEQ ID NO: 191735 - DNA, 374 bp, Homo sapiens
taccttctctctgcaaagcctgtccctggcctggacagctttccaactggagggcagcagcgaagagcacagctctagactccctattcttccacttactgtgaccttgggcaagtgacaaggaccctgagcctcctctgcaaaatgggaatcccaagggcacttgtggggtttaaagattaaatgaaccaatacatgtaaagcacccaagagtgcctggggcagtatcttccaggtctgtcactgctcttaagcaaagtccagaaacccagctcacactcgccctagaaaagccgatacacttgctgtggtaacctgtgtcacacagtagctcatttacctgcattaccattaattcagctgtgggctctgga

SEQ ID NO: 191736 - DNA, 372 bp, Homo sapiens
acggcagcagcctcttagtcctctgaatagatgactttattccttgtattctggtacacagaaatctcttgaattaggcttattttaagaatagagtttagataagtttcccaagctataattcatcatgaaccttattttcccaagtctagaagattctcaatactagtactttcttgatcttatcagagggtgtccatggaaggtcatgaccatcacccagctgagtgcagtagaaggaagctttctaatgtaagttgcatcacagtttcagagatgtgagagaaattcagaaatgtgagggaaattgtgaaatgtaaaacgtgagggagaaaagcattcagaatggaaaaataagacaaagagtccctt

SEQ ID NO: 191737 - DNA, 666 bp, Homo sapiens
ttagacatgggcttcaaccatgcttttgagatagccctgtgattgctctatgactattttcccagtctctaatcaactttcatgaatttatacacaagagaagtgattcccatgtttcatttgatgtgtaaatagatgggtagctgttttcaccacaaactctgcctcctcttgggtttcacaatagcactccccaaaactgcactctgctaaccttcctgtaagacatcacacctctgttaatattaaacacacacagagcagctctggtgtcgatgctgagcagtgaagcatcacacagaaagatgtccaaggttaggagacaatgtgggtgaaagacactgatcatcatacaaaatatgtagggaagtggcacagaaaggttggtattaggtgagttggtgggtggcagtgcccctcctccatcagggaatgacagagatgcctgctcttaggagagtattggagaaactaggagaagatgactcatcaagaggcatgatattagcgaagagtattgtgcaggattcaccagcatgcctatgcaaaatgtcaggtttaaatgaaaccatcgcaggtcattgtattttacacagtattgacatcaaacccatcggactgtggtggatggtgtcactcacacttgctgtaacacaagcagctcgc

SEQ ID NO: 191738 - DNA, 451 bp, Homo sapiens
agggtgggcctgatcggagaccatcaaccatctcctgtaagtctaaacagaggctcagaccgggagaaatagattcatacataactgaatcaggtccttcggaggaaagttgatatcaacattccttaaccttgacactaaccactgaggtgtggtcactgttacgttttgtaaagaatcggggtgtggcctctctgatattataggtccaaaccaatggtctctaccttggtcattcccatgaaaactattttgggattgtgctctgtccttcagaggcttaacacaaaccatacctgagacttcagccacacataaacacactccaatacttcctcccaaaccttttaagctgctttgtacgaagcacagtgacatcacacagcaccccaaagagggacaggcacccccatatgcacttgataggccggctcttcccagaagcatcatc

SEQ ID NO: 191739 - DNA, 283 bp, Homo sapiens
cggctggaagggagtggtggagagggcagccgttgtgggtgagatcaatgcattttgtttactacacataaaatctcattcctttgttgaatttcaggtcattcaaaaagtcttcaagattttattcacagcaaggaataatgacagatgtttacagagaaagttgctgctgcttttctagacagttttcagcagtttcccctctgttctctgcaggcacgtccttgtgatgcccagggctgacttggcttttctgatcccccgctaacctgtgtgtccagtt

SEQ ID NO: 191740 - DNA, 205 bp, Homo sapiens
acagagtgagactccatctcaaaaataaataagtaagtgctgagaataaaataggagttgtcagccaggggtttgtgaaaggtggaactgtcttggcctcctggtgtagtgagcattccagagaggccttccgaaatgaacaataaatgggataatgcctcattttgttcagtaaggaagtggggtggtgtgagttgttcattca

SEQ ID NO: 191741 - DNA, 315 bp, Homo sapiens
tccatgagtagattgagtctttccattccatcttcaggatgggaaaggaatgttttccatgtgagctctaactgtggagatgccaggggtgtgagggctcataaaccacctacagttgatttttggacagtttgatggtttcatatactagtgaagattcagtttctgaataccttaaacccccttgaatagactgaccctgtgatgtaggttctaatggtgttattggacctgttgccccccctctgcaactcattagggtaatttaacctttgtgggtggttagaaagcagaaataacagtccttaccacttt

SEQ ID NO: 191742 - DNA, 177 bp, Homo sapiens
  misc_feature (100)..(100): n is a, c, g, or t
actgcccatataaattttatgatgcatttcctttagattccatctttttaaccacgcacaatctaaagaaaggaaaataacagtctgaaagcctttggangagccaagaccaggcacctagaggaaatcaggtaaagaattgtagaacctgaatatggtgtaccgcagctacgaatt

SEQ ID NO: 191743 - DNA, 209 bp, Homo sapiens
attttatattgtacctacctccagaataatctggggatgtttcttttatcttcactgctgtttttacaccacagcgtttaaccctgccttacttgttactacccattccacagtagcctaattcttccctttgtcttctctatttctgggtctgtgtcatgccttatatttagaacaacatgatcaataaagttcatgaagttttctcc

SEQ ID NO: 191744 - DNA, 205 bp, Homo sapiens
ttagtctattcaggacctatctgctgtaactggggatgaggccaacttctcccaaagtacttagctctggggagaagagatggatgtttggacaaaatcagaattctctcgggaagaagacaaaagcaaaaagttagttgagtaggtaacctacaatgttctctacataaggacactattgctgaagtcagtaaatgtcacttag

SEQ ID NO: 191745 - DNA, 400 bp, Homo sapiens
aaataattctcattttccatatccaaatagttacatagttataaagctaatgtgtatactaaaaagggctcacttgagaaaatcgatgttccttcaggcctcatactttagctcttctttctagctttcttcagtactttatcagatccctagttactgttctattcttaactcttctgctttatatcctgtgtgctattgtttttccgtcttgaatctttagtctttccctctcccaatccttcctttcaaccccactgtgctattctgcctgttcatcctaaaaagctttatctctgctctgcttccctcatggactatttgtcaaaatttatactctatcccataacttttaaattctgcctctataattcctttgcagtatctctaatataactta

SEQ ID NO: 191746 - DNA, 359 bp, Homo sapiens
cactctgagggtgtcatacatgcctgaacccaccctgcagagacagagtggacagctgtccatgggctgtgattggattttgcttcagggacctctcgacaactaccccggctggtccaggacaactgcctgctggaaattctcacaatcacttatctctttggacttaggcattgaaagttgtttaaatgcaaattattttccacaaggtagagacattatcattcattaatatttgggctttaatgagtctatcaacttagaagagaatgcgccagggtcctcttttggtaatgggagccaaaaagccaaacagatgtgttttaataacgacaggtcgaagaggaaagagtaagttc

SEQ ID NO: 191747 - DNA, 383 bp, Homo sapiens
aataggcagagcacagaggagttttagagcagtgaaacgatattgtatataataatgatagatacatttgtcaaaacttctaaaagagtgaaatgaaatgtaaactactgactttggttaataatgatgtgccaatgtaggttcattgtttgtaacaaatgtatcactctggagcagcagatcgacagttggggaggctctgtgtgtggggagcatataaaacttatttgtactttttgttcaatttttctgtgaacctaaaactgctctaaaaaataaagtctattaagaaacaaacccaaataaaaccagtgtaccatcctttgttaaccttctctagactattgcctttgagaagaatggcttagaagatagcatgaaat

SEQ ID NO: 191748 - DNA, 331 bp, Homo sapiens
tctaccactcacctcttcacttactcttctctagccacactagtctcctttctgctcctcaaactcaccatataagcctccacgttagggcctttacaatggctgatctcctgcttctccctcagacatcctcaaggctcactctctcaccttcttaaagtcttcgctcaaatctcacctctcagcaagacctaattcaaattgtgattcccatccttttactcaaacagggctctattcttcctatataagcacttttcactttctaatctactatacaatgtacttgtatttattttttattttctatctcccccaactagaatgtaca

SEQ ID NO: 191749 - DNA, 204 bp, Homo sapiens
ctaaacctgtctccatctattcagaacagtgtgccttgtactgacccatttttgttttttaactttagcctgttgtcaattatgtcatgaaactcccaagtcatatggacaagcccatttataattctagttgaggtcacttgttaaaagttttcatgttttgcaaaatgtacttaagtttgagtttatgttttgtctaatagg

SEQ ID NO: 191750 - DNA, 933 bp, Homo sapiens
atgaaactaggtatatacgcctataaaaggttcatttgtttttgacaaatttgtaaactctcagccattttttttttcaaatactttttcagccccaccctccctctcctctttcttagagccatgattcaaatgttaggtctttagctagaggcccacaggtaccaattgcagtctgttttctccgctcagatttttatttcatctttaaattcagtgattgttttctcgttactcctcattctgctgtttaacccatccagtgagatttttgtttcatttactcttctcaattctaaaatttccatttgattctgccatcttctaagacttcctatttttttcatttattccaagcatgttcatgattgctcactgaatcttttttttaaatgatggctgcttcaaaatccttgtcagataattctaaaatctgtgttatcttggtgttggtgtctgttaactctctgttctcattcaggttgacatttgcctggttcttggcataagagcatggctttctgttctattctgcccatttgggtttgagacgctggaccttgtttgaatcatgttttcgtaggtctactctgacaccacccaagtgggtgacgggggcatgtggtggggttgatggttcaggctcactactgagcccctttgaatacaggcaaggggaggggtggctaagtgcagcttcccgctagaacacgtgggtcccactgataccatgggagtgggggcagttgttcctcctgggtcagggtaaaagtctaagctcccaacatggcctccactgacactatgggggtgggcctcattaccatcctgcagggatagatgtcccaagctctctgctgggctagctctgacactgctccagcaggggatggggaggcctcattacaacaggcaaagaaggtctaggctccc

SEQ ID NO: 191751 - DNA, 879 bp, Homo sapiens
atgaaactaggtatatacgcctataaaaggttcatttgtttttgacaaatttgtaaactctcagccattttttttttcaaatactttttcagccccaccctccctctcctctttcttagagccatgattcaaatgttaggtctttagctagaggcccacaggtaccaattgcagtctgttttctccgctcagatttttatttcatctttaaattcagtgattgttttctcgttactcctcattctgctgtttaacccatccagtgagatttttgtttcatttactcttctcaattctaaaatttccatttgattctgccatcttctaagacttcctatttttttcatttattccaagcatgttcatgattgctcactgaatcttttttttaaatgatggctgcttcaaaatccttgtcagataattctaaaatctgtgttatcttggtgttggtgtctgttaactctctgttctattctgcccatttgggtttgagacgctggaccttgtttgaatcatgttttcgtaggtctactctgacaccacccaagtgggtgacgggggcatgtggtggggttgatggttcaggctcactactgagcccctttgaatacaggcaaggggaggggtggctaagtgcagcttcccgctagaacacgtgggtcccactgataccatgggagtgggggcagttgttcctcctgggtcagggtaaaagtctaagctcccaacatggcctccactgacactatgggggtgggcctcattaccatcctgcagggatagatgtcccaagctctctgctgggctagctctgacactgctccagcaggggatggggaggcctcattacaacaggcaaagaaggtctaggctccc

SEQ ID NO: 191752 - DNA, 454 bp, Homo sapiens
ctgaatttaaagatgaaataaaaatctgagcggagaaaacagactgcaattggtacctgtgggcctctagctaaagacctaacatttgaatcatgttttcgtaggtctactctgacaccacccaagtgggtgacgggggcatgtggtggggttgatggttcaggctcactactgagcccctttgaatacaggcaaggggaggggtggctaagtgcagcttcccgctagaacacgtgggtcccactgataccatgggagtgggggcagttgttcctcctgggtcagggtaaaagtctaagctcccaacatggcctccactgacactatgggggtgggcctcattaccatcctgcagggatagatgtcccaagctctctgctgggctagctctgacactgctccagcaggggatggggaggcctcattacaacaggcaaagaaggtctaggctccc

SEQ ID NO: 191753 - DNA, 553 bp, Homo sapiens
tggatggatggatgttggatggatggatggatgttggatagatggatgaatggttgttggatggatagatggaggctagatggatgagagtattgcagaaaagctgtatggaagtgaaaatcttaaaaacaaaatctatttaaaattccttcctgggagaagcactctatattgtattaattaactcagcttgctaatcagggaaatgctaacgatctctccttccagttgctgaggagaggtgctggaagagcacccgcctcattcatcatttcagcttggtgctggctctgtttatttttctggtaaataaggaaaagaaattacaccatactttgagctgaaggtattttctgttggagttcaaagctgccttaatttctatcttgtggatgcatggtatacgttatctaactcaaggctggggctgtgtcacctcttatctgtcacagtgcctagaccagtgctgaacacatacatgccaaacacccaggggttcaccttaagaaataaatcctaaaggatgtgctatgtcagtttatcttcattcact

SEQ ID NO: 191754 - DNA, 395 bp, Homo sapiens
tcctcctctgtcgcccaggctggagtgcagtgacacgatctcggatcaagtgattctcctgcctcagcctcccaagtagctgggattaccggcgtgcgccaccacacctggctaattttgcgtgtttttagtagagacagagatttcaccatgttgatcaggctggtcttgaattcctgacctcaggtgatccagccgtcttggcctcccaaagtgctgagattacaggcatgagccacgtgcccggtccttttcccatttttaaattggatttatttgtaagagctctttgtatattaagaaaattatccctttgtcacagcagttgctactctttctcagtttgctgtttgttttctgctggtttattaaatatagaaatttgaaattttttt

SEQ ID NO: 191755 - DNA, 572 bp, Homo sapiens
agcgagcctagagggcagcacgtgctgttggctgagcaggtggaggatgccaccaacggcctcttcagcaccctcagcagctcggccatctgctccagcgccacgccaggtaagatcttccagcctggagggagtggaagtgccatgtggggtcggggagggctccctgaggcaagaggtcaggacccaggagcctcccaaggatggagggcaggcaagagaaacagagaccggcagcctccaccctggatgctctgcgtctccctgtgccctgccctgtgggtttcccagctgggagccccgagcttgtcttcatggaggtagaggggcccagggtttgagacccaaatgtagtaggttccctgtcccctgctcaagagacagagccaagtctcctccccctgccttggaccacacagaggagcacaaggaggctttgtgcttggtgcgagatccctgcattctagtcgtccttgtcagggtccacccaggagccacattgatgacgttatgtggaatgtacatgtgtgcccattacgcaaaagctgtgtggggtggggcccagcagagga

SEQ ID NO: 191756 - DNA, 340 bp, Homo sapiens
tttctaagacacagaaaaagaaaaggatatccattttcaccacatccataaaacatagtactgaaaattctagccagagcaattaggcaggagaaaaaaataaaaggcatccaaattagaaaagaggaagtcaaactgtccctttgcagaaataatcttatattcagaaaaacttaaagactgcaccaaaaaattcttagaactaataaacaaattcattaaagttgcaggacaaaaaaaaattggcacacaaaaatcagtagcatttctatacatcaattatgaaaaagctgaaaaagaaattgagacagcaatcccgtttacaacagtcacaaaaata

SEQ ID NO: 191757 - DNA, 228 bp, Homo sapiens
acatgtccatttcctgttgagggttaggggtgagggatggaaggtaccttcattgttatagccagcctattgaattgggggcatgttcttcaaaggaaaacaaaacactgttaccaaaaggcagagtgagggatactacacaggtagaaacaacagactctataaggacccttggcggattttactttggtaacattagtcatgccactccctaatgtgacttctctg

SEQ ID NO: 191758 - DNA, 679 bp, Homo sapiens
agccagtggtgagcatttatcgctggttagagaattgaatttggcaggagagatttctgtgcatttgggggattaatttgtcaagcaccttcgccagcagaaatgctaaggatggcagccaagagtagggtggtgcaggcagtctggcaaacataggccaaaccctcttttgtagctggttctctctagccctgagaagaaatgcaacatcactcagctttcacaccccaggagcacggctttcccttaggcacactgtcttctccccaaattagcactgtctcatcaggggccaacccaacagggaagccggggttgagaaggtggtggggtggccagacagaatgaggggacctgggaactaggcatgttcccctgggtggagcacatacttggggcctgcctatcaagaatagcaaattcacaggtgtgacaggaagtgagagaatgagccaggaatgagcatcaggtggggtcggctacagtaaggagcaagagagtccccagaggtctcagaaatgcaaataggtagagatctggcaagcagactggtgggtataatagtcattgtcattcaaaggtgtgctagagacagcttataccacttctctagaggcaattgttaaattttcaaaaagtttgcaagccagttgctaaacacagccattattaaaatgta

SEQ ID NO: 191759 - DNA, 175 bp, Homo sapiens
aaatgccaaccatgcctttctttgctcaggggtacaggggttgtaatataactttcaacaacaatagatagacttcatatgcctgtagtcctagccactcaggaggctgaggaaggaggatcccttggacccagctcaagcaaggttacagtgagctatgatcacgccacaagat

SEQ ID NO: 191760 - DNA, 398 bp, Homo sapiens
acatctaaccagcgtgtggaataatgctcctgaggctagaggtgcacattcttcatcctatcagatgtggtcaggactgctggactggagcagcaagaagggggctctggggtgtctaatgtgatttttcaggcctcagtgtgaagtggatgaaatatttctctggattatctgctctgtatactcaccaaatagccttctgttgacttacatgtcttctcaggtacctgaccttgggaacacagggctatgaataagtaatgaatggaatggttgctggcatgtatggtcactccattgaaaattactacacaaatattttgatctataagttcatctcttgttggtcagtgaccaccaatccgacgagctctaggtgtaatgacaaattaaatgtg

SEQ ID NO: 191761 - DNA, 780 bp, Homo sapiens
agcggaggaggggaaatggtcaaagagcgatgggcccagaaaagggtcggacccagatggagatgccactggctgctagcagacccccacgctgggtctagcccacccaatcccatggggatgctcctgtgctctgcagacatctgggtgctgccacaggggcccgacagagttggcatctgggtggatctgagccaagtggtgcttctgggcctcagcaagttgctggtgctgattctgggcagccaactgtggcagcatcttcaggtgcgagtgctgctgggtgaagctgcgtgggcagtccagaaagtgacgtgacagtccacagggaccgacgtagggtttccagcccctatctgtgcagatgctgtcctccaaaccatcacggtccctctctggctggggacgtgcgcctgccactgctggcttgccagcatgatcattggttgtgacctgttgagcccatcttgccagcctcacaaaggacagtactagctgcttatgacaggaaagtggaagaacttggcctggatatttctggagaattaccgtgtgtgctagtcagtctttcgtgtcaaccaggccaggctgtggggcccagtgatctcatcgagaggggccgaggtgttgctgtgatcgtgtgctgctggaatgtggtgaacacctacagtcgatttcacctaaagatcatccttgagaatgtgggtgggcctcatcctatcagctgaaagctttaagagcaaaacccgaggtgtcccagagagggaattctgccttgag

SEQ ID NO: 191762 - DNA, 616 bp, Homo sapiens
  misc_feature (45)..(45): n is a, c, g, or t
gtgttcatgcagtctttcgtgtcacccaggccaggctgtggggcncagtgatctcatcgagaggggccgaggtgttgctgtgatcgtgtgctgctggaatgtgcatgaacacccactgggtgaagctgcgtgggcagtccagaaagtgacgtgacagtccacagggaccgacgtagggtttccagcccctatctgtgcagatgctgtcctccaaaccatcacggtccctctctggctggggacgtgcgcctgccactgctggcttgccagcatgatcattggttgtgacctgttgagcccatcttgccagcctcacaaaggacagtactagctgcttatgacaggaaagtggaagaacttggcctggatatttctggagaattaccgtgtgtgctagtcagtctttcgtgtcaaccaggccaggctgtggggcccagtgatctcatcgagaggggccgaggtgttgctgtgatcgtgtgctgctggaatgtggtgaacacctacagtcgatttcacctaaagatcatccttgagaatgtgggtgggcctcatcctatcagctgaaagctttaagagcaaaacccgaggtgtcccagagagggaattctgccttgag

SEQ ID NO: 191763 - DNA, 412 bp, Homo sapiens
cccccaaattacctttacaggcccagcatccaattcagtcgccttcaaggagtctcttcagtctaatttattctagaacaattcttcaggcttcccttctctggccaagatttttgaaaaatacaggtcaatgactttgtaggttgtcttcagtttggatttgtctgctgtgtcctcatgatttatgcatctctggcaggaataccacagaaacgatgcgacattcttctcagtgtaccatattaggagtcacacaatgtcaacttgtcccattactgctgatgttaatgtttaccacttggctaagatgatgtctgccaggtttctccactggaaagttaacagtatttagtacgtgttaagtgatgagtaatgaataaatatttcatagggagatgttctgagagtataa

SEQ ID NO: 191764 - DNA, 511 bp, Homo sapiens
gttgtctttctctcattcaggttatgatttcctagttcttttgtctcataagtgatttttattgtgtcctgaatttttttttatattatgagaatttttcttattatttcgtagatggttccctattgatgtgtaacctgagagctgggtgggtgtgcgtgtttatcttcctgatgggagaagactgggcgcatcttcgtcccatcagacaagctgacctaggctgacaccttcactcaggcaaacagcaaatctcacagttggaaaaccaaccctcgcttggccctgccccggggcttaatcggcctattctccccctgcctcctcttgccctcccacctactgctctcctccataccctgaaaggatgcattatcttcctccagctcctgctcccaggaccttcgcctcaagccttggcacagtcaaagcgcacccagggtgggaaatttccaaacagtgcaggagggcggccagcggagcccactcactctccttgtgaaacctcgcg

SEQ ID NO: 191765 - DNA, 290 bp, Homo sapiens
gttgtctttctctcattcaggttatgatttcctagttcttttgtctcataagtgatttttattgtgtcctgaatttttttttatattatgagaatttttcttattatttcgtagatggttccctattgatgtgtaacctgagagctgggtgggtgtgcgtgtttatcttcctgatgggagcacgcagtcttcttcccatcagacaagggcttctggaatttgtcgatatcacagccaccaaccacactaacgagattcaagattatttgcaacagctgatgggacgaaga

SEQ ID NO: 191766 - DNA, 426 bp, Homo sapiens
tgactcagggatccattgtttcattccttcattttagagtccttttcttcttgtccagggacaaattgaggattttgttggggcctggcctggatgtggaggaagatcatttttgccttcattccattgttcagacctagttataggttctaacctaactgcttgggaggctgggaagtttaactttctttatgctcagaagaaggacatgggattaatagccatatgggcaatctttgctacagtaaatttaaattataaattgatagaagttaactagttaccatgaaaaatgtgcttaactgagtgaaacattggaaaacattgggatagagcagttttctaaaatcttacctctaagattatttctagttcaaacaatacaattattgtgttctgtatgcctttaattggtggaagtgagta

SEQ ID NO: 191767 - DNA, 241 bp, Homo sapiens
ctcataataaccctatgagagaggtataatcctgggaacttcaatactggaggcttacaaggtctctggagccatgcccattcctgtccccactaaaggcttgttcagttcaactctgcctgcattgggaaagctatcttacattcattccagcaccttctgtacttaaatctatcagtttcctgtcacttgtggccaaaaaaaaagataactgatatagaaatgagcactagaaaataaa

SEQ ID NO: 191768 - DNA, 398 bp, Homo sapiens
ttctcaccttccttattcttagggttcacccaaacatatcaaggcttccaaacagaactattggaaagctgcctcttttctcagcacttgtgctgcatggccatctcgtcccgcttcgggagctgggggaattaagcctaggggcagcttccagtcctggggtgtagcttgggacatgtgctttttcctgtaggcttggccttccacaaggaagaggaagagtaaaacttggcagaatatccacatttcccccaaatccaaaagcaaaataaaataccatgtgaacctagtcactgatggatcctgttaagtttcagcagttatatgctaacagctccagaagacttctggcatttgcaggggtgtgtgtgtgtgtgtgtgtgtgtgtgtgtgtgtgt

SEQ ID NO: 191769 - DNA, 381 bp, Homo sapiens
cagccaggaccacaggaatgcaccaccatgccccgttaatttttctatttttttgtagagaagaggtttcaccatgttgcctaggctgttctcgaactcctggactcaagcactcctcctgtcttggcttcccaaagtgctgggattacgagcgtgagcctacacatacattatttaatgccagccacaaatctattaaagtgctattattattgccattttaagatgagaaaactgagttacagtcaaaccaagtaacttgccccaggttacaaaaatgaagctaggatctgaatccagggcccatgctcttaaaccaccacaatccacagaccgtatttcttgccattcccagggatcccctgggttctctgcaagtcc

SEQ ID NO: 191770 - DNA, 552 bp, Homo sapiens
ctcaacctgtattgcttcctttctctccataatgaactcatgttccaaaacatggaaacagtttttggaacattatattccaaaaacagataattggaagagacagttggccaataaagatgaaagcataggccaggcgcggtggctcacgcctgtaatcccagcactttggggggccaaggtggacagatcacctgaggttgggagttcgagaccagcctgaccaacatggagaaaccctgtctctactaaaaatacaaaattagctgggtgtggtggcacatgcctgtaatcccagctacttgggaggctgaggcaggagaatcactggaacccaggaggtggaggttgcggtgagctaagattgcaccattgcagtccggcctgggcaataagagtgaaactccatctctacaaaaacaaaaaacataaaaaaaaggaggcaaaggctgtttaaactactcttgataaagtctttacgaagaaataaaaaaactttaagaccgggcacagtggctcacgcccataatccgagcgctctgggaggccaag

SEQ ID NO: 191771 - DNA, 455 bp, Homo sapiens
gaaaggacacatcattcccccagtgccagtccaggttcctggaacgtacacagtctccattgacagtgtgagagggggagggtcaccactgatttttaaaatctcattttaatatttcagatatttccaattataagtaactttaatacttcatatgtttacttttttggttatatttcttttagatctacagatatatttagttttttcatactagttttaacaaagctcagagcttacaattttgtctggtgttgtagcgtcacatttgagaactgctaatttgcttttcagatgtgagaagaagagaataattgcaaagtgtgctgtagatgaaagagtttaatgcttttgtagatattttgtgaaaagcagtgaaagtataggtctggttttttaaaaaatggaaatagatggtgcttacattcctacttgattcttcaatttataacaac

SEQ ID NO: 191772 - DNA, 267 bp, Homo sapiens
cttgctaaaggtgtttaatttaagctgagcttagttatagtagacaatcagacaaatccagtttgtgggactttctacaagacagttggcctgaactctaaaaatttcaaagtggtgaaaacgaaacgaaacaaaaagggcaggaagactgttctagatgaaagaagttgaaagagaaatgacagtcaagtacagtgtcaagcctggattaagaaaacaaaaaaccatagaggacattttggggataactgggaaaatttgaatatg

SEQ ID NO: 191773 - DNA, 470 bp, Homo sapiens
ggtctctaatgttaaagacgctcctaagactgcagttgctatcaggagttacagacgacgccgaccacaacacggcgctcttttccatcatgacacccagagcctgttgtttcaacgacaaccaagtgagcatttgttttcaaatacttggcaggggcagaggaagacaatcgtttactcattcagcaaccgtttcctgatcaacctcctgtgtgatggcagctcctacatggatccccttggactaatctcctctgcagtgtccacacagcaggacctgctggcagggccagaccacaaggctgacaccctccagctcctccgtgcgggcgggaattctcagatgtgcaaatggaggagatgagggcaggcggaggaggggctgctaatctgaagaaagggagaggagacgctggcttggggcttgcacacaccggaacaaatagacacacacacacagacacacacag

SEQ ID NO: 191774 - DNA, 155 bp, Homo sapiens
tttgaggctgcagtgagctatgattgcattgctatactccagactgggtgacaatgagaccctgcctgtaaaaaacagaaacaaaaatatcacaaacaaaaaaacaaagcacacattgttttgtgtataaaattatttaaagtgttggccgcaag

SEQ ID NO: 191775 - DNA, 192 bp, Homo sapiens
caacataatttcactgcttcatgtttactattctgtatcagtttacaaactaaaattaaactgacacacacttaacagaattcccgacaacacaataacattaccatacaaaagataataccaaggttgttatgagttatctagttctctgttacttccttaatgctgtaaactacaaatcagaaccccaaa

SEQ ID NO: 191776 - DNA, 404 bp, Homo sapiens
tatctgttcagcatgtatgagaatttaggccattaacaggtaaatgttaggtccacattatggtaggtccacagtatggatttgctgaataagtgcatgaatagtaagtaggtaaatgaagcttacttgcattgttaccagtcatttttattgttgctgtcatagctagttttagttctttttagctaaaaaaattactgaaacattgtaaaattttatctattaaaaagtggtaaaatatgatttcaactgagagagttcagagtcatcattgcactacacttgctatgctaacaaaaatcaaaataatgagaaatacattgagcagaagatctgtaaaatctttacactgaaaattacaaaacaaatccaaatacatagagagatatactttgtttatacat

SEQ ID NO: 191777 - DNA, 517 bp, Homo sapiens
cggaaactggctcactagatgttaaatctgcagaggaaactaaattgggaggtgttgcaaacaccaaagatggttaagtgcaaacagtcacattaaaaataagatgccagttagaaaaaatgcaaatatatacagagaaaaataatctgtagctgacaattcagtaagtgaaaaaaggaaaaattctgaagggtaaaagaggacaggtgctaggaggggctcactgcaagagtgaaagtcaggaacagcaggaaggaaaactgaattcaacccagaaaacaatatcaactccacacatgcagaaaaggcaaatcagatatgaggagataaaaatccaggaaaaggggaactccccagaaaaaggaaagggtgctagagagatctggactattaccaaagacttgatttgctggcaaaacaaacaaacaaacaaacaaacacaacaaacaaactaactaacacacccaatttccccttctgggatgtaatcaggagttatcactatagtttttttgaa

SEQ ID NO: 191778 - DNA, 657 bp, Homo sapiens
actccagctcagggcaacaacaatgtgggactccgtctcaaaaatataataaaagaaaagaaaataggctttactggctcacagttctgcatggtatacagaagtgtagtaccagaatcttctcctggtgcggcctcaggaagcttacaatcatggtgaaggcgaaggcgaaaaaggtgaatcacacagcaagagtaggagcaacagagagaagtggtggaggtcccagacttttaaacaaccagatctcatgtgaactaattgagcaagaactcacttaccaccaaggggatggtgctaaaccattcatgagggatccaccccatgatcccgtcacctcccgccaggccccacctccaacactgggagtcccatttcagcatgagatttggaggggacagacatccaaaccatattaagagtcatagtacaagaaacagaaaaacagaaggccaagtattgcacaatattgaacaatcttaagtaacctctaaaataactttaaaaagattgaaacaattttaaaaagaatggaaactataatgaaagaacaagatagtaccaaaaaatacaaatttataaaataagcatagagcaatgtactcaatgaaataaaaagcttaatagtggcataaaatgaaagagggaaaagtgata

SEQ ID NO: 191779 - DNA, 632 bp, Homo sapiens
actccagctcagggcaacaacaatgtgggactccgtctcaaaaatataataaaagaaaagaaaataggctttactggctcacagttctgcatggtatacagaagtgtagtaccagaatcttctcctggtgcggcctcaggaagcttacaatcatggtgaaggcgaaggcgaaaaaggtgaatcacacagcaagagtaggagcaacagagagaagtggtggaggtcccagacttttaaacaaccagatctcatgtgaactaattgagcaagaactcacttaccaccaaggggatggtgctaaaccattcatgagggatccaccccatgatcccgtcacctcccgccaggccccacctccaacactgggagtcccatttcagcatgtaatgttcgcggcaactcacatcagacgcatatcaagagttattgacctcgaatacaggacaccgggacgcgactactgcctggcccgactctggcctatgctcgcgggaccgtataacaattattaatctacagagactggctctggaactctatttaggaccgaatatggtagctgacaatatagaacaagtttggtccacaaaagctatagcctgtttacggtacagtcttcgcgcatgtcgtaa

SEQ ID NO: 191780 - DNA, 265 bp, Homo sapiens
agttatactgttgatacttttctttcagacacaagcatttatcaggtatctggttcatcttcaaactcaaaaaaaaaaatttatagaaacccctatgtagtctggtaagtccttcactcaaccattctttttaatatatggagatggagtctcgttctgtcacccagactggagtgcagtggcatgatctcagctcactacaacctctgcctcccgcgttcacgagattctcctgcctcagcctcctgagtagctgggattacag

SEQ ID NO: 191781 - DNA, 147 bp, Homo sapiens
tactttgaaaaacttcttaccacaaactgaaacataaaatgctacatatgattatgcccaacatttgctttttcaatatcctttacgtttttctgactacagcgaagaagtaactttggttaatctctttttagtttctacttacac

SEQ ID NO: 191782 - DNA, 126 bp, Homo sapiens
taaaacccttgtcaaaataataatcaagccattcatgagctgcctgtcaataccatgcttgtttttcgagccacagcttggggcaaggctccccgctaaattccttccatgattaggtgagaatta

SEQ ID NO: 191783 - DNA, 683 bp, Homo sapiens
cttttgtatgtatcctttataaaggtaaaagcttattgaatgttgatggtagtagcggtagcagaagagctgagttaaagcatgtatttaacactcaaagtgaaaatacagtatgtgtaagtcaaaagtaaccacctatagcaagagttattaatctggatttagttttgggctccttattggactttagtggattcagtaaacttttgaaatgataagccataagttgtgtggatatgtatatgcacaatattttttattagaaactcaatgttttcattagattttcaaaggcaatcgtaatcctgaaaggtaaagaaccattgctctatagaataaaggtaactgtaatgtattaaacatgttctaggagccaactacctattcagtattttcattatactaatttaatctatataatccttgtgaggggaggactctcatcaccattgtacagattaaaaaccatggctcaaacaggttaagcgacttatccaagcttagtaaatgatgggcttgggattccaggtcagctatgtttgactccaaaggtctttctgctgcaccatatgtatcagtcaggattcttagttgaaagctacaatactcaattatgctcatttaagcaaaaaggaaactgcactgggatgataccacagctcaaaaaacttacgggaagagcg

SEQ ID NO: 191784 - DNA, 193 bp, Homo sapiens
gatttggagcattttaccacccagtggaagactatgaaaactttgctactgattcatgcatttctaaaggttttccagtggagacacagagtaagggctgaaaggtagggacaaacatatggactgacttaagaggtccagtgaccccaatgagcagccatagtacatttaaattatttggggtggtaaagat

SEQ ID NO: 191785 - DNA, 515 bp, Homo sapiens
ggcaagtctctgaatttgtttttgaaattagtcttgaaagggactaaaaaaggtagatttaaagggtcagtgaagaaaataccttctccgagattaccttgttccacagagactgaaggctcactgtgttgaaggcatcatctacctctgtgaactctgctcacaaacattgaaaataaacagtgcacagtgactcatgcttgtactttgggaggctgaggtgaggggatcacttgagccaagagtttgagaccagcctaggtaacatagtgagaccctgtctctatttaaataaaaaataaataaataaaaatttaaaaaaaaagaaatgatcttattccctgaagagcttagtctagtgatagagagggattatagaaatagttccttttattataatcaagtagaagatgtatagggtactgtggaggggaagaagaagggacttgacctgacctaggggttcagagaaggcttcctgccaacacggagctggaaatcttccagtcgaatga

SEQ ID NO: 191786 - DNA, 267 bp, Homo sapiens
aaggcttggcagcacgcaagagaggccatgggcacccaaggaactacaagtgggatgggtcatctgaaacctccctaccaggaagtcaaggactagatggcttcactagaaaatctgacccaacatttaaagaattaaaaccaaaccttgttaaactctcaaaaaatataagaggaaggaatgcttctaaacacattctgtaaggccagcagcatcaccctgaaacaagatcaagccaaagacatcagaagaaaagaggaaagctac

SEQ ID NO: 191787 - DNA, 202 bp, Homo sapiens
agacgccccctctcccaccagagtctatactttgcatcactttagcagtttcaggctgtccttctaaacagtttcagacacttttaacaatttgcaacaaaagtgtaagccgcaaataggatgttacttctcataagtagcacctttctatttctgctatttacaagtagtatttttttttctcttttttcggacatggagt

SEQ ID NO: 191788 - DNA, 442 bp, Homo sapiens
acatggtgaaactctgtctctactgaaaatacaaaaattagctgggcgtggtggcacgcacctgtagtcccagctactcgggaggctgaggcaggagaatcacttgaacccaggtggcggaggttgcagtgagccaagaacatgccactgcattccagcctggcaacacagtgagacttcatctcaaaaaaacaaaaacaaaaaaactataacaatatgaaatagtgtgacattgtgtcgataagtaatggtatagatggacttctggaaatgattaatgtggaatggagtaggaaatgacttgtgatggaaggaggtcctctcctctgctctagagaagtgagtaggaggcagaagcaggaaggcattcctttgccctgaccaccactagaaaaaagataaatgaccgctgggcagggtggcttacgcctgtaatcccagc

SEQ ID NO: 191789 - DNA, 313 bp, Homo sapiens
ggaacaagatctcagaaagaataaagatgaaatgcattctcacacagccaaaggtaagatgcactgacctcttccttctgttaaaaaaacaaaacaaaaaactagccctgattcacacggaagatttttcttgagtcctcatgctttgcttgaaatcacgtcatggggaatgggtagtcggaggagggcaaaggaaaagaaagaagtctgatcgtttatcattctcctccctgggtatcacaaagtccccagaggttcaagtggacatggagagggaagagagaataagggtggggcagggatgtgggtacta

SEQ ID NO: 191790 - DNA, 384 bp, Homo sapiens
tcgatctagaggatcctatcggcgagatgacgactagggaaaacaagctgagaaaaaaaaggaaacaaaaagaagagagaaaatgtaaattctctggcctatagttagctattttctgcattttaacattttctgcataattaacaatgtcaaatccctttttcctgtaagctacggcctttaaggtggaactaagaaattgatagacagataaagaaagcataacatcaaaagaggtattcttctagttttatccctgcattaagatcactgaagataaactaaggatcaaaaagttccacattttcatttccaaaataccttatgactagtacaaatctaccttaattaagaagttactgctcttggcaaaaagaatacctg

SEQ ID NO: 191791 - DNA, 753 bp, Homo sapiens
acatggcaacccagaagtcaggacctagttgacaagaaagttcagaggaacctgagctgggtttggtgaaggacagaatttttgtcacctgacagtaactcatgtaattccactgacattcatgtttgctagatatgggggtgcagcgggtgtgcacaggtcagaaaaaatggaccctggagaaaatttagttttgctggacattagttcccagcagccactttatactatgaaaggataacaacaatttgggtggacaactagctagctgtctgtgccacaaatagagttctgccttccctaatcagtttctgtagctcattattaaaaaatgttttggagaatttcagtgtgaggatggtgattgtctgtctcttggtcaatttaacaatgtttctcatcacttttatggtaaacatgaatctccagtatttgtttacacagcccagcaaattccaatagcagttcttgatagcacccacacaagccgcctttccacttttatctcaattacttaaggtagcctatatactttctttattgttttgcttttagcttttattctaatttaccttcacaagagtacttatggccgtgtaattttgactaaattactttttctcttttgttaacatctcttcatgcaactttagatgccctcttcatctttcactgacggctttattgctgggccctgtttataaccagaccttgtagcattacccaaatatcaaacaattctctttcctttct

SEQ ID NO: 191792 - DNA, 424 bp, Homo sapiens
tgctgcttctcctcctcggaaaaaggcaatattacaagtaagctttttaggaacagtttaaccagttcatgtaaaaccgatcagaaacagcacacgtggctaggtgtggtggctcacacttataatcccagcactttcaggaggctgaggcagatcgcacaaggccggttgaagactagcctgagaaacatagggagactatctataaacaatttttaaaattagccaggtgtggtggcacatgcctatagtcccagctactcgggaggctgaagcagaaggattgcttgagcctagaagttcaaagctgcagtgagctatgatcgctgcattccagactaggtgacagagtgagactgtctctcaaaagaggggaaaaagaagacaaaaaggcacacatctgtgtgttctgatacggttttga

SEQ ID NO: 191793 - DNA, 431 bp, Homo sapiens
cacacgtacctcagaacttaaaaaaaaattaaaaataatttttaaaaaagaacagttatcccaaataacaattttaagaaattaaaaattgtatcatcagccgggcatggtggctcacacctgtaatcccagcactttgggaggctgaagtgggtgtatcacctgaggtcaggagttcaagactagcctgagaaacatagggagactatctataaacaatttttaaaattagccaggtgtggtggcacatgcctatagtcccagctactcgggaggctgaagcagaaggattgcttgagcctagttcacacctagcctgggcaacatagcgagacctcatctataaaaatttttaaatatcaaatttataaagtattcaaaaataatataatcaatatatcaataatgttttcactgatttttcaaggcag

SEQ ID NO: 191794 - DNA, 320 bp, Homo sapiens
ctcacaatagcactacacaagctcacaatagcaccacacaagctcacaacagcaccacacaagctcacaacagcgccgcacagctcccaacagcgccgcacagctcccaacagcaccacgcagctcccaacagcaccacacaagctcacaacagcgccgcacagtcccaacggcgccacacaagctcacaacggcaccacgcagctcacaatggcaccacagaagctcacaacagccaactgcgggcttgacattgctttgttttgtttgctttctagctttcctttattctgtttctgctgtctttcctggaccagcaa

SEQ ID NO: 191795 - DNA, 390 bp, Homo sapiens
tgtccacgtgacttactgcttcttgtcatttagatctcaactctaattgtcccctgacttctatcagtagtgctccatcacaccatcttacttttcctaaggcttaccactatctgaaaatagcctgcgtttctctattttcccctcagtaagaattaaaagttcatactagggcccatttcctagcagtgtttggcacatagtaagtatgctgaaaaaaaaaaaccttgactgactgaataaatgaacaaataaactcacttttaatgagatatcaaggttttatattaattacatgagccaagaattgtggtttcatttttaaaatgtgaggacctactggtttaatccttcatacttcacacatatgcttgtgctggaactatgact

SEQ ID NO: 191796 - DNA, 495 bp, Homo sapiens
tacattataccttgttgagagcagatctcttcttttaaataaccatagttaataaaaattgaacatatattaggcaacaaaaaaaccctttaaattccaaaaattgcaaatagcagactacatttttcgaatcacgatgccataaaaactaaattattatttaccaaaacaaaagtaaccctccttcaactgtgcagaatataaaaattcccttggctgggtgccgtggctcacgcctgtaatcccagcactttgggaggctgaggcaggtggatcatgagatgaggagttcaagaccagcctggccaacatggtgaaaacccatctctactaaaaatacaaaaattagtcaggcgtggtggtgcatgcctgtaatcccagctactcaggatgctaacacaggagaattgcttgaacctgggaggtggaggttgcagtgaccccaggttgagccactgcactccagcatgggtgacagagcaacactctgtctcg

SEQ ID NO: 191797 - DNA, 297 bp, Homo sapiens
tcaaaatgtttttaaagaaacttaatgaaatgcaagggaaatctgaaaacccatacaaagaagtcagaaaattaatttaggatatgaatgagaaatttaccaaggaaatagatatcttttcgtaaaaccaaacagaactttatggcaatgaaaaattcattgaagaaattttggaatgcatttgaaagcctcaagtatagatcagccaaggcagaagaaataatcttttaaattaacctagtgagacaaaaataatatataagactgaagaaggcctttgaaacatacgagactaca

SEQ ID NO: 191798 - DNA, 476 bp, Homo sapiens
atctggttacttcaccagctctgtgtgttctctagcaatttcacaatcactatgcaggagtcactgaggcctcgaatctgctttgcagtcttcatcccaaattctgccaccctgaatgttttcaagcatggccttacagttggacttgatgtttttcaaatctgtatgcacttccacttcaaccacacattcctcccttgtgatcatgctcaaaactctaatatcctgtcttattataacttcacattttccagttttcttactctctaccactaaacttttttttttttttaatgtacagtgtcttgctttgtcacccatgctggagtgtagtggtgccatcatggttcactgcagccttgaactcctggcctcaagcgatcatctttatatctcagctgggactgagtagctgggactacaggcgtgcaccactgcccccagctaattttcttcttttttgtagagacaagggt

SEQ ID NO: 191799 - DNA, 1013 bp, Homo sapiens
cacgccatcaccctaaatttattatggatgatatttctgtcacaaagaaaacttcaaaggctgagatcgcagaaatgtctcagttgacaagccactgacttgagttctgtgattgaaatgtactccaaggtcagcaaaccaaaaccaaacatcactggatgataatacgttcagtgtctcactggctataattcgtagatcacctttcaaagcattatatctttattaatcattgtaaatttgtgcttttgaaatcttagactcgtttccattaggcaatgaagcccagaagcttaatgttctagtctcattttaattttttcagtcttatgtgctgaattgtcagggtttaaaaatcgatttcacctcatcagattaaaaatatttatttatgcacatgttaacaatatattaaaagaaatgagagcttcaattttaaaaataggaattgtagctcattaagccatgacaatttggtttatatttacataattaataggaaggcatttatatgtttgcaaaataggtaagaaaaggtatttaacgtagatgaagcagaatgattgtttatcaaaagagtttagagatctttctagcagtctacccatggaaagttaggatctagaaaagccttctcaataagggaagaaacaacaaagaaacaacaaccaggaaactccccaacttatctctttaaattccagcctcttttctaagtggtggtttttacatactgtcctctggtaggtgggtaccctggccttgtgtattaagcagtgagggtggtttaaaggttacaaatgtgatcctgtcagattgacaactaactgttctaatgaggaaaaaatcctcaaagcatgaaatttgaatgaaatgtgtgattataattcaagtactgtttacacaaacctctggggaccttccgaataaatgcagagcaagtgagttagacaaacctctgggccttcgatacgtgtgtgtggatgtgcggtgtgtgtgtgtttattttagag

SEQ ID NO: 191800 - DNA, 673 bp, Homo sapiens
tcattatatacacttgtagcagatctaggatcaccatacttccgttgtatcaccctgcttccctcacttataacaacttttgggtaacagatactgtaaaattttttcccagattgtcattgccttttaaatttgttatttttacccaacaaagattttaacatgtatatagtcaaatttcttatttccttttccttatgaaataatctcactacatgaaattttattaaatacatgcctatcatatttgtgatttaaatttttacatacaagtgtgttaattgatttttttttttagaatgtatttagtcatatatagcctgctgtgtcagtttattgtgtaactcttcggagtttttactttcctttttttttactttttgtgaaacagggtttcactttgtcctccaggctggagtgcagtggggggatctccattcactgcagcctcgatctcgtgggctcaagccatcctcccgcctcagtcccccaagtagttgggaatacagggcacatgccaccaggcccagttaattttttcgtgttttgggtaaagatggggttcaccgtgttgccaggccggtctcaagttcctgagctcaagctatctacctgcctgagactcccaaagtgctgtgattacaggcgtgagccacggctcctggcccagagt

SEQ ID NO: 191801 - DNA, 199 bp, Homo sapiens
tcccgtttccttcatacagaatctgggtctctgggctcctgattgccttgtttggagtcccgttccatgggccttccctcttccatggttgcctttcccaagtctattctgctatgtctgtttttgaagacatccttctgtctcccttaacctgaggcacttccttcgtagtcaagcggctgtcttgttcgttccattt

SEQ ID NO: 191802 - DNA, 353 bp, Homo sapiens
atgagagagaagatatgaagaaacttctgctttaatgactttacaaagctggcatattacaatccttgacctcagtgaaagcagtcatcttcagcgttttccagccctatagccaccccaagtgtgaattctgtctgtcattggccttgggctccgtttgctctgcatcccgcatgtgaacactgaccggggcctgtttccctcctactgctccatctccaagagcagcatgacagtcacacattgctcaagctagaaatgtgacagtatctcagtctgtcctctcccttccatgtcatatctaagcagccagggagtcctgtctatcccaaggcacgcctcctgtccctttc

SEQ ID NO: 191803 - DNA, 305 bp, Homo sapiens
ctaattttgtatttttagtagagacagggtttcaccatgctggccaggctggtctcaaactactgacctcagatgatccgcccccctcagcctcccaaagtgctgcgattacaagcatgagccactacacctggcctagaatctcatttgatcctcacaacttcacaaaactgtgagctgagaatgtttggtcagggcatggagccttagtgcatctgaagttcttaaaattttgcaaagaagctcagagaagctgatttacctgcccaaggatattgagtggcagtcccaggattcatcacagg

SEQ ID NO: 191804 - DNA, 216 bp, Homo sapiens
gagctcggtacccaatcagtttacacaaaatactcagtgcagttttaaactatgcaaattagtacaccccagagcatgccaaggcaccagccttagaaatgtgtgccctgtgaccctgcatccacacctgggaatttgtcctatggaaataatcagtagttgcccaagaatgtatttatttggatagtcttcacagtgttgattgtgaaactgaaa

SEQ ID NO: 191805 - DNA, 472 bp, Homo sapiens
aggcgtgagcgcacgatggcgcgtccaacagatggaaattcctactttgcctcttggcatgcatacccagcctcttttctaaatgggtctcagtgattgtccaatgtgtgccccaaatcagatgaaatacaatcatcagatgcaaagcaggaaggtggtagatgacggacagtatgtaagtcggtctttgctgctagtggctttacttcatccttgagaaaatcatctttggtaaagtcataagtgttgaaactcgaaactagggtttaccctagacccacccattggccaaccttaatgggcacactgactttttaagagtgtgaaagttattagctaaatgacttgttccatggccccattatatcacagacatgttgatgtctctgttatcaaaagacgtgcaaaacaccccaaaatcgttgatgacattaacaggtaaaatgacagggcgcgccatcgtaacacagaa

SEQ ID NO: 191806 - DNA, 509 bp, Homo sapiens
agtaacccaagtttccaccaacagaggaatgaatggctaggcaaaatgtggtgcatacacacagtgaatgttactcatccttaaaaaggaaaggaatcctgcagtatgctgccacatggatgagccttaaggccattatgctaaatgaaatgagtcagtcacaaaaagacaaattctgtgtgattccacttatatgaggcacttagggtagtcaaaatcatagagacaggaagtagaatggtggttgccagaggctgggggaggaaggcatgagagttattgtttgtgggtatggaatttcgtttgacaagatgaagagttctggaaatggatggtggtgctagttgcacaacattgtaagtgtattcaataatattgctgagctgtacactttgataaattttgttatgtgtattttaccacaattaaaaaaataaaaacaaaaccaaacccttatgcgtggggaaaacaaatgactggatggaaataaaacaaaagcttatagtaat

SEQ ID NO: 191807 - DNA, 112 bp, Homo sapiens
tgttccaggctctttcgaatgaaacagaacaaattatattgtttgaatcataaaacatctagagaaaaatttcagtggaatctctgatccacgatgcctcaggggtctgggt

SEQ ID NO: 191808 - DNA, 287 bp, Homo sapiens
attccccaacaagagtacttctattcccctttcctaatttttttttaccatagcacttgttgaaaacaaacataatacatatgcatttttaacttatttgtggtctttctctctctaccccttgaagttaaaactctgtgataccagagactttgtgttcttcaatattctattcccagtgcataaagtcatgcttaaacattcagcaagtatttgttaattgatctgaatttcatcataactgttctcatgcaatttcatactttctgttctttttgggcactctt

SEQ ID NO: 191809 - DNA, 124 bp, Homo sapiens
ctgttgtgttaacaaatcacccaaaaacttactggcttgaaacaacaattatttcttttttctcatgaattctgtaggtcaagaaattcagaaacacctcatttgggtggctgtagcttggggt

SEQ ID NO: 191810 - DNA, 336 bp, Homo sapiens
actcactcgcctggctcccaaagcacgaccactgtcagagaaaaaggttgaatgttaaaaaggatcctcagtcccaaagagagagaggcgaggatgtaaaatgcagcattgtccgtcacagggcaaaactggaaacagtccaaatggctgtcagtggatgggttaaatgaactatggttcatccatacaatccaatactatgtagctgctctgaaaaacgaggtgaggccgggcacggtggctcacacctgtaatcccagcactttgggaggcagggggatcacttgagcccaggagttttgagaccagcctgggcaacatagcaagatgccgtct

SEQ ID NO: 191811 - DNA, 126 bp, Homo sapiens
tggtcactatacatgccagccatactgaacatttttcagttttctgaaaacatacttttccttctgtaagaagcagaacttccagaaaagactcaactgtgttactgtttaaagacagctgaagca

SEQ ID NO: 191812 - DNA, 379 bp, Homo sapiens
tcccgagtagctgggactacaggcgcccgccaccacacccggataatttcttttgtatttttagtagagacggggttttgccatgttggctaggctggtctcaaactcctgacctctggtgatccgcccacctcagcttcccaaagtactgggattataggcttgaactactgcacccagagtacagtgattctgttaaaacataagtcaatcacatcactcctctgctcaagatcgtcaatggttctccatttctctggagtaaaagatacactttttttttttaatttttttgagacggagtctccctctgtcgcccaggctggagtaagtggcgtgatcttggctcactgcaacctccacctccagggttcaagca

SEQ ID NO: 191813 - DNA, 442 bp, Homo sapiens
tagtggacgttggcatgtgctgtaggccagcgtagtaaatgctaatctcataatttcagagccagtttgaggagctctgggtttgacagcttaaagattttcattggcgtgtgtaaaacagcatctgccagcggtctctacctctgctacaggggcctcactgggggctggggctgccccaacttatatgcactgtaaaccagccagagctctaagatacgcagaaacattgcttccaagaacggtttcttagaaaacagtactccctctatacctaggcacagaaactaaaaaaataataattctcataccaaaaccttgaaaagctttatgttctcttcaagccctgcggagcacacgggtttgaaccaatcccccatatcagccccgcagaagccaagcctcagccgctggcctacagcacatgcagtgtcggctgagt

SEQ ID NO: 191814 - DNA, 637 bp, Homo sapiens
ctccaggagtaatgtggaatgtagcaaaatgtaaccagtggactcggtgtctagctagggagatacccaggaaggatattgaaagtgccaaaatgtgtatcttttagttacccaagataaagtacaggaagaaagcaataacctaaagaagaaactacagtagtcccctctgtccccagtttccctttctgcagtttcagttaccagcagtcaaccacagtccaaaaatattaaatggaaaattccaggaataaacaattcataagttttaaattgcgtgccgttctgagtagcgtgatgaaatctcatcctgcctgggacatgaaccattcctttgtccagcggatccatgctatctacgatgatcacccattagtcacttagcagacctctccatgatcagatcaactgtctgtcaggtaatgcagtgcttgtgttcaagtcacccgtattttacttaacaatggccgcaaaggacaggagtagtgatgctggcaatttggatgtgccaaagagaagctgtaaagtgcttcctttaagtgagaaggtgaaaattctcaacttaataaagaaggaaaaaattcatatgccaaagttgctaaggtctatggtaaggatgcatcctctatccaaaaat

SEQ ID NO: 191815 - DNA, 329 bp, Homo sapiens
ctctcatactgtcatgccttcccacttagaagtgcccatgccctgctcagctgtgactctactgacctcaggacctcactggacaagtcatgtggtaacccttgcaggagacctgataatggtgaaatgattctattgttatattatttatggagcaacaactttgtacagagaacgagctgcttggctttttcttccaatgccgaggatgctgctgatgctgccatgtaacagcatacttttgggtgtcctcaaggatagaacttcccctctgaataatggaaattagaacaatgaacttcacaggggaataaatattaattactgat

SEQ ID NO: 191816 - DNA, 464 bp, Homo sapiens
atgtgtgtgtgtgtgtgtgtgtgtgtgtgtgtgtgtgtgtatatatatatacacacacacatatatatttgagacagggtttccatatgttgcccaggctggtcttcaacttctgggctcaagtgatcctcccacctgggcctcccaaagtgttgggattgcaggtgtgaaccaccactcccagcctgttgtttcttaagcttctaaccaccaatctcccctttcactctacacgtgccctaactaatctcagctactcctgagcttcaacttctacctgcacactgataatctcagtctgtctctctcttgcttgcctatttctcctgaaggccagtccagtacatccaaaaacttactgaaaatttccaccgggattatctaaaagcaccctaaacatctaaaatggaatctgttatctttgttacatcataatctcacaaattcttctaaatttcctattt

SEQ ID NO: 191817 - DNA, 396 bp, Homo sapiens
atggcgcatgcttgcttcccaaagctaaggagggctctgtgcaggcgggcagcccaccctaagggaagaatcatgggaaagagatggggaactgcgacatgaagaagttaacttacctaagatcagagaatgagtcaaggacagaacaggaccatgtcatcaaatttagagaaacttgaactatgcagaaaagagatgggattcttctgtggctgtgctgctcactcaagggagtctgaaccattttgaccaggaaaagccaaaggaaaggccactgccaagggcagaccacacattgcctgaagtcattgttctccattccagccccaagaactctgcgagatcgatgaaagcatacattgagaaataaaagtcatgagaaaattttacaaatta

SEQ ID NO: 191818 - DNA, 309 bp, Homo sapiens
gcataggttcttagcttccccgccgagttggtttaggattgtcttcatcaagtcacccgtctgttatggctcaacctttattctccactttatgaaaatttttttgtcacctcttcccccattctctccatcttcttaaaacaatctctttgctgcagtttcagtagggctttgagaggggtctagatttgacatctgtgttcagttcgccccctttgctagaactccaggacactttctatgtgtgtgttttcctatcttctcaagcagaatacctttccctgtgctttcctcgcctcccctgttcta

SEQ ID NO: 191819 - DNA, 277 bp, Homo sapiens
ctttgcctagacagagagctgctgcttggagaaagagaaatcaaaaaagctttcagcagttgtattggatgaagtgagaaatggagacttcaggggcctcaagtaagtggccatttttttctcagaagagacttggtgaactctgacactttgcagaaggctggagaaccaggtcaaaggcttccaaaaagcaaagtgaaagtccccatagtttcacagtgcttgggaaactagagagagaaactgacaacaggcaagagatgccctagggggagtg

SEQ ID NO: 191820 - DNA, 315 bp, Homo sapiens
atccttctgtaatatggaatatgcgtcatactctggcagagccgaacacatgaggtggcagagcttccccaggggagcatgtggcttcagagggtcaaccgggactaggtggacggaagctcgggacaggttcctggtcagaaggagctccgagaaagctgccgggtatgtgcaggctgacctgctgcccaggagaggcttcttagagcaggtctggggaatagcctgcccaccccaggggtcaaaggtcaaggagtatggctgtaataagctattctatagttgtattcccagtatgctgtgggctactagaga

SEQ ID NO: 191821 - DNA, 246 bp, Homo sapiens
gcctctgcttgcatccaagcccctttgattaactggacatgatatccagttaaccaatccagaaatcagcagatatccaattaatcaaagcaaatcatttcacagagctccaaatcaagaatcagagaagtgtacttctcccacagaggtggcgaggagagaatgaatattgaacaataatctgccacaagggtttgtttttttttttacattccaattctttgaaaacgggtcacctgaatttaa

SEQ ID NO: 191822 - DNA, 281 bp, Homo sapiens
gctgatttcaacattcatatggatgattccacttatatctctagcccagtggtttttgacctgcaatcacttgaaaaagtttttaaaagtactgatgcttgggaccaactcaaatgaattgaatctgaatctctggggatgtggcctgaacactatagtacaactagaatcttccagctctcacacttccctactgtagtgcctcttccatttcattacaactccatatttttaaccctatcactattaagatgtattagcagtagcccatcattttgttt

SEQ ID NO: 191823 - DNA, 157 bp, Homo sapiens
cctgcttcagcctcctgagtagctgggacaataggcacttgccatcacatccagctcaaattaactttctgtctccttataagtatactgtagggattaagcgagatgaggaatggaaagcattctgaaatgtaaaaatacacattgactttggcct

SEQ ID NO: 191824 - DNA, 347 bp, Homo sapiens
gtattagggtagatgagattactagcaaaacttctttatctagaatcattcatcaggttggaaatagtacataaaccttaaaatatcatcatattaaaatatcatcatgttatttttcctagtcattaaaaacattaccattcaacaatgtatactaaaatttcttggacaaagaaaatgattttaaatatggaatgcatccctcccatttcattcatgtactggtctcattaaacagagaggagcttttccattctgctccaacacaagcccatggggaaaatgatatttgaagagttaactgagagaggcccaaggtttaccaccaaaaatgacctaacaatgta

SEQ ID NO: 191825 - DNA, 557 bp, Homo sapiens
accttcaaaatacatccagaagccagtcacttcccaccacttccactgccactctgggccgtgccccaccatcttttgcctggattgatcactgcaactgcctcctaatgggcctctctgattctgtcctttcccctgcccagtcttgtccacagagcagctggagagcttttaagtcagatcatgcctcaccttcttcagggccctacaatggcttctcatctcatgcagagtaacggcccgagtccctacaatgcccctgcaagccctgcatgatacggccctgtgacctctctttatttattattattttttgaaatggagtctcactctgttacccaggctggagtacaatggcgcaatttcagctcactgcaacctccacctcccaggttcaagagattctcgtgcctcagcctcccgagtagctgggattacaggcgtgtgccaccacacccagctaatttttgtatttttggtagagacagggtttcaccatgttggccaggctggtcttgaactcctgacctcaggtgatccacccgcctcggcctccc

SEQ ID NO: 191826 - DNA, 476 bp, Homo sapiens
gcaaaacagcaatgaagacatttcgtttatctgggcccttacttgggggagttctgtggttataattacagacagccaccctagaaagtcttacattcctatccatttctgtaattgaattgattttaatctcttcctattttatacaccaaggatttataggatgctaataactttctccccaccactaccctcttcttatccaaattcctgtaacgtaaggatatcaagttaaccacagagtttgaattgaatgcctgtggctgtttctggataagaatctgaagggaggccaggcatggtggctcacgcctataatcctagcactttgggaggccaaggtgggtggattacctgaggtcaggagttggagaccagcctggctaacatggtgaaaccccgtctctaataaaaagacaaaaaattagctgggcatggttgtgtgtgcctgtaatcccagctactcgggaggctga

SEQ ID NO: 191827 - DNA, 554 bp, Homo sapiens
agatagttgtgtgtgtctatatgacatatataaaacattgtgacattgaagcattttgttgaagtagaaagtcttgtgtatgtttatttgaataacaaatcttgctttccctttaataagtaaaagtaggaaatatcacacttgaaatgcttaagactagtttatatgatggaataggggagaatcttttacttatttgttgatgtatatagattgattgtcttgtgtttttctctagatcttagtttcattgtaccctctctgcaacctttttctgtaagaatgagaataggaaggcctgaatgttagtaggtagttgatagtctgctgtttttattttcatttttcttcttatgaagaggaagaaaaaaatagaatcctggaaatagcactgaagtggactttgggagatctttgactttgttctttgttctaatattcattcaacagtgtaaatttggacagttattattttctgtgccagtcctcatttgtaaaataagaattggaacaataggtaaggcctgtttaagttttgtaaaatatggaagggc

SEQ ID NO: 191828 - DNA, 144 bp, Homo sapiens
ggagcagatctgaggagggaaataaagagtttcatttcacacatgttccagttatttggtgaattacagagcttgtcattgaccatcctaagataaaatgtcccttgaacttgaaggttctcagaacctactagtggcacaccc

SEQ ID NO: 191829 - DNA, 505 bp, Homo sapiens
acccacctactcaagtgaggtcattacatactattttaatagagttagattcttttgtcatattctgcattacttcctgagtaccagtgttatcctaaatgattttatgttgcatatgtattaagattcaatctttgtgctgtaaagttcagtgggttttgaaaaatgtatggtgttgtatatttaccattttggtattatgcagaatagtttcactgccctaaaaaatcccttatgcttcacctatgcaaccctccctctttactgtctcccctgccaatatcgtctctgtaggcttggcttttctgcatcatataattggaatcacatagcatgtaacccttttaaactactttctttcaccaggcaataaggatttaaagatcatccatatcattctatggcttgatacttcaatctgacaatccctgtctttaatcagcatattgaaccattcacatttaaagtgattatcaatgtatttggaataacacctgtctttaaa

SEQ ID NO: 191830 - DNA, 280 bp, Homo sapiens
tatgatagcaaatccttgttggaaaaaaagatagcctaaaaagaaataagtgtgcatgttaggaagtggaaaattaggctgaacaggaagcatggagtacactctggtccttagtgcgcatccttttccttgaacaaccatggagtttctgttctaccaaagtagttattggacactaaattttacacagtattaatctcgtttctcttgttatattgtgatcctcctcaagaacagccagtgaccatgctgcctatttcctttgtatcatcccaagtgc

SEQ ID NO: 191831 - DNA, 646 bp, Homo sapiens
tggcatgtatgcacttaaacgctgagaagccttcatatagtgcctgcacacactctattttgaggtagtttctccaattcaaatacatatcctagaacggttaaagggagctttcatctcttctgcttgctgtgatcccaaaccaaaggtaaacatgtgctggcaagctaccccaggtggcgatgaaaagtggccctaacctttcctccacacccatcctcagtcccactccttcatctttaccgcccctcttgtacagagcctaaaccacagctcaacttactgacttatctgaacccttcctcctcctagagtaatagacaataagggaatgactccactcaacatcccccgagttccttgaaatgtgcccaggaactaccaagcatgaatctagtgcacggttaaattggcagaaagggacagctgggactacttcaggcatgtcctctgaccctaacaactgtggacacataatcaaaagattggtactctgtgagctagaatgagagatcccaacacaactgtaataacattatattaccagttaataggaaatactgtgcaaatggacagaatatcctgacatagcttttcatcttctttttttatttttttatttttgtgagatgcgggtttcagtctg

SEQ ID NO: 191832 - DNA, 426 bp, Homo sapiens
agagtaaaaacctgcgcatacctaaaccctcttgtacagagcctaaaccacagctcaacttactgacttatctgaacccttcctcctcctagagtaatagacaataagggaatgactccactcaacatcccccgagttccttgaaatgtgcccaggaactaccaagcatgaatctagtgcacggttaaattggcagaaagggacagctgggactacttcaggcatgtcctctgaccctaacaactgtggacacataatcaaaagattggtactctgtgagctagaatgagagatcccaacacaactgtaataacattatattaccagttaataggaaatactgtgcaaatggacagaatatcctgacatagcttttcatcttctttttttatttttttatttttgtgagatgcgggtttcagtctg

SEQ ID NO: 191833 - DNA, 511 bp, Homo sapiens
tggcatgtatgcacttaaacgctgagaagccttcatatagtgcctgcacacactctattttgaggtagtttctccaattcaaatacatatcctagaacggttaaagggagctttcatctcttctgcttgctgtgatcccaaaccaaaggtaaacatgtgctggcaagctaccccaggtggcgatgaaaagtggccctaacctttcctccacacccatcctcagtcccactccttcatctttaccgcccctcttgtacagagcctaaaccacagctcaacttactgacttatctggacattcggcgtgtgcatgcacacgccgaagctccaaaccatctccaggagcaagtcactgtggacgaagttgttgcagatcagaatggacgaagcttgttgcgccacatctatcgtccactaagatctcatgatgtagtttggacctgcaccacttcgtccataccgattgatttcacgaagtgtatggtattcggcgtgtgagatcctcagatcg

SEQ ID NO: 191834 - DNA, 500 bp, Homo sapiens
cttttttcttactcccaattaataataaaaacttagatttttgtgtattggcagcttagaagatgaatctcttagcaaacactgtcaccagtttgccctctactaccgcaatctttaggtctttgatcacggattaattataccatgggcttcaagtaggcattcctaggttcctagaacctgcttggtgcacttcctcacttcaaccacgtgatggcagtggaagccatgatttctgctaaggggcttcagtgtagagctatttctgcattcccttagcacacaagaccaagaacagccatttatccggaggtaaagataaacgtgtctaaactgtgaaaatttgtaaagcggggtcatcagtctcttttttctgcttcccttttctcttgactgacacttcattgctcctttactcattctcaaaattgggacacatctgatacctcaatgtattatgtagtttgaaattctttcataccaattctttattctgctag

SEQ ID NO: 191835 - DNA, 430 bp, Homo sapiens
tgagacacagtctggtctgttgcccaggctggagtgcagtggcatgatttcggctcactgaaacctccgcctcctgggttcaaacgattctcctgcctcagcctcccgaagtgctgggattacaggcgtgagccacaatgcctggccatcttcccattttcttgggggaaaaattctaatttaacttttaggaaccaaagactttatgtaatatgctactataagtggattaagttatcattcctcagagactcagattaagatgataatgaattagatttgaaaataagaatataaacatccactttaataaatgactaacctattaattctgaagctaatattaatgtaggagaaaagaatcttttgtgattagcttaaactaacatcctaatgaactcaagatcatttagaaatatctaaggtcgac

SEQ ID NO: 191836 - DNA, 477 bp, Homo sapiens
cagcgggtggatcacttgaggccaggagtttgagaccagcctgaccaacatgtgaaaaccccgtctctgctaaaaacacaaaagtttagtggggtgtggtggcgtgcacctgtagacccagctacttgggagactgaggcatgagaatcacttgaactggagaggttgaggttgcagtgagctgagatcacaccactacactccagactggtaggcagagcaagactttgtctccgaaaaaaaaaaaccagaaaaagataaaatgtcttctaagcatgggcccccaactcctgggctgtggtctcttaggagccgggctgcacagcaggtgagaggtgggcaagcgagcattcccacctgagctccacctcctgtcagatcagcggcagtgttagattctcataggagcgtgaaccccgtcatgaactgcacacgcgagggatgtaggctgtgcactccttatgagaatctaatgcc

SEQ ID NO: 191837 - DNA, 254 bp, Homo sapiens
aggcaatccaaacaaatattaaacaaaagaaacctagggtagcaatattaatatccagtgtattgataggatcaaagaagcacattttatagttaatgaaaagaaatttcataggaaaatattacaatattacagtaatgaactttatgcacctaaccacatggcactgaccatagagagccaagactcagacttagatggtaaaactgaaaagtctgccatcatcataggagatgttggtttttttttaatgt

SEQ ID NO: 191838 - DNA, 514 bp, Homo sapiens
gaatgatggaattatttcacatttagtctctttttcatctagccattatagtttagtttaaacaccaagttccattcctgctgcatgctgaaggatttgcagtacatcaggctatagtccatcaattcattccacaattgagtaagtaaggtatctatagtacctcaggccctgtgttaggcagggatggggtaacctagacagatttggtacctgtcctcatggagcttgactttagcggcagagacagatcttagataattgtaccagtacttaagtgttcagaaggacaagtatggaggtgggagccactccagtcctctacagtcacgtgctgcacaacaacgtttcaaccgacaacagagcacacatacagtggtgttcccataagattagaatgccatatttttactgtaccttttctatgtttagatatacaaatacttaccattgtgttccagtgatctacagtattcagtatagtaccatgctgtacagttttatagcccaggag

SEQ ID NO: 191839 - DNA, 590 bp, Homo sapiens
ttgatctagaggatcccgagtgatgatgtaggggtaagattaactcactaaaatgtgagctccatagggcaaggattcttctgttttatctacgatgtgcctatgttgaataaatcaaactaggaaagagggcaaagaagaacatttggcacagggcggcttattaacaagccagagtggtcaagatgaattccaggacaaaactgatctgagcttctggagggaggttcttcttagcctctccttggattatctcttttgcttggactccttaccttcttaagtgttttgagctattcttcttttttcctccaagaggcaggctagttgggcttgtcactttctgggctctaagtccttgcaagtttatagcctagcctgactcatcatagtagattttggtgtcaaagccctaggaccaagggcctaattataataaagaaggcttttttgtatgtggaatatcctcagtggttatctcttcagggacctagtgggacagtaggtatagccaaggcagattttcagaatactagtcatctatattcctctgtccataccatgatgactactaagcatctactctggca

SEQ ID NO: 191840 - DNA, 499 bp, Homo sapiens
gcttccgatgcaccttgggaagaaagtgattttctgaaaagctctttgctagccttaaaattctgtgggtttatgagatcctagcaacagaaaggcattttattttgttttgaagcagctttttttctggacattcccatgcaagtccagggcacatgaagcttggagtcatagagtttcctgtccccccactccaggtaaaggtggttttgatcttcattttatgactgagataatttagtcacattgattctaataagatgataggcaagtggcatcttgggcaaatacttagattgtccattgttgcctaggcccgcttcagtggagtagtgtatagaagggaaatgcagtcttcactgaggagcagttcacacacatcactcgtacctgctttccttctacctgcctatcacatgggttgttcaacattctaacaaaacagcatgcccagaagcctaaacccataggcattggatctggtaaataaatctttgag

SEQ ID NO: 191841 - DNA, 356 bp, Homo sapiens
tacagagcctcccctagagatgagggccctgggcccagagctccatgcctgtgctgatgagtctttaaggagaatgcccaccagtggcatctccagcctctggggccagaagctcatgctctaggtcttgatgggtccagaagctgtcatcacccagaatctgtcctgttctcagtcacagggcagagagttagactctgggggtatttgtgactatgattctaaacaacaagacttaggacttcagggaaccccaagatctcagaaagcccaatcacagaatcttagaaatttagaatcatagaatctctgaaacttgaacttgtaagctcttagaatcttagaatctaagaagc

SEQ ID NO: 191842 - DNA, 486 bp, Homo sapiens
atgatgcctgtacagagcatgctggatgtagctgatgatgggcagagctgctgaagtgaggggaaagtgcagtcccagaatgataggctacagtttgtgactttatcaacatcaagatcagtaagatgcagtagttttgcattgcagttgctcacttccacattggttttggtttcttcctactgttttgcgcatcagagatttagatagggtctaaatgcctgtatagggagatgatgtacgagtggttagagctcagacacaaatttcaaacccatggctctaccacttaattgctataggacttggacaggatactcaacctctctatgcctttgcttcctcaatggaaaaaaaatccttcctaaaaaactctcatgtttgtgaatagttgacatgattaccaggtttctgaaaacttgccagatactggaaattcagaggcttaaagctgtctagggtgtggagtcatgggcttagttcaaa

SEQ ID NO: 191843 - DNA, 456 bp, Homo sapiens
tcacatgcccaccaagtgctaaatatagtaccataagtaatgcggcttcttcaacataagagcaactgcataggttaaacattgttatcccaatttgcaagcaaagaaacaggaaaccaaagaggctaagaaacttggcaaaggtcacagaactaagaagtgtgagaaccaggatttgagcccaggtctgtccatttctaaaactagagtgctcttaattacacccctgtgccaggatccaaagtgtaagccttaagtttctcttgcaagttagtaaaccaacacttaaaggtatgagagaagacgctatttggctatttggagaaagaaaatgctttccttttaattctatctctcttctaaattttgaagtgtgagagcatgacaccactattaaatagacagatatgtttcatattgtcatggattttaaggcaaaacctttacttgtctaat

SEQ ID NO: 191844 - DNA, 461 bp, Homo sapiens
gatattggatttggaggagaaattgaaaggtcacggcttctagagcatctagctctcttgggcttaagatcaaattgtgctagtgaagacagtgcatctcataaaatgggaagtaggcccacagttatcacctattcacctttggatttctggatgtaatttcctttggctattgtcatttttcctttgcaaggcagaataataaaagaagatggaaaggcttctcatgatctcacctcattaagaaggtcattcctgtttcccataggaccaaaaaagaaaaaaaaaatcaacctctttccaggattatcagtcaggggtatagctctctgggcatataccttcttctcctgactcttattaagccacctacactaaggagggcttgggtgaagatagatatgaggccttcggtttgcaattcagaaaaaaagaatctgtgacaaataggaccagaaatg

SEQ ID NO: 191845 - DNA, 438 bp, Homo sapiens
gctgggattgtgcagtggctcatgtctgtaatcccaatactctgggaggccaagatgggaggatcacttgagcacttactgtttgccactgcggtgctaagcactttgcacatactagctcagtgcatccttacagcaatcctgggagggaggtgcttttctcatccgcatgtgctgacaaggctgagaagagctgggtcttgcacggtaccttaagggctaaagacctgcaaggatggtgcatgaaagcaaaaccagagaggcgccttttccaaatgccaatgcgccctccacccagtccttcacaaaccacatcagcatggatagcaccacactccacaggcttttctgcatctcctttgtgtgtgtgcacatgtgtaattaattctggggcaacttcctacatcagtacagagaaactccttgatcattatccac

SEQ ID NO: 191846 - DNA, 188 bp, Homo sapiens
atataagtaatcaaccagacagtggaatatatgttcaccattattttaaaaggttattgttaaaaacacaaaatttaaaaacttcttattgaaaacttgagactcctgaagaatactgttttattaaattctctctccaggttgaattcccaggcatggaattattaagtgaaagggtatgctcagct

SEQ ID NO: 191847 - DNA, 495 bp, Homo sapiens
tggaatcctggagttttaggttgtgatactttatttatgtagaattgaatgagatgacattgctattaactttacatattaaaggattttaataaaagttatagacttggcagtggctcagtgtcccaagtggatgtttcctatattttttcattactgaaaggggaagtctttgcaaagatcaggttttcaacatagaaaagataacattttaaacatcaagcacttctattttaaagagctcaagaaatctgtcagcagagttcttggcgcagttaaggcaggggtccgtttcattcttaatccctgaatgaactacatcttcggtatctgacgtggttgatagacacaatagcagatggttgtttcttttcctgatggggaaaggaaaggacaaacaggatccaatttacttaccagcctaacactgttgggaattgacacagtcactaggtataaatgatagagcagatacctttaaacaggacccagtgg

SEQ ID NO: 191848 - DNA, 679 bp, Homo sapiens
gttaacgtccctatttacaaaacgaaggtgcagtgaggataaaggatttgtccaagatgacacattaggcaagttgcagaacagggacttgaaaccatcatttggccacagatccttgtcttcaccatgattattcatcccatggtgttatgaggggaggtgatgtgggaactgcatcctgtgtatttagaaccataaatgactctgaaagaactgttggtagaagcgaaattccaaggactggaaatccaggctcagagtgactaaaagagagaattaatttgctttgattcaccgagtgatatttccagaaatttcaaaaagtcaccatcttcctgctctgcattagaacaggatctggggccctgaaggacatgacgaagatgtgtgatcaggtaagggagccgtttctcctttgcccagcggacagggacttccatgagccctgtttatcagttgttttcctcttggtaccatgagatctttaccatgatcctcttcgtttactttcattgatcatcctctcatctcaggtctcaaagaaacattgagggcctcctatctccaagggcttgacattataaatgagaagacatatcatagatcattatagatcattgtggcaacgaattccatccgggctgatttattttgtccagaggaatgtaagacatttaaa

SEQ ID NO: 191849 - DNA, 286 bp, Homo sapiens
acagcagagaaacagcttggcacaatcagtcatcccaggcagtgctgttttagaaacgagctaccatacagctcatgtccggttgacggggagaccatccaagtagaaaggggatgatctgggcctctggtctaccgtgcgcacaaggataacagtcacttttacctagggtgtggatggaatgtttaattcattccagtcaggcatttgtatcttgatgtcctgtctcaattgctagggtttgttttagatcttttacttttaccagggacaccttggttttatc

SEQ ID NO: 191850 - DNA, 156 bp, Homo sapiens
cttgtcaactttaagagatattttagacatagcaagcatcccagagagctctccatttccttagtcctgctccatctgaaagatctgatgatataactaagtattacagaagtttggggaggaaagaccacttggctaataataaaagatactaat

SEQ ID NO: 191851 - DNA, 474 bp, Homo sapiens
ctagatatttcaagcaagttagggttagaggaggtaaaaggctacaaaatctcatattttatctttctagaaggatttatggaagaagggctatggaatttgttcccaaagactggctaacaaagattcaatgggacttgaaccgttctttctatatgtccatagcttgctttttcagtgtctgctttttaaccaaatgctacaaccagaaaacgtaatttgtctagaacataagcacatgttttccatggttttagtctccttattggtaaggaatttagtctccttattggtaaatcatacacaataccagtaagtgggttttaagccctgggactcaggtttcagggtatctggatgtcccagggtatatcaaagaggccagtgcacagagataagatacatgcccacatttttaggggcattagtggaataagcctttgttataatacctaccaagttatcaacaatatg

SEQ ID NO: 191852 - DNA, 150 bp, Homo sapiens
ctagatatttcaagcaagttagggttagaggaggtaaaaggctacaaaatctcatattttatctttctagaaggatttatggaagaagggctatggacatatagaaagaacggttcaagtcccattgaatctttgttagccagtctttgg

SEQ ID NO: 191853 - DNA, 597 bp, Homo sapiens
taagaggtacactttgttgtacagtgttcgaacatttttatgcaagctttttgtggacatatgtggtcatttcttttgggtaaatacttagtagaattgccggattattgggtacgtttaactttttaagcaactgcacaactgttttccaaagtggttatagcatcttactcttctaccagcagtgtataagcatttcaggaactctacatctttatttatttttttattttttatttttgagacggagtttcactcttgttgtccaggctggagtgtagtggcgtgatcttggctcactgcaacctccgcctcctgggttcaagtgattctcctctctcaccctccccagtagctgggattacaggcgcccgccaccacgcccatctaattttttgtgtgtttagtagagccagggtcacaccatgttggacaggctggtttcgaagtcctgacctcaggtgatccacctgcctcggcctcccaaagtgctggggttacaggtgtgagccaccacgcccggccaggaactctaaatctttaccaataattgatattgccaacttgtaaaatttcagttctggtggggatttatgg

SEQ ID NO: 191854 - DNA, 329 bp, Homo sapiens
tcaggtgatccacctgtctcggcctcccaaagtgctgggattacaggcatgagacaccgcacccggcctcttctgggagattttcttgacattgtcttttaggttactggctgtgtattcagctgtgtccattttgatatttaacccacctattaaatttttaaactttgataatcttattttgtcaatttgattattcatgttctttacttttttaatttttgtagctacagtatccttttgatcctctctgaacctattttatttttttcatcttaagaacctttaatacagttatctaaatgcagagtttcagtttatgaaatgaa

SEQ ID NO: 191855 - DNA, 204 bp, Homo sapiens
taattagctaaccacacacacaaaaaatctggttttgagatttttctggtgatctttctcaagtgtgtgtgctttaaataaaaaactgggcccgtttgcaaacgacatggaccttattttatactttcaatcacagaactagcaaatttgatagatttgattttctatgagataattctatagagtgagggtgaccccctctag

SEQ ID NO: 191856 - DNA, 578 bp, Homo sapiens
ataggctttattgacataaatttctgttcagtttttcaagctttattatatgttttgaagaaactgacacattagttcaaagcaagtaatttgtatttctgattagtgtgcttattcttataacagaaatacctattttgctgtattaaagtgaaaatgaaataattaaaaatagaacttatatggcatcttaccctattagtttagttttttttactaccctagtagatagcatcttttaaaataataagattggttctctcttcaaattttacattaagaaatataacattttgacaaaccatttttttttctgtaatgtcagtaattttaattctgactttgatgaaaagattagcatgttggtcttagcttaaaggaaattcagaagggcatagggatgaaatgtaccacagcaggggcttgtgagtaaaggaatacattttccacttgtgtatccttgggcggaagcagtagagcctggaggcccctgcccttgagtgtccacatgcacactcatactgtaagggaagagagtcaaacaagagataccccagccttcaaaaaaccctagttgg

SEQ ID NO: 191857 - DNA, 554 bp, Homo sapiens
tgccgaggctggagtggagtgcagtaatgcaatcacagctcactgcagccttgacctccccagctcaagcaattctcccacctcagcctcctgagaagctgggactataggtacataccaccatgtctggctaattttttattttttggtaaacatggggtcctgctatgttgcccaggctggtctcaaactcctaggctcaagtgatcctcccgtctcagcctcccaaagtgctgggattacaggcctgagccaccacgcccagcctaaaatatattcttaatttaaaattaaagctataatggaaaagcaatgacctgtccaacttcaataatatatgaggtaaaatattacttattcttaactttgcagtcaccctctgtgaaacatgcaacatgtaagtctaacagatacaaccaaagcttaatttgaaatatattttaagtaaaaatcttggttaaaatgtattagtaaaggaaaatcaatgtaagtgtcaacagactttatctagagatagtattaactacccaaactatttactctgaataaaaagt

SEQ ID NO: 191858 - DNA, 307 bp, Homo sapiens
  misc_feature (253)..(253): n is a, c, g, or t
actgctccctgacactgatgtttctggtgtcaataatgtattaattttctgttgatgccaaaacagattctcacaaacgtttagcagcttgaaacaacacaaatttatcgtctcacagttctttaggtcagaagtctggattggcttgactggtttctttgatctgggtttcaaagactgaagtcaaggtgtgggccaacagggctcttattggaagaatctgggaagaatccacttccaagcttatccaggntattggcagactaattctgagatttgtttctttgctggctgtcaggggagaaga

SEQ ID NO: 191859 - DNA, 358 bp, Homo sapiens
gtttagcggtccctagctctgccaccaagacctttggtcactttacgtctctcgattcttttatgaaatgatgactttgggccagagtctctctgaggtccttcctgctctgacagccagcagttctgagtcacacagagagactgaggtggtgaggtgtttggtgacgctcagcaagaacaggtctggagagaggaagaatcaccctgctttagcatgaatagccttcacttcatgtaagcgaaagctcaggaaccaaaacatgcatcagcagaattgcctctgaggacagtgttttctgaaggtttcagcgagccatctgcaacctgttagcacagaaaaatcttgtggggaaaag

SEQ ID NO: 191860 - DNA, 347 bp, Homo sapiens
cgtgtacatatgcacacatgcatatatgtcagtgcatacatgtatatgcacacatgtacatacacatgtgcatgggcacaaatgcatgcatttacatgaacacatgcatccacacacataagcacatgcacaaatgtacacatgcattcacacatgtgcacacatgtgcatgcatgtacatacacctgtacccacatgcacacatatacatacacatatgcagagacgggcacacatacatacacatgcacacaaatacacagaacatgcatgcaccacacagtacacatatacacataccaaacacataccacatacaccttcacacaccacacacatacatacac

SEQ ID NO: 191861 - DNA, 687 bp, Homo sapiens
agggcttcctccctaacaaactggtcacaaaatcactttcctgctggcattaaggttactgctctcatcctgaacccaggatttactaggtcaaagcagcattcagacaatggttcaagctataatctcttcctaaaccggcaaaggcaggccagcatctggtgaactgcaacaaatggcaacagcatacccagagacatcaataatgatccctcgaggctacaaagacaaactctactgatggcaattgctaaaatacaacatcactgcctgttcctaacagaactgaactatagaattttatttcaggaagagtttttctcccaattagtcctaatagaccaacaggaagcctgataaaaattatcagggaagaggcagtgaggcagggctaaattcagtggtatgccatcacagtgacatatactttcatgtgtgtggtaatatacacataaagtttaccattttagctgaatttgtgtatagttcagcagcattaaatatgttcatattgttatgcaatcaataccactatccatctcccgaattttttcatcatctcatactacaactctgtattcactggcatataccttttcatggattctatttttctgatatgaacatatcctaaactgcaaatgttccctgctgcaaaaacagatccattcccactattgtcttcaa

SEQ ID NO: 191862 - DNA, 347 bp, Homo sapiens
cgtagtcccagctactcaggagactgagacaagagaatcgcttgaatccgggaggtggaggctgcagtgagccaagatcgcgccactgcactccagcctgggaaacagagcgagactctgtctcaagaaaaaaaaaaaattaaaaagggcttaatgtgctaataaacatacacacacaaatacatatcaatacatccatgcacagatgcataatgggaagcccccagaccccattcttcctcttcatagcagggtgggcttcatgaacagacataatcgaaaatgaatagaaactcttctaagaacagggagctccgcactgatcaagaagacactggtgagctaag

SEQ ID NO: 191863 - DNA, 411 bp, Homo sapiens
aacactgagcttctacgcgagcaccattggctggcatcaccatatcgagctacccaacgtgtgccaaattctgtctggctgcacaaacaaacacacatctctctgagtaatactgagacttcatttcggggtttcccagagcactccactgtgttgtaagatctcttaggtggccagaagcttagaaaatgcaaatggagatgacagtgaggagctgttgacccaaggtgtttatttttggcactttatttactgcatggttttgaagatactcccagtgttaccctagagaaactgtcccctcctcctgtaactgcaaccttgaaattgcaccattttctcccagaagagactgtggacaacagggttggagaaatccagcagtgagaagggatcaccccagaggaattc

SEQ ID NO: 191864 - DNA, 456 bp, Homo sapiens
ctcttaacacagtggttctccttcgtttcatctgctgaccacactgtgccacctgcaggctggtccgcttgctggctgttcctgcactctacaaaactagaagttgctattccttaaccctggggcctgccttgggctcaggaccagcccagtcctggaggcagccaagggtccacaaaggtcacatgggcactgggtggcaccagttccaactcaagattaagtcacatgcttgatgttcctttaatacaaagtctgttaagtacggagacagatgtgtgactgtcctacttgtggaatcagtcttacggcttaataatcacactttggccgtgcgcactgtgtgattatagaatcacatctataatctcagcactttgggaggcaaatgcaggaggactgcttgaccccaggagtttgagaccagcctgggcaacatagtgagaccccatatct

SEQ ID NO: 191865 - DNA, 420 bp, Homo sapiens
tatgcctacctcctggagtccaccatgaatgagtacattgagcagcggaaaccctgtgacaccatgaaggtgggaggtaacttggattccaaaggctatggcattgcaacacccaaggggtctgccctgagaaatccagtaaacctggcagtgttaaaactgaacgagcaggggcttttggacaaattgaaaaacaaatggtggtacgacaagggcgagtgcggcagcgggggaggtgattccaaggacaagacaagcgctctgagcctcagcaatgtggcaggcgtgttctacatcctgatcggaggacttggactagccatgctggttgccttaatcgagttctgctacaaatcccgtagtgaatccaagcggatgaagggtttttgtttgatcccacagcgtttagtacagccaatt

SEQ ID NO: 191866 - DNA, 628 bp, Homo sapiens
ggtagtagtataccaagcaagctaaatggatatgaactgttttcttcagggcagtattgcaagtttagaatttgtaatcattgagttgctaccatattaccattatcacaatcacttccctttccatctctcccaaaatgttttctttccaaaaagaattttatttttattttcacatatttggaggcttttttgacatcctttgacacaattagagttaccttgttggctgcaaatatagggatggttaactgcttttccagaagttagttgacactggccagcctccaggaggtgctacaggaagctggggcagtgagaagtttctaaagcagtttccaagaggactgtgaagcacatctcgttccagctgtgtgtaatgattccttctcctccataagtggagccgccttaccagaaggtgttatcaaaaaagagatggggtcaggcagggtggctcacacccgtaatcccaacactctaggagaccaaggcgggtggatcactttaaggtcaggaggtccagactagcctgaccaacatggtgaaaccgcatctctactaaaaatacaaaaattagcgaggtgtggtggcaaacatttgtaatcccagctactcgggaggccta

SEQ ID NO: 191867 - DNA, 373 bp, Homo sapiens
gctcaattcccctacctttagccagtctcatttagaaattacctgggacatttgcaaaacttttttgctttgggttttgtttttcctacctgcagtagcatattaacacgtcacatactcagtgaatgtgcttagttttggggagaagcgtatactccttttgaactgttgtatctagtcagtaaagctgttatgcaagttgactgcaatatatcatttctggccctggaagtaacagcaattggttaaggttcagtctctggcctcctggttttatagttcataaagtggtagaaaaggacacacgtaactataatatatgacagatcatggcaagctgtgatgagtacaacaagaaagccacaaagtgtta

SEQ ID NO: 191868 - DNA, 391 bp, Homo sapiens
ttggaatgaggcggtgtggtaatctgacctgcacaggaccaggggcactaatcagaagctccagggaacagcagtggaaaggaagcaggcaggaaggtctctgggctcctcagggaagaggaaaggacaagcaatcaatgcagaggagtttccaagggggtggggaggggggtctagcttgaagttccagacactggttctgaggacacacatcagaaaaaatttccaaggggtctaaaacatggttttcacttatccctaaatgagcagagagtggttaaaaatgggaggcagggaagaaaaaaaaaattaagctccaattatcaacatcaaaaaagaaatattcctgtttactctttaaagaagttaaaaacaatttttaaagaacatc

SEQ ID NO: 191869 - DNA, 351 bp, Homo sapiens
tagacaccaggcccccaggagcagaggagttccatccccctgctggggcactggccccagatgtccaaggctgtgcgcactgcctgtgcttctcagcagggcagtcctgcaaccgttgcaagtctggagtccttagaagaggtgctcacgggaggaccacctgggcacagggagccagaacctgggctgctgccgcagaagggccagcgtggcaggtgcagttgcctgcaggttagatggcaagggccacccccttttccagcaggacagcctcctcctgtaccaccaggacctgtgtccttgctccggccagaggtggcctggagtggcgagcagccctgcacacaggcc

SEQ ID NO: 191870 - DNA, 401 bp, Homo sapiens
gggattggcgttctagaggatcccattatgttctgacccactcttatgtctctgtccaccaggttgaacctctttcctgcctgctaactgatacctgcctgtcattggctgtctgtgtctatgtcccaaactcctgggctcaagtgatcgtcccgtctcagcctcctgagcatcttggattacaagcatgtgccaccacacctggctgtgatgtaggaatgatttttgagactgttccatgtagacttaaggaggtatgaggggagtgattctccagatcacctgtttttttgaggcagagtctcactctgttgcccaggctggagtgcagaggtgcaatctcccgggttcaagcaattctcctgcctcagcctcctgagtagctgggattacaggtgcat

SEQ ID NO: 191871 - DNA, 386 bp, Homo sapiens
gtatagactcgagttagtacctgaacattcgtgtctctgtccaccaggttgaacctctttcctgcctgctaactgatacctgcctgtcattggctgtctgtgtctatgtcccaaactcctgggctcaagtgatcgtcccgtctcagcctcctgagcatcttggattacaagcatgtgccaccacacctggctgtgatgtaggaatgatttttgagactgttccatgtagacttaaggaggtatgaggggagtgattctccagatcacctgtttttttgaggcagagtctcactctgttgcccaggctggagtgcagaggtgcaatctcccgggttcaagcaattctcctgcctcagcctcctgagtagctgggattacaggtgcat

SEQ ID NO: 191872 - DNA, 351 bp, Homo sapiens
aaaatgatcaggttctcacatttgcttcatcagatgaggcagagtgcaaagcctcactctgctatatttcttagctgtgtgatcattgagcttgactctaagcctcagtctccttctttgtgaaagggggctagaaatggtgtccaatttcatacttaatgagtgcttactacattctagttgctttagtgtaccacagagtacaaaacagtcaaaggttcctgtactgatggatctgacattccagcaaggaagggacagtcaacaaaagcatgattactatatagtatgccatgtttagttctatggggagaaaaagacatcaaaaggaagagagaaatcagcagtgct

SEQ ID NO: 191873 - DNA, 492 bp, Homo sapiens
tgtcagattttgaaatatttgcattatgcttacccatcgagcatcccaaatccaaaaatttgaaacttgaaatgctccaataagcattctctttgagtgtcatgtaactgctcaaaaaattctggatttatgaacacttcagattttggattttggggttgtaatgcttaatccatagtagataaaggcactttgtcagctccatcagagcaagcttcctcagaagcactacctggtgatcactctcattccttcccaaagtttcatttctctctctctctctctgtctctggagacagtgtcttgctctgtcccccaggctggagtgcagtggcatgatcaccaccaggttcctggtggtgatagaagataaaagcagaatcttaaatgaaagcaaaatagaaattgagaggctgcagtctctcacagagaacctgaccaaggagcacttgatgttagaagaagaactgcggaacctgaggctggagtacg

SEQ ID NO: 191874 - DNA, 428 bp, Homo sapiens
aatgggcaaatggtctagaggtgcctgatgtccatgcattctataacacatcagaccctccctagtctcagcacacaatgaaactcatcccacatctttcttctttctctcctgtctgtatcctccagtctccactccaagctctaagtccttatgaatcttccttttcaacggacacaacgttcctactcccctcctaccccaggcagctccctcatggccagatttactaccttctcatcggtcactacccaactactctcccactgaaacttccacctagtaaatctctacccatccagtgaaagtatctacccagaccaaaaggtattttagtttcctgactcagagcatgtgagtaaagtcaatttgccagtcctgggcaggggcaaatccccaaggttgatgtatagggaagggaaggggcc

SEQ ID NO: 191875 - DNA, 617 bp, Homo sapiens
ctgacgatgagtctagaggatcccttcagcacagaagggaagtggcacctatgtgtcctgggaggtttaggattgcaactggaggatgtgggagggcacaatttggaccagatgactttggaaggtcttccttcacctcagattgtaggactttaaattctgaagattcctgctgtgccataaatcctgcttcactcttcccaccaccctccttcttgagggaatctccctactcacctcggcacttaagtgggaaatgcaaccatgtaactccctccaatgttggctgattggaccctggagttgtcctctgacccagtgcagtccagctttttggtggctggaactgtaattctggctcagaaaactgagctgcatcaatgagattcttcagttcatgttggaaaacagagtcactgagagtgagccatgttaacagaaatcaaaaaaatgcgtctgtggcaggagggcgaggcggaagccttccaggagtccacatgatgaagcaggaccaatgttgacagggagagggtgctgttgagaggataatgcattcctccacaaggagaggcaccaccctgacagaattagggtgcagtggagggcctgatagagtg

SEQ ID NO: 191876 - DNA, 599 bp, Homo sapiens
cctggcctgggctggataatctttcgttgtggctgagagtggaagaggttctgtccattataggatgtttagtaccatccctggcttctacccactagatacaagaagcacctcaaatcccaccagttatgacaaccaaaaatgtctccagatagtgccagatatcccctcggggcaaagttgcctctggttgagaaccaccatcttaaactgaaatcttacaaaacattttaaacattttgtaactgttacacactctatagccaggctattttctaccaagtcaaagcttttgtaaaaacctggggatgaggtgtaatcccaatgttcaactgtctccctaggcatctgcccatctctctgtatttgcaaattacaatgctcattgatccttcctctcatagattccattatccattcatattttgactctaagagatgtttgctcgaatcgtgtctgctgtgtctaatggtctcagtaatttaaaagcttcctgccagcaggcatttcccactattgaccgtggtgttctggaaaatgtatgttgcttttgcgagagtatggttgggtcccccactccattccaaagcttcagatg

SEQ ID NO: 191877 - DNA, 188 bp, Homo sapiens
taaagatgataagtcttggtcagaatatatttctttatcttgctccttttgtgtcaagggaaaaacatgagataaaaatgagaatttgatgatccaagcagctcacaataaaactggtggcaacacctgaacccagagttatacattggtatttgttacgtttcccatgacacaaaaggagcaagata

SEQ ID NO: 191878 - DNA, 192 bp, Homo sapiens
ttgctcattattcatgggctctgttagaatgtaactgtgctcctccttagagggcaaaaagtggattagtagtggctaatgataagaggagtttacttcctctagtttttgaaatttttttgtgtgtaaatttaacttttcccatagcatattttagatgctttagatacttaggatgtacagaaggtacat

SEQ ID NO: 191879 - DNA, 397 bp, Homo sapiens
gaaagacaaacatcacatgttctcacttagttgtgggaactaaaaatcaaaacaattgaactcataatcacagacagtagaaggatggagtatcagaggctaggaagggtagtgggggacttgggggaggtagggatggttattgagtacaaaaataataagacccactatttgatagcacaatagggtaactatagtcaataacttaattgtatactttttttttttctcctgagacagggtctgactctttcgcccaggctgaagcgcagtggtgcaatctcggttccctgcaacctctgcctcctgcgctcaagagattctcccacctcaacctcccaagcagctgcgactacagtcaagcatcaaatcaattctttttttttttttttaaaca

SEQ ID NO: 191880 - DNA, 242 bp, Homo sapiens
gaatagggctggcctgtgtgacctataggatcttgtgaaaataatggaatataacttccaaggctaggccataagaggcactgtggattcaccttgctcttttagattcctcactcggggaagccagctgccatgttgtgaagatgcagcagggaggtctacgtggtgaggaactgaggcctcccgccaacaaccacatgtacttggctgctacggctgccatagcaaaatgccacagcctg

SEQ ID NO: 191881 - DNA, 491 bp, Homo sapiens
attgacaatgattgtctgtgtaacttgggcaagttattgaatctctctgtgcttcaatttcttcagtaaaatgagaataatgatagctatctattagttgaactataggaaatttctgatatccaactatttttgacctacaagaatggtaatttgcagaaagtccccatcagcgagcaggctctcacagatgtgtcccctcaaccttggacttctcagcctccataattgcatgagcccaatgaatgaattcctgtaataaactctatctatctatctatctatctatctatctatctatctatctatctatcttatatctatccatccatccatcctattggttttgtctttctggagagccctaactaatacagagtgcttccatgttttcaccatttcatgttttctgaaggatgtattttatgtttttttcaaactactagtacctgtattctatgagtttttctttcctaggtccaactgatacc

SEQ ID NO: 191882 - DNA, 231 bp, Homo sapiens
tctgtttagtaggtcttgggtagggaccaagattctgcacatctaagaagttcctaggtgttgctgatgttgctggtctaggaaccacactttgaactaatccagaacaaaggtccaaagaaagtagactacctattgaagaaaaatcctagtctgggtagtagttccaaaaagagaagtgcagaatttgaggcaactcctaacctccagattagctctactcagggttca

SEQ ID NO: 191883 - DNA, 473 bp, Homo sapiens
tcacatttctctgtgcatgcacatccttggtgtctcttttgtgactttttaaagacataggatcttgctttgttgctcaggttgtactttaactcttgggttcaagcaatcctcccacctcggcctcccaggtagctgggactatagggtcatgccactgcacccagctttttctgacttttgacagtttgattaaaatacgtcgcagtatggacttctttgggttcatgttaattgagatctgttaggcttgaatctggatgtccacttctttccccaactttgggggtttttagccattatgtctttttttttgagatggagtctcactctatcactgagacgagtgcgatggcacaatctcagctcactgcaacctctgcctcctgggttcaagcaattctcctgcctcagactccccagtagctgggattacaggcacgcgccaccatgcttggctactttttgtactt

SEQ ID NO: 191884 - DNA, 541 bp, Homo sapiens
tcgagctcgttacccgtcctacatagtgttagaaggaggcttaattaccattcagcctaacctaggaacctttaacctccagtcaaagtagatccctgaaattagtttgtgtttgcatgtgtatatattctagggagaaggtacatagctagaaataaggttttctgagggcagtaactctaaatggttgaaaaccactgatctaattcaatcatttttcatgaaaggaatcctttatgacatttctaataatcattataacactaggtcaggtgctaaagatagagcagggaacaagacaatgatggtccctgatcttcacggggcttagggtctgtaggggagagattataaacaagaatcacataagactggtacgatcacaataatgataagcccatgaagaaaaagtatgacaggacctaaatggtctctcctgattatgacagttaggctatgacctgaaagctaagtaagtaaaaagggaccaagaagaacttcccaggtagatgatacagcagcactatgtgaggaccctgaa

SEQ ID NO: 191885 - DNA, 352 bp, Homo sapiens
caccgcctccaccgtcagactaaccctacgggaataggccatttatagcaattaattgctcttttattcctctagatatcaaagcaccaaaataccaaggaaccctggggaactttccacccaagtccccacattctttcaaaaagagatgaaaagagtgaaaagagagccttcctctacttctgaagggctttaatttcttctactaccatgacagccaattatcattcccgtctacagggctcagacccttccaagaagcagaggggaacactgtattcctgacttccagggaaggggtcaaaggatagggactgtccagggattcacggacagctgttctatttgtcat

SEQ ID NO: 191886 - DNA, 620 bp, Homo sapiens
gcaattctcctgcctcatcctcccaagtagctgggattacaggcatgcgccaccacgcccagctaattttgtatttttagtagagacagggtttctccatgttggtcaggttggtctcgaacttccagcctcaggtgatctgcccttcatggcctcctgaagtgttgggattacaggcatgagccaccacacccaaccaatcctcatttttaaatgaaccctgcctcagcctctcgagtagctgagattacaggtgcctgccaccacatccggctaatttttgtagtttttagtagagacagggtttcatcatgttggccaggctggtcttgaactcctgacctcaggtgatctgcccacctcggcctcccgaagtgccgggattacaggaatgagccaccgcacctggctcttcccttcccctccactcccctcgctccctctttttctctctcactgtctcttcttgagcttctgtggattgcacacccttcctgaaatttaccaccctttttgcaatataagccagtggttgttattctgtatgtggctaaaagactctctaacaaaacaaaattttgtccggtgaggtacaggcagtataaggaatcataataaat

SEQ ID NO: 191887 - DNA, 319 bp, Homo sapiens
ctgtggccctcctgcctacattccatttctgctgtttctctgacactttcccccactctgattcattttccgagtatgcagttgcaaaacctacgcttagaacggggggactgcaagcgtcctgtgtggcatttccctaagtcagctgtgactcagcctggcaagggcccaggtgccttcagagtggcttcctgcaaagaccagtaatgacgggccagccgctgcactcaggcacatgagccagcacctctgcgactgagatccagggaaggaacgggatcgccctcctacctcccagcactgcaaatgtcatttacat

SEQ ID NO: 191888 - DNA, 306 bp, Homo sapiens
tgctgggattacaggcaggaggcaccgcgcctggccctcatgcctgccttttgtagatcacactgttcgttcagtgagtatttatttggcatcttctttttgctggacactttctgggcagtggatggaacagtgaatctgaaggcagtgccgcctcacggggctgacatcgttgggaggggcccagatataaagaaatgagcccaatgtgtagtgcattcggtggggattgatgctgtgagatgagtagagcagggcaggttccgatctgatgatggaggtcaggaaaggtctcaccaccaggct

SEQ ID NO: 191889 - DNA, 426 bp, Homo sapiens
tcccggagtcacacaggatttgagttgtggtcccacttcggtgccttgtttccccatcctgtgaaatggaatcagagtctgggacaagaaaatgcaaagcaccggggcatggcacagagagtcttcagttaagaggagctgtctataaagtaggtggctttgaagggtcttttaaaaggctcatgcagtagaaaactgccccttccaccctcgtccctgggatagctgtgactgggtaactgctgttgtcgttgcagttacacggtgctaacaatgttggcctcagaccccagagagctgctggccgtgaccgtgggcatgcagcagcaggggctacatagaggctccccagtgcagtactgactgctttcaggagcagtcatgcccactggtgttgcatctttggcttctcagctgggttcactt

SEQ ID NO: 191890 - DNA, 99 bp, Homo sapiens
aacacaggaagcaaaaactgacagaattgaagggagaaatagacaatttaacaatagtagatggagactttaataccacaactttcaataatggataca

SEQ ID NO: 191891 - DNA, 359 bp, Homo sapiens
ggcagttgagaactaagaggtgtcaattgacagaatcttatcttttcttttttctttttttgagacagggtcttgctctgtcacctgagtgcagtggtgcaattatagctcactgcagcctgaaactcctgggctcaagccatcctccagccttccaaagtattgggattacaggcttgagccaccatgcctggcctggataatatcttcataatattataacatctggcttttcagagtttatgaggtgcttttctcattgatctttaattttgtgaggttcctagagaagttaggatgatcctcttgtcatagtcaggcaatggaggctcagagaactggcaccgtgtgttacacat

SEQ ID NO: 191892 - DNA, 269 bp, Homo sapiens
tcatcgagctcggccagtcggttctaccatcagcattgcacctatgtcctcacaaagctgtactccatccttcctattccttagaaccaccaccaaagctacttacactacccttagccattcttcacatatgaagttcagggagaaagcaattagttacttggcacatcacttttgaaatgtggatgacccctgttcaaagaatgcttttcttttgctctgccctcagtagagattagacattatagaacctgcctagaggaacatga

SEQ ID NO: 191893 - DNA, 414 bp, Homo sapiens
caggctcaagtttccccctcccacctcagcctccagagtagctggggactacagaaatgcattaccacacctggttaattaaaaatttttttctctagagacgggtcttatcatgttgcccaagctggtctagaacttctggcctcaagtgaccctcctatctcagcctccaagagcactgggattacaggtataaatactgcaactggtcacatactcttcttttgtaacacaagtctgccatcactctaagtgacttgaatatagatatgtctgatccatccaataaaactgcctcaaagttccttgacctcagttcctacaatcttcacttccatccaggaagaatcaagatcacactctgaaaagcacttcatcactgcttagaactgctctgatgctgacattatgaac

SEQ ID NO: 191894 - DNA, 485 bp, Homo sapiens
aacagtgtggttaggaaagtattctgtcataaaatgccatttgcatagatactcacaggtagtggggcagtgaaccctgtaaaagaatttgcaggcaaggaaaaacacaagttcaaaggccctggggtgagcttggcatgtttgaagagtttcaagtgaagcgggagtgtccagtctgtctggagcagaatgaacaaaagggagaatgacacaatttggggagcgggcacagagaagacattgttcagagccttgtcggccactgtaaggactccagcttttaattgggagacgttggagggtttcaggcagaggaaagacagggtctgacttctgttttaaagtggtccctctggctgctgtccttaaatatcaattgcagagaggtaagggtcggaggaaagaatcctgtggggagacttacggtattcaggggaaggatgacatcagtagtagtgtgacagcaatagacatcatgagaaggg

SEQ ID NO: 191895 - DNA, 417 bp, Homo sapiens
tggtttagccaggatggcaaaaccaggtatccaaaggcaaaagtacttaaccatgcgtaggaaggaaaggagttgttgctttgtagaaggggctagggtttgggagatttgccagacacaatcagcagggagatcacgcgtgttttcatgaagaattacagtgagcagctaaacaagaactgcctcgagataaagaagatgaaaacaatcgcagctcatccagcgcgctgacacggagcaacagagcccctgctccacagccctaactccagctttccctgggcaagagactgatttcagtaacttcctccagatcagaagaccactgacaacagactggttctgcatggtttacagacctggcaaatttcggtgccttcatgtcctgaaaagaccctttgacatacaggcttaatt

SEQ ID NO: 191896 - DNA, 377 bp, Homo sapiens
atacagtttggaccctgcatcttacaacagatgtgacagaggaatgcttatggtcaataatgatgtacagtccacagtgataaagaaattggtgggaatgagactttgagaagtataatgaatgtcagattgcaggctgcccatagtacatccagcatcagcacactgtagtttgccttaactaatttgggcctctgcagctttgggacagtattgcaaataggtggtataataagcttaaataacagatttccatcacttaaatatgaaaatctcagatttgtcacagtaataatattgacctcatgtttttgtttttattttttgttcattgacttcatgaatgaatagtttggcaggaaagcaggtaatacact

SEQ ID NO: 191897 - DNA, 359 bp, Homo sapiens
  misc_feature (171)..(171): n is a, c, g, or t
  misc_feature (181)..(181): n is a, c, g, or t
  misc_feature (192)..(192): n is a, c, g, or t
  misc_feature (222)..(222): n is a, c, g, or t
  misc_feature (229)..(229): n is a, c, g, or t
  misc_feature (246)..(246): n is a, c, g, or t
  misc_feature (249)..(249): n is a, c, g, or t
  misc_feature (336)..(336): n is a, c, g, or t
aagaaatctgagaaaggaaggggttctgttgaagatggcttttgagaatcactgaactaaatgcctggtaggtcttgaaattctaacttctgacgtattagtccattttcatattgctatgaagaaataacagagactgggtacttttttttttttttttttttttttttngggaaggggnttttttttttncccccagggtggggggggggggccaaaaantggtttnattaaaaaacccctttncangtttaagggtttttcccccccaaaccccccgggggggggggaaaaaaggggccccccaaaaggcccaatttttttttgttttttttnggaaaaaagggttttacccttgg

SEQ ID NO: 191898 - DNA, 605 bp, Homo sapiens
catccgtataacaatataaaaaaataaaccaacttcaccttacacattccttttttttttcttttcttttcttttctttttttttaagacagagattcactcttattgccaaggctagagtgtaatggcatgatctcacctcactgcaacctctgcctcccacgttcaagtgattctcctcaaccttcaaagtagctgggattacaggcatcagccaccacgcccagctgatttttgtacttttagtagaggcagggtttcaccatgttggtcagtctggtcttgaactcctgacctcaggtgatccacccgcctcagcctcccaaaatgttgggattacaggcatgagccaccgtgcccggcctacacattcatttcttatgctgcatctttttcctcaaaactatcatcagtgttacacaatgaaacagtctcaaaaaagcttattaactttaaccacaaattaataaacattccaaccaaagatacctcttttgttcccttcatctaattcagagggttttttgacattatctgtgcctttgcatgcccttgctgttttatatactctctatataactgtattgcctaatgaaggaccgtca

SEQ ID NO: 191899 - DNA, 382 bp, Homo sapiens
ctacaccatcaatcttttgcaatgatgctttgtcttccaacttaaaaaaataaaccaacttcctctttacctcacctcctcctccagctgctgtccccatttctctctttcccttttctgcaaactttttgaaagagttggctatgctgacactccaattcccctcctatcatcctttctcattcccactattatcaggcattccacaaaagcccctttgctcaagtcaccaatgactgctcagctttcatcctctggttgatctatcagcagcacttggctgcagttgatcactgcccttgttccttcacttggctcagggtggcttctggctctcctccctcttggggcttgctctctttctcacccctctgctgtccct

SEQ ID NO: 191900 - DNA, 124 bp, Homo sapiens
agtatgtgtcaaataagtacaatcatcactgcactggtgcctgtaatcaccctgtgcacatagtgagaaacagacattctagaaaggattcttgattctcccactaactgtccactggactggt

SEQ ID NO: 191901 - DNA, 617 bp, Homo sapiens
gttgaaaaagccagtgtccccttacctccagacaagtccactagtttcccaacaatggttcttaaccattccaaaatgactgcaatgacagacacagaattgagaatctggatgtcaacgaagtgcattgagattcaggagaaaattgaaacccaatccaaggaatctagcaaaatgatccaagagctgaaagatgaaatagtcattttaagaaagaaccaaactgaatttctagagctgctaagtttactacaagaatttcataatacaatacaagtatgaacaacagaatagaccaagaggaggaaagactctcagagctcaaagactggttcttcaaatcaactcattcagacaaaaataaagaaaaaatttaaaacaatgaacaaaacctccaagaaatgtgggattatgttaagagaccaaatctaggctggacacggtggctcacgcctataatcccagcattttgggaggccgaggcgggcggatcatgaggtcaggagttcgagaccaacctggccaacatagtgaaaccctgtctttactaaaaatacaaaaattagccaggcgtagtggtgggcacctgtagtcccagctacttgggaagttgaggc

SEQ ID NO: 191902 - DNA, 140 bp, Homo sapiens
caatggaagagatagaaaacaaacaaacaaacaaaatctacgcttttacgccaattgattttcaacaaaggtaccaagaatattcactggggaagggacagtccctttgataaaaggtcctgggaaaactggatatctgt

SEQ ID NO: 191903 - DNA, 664 bp, Homo sapiens
tggaatccatggatatataaggctgactgtattaatatttacactctacttatataccttaacaaccttaaaactttaacttaaaacagtaacaacccttccctcaatcttaaacggcactataaaaccatataatgcctttgttcttcaacaccatgagtgccttaagggaaaaagaaaaagccatacatttaaaatacaaatacacaagaatttctgaaatatgaaattcatttttcattaaaaaaattaaacccaccagaaataaaaattgtatttgcccagtggattaagtttaaaatgcttagtatctactatttcaagagtcaaaatgagtatttcctgacttaagcagaaaatgaatactgtatctggcaagcagcttaagatttactaaattgaaagctgtattaacaaggctacaaagtaaatcactttttacataaacaaaatttgtaaacaaatagtacatacagtacatacagcaaaaactataaaagatttgtttataatagttgtgaaaattttcaaccttgtttctcaatttaaacctaataaatccagagataactattttcctgttccatccttctctatatactgatgaaaatattaaatgaacattgggggaaaatattccattcgtctccacacaaacaaatga

SEQ ID NO: 191904 - DNA, 519 bp, Homo sapiens
aatgtggatctttagtaactaaactaaactaaactaaagaccgttagtgagtgctcgttatatttgcacagtgatcgtatgaattaggttcttttgctatcttcatacaaatcaggaggaatcaaacacctaaaacatttgggcaacctgaccaaagtcacacagcaagttgctgagaacaaggacgaaatcatggtcctttcccttaaacataacacacactaacttggaaagggaaattggaaaagatgtgcattgaaattgggaaatctttttgctccctcctcacttcgttcacttagaagcagttaaaaggacagaccatgaagtcagacatctgggcttgaaagcgatctcagaaaattggtgtaaggcactttaaactcgctaatggctaatttatgaaatggcaggctagcagtccctatattatagtgttaaaatgactaaatgagataatgccatctgacgctcccctccacctcaccaccctattctctggaaaccacatgcatcact

SEQ ID NO: 191905 - DNA, 561 bp, Homo sapiens
aactcccctgaccccatctctgcctctgggtctttgctcagatgtccccttccctgactaggtcaccctctatacagtcccagattttgaggccctccagacctgtttttctacagcccgtaacacacctgcacctgcctagtttctcctcccacctggagtgtcacagatttcatctgccatctttgtttttcaccccagcttcaggaacaacagctgattctttaagagaatactcaatacattcaagttaaataaatgattctaagagtccacaaggtgccaagcctatgattcccgcattctcttaccctgagcaacttcatgtctacaaatgctgagtttctcaatgagtattaaaaaaaaatgaaagattgatcgggcacagtggctcacgcctgtaattccagcactttgggaggccgaggccgggggatcacgaggtcaggagatcgagaccagcctgggcaacatagtgaaaacccgtctctactaaaaaatacaaaaaattagctgggcgtggtggcaggcgcctgtagtcccagctattcgggaggctga

SEQ ID NO: 191906 - DNA, 627 bp, Homo sapiens
gaactgtgcagcaacttacattttatttattcatttttatctttctaattacaaaattaaagttctgcattgtttctttaacagaaacaattattgtttacataattttgactacttgattggaaatatagtcattattgtaaagtaaggataatttgaccacagttttgtgtttaatttcagaaataaaaattgattaattgagctcagatttaaacaaaataagtttattgtgtttccaaagtttctgcttaaaagaatgtgcctcataaaagccacacacacaaaaaagtttattttttgaatcgagggtggataaacctaatttccaacatgtagtaattttcagacatttatattaagtctaaaattacttcaaaatgaaagattaaaaatcattttttaaaacttatatagacaatttgaaacttacttcaaattgtctttccctaaatattcctaccaattctcaacctcttttagccctgaatctgttttctaattttcgtttttatgaattgcttcttgattcatgattttctctatttgtgttgagttctccacttcctacatttattttctgccccctttttccatggcatttattgtctattatgtgcagaacac

SEQ ID NO: 191907 - DNA, 276 bp, Homo sapiens
agtgagtacatttttgaacacataccttaaattttaattgtttttaagccccttattccctagttttaccaggatttagcctagaaccctattgggcactacagagagtggacaaatgaagcattctaatcaaatatgctgtgcgtggtagctcatgcttgtaatcccagcactttgggagaccaaggtcgggggaatcacatgaggtcaggagttcaagaccagcctggccaaaatggcgaaaccctgtctctactaaaactacaaaaatcagcc

SEQ ID NO: 191908 - DNA, 328 bp, Homo sapiens
gtggggagtggaggaaaatgagatctggtgggcacggggcctcagtccacagaggacgaggtgtggggtcacctgcagcctccctcactgtagctgctgccatcctgccatagctggcggggccctctgctccttgggccgggttgccttccttggtcatgacactaaccttttctaaagcactagatcattcccggtccgactaaccctctcaacaacctgtgaggaaggatcaatagcctgatttgacagatggggaaaccgaggcctagagatggccttattttcctggcaagctaagggcaagaactcagtatcctggcttcct

SEQ ID NO: 191909 - DNA, 246 bp, Homo sapiens
agaggggcttcactgtccttgtctgtggcgctcacggtttgccctgggacaagggagcccgacctcagccctggaggagcgactcttttatctagctgggaagtaggacgagagcatcccctctacaggggacagggatggcttcagggccccgggcacagcagtggctgctaggggtttctcagcttggtgaaatttcagggatgagatggtcccaggatagcggggttctggggaggctctgct

SEQ ID NO: 191910 - DNA, 381 bp, Homo sapiens
tgagttcaactgagccaaaatgatttttgtgtgttaagctctgaaaatactttggggagaacacagtgatatcatttaaaagttctctgcaggaaaccgggaaattaagtactagagtggaaagccgggtaggcactaaaacatctactgaaaattaggtctcctgttgatagaggaaaagactacacaagtcgattgttttaaagatcactaggcattttaaaggttcctagaacccgatctaaaatccaattttttggccaggagcagtagctcacgcctgtaatcccagcactttggaaggctgtggcgggtcaatcacctgaggtcaggagttcgagaccagcctggccaacatggtgaaactccgtctctactaaa

SEQ ID NO: 191911 - DNA, 1302 bp, Homo sapiens
gctccgagggagaggagcttgttacaaacacacattctatggaattgagagccatcgctgcatggaaaccaccccgagcttggcgtgtgctaataaatgtgtcttctgttggtggcaccacaacaaccctgtgggcactgaatggtggtggaagatggaccagcctgaaatgatcttgaaggaagccattgaaaaccatcagaacatgattaagcagtttaaaggaacctcgagccagttactcagctgtatgtcagtgtggatgccagtaccaaagacagcctgaagaaaatcgaccgcccactcttcaaggatttctggcagcaattccttgacagtttaaaagccttggcagtcaagatggagtctcactctgttgcccaggctggagtgcagcggcccaatctcagctcactgcagcctctgcctcctgagttcaagtgattctcctgcctgagcctcccgagtagctgggattacagcaacaacgaactgtctacagactgacgctcgtgaaagcatggaacgtggacgagctccaggcctacgcgcagctcgtgtccctggggaatcctgacttcatcgaagtgaagggcgttacctactgcagagaaagttcagcaagcagtcttaccatggcccatgtgccctggcatgaggaagtggtacagtttgtccgcgagctggtggatctgatccccgaatatgaaattgcatgtgaacacgaacactctaattgcctcctgatagcacacagaaagtttaaaattggtggtgaatggtggacatggatcgattataaccgcttccaggagctcatccaggaatatgaagatagtggtggatcaaaaacgttcagcgcaaaggattatatggccagaactcctcactgggcattatttggtgccaatgaaagaagctttgatcccaaggacacaagacatcagagaaagaacaaatcaaaggctatttctggatgttgagattatctgatttcaaggtactgaaggacaaaaacttggatggcctcaaaaggttcttgaacaccactctgattctccaaggacgaattacgtaaattatactttcatacaaaggagacgataaggcagtaaacatggagacacgggggacagcgtccacactcagagggcctgggccacagccccgatgtttcttttcagaactcagcccctttcctgattttacttctaagaggaaaattattttggggaggaactacacagtcgtgattagaatttaactgatggttttgtattataacttctaagacctgccaga

SEQ ID NO: 191912 - DNA, 1180 bp, Homo sapiens
gctccgagggagaggagcttgttacaaacacacattctatggaattgagagccatcgctgcatggaaaccaccccgagcttggcgtgtgctaataaatgtgtcttctgttggtggcaccacaacaaccctgtgggcactgaatggtggtggaagatggaccagcctgaaatgatcttgaaggaagccattgaaaaccatcagaacatgattaagcagtttaaaggaacctcgagccagttactcagctgtatgtcagtgtggatgccagtaccaaagacagcctgaagaaaatcgaccgcccactcttcaaggatttctggcagcaattccttgacagtttaaaagccttggcagtcaagcaacaacgaactgtctacagactgacgctcgtgaaagcatggaacgtggacgagctccaggcctacgcgcagctcgtgtccctggggaatcctgacttcatcgaagtgaagggcgttacctactgcagagaaagttcagcaagcagtcttaccatggcccatgtgccctggcatgaggaagtggtacagtttgtccgcgagctggtggatctgatccccgaatatgaaattgcatgtgaacacgaacactctaattgcctcctgatagcacacagaaagtttaaaattggtggtgaatggtggacatggatcgattataaccgcttccaggagctcatccaggaatatgaagatagtggtggatcaaaaacgttcagcgcaaaggattatatggccagaactcctcactgggcattatttggtgccaatgaaagaagctttgatcccaaggacacaagacatcagagaaagaacaaatcaaaggctatttctggatgttgagattatctgatttcaaggtactgaaggacaaaaacttggatggcctcaaaaggttcttgaacaccactctgattctccaaggacgaattacgtaaattatactttcatacaaaggagacgataaggcagtaaacatggagacacgggggacagcgtccacactcagagggcctgggccacagccccgatgtttcttttcagaactcagcccctttcctgattttacttctaagaggaaaattattttggggaggaactacacagtcgtgattagaatttaactgatggttttgtattataacttctaagacctgccaga

SEQ ID NO: 191913 - DNA, 627 bp, Homo sapiens
gcaggcttccttcacaagcactgcaggtttcgataggatagtattggtagataacggtggacaagtagactgggtcaaattatccagaaatgctttgcataaatccaaaggattgtagtttatgatctgtgattggattctgagcagaaactagaatgataaggtaattgatgacaagatgcagaatggtttagtgttagagagactggtagcaaagagatcagttagggggcttccaccatgtttgagagtgaggtagatgaggctttgatattctgcttaggaatttttaagatgatcatattttaagtaatatctagcttaagaagtaatattttaatttttttattattacagaagtgatacataattgcaatgcaaacatttagaaaatagaattagtaagaaaaagaaaataaaacttgcccttaatctcagcatgtagggctaaaactagtattagcattttggcatctttcctgctaatctttttattttatcattccttttcttactctcttcactgtgaactgaactagcaaatgcatggaaagttgactttacatacattttattccattacaccaaaatctttagatatacttgttatatcataaaatggtatag

SEQ ID NO: 191914 - DNA, 314 bp, Homo sapiens
tatgctcattcagttctccaagtacaatcagcatttcctataataataagacatagtttatatgagacataggtaattacacaactgaaatctatgggataatatattctaaacaagctgaagggcaaatattattcttcccactaaaataattacacctagctgggtatttctccatgtaagcttaaatttcttaagtacatgggcctgtcttgcttcactttttattctttagcacttaagcacacctttcacgagtaagtatgaggatgacataacattatgtatgctaaagtcttatgaactgaaaatgg

SEQ ID NO: 191915 - DNA, 370 bp, Homo sapiens
acagatggcaccagggacaataaaatgcaacagagttgggatggacggggtccatgcaggcagccagaaatccaggcaagtgctgataggacctggaatgatgcagcgactgtgaggacagatgtcggacaccatctcataggacctagtgaccaaatccccacgctctccatcccgcctcagcttcctccccggcttccctagtggctgtccaggggtctcagcctgaatttctccctctgcaatgggttcgagacagctcgtttcagaaaaccgggctagtcaccttcccactggtcctctgtttcttacaagagtagccccacaactcagcctctcctggcccccgccttaccaagcaccagatatt

SEQ ID NO: 191916 - DNA, 394 bp, Homo sapiens
gtcgcgccaccgcactgtagcctgagtggcagagtcttagtctcaaaaaaagaaaagacattatcatcttgagccatcaaattcactgttactgaaattctttgctaaacctgaaggcaaaacaaatttagtctttttgtcttagaccaaaggctgtatgtttctttggtaggtaaggggaacagagcacaggtgacctacttactcatatctgttcatctcccagtatggggttgcctcctctgaactagggcaagggtcaagtctctgacttggtttttccctgaaaatggtcacaaagtctgctcagcattgtttagggatgtggatgcattggccccatcacctgcccatctaaagtaagcatgttatgtaatctaacaaatatttacca

SEQ ID NO: 191917 - DNA, 400 bp, Homo sapiens
ggtgggccccccccaaaataaaaaaaaaaaaaaaaaaaattaaaaaaaaaaaaaaaaaataaaaaaaagaaaaagaaaatgaaatacttgtaagcgtatggccagcatcctctgttgaataataccaaagacaggagtttcccccaaccccaaaaatcatgctttattttagagtgagaaaaggccagattagggttataagtggagggctgaaagtttgactttcagttgccaaagtttagccttaatactgctgatgattagaaaaactgtgatctaacttacaaactagatttgattgaatcattgggtaaatagaatatacaaaagtgctcccctgtcataactttttaaaccatatttgtgctatttaattctattccttcttgttttctactaa

SEQ ID NO: 191918 - DNA, 842 bp, Homo sapiens
cttactgtatttttaaatgagtgtctgtctggccacttttcattctttataaaaatatagtatcaacctgaagttctaaagagttccttggcccctgttcgaagctttcaggatactttccatactttatggaattctgtagtttgggccttttaaaaactaatttcttttgcacagttaaacaactactatatatagaaaaaaagaaaaatcttgtttattgacaattatttttatcttgtttcattctcttccagtccatgtgtagacatgtccgtatgtattagatgcctttgtatagtttaatttgagtttatatcattttttctgttcgttccatgtattagttgagttcacatatttatttatttatcttttttttttcagacagagtctccttctttcacccaggctggagtgcaatcacgatgttgcagtgagctgagatcgtgccactgcattccagcctgggcaacagatagagactgcatctcgaaaaaaaaaaaaaaagaaaaagaaaatgaaatacttgtaagcgtatggccagcatcctctgttgaataataccaaagacaggagtttcccccaaccccaaaaatcatgctttattttagagtgagaaaaggccagattagggttataagtggagggctgaaagtttgactttcagttgccaaagtttagccttaatactgctgatgattagaaaaactgtgatctaacttacaaactagatttgattgaatcattgggtaaatagaatatacaaaagtgctcccctgtcataactttttaaaccatatttgtgctatttaattctattccttcttgttttctactaa

SEQ ID NO: 191919 - DNA, 600 bp, Homo sapiens
aagttgatctgatctcttaaaagaaggctatatcattctcatagcggtgtacctgctccataaaaaggatttttttttcaactttgttaactgtgatttcatgtcttaatggggatggtgccatcaaaatcattcattttgaaattttgttttaatggaaggattttaattgtggttagggaattcagcctccatatatagaatctggaactgaggatgaactttgcaccattctatcaataagcaggtgataaatatcagctatttttgtttaaattactctgcacccagcttttgcctttcggtcgtattgcaatcaggagatatttattccagcttgtgatagtgttggaatgggtagtaattttaagcacagtaccggctctttaggagcttacgattctgccattatttttcacttaaaaaattctttgagaccttcctattctttgcatctggggggttctgagaagctaaggaatttatgatattaactggcactttggaaggcaagggagccttggaatcttgcctatagaacctgttccatacacctgaagaatagcatttattctactaattatgcagcataccctataa

SEQ ID NO: 191920 - DNA, 335 bp, Homo sapiens
catgcagaataaagctgtcccctctaaatatgtttacacactgccacctacttggcaaaagagatagaagatcttcagcctttaggaagtctggatgcaagggtccagaaggaagagagagtggactggtcattgtagtgggaattggcaagagcaggactgatgtgcttgtcatttctctctggggcagagctgatgtgaggtgtgttgaggggacagcagtgcttctagggagaagctcggttcagcgccttggggaccttgggcctggtgtagcccagcattccgtggggcttttggaatcctgttgctggcatctgccaaccctggggagc

SEQ ID NO: 191921 - DNA, 271 bp, Homo sapiens
cgggccaggacggatgtgcgacggatgtgtagttgcaaaagtgaagcttttgttaatgaaagatttaggttagacttctgaaagaacttccagctcagggtgaaggagtcaatccaaaggaaagtcagagcatctccttctgataaaaagggcagtgtttccaggcaaggggctggattccatgacctccccgaagactcagggctacagaagggtcggcagagcccccatggcacccccagggagcccccacatccgtactgacccggac

SEQ ID NO: 191922 - DNA, 435 bp, Homo sapiens
ctttggagaggatagtggtgcagaggtgtggaggtaggtctgtgcttggcctagaagacccaaattgaggaggttgtgcctgcaaagctggagggtacattcattgatcccactaggagcaagagacacatagcaggttgtggttaaacaccagaggaaagacagacaactccctacgaagttccaggatgtgtagttgcaaaagtgaagcttttgttaatgaaagatttaggttagacttctgaaagaacttccagctcagggtgaaggagtcaatccaaaggaaagtcagagcatctccttctgataaaaagggcagtgtttccaggcaaggggctggattccatgacctccccgaagactcagggctacagaagggtcggcagagcccccatggcacccccagggagcccccacatccgtactgacccggac

SEQ ID NO: 191923 - DNA, 228 bp, Homo sapiens
gggatgccatctttcttctgcccttgcacatcatactccaggttctttgggttttggactctggaacttgcaccagcagcctctcggggattctcaggccttcagccacaggttggggactacgcttttgtctttcctagttctaaggcttttggactggaatgaagccaccagcttttctggttctccagtttgtggacaccctgttagtgagacttcttcaccttt

SEQ ID NO: 191924 - DNA, 1147 bp, Homo sapiens
accccaaatggatccttcctagttgaggcttcccccaaaaagtcaatctaagtcatcactagtgattctcattcatataactattttaattgtttgcatactatttttcgctaatattttgtatgtttgtgtattattggctctatttatcttccaccactggagatgtgagcaatgacttttatcttgctcacttctcagttacctgatcttagaacaatatctggcaagtattaggccctccataattattttttgaacaaattaatgaaggaatgcatgcatacactcatgccatgggcccagcactctggtaaatctccctgatggaggcatccttcgacttgtattctgctctacttgtccccttcccttcttgcatacacagcctagtttctaggaaaagtgacctatgttctgttcttcagcagctttctacttataataaatccattacaatctggcttgtacctctacccctcgaaagaaactactcacaatagtttctccacttgccaacaacttcctatttgctaagtccagtggatttcatagtcttcatcttatataacccatcagtagcttttaacagtttcttccttgaaacatccattctgccttcatatctatgacatcatctcttttgtttttatttctcttaagccatgtatgcttgtggctgcaatttgatgtcacgtcaaataatatagctgtctttgtgggtggaaaatcatttctgcttaataatttcatgtcttcacagtgttctatctgaagaaatttgtgaaccactgcaataagggatacatggcttacatgcgtacctgttaaaactctgtttaggctgggtgtggtggctcatgcctgtaatcccagcatttggggaggctgaggcaggcggatcacttgaagtcaggatcaacctgaccaacatggcaaaacctcatctctactaaaaatacaaaaattagccaggcgtgctggcatgtgcctgtaatcccagctactctgaaggctgaggcaggaggacaacttgaacccaggaggccgaggttgcagtgagccgagatcgtgccactgtgctgcagcctgagtgacagagcaagactccatctcaaaaaaaaaaaaaaaactcttgtttaatgac

SEQ ID NO: 191925 - DNA, 326 bp, Homo sapiens
catcttttttcctcaaaacttattaaattgataaaggaggaaatgtggtatttcattcagagatcattctccttttttcaatatgactgcttctaaagtagagtgaaggtgtatggatttttttttttttttttttaatcaagacaaggcctcactttgtcacccaggctggagtgcagtggcgtaatctcggctcactgcagccttgacctcccaggttcaagtgatcctccgtgcagtttagatatgatatgccttagatgtggtttttttttttttttttttttgggggtttaaaccggggggggggccctgggacctcccgg

SEQ ID NO: 191926 - DNA, 149 bp, Homo sapiens
ttctgcaggaagcaacggacttgccctcgggacagggcagctgccccaccccaagggagcacctttgggagagcaaagttctgtttccacatcgggatgcctgtggggcctctgcctcctggtcacgccactaaggccactttggctgc

SEQ ID NO: 191927 - DNA, 514 bp, Homo sapiens
ggaggctggcatttctggccatgtttctggcctctggcttagggaggtactctgcttcccatggtaaggaagtaagtggtatcagaactagcctcctctctataggaagctataaaactggacaaaagaaatgaagcaattgtgtcagcctgtagacaacaggcagcgtaaaatttcagttcctaagagaaggaaaactcgaggtgagcgccacatttgctcagttttctgtctgaggacggtttcccaaccctgttctgtgagtggagtctaaacaggctgtgatgatttcccctgagctgaagaggcagaggtcagagtttgggcagctgaagcagttggaatctgtggggtggaccatcatagggtagggaattgttcagcaagagggtctcagaagtctgtgggggcattcctgtgaggctgaagctaaggactggcctattatttatacatggggtgaagccacctgaagcttaccatatagacagcagctggtacaggatgaatagaa

SEQ ID NO: 191928 - DNA, 152 bp, Homo sapiens
atattccaaagagagtttccaaacttctcaaatctactgctctatctcagtctgtccattcctctttctccttgatcacccttctctaccccaaggctgagaggtgattgactctcagtcatcatttccactccttgggtggtgcaacatac

SEQ ID NO: 191929 - DNA, 679 bp, Homo sapiens
agtgctgggataaaggtgtgagccaccacacctggcctaatcatatatttttaaaactggaagtggtctatgagattctaatccaaatccctttattcccaattaggaaatctagagaagtgatatgacttgacttaaggtttcacagaatacctcaaatgccacttcccagctacaggccgtatgtcctcaccactagacccattttcatttcattgttcccaccatagctctaaggcagatcacctgtgtgatctttaagaaactactcgtctagaatccagtgaaaagcacaaaaggggtcaattccggagttagctttttagtacttttgaacttaaaaaaaaaaaaaagaagctactcatctaaagatagagctagatagtctctggaacctttcataactctcttatctgtgtgatatttgccatcattctataaatctggatttgcaaatcttacatttcagccttttgtttttcaagtttaatgcctgtttgggataatttgtctacaggtaaatgtctagccctgtggttttcaaagtgtggttcccaaaccattagtatcatgttagaagtgacaggtctcagaccacacatcagacctgctaactcagaaactttgggattggagatcacttcgtttagcaagctctctaggtgatgctaatatatgc

SEQ ID NO: 191930 - DNA, 303 bp, Homo sapiens
ccctgcagcccccaagagcacacgcaacctgccccacccacacccttctctgttccttgcccttgaccttgcagactcaaccttccggattcacttcccccttgctcactctgctccagccacaaaagccaatttttggttcctcaaatcaaactaactcatgacagcattttgaattttgaagccttggggccccgaaaaagtccatcttttttttttttttttaagatcgagtctcactgtgttgcccaggctggagtgcaatgacttgattcacggctctcactgttctcctcgattctc

SEQ ID NO: 191931 - DNA, 308 bp, Homo sapiens
caagtagcagagctgggattcaaaccccagaaagctggcctcagggtccatgtcgtgaaccactagcctacactgactcccacatctctgatctgcaaactgtgccttttccatttctttctcaagacataactttcagaaattagccagtgctttgacaagtggagcacctaaagtaaaatcccagagatgggttctggggagactaagccgaactactcaacagctcccctgggcgcctaccacatgattctcctgaaggagtttactggccacacagatcgcctcgccacatctgtacttatcat

SEQ ID NO: 191932 - DNA, 322 bp, Homo sapiens
ccgagcagccaatcaagaacaacgagctaatgacttggaacaaattatggaaagtgtgaaatccaaaattggtgaattggaggatgaatcactaagtagggcttgccaccaacagaataaaataaaagatcttcaaaaggagcagaaaactttacaggtactgagttatgaattcttagatgatggttagttagtactaaaacagctcattatggtcccaggtgacttccatgttgtttgattcagtggtttttaccttttttggcttatcactgctaccttgaaattctcttcacttggtttctagaatgtcctttatttc

SEQ ID NO: 191933 - DNA, 372 bp, Homo sapiens
ggcaccatcactataacattaagaacttggaatgcatgggatatcccaataggattctactagtgtagcactgatggtattagttatggaatttatctgatttaaaaattgccagcttagtgtcagcctgatagactatatagtattgtcttttttttaaaatactagagccaagtgtgagccatattaggtgatttgtaggtaatgcaggtaattagtaggatgaggcaatgaataggatacgatctgaggtcagaggagaaatatttggggaagattaagttaaataagttaaacaattttgagaggtagaaattctgtattttgtctctttgacttgagccaactactgataaaattatattttcaaaa

SEQ ID NO: 191934 - DNA, 449 bp, Homo sapiens
tgcctcccgggttcacgccattctcctgcctcagcctcccgagtagctgggactacaggtgcccgccaccatgcccagctaattttttgtatttttagtagagacggggtttcaccgtgtttggtttagccaggatggtctcaatctcctgaccttgtgatctgtccgcctcggcctcccaaagtgctgggattacaggcgtgagccaccacgcccggcctatcacatcttaattaaaataattaacaacattatccaccactaatcagcatgtagactttcctgattgtttcataaatggtttttaaagttggtttatttgaatcagaatcaaaataagtctatacagcataattggtcaatatgtctcttaagttacttttaacgtatagtttatcctttccctttttttcttgcattttatttgttgaggaaatggtcatttttca

SEQ ID NO: 191935 - DNA, 482 bp, Homo sapiens
gggcgggcagaggggagattataggtgaattcagaatgtgtttgaagagtggtgagagaactgggacagcatacgtatgcagtttgcaaatagccagggcttgaaaatagtggagggaaaataagtgaactagcacttgggtccagattatggtggtctttgactatcaggctgaagcttcgcattttctcacgttgatcagtacatttcaaaatgagctgtggactgtggagttaaaggtcttgctggggaggtggcaaaagagggaggccaattcagggaagagaaatgcctgggacctgacccttcccttcctcggttccttctccctctaccctctgctttagcttgtcccggcttctctctcctctctctctctctttcttttttcttgctatatttggtatgccatgtaagatttcatctgaaaaaagcatcctgttattttattttactttttacgaatttgaaacacactgatg

SEQ ID NO: 191936 - DNA, 584 bp, Homo sapiens
ttatcatgctcatcaagccacattttttaaaaaatgactatctttgttaaattatctatagtaagagaatgcaatgagcagaaggctctggcaagtatttcattaattatttatttgtgttacagttgaatacattattattctagtatttatatgtcagtctcaaatgaatgtagtgacagaagccagtatctaagagccagattacccttaggtatatgaacagttttatttaaaatgaacttgaaaaattagatcttgaaatacagaaaccttcaaaagacttcatctactatgtatactagcctggatgatctgtcagcctttgtcaggcaaaaaaagcccttcggttttattaaagtctcaatcaagctgcatgatatatgaatttcttaaaaactcaaggtcattattgtgagcacctctgattgtattgtgtgatattattgtttgcagaataacagaatgttgtggctagaagagagcttagtagtcatctagtaaaatctctttattttaaagatggggaaattgaaactttcctttaaagctagcaattagagaactttgggttcctgatggtt

SEQ ID NO: 191937 - DNA, 538 bp, Homo sapiens
tgttatagatcagtttagtaatggtgggagggaagcagagggagtccaaaccacacaccactattttttgcagtagagtaggaagttaattatctgctgggaatggatgttcaggaatggagtaagaagtctcagcagcctcttaggtaaagaagcaaagatcatcagtaaagacacatgccagaaagcaatcctacctacttttgccccttagaactagtgtctggcttgaagaactggagtctctagctacactgggttacgtacaaaaaggatgaagtcagatctctcctcaatggacactaaaataaaggtctggggtagagtggggtgtccacaagttgtacttagttctgacccaacgcaatccccctaatgaatttaaaagtggccttataagaatggaagaggccaacttagaattaaaaagggcagggcagtttaaagtcaataacatccagaattatggccttaacaagcacctaagtaccatgagggaataaaaacaagatatccctactgtctatatactacatct

SEQ ID NO: 191938 - DNA, 597 bp, Homo sapiens
gctcggtaccccactgcatgtacttgcctttgtgtacttgtctgtttccatagggtaaattcctgaaagtataattcacaggaagttgcagaaatgagtcagcggccttacgttaggaaacaaggtgacaagaaggctacttccacatgaagggacaggactttacttggtgagatacaagactgggctgccctcttcactgtccccaatttttagtagttagtagcaattctaacctcaatatagaaagcacacttaaagacaaacatagtaacatgctgaagtatacaaatggctaagtcagacattaaaaaccttacaaaagattctatttcatagtaatagtaacaatcttaaaaggataaaatattcttccttcttatcagaggcaaaggcttttagatacgccactggtaggaaaataaattggtacaactttactggagggcaatttggcaaaatgttattgaagagttttaaaaggtgcaaggcctctgactcatttctgcaacttcctgtgaattatactttcaggaatttaccctatggaaacagacaagtacacaaaggtaagtacatgcagtgttacttacaaca

SEQ ID NO: 191939 - DNA, 558 bp, Homo sapiens
gtaggttcaagtacttaacaagtacttccagtctttctggaatctccacctgaaacaggaggatttcatataatttatcatttaaactgggaccctttgagagtaattactaataacatcaggacaacagataaaacagatataagctagggctgtcttggcaaacttggacacatgatctccctaccttgaagatcctacacccttgggtgcacaggtacttaaaagacccccatcatgcaacccttgctgctttacagactttgctcttgtctgaccctaataacttgtgatgaagacttgacaagaccttgcaaaaccagtctttctggagtctccacctgaagcagaagaggtcctcagcaggggtatggtagcatggtgccagtctcagagcaatcctataaaaccttttaaaagcattggccagtgatcaggtggtagtaggccccatctctgcttgtacatctcagtttcacttgaaacttttcagagaagattatgccatgatactggaaagaatgctggatcaaaagtcagaagacccaagttccagct

SEQ ID NO: 191940 - DNA, 589 bp, Homo sapiens
acaatagcgagggactgtgtacttcctgcagatcatggagatcatggaagcctcccaggggaggcacatctcggtagtgacgtgagtgaggaacggagctggtgctgcccatgccagggaggccaagctgagccaaggacacagaatatggtatgttctgaggacagggccacagccaaccagccaggcgggaaagagcaggtggtagggagagtggcagaaaggagagaagaggggtgcacagcacctggacaatgggaacctttgtaaaagacagagcaagaaacttgacttttcctggagatgggatggagagcctatggcgagcttcagccagacaatgatatcctctgatattcactttaaaagctgactctgacactctgtgagaaatagatggcacaggggaaggagtggaggcagggaggccaagtggctggtgaagacttgcatttgagagtcaggtggacacgaggaacatggctgtgtttaggatgatagcacctgtggagggactggagtagaagatgtcaactgaagaatcacaggattcaaaatttggaaagaactttatttctcatgaagggtt

SEQ ID NO: 191941 - DNA, 239 bp, Homo sapiens
gcctggagtggagagtgagggctggcctgacgtgaggtggtggaccagaccacattctggtctttatcttgagaacaatgaaaacttaaagggttttcaagcatgggtgtaacagcaactgaaaagctcactggcctgcagtctggagaatacatattgggagattaaaaccttacagaaaaaaggccagagaggatggtcatttgcactaaggtgacagtgtggcagtggagatggag

SEQ ID NO: 191942 - DNA, 332 bp, Homo sapiens
ctcgccgcccctgccctgtctccagcttattgttcatatcactgtagcatacgttatagtcatatttcttttgtaacctgagctgtgagtttctgtttttttcacacaataaataacaccacagtgaatctctctctctctctctctctctctctctgtgtgtgtgtgtgtgtgtgtgtgtgtgtgtgtgtggttttttttcttcttttgaattgttcccaggaaccttccttgattctccacaagaaacacttcccagtcctatgtggtcctgttcccacaaattaacacatgtgaagatcaggtctatcagggctgctcctcagtgccca

SEQ ID NO: 191943 - DNA, 486 bp, Homo sapiens
tatttcttttttcaccccatatatatttattaaatgaactggaaattttttcagttaaaaaaagaaagaaaatatggaattctgtcaacccaagaacctggcaattatcgcttgcaaacatgtgacatgggttattttttgttgggattaggttgtcttttttcagaaacaacagattattagttatactttcagtaaggattaacagtaagcatccatttttaacttacaatgtattcatagtaaatagtgttggttttttttctaagagtttataacttatggaaaatgttaatactttagctccagggctaaccttaattggaaaattagcatatatgtttctagaaacatttttcattagaaaataaaagcaaggctcagcttttgagagcagcactaatgaggacctttggttaaattatttgaatatgatgccagattttatatttttcttttccatcttgtcattagccacattaggcc

SEQ ID NO: 191944 - DNA, 641 bp, Homo sapiens
caattccattctttaatctcaatactcactttttaaatgatttcatctagtcccacggctttaaatatctatagactgaggactcccaaatttttatctccagtcctagcatcagtcttgagctgcagatttgtatatgcacctgcctacctaacatctctacttgaatagagtttatatgagggacttgagcctttgtggattttggtatctgttggtcaggggaggtcctggaaccattcccccatggatactgaggaatgactgtagtgagatttgggatacatcttgaaggtggaatcaatagaattggatgtgggttatacggcatcatatttgcatataacctcccatatactttttttttcctgagacgaagtctcactctgtcgcccaggatggagtgcagtggcacaatcttggctcactgcaacctctgcctcctgggttcaagcgattctcctgtctcagcctcctgagtagctgggattacaggcagtctgccaccatgcccggctaatttttgtatttttggtagagagggtttcaccatgttagccaggctggtcttgaactcctgacatcagggatccacccgcctcgcctcccaaatgcctcttggaattacaggtataagccac

SEQ ID NO: 191945 - DNA, 209 bp, Homo sapiens
ctttcagtccctcaaacatgcagtgccttgttttcccttgcctgcttcatctgtgcagagccatgcacctgggatgcccgaagccctttcctatgctctcaccagccccctgatccccaccgtgccttgccttttccccctcatcaaatcagtagaacatcaaccgctcagggaggctcttgttgattcctgagtagatatctgctact

SEQ ID NO: 191946 - DNA, 376 bp, Homo sapiens
cagacactgggtactccaaaagtggggagagaaggaggtggggaggggctgaaaaacatcctcttgggtactgtgtgcaccacctgggtgagaggatcaatggaaacccaaaccttagcatcatgaatatacccttgtaacaaacctgcccatgtaaccagtgaatctaaaataaataaaatgggggtcatgatagcacttccctcctagactgtgaagatgaaatgtggtagtacatgtgaagtattttgagcaatgttcaagcatgcctttgataaatgtgagctattagtattcaggacggtcatgtaaataattcagtgtccaaatgtgggccctttaatctgggacaaaggctgaactatatagaactcta

SEQ ID NO: 191947 - DNA, 768 bp, Homo sapiens
agacctagaaagtgcctaccatatatagttcaataaatgatagccctattatttttacaataatttttgccatcttgaaaagtgaaaagaaacattttgttgctttaatttgaatttctttgatgcttagcgaggctgagcttctataaaagtttggtgttgctttttgtatctacatcctttatctggtttttgtagcttgttgattcttctgaattatctggccacgtgggtaatcaaacacttcccagtttctcagggacagtcctgattcctgtctgctgtaccaactgatgattaacatgaacgctttgtatttagaaagataaattataggcaggacatggtgactcacacctgtaatcccagcactttgggatgtcgaggcgggcagatcacctgaagtaatgaggtccagagtttgagaccagcctggccaacatggtgaaaccccatctctactaaaaatacaaaaaaaaactcgagttttttttcttttttttaaatcgattgtatcaatttcacattttttcggagaattgctcttgagcacattgctacaggtcagattcttcctaattttctgcttttctctttctaaactgattggaagaatgcactggtcattgctgatcatggggttcccatgacgtatattagttaacattggcattttctggagcaaagattttgctttaatcctttattggtagaccgcctttgaattccttttgaaagtgcatattcttaactacctttgaggtcttt

SEQ ID NO: 191948 - DNA, 373 bp, Homo sapiens
agacctagaaagtgcctaccatatatagttcaataaatgatagccctattatttttacaataatttttgccatcttgaaaagtgaaaagaaacattttgttgctttaatttgaatttctttgatgcttagcgaggctgagcttctataaaagtttggtgttgctttttgtatctacatcctttatctggtttttgtagcttgttgattcttctgaattatctggccacgtgggtaatccacacatctccatacatctactggccaggcaaaatggctcatgcctatcatcccagcattttgggaggctgaggcgggcggatcacttgaggccaggagttcgggaccagcctgatcaacatggtagaaccgact

SEQ ID NO: 191949 - DNA, 313 bp, Homo sapiens
ataagtgactgtaggtgtaaagtagtacagaagagggaaataaagataacttctgtccactttagcttttaacatgcaatgctttcccttcaactcctgaaactatcacactgtcagggaagaggcaccaaattgtacagaatgacaacacttgtataagggtaatggaaactaaccaagccacttgacaatgctctacccatgtgttccaaaagtcaccaaaatagaagtgctttctaaaattcagcactaatgttaagataatacacaccaaacattactagataaaaaatttctcccacatgctatcact

SEQ ID NO: 191950 - DNA, 494 bp, Homo sapiens
cttagacaccccccattagccacctggacttacccacctggccttaactttatggccttacccacctagatgaccgatatagcttactaacctggcattcccacctggccttaaccttttgttctaactcacatggctttaacctcctgaactaacctgcctagctttaacctcttactattacccaggtggagctatctacctacccatatttagggaggccttaacttactggcattacccacccaggcttttcaatcacttggcttcctgacccagtcttaaccttatggttttgccaacttatatttaaccacctgccttataaacctcctggccttttgcattcagtatgaattccctggccttatgcacctgccttacccacctgtccataccccactggtgttaagatcgtgtcttaaccaaccagtagtacccaactgatcttaccttcaaaaccttccagttgccattcataattcatctcactc

SEQ ID NO: 191951 - DNA, 224 bp, Homo sapiens
agccgagatcttgccactgcactccagcctgcgtgacgagcgaaactccatccccttcccccagcaaaaaaagaaaagaaaagcgtacatctgtttaacaggtaatatcaggcccaggccaggtgctggggattcagagagaatcaaacaaatcttccacgtgatggaggacagactggctaaactggtcacatcctgggtgacaagagtgaaactccatcttt

SEQ ID NO: 191952 - DNA, 251 bp, Homo sapiens
cactaatcatcaagacaagttcatcagaaagcccaatactagaaattaatatttaggcataacataagaaagaaaaagaacatgtgagttattttaatatgactcaattctttacactgaaatagaacaaatttctagtaagagtgcctatattcaaataacacaaaatatcattacaaatataaagcaaacaaattttaagtaaacatggatcttaaaatgcttaagagaaagctgaaatcacatcacag

SEQ ID NO: 191953 - DNA, 191 bp, Homo sapiens
ttgaatccatgtcacagggggacatgaatcatgtctctagggcaacccaaactaaaataggatttcatcaacatagtgagtgcttttaactagtcggggttaaagttataaaagtgactttgtgggctctttcagagaactttgcctacagtaaagtcctgattttaggagaagctgatttttaaagtgta

SEQ ID NO: 191954 - DNA, 377 bp, Homo sapiens
ctgggctcaagtgatcctcctgcctctgtcctctgtgtagctgggaccacagacatgcaccatcatgccaggctaatttttagattttttgtagacttagggtctcactttgttgcccaggctggtctcaaactcctgggctcaagtgatcctcttgcattggcctcttaaagtgttgagattataggcatgggccactgtgtcccacctcgcattagtttattgaaaagaatgttatgtaaaattttaaaaacatctacaaaactaaatgcaacagtataataatcctctctttacccagcactcagcttcaataatttttaattcataattgaatttatttatagcttctcctacttttctctactcccatattg

SEQ ID NO: 191955 - DNA, 372 bp, Homo sapiens
cattctgccgggaccacagctgactgtcggaacatctcctcaggcactatcaacaagcatttgcagagcacttactctgcaacagggccacctccaaactgccaagcccacaggactctctgcacatgggcctctggtaactacctcttcctcccaagaaagctcactttctccaggcacagaccaaatctcccaactcttttcaatcatctatgaggcctctaacaatggccccaaccctggtagcccatgagaacacctgcaaagtatgaggcctgggttccattccataccacctgaacaagaaccagagcctgtcacattactggcaaggcatgtcctgaccacctcctcatcccctgcatgcccaat

SEQ ID NO: 191956 - DNA, 659 bp, Homo sapiens
accatgggagccaagggctagtttcgccttcattcttctgactgctggagaacacagaaacttcaggagctgtggacgggatgggaaccaggggcacattcatccgtctttgccgggcatggagatttggcctgccccctttccagagtttttcttagaaggtggtcttttctggactgctaaggaacgtcgtgtgctttctcttctcagtaatctgcttttttgaggaacgattttaacggcagatagtaagagttcctcaaggaaagtaaacagaccttttctaccccctcgaaatgtgattttaggaaatgatattcaacttcagaaaggaggcatcttaagtcacaggaggaagttgtgtttatttttactcctctcctgactttaaagtagtttttaatctgttggtagcattagggagaatgcagctaaaataagtttttgctggatgttcatgttttgcgtagctgctgccatttcggaaaaagctcctcccccattcacaaagcccttctccttccacgtgggagctgaggtcccaaagtggaaccaactctgtagcttaagggaggtgcattcctggcccctcactttctaaccctcaccttaagtggaatatgtagataatatgtagatcattaaccattgttggtgtc

SEQ ID NO: 191957 - DNA, 354 bp, Homo sapiens
cccccgccccccgccaacgggcacacacacacaccagaggcatggtgcctgggctatttgatcactgagtacagtgtgattggattaaaggttataccgtaaaggttgagaaggtcagtgatcaaagaggaggctagaggagaatggggtacataaatcctggtcctttaaagtatctcttgagctcctagtgactaacactttactataagtcaagtccttctgtattgaatactcccttgatctgtcctgaaaatgggacactccttcttggccctaacttgtaaattaaaaaaaaaaaacaaaagaatcataacttattctaaaagataggtgtgggtgaggaaattcttc

SEQ ID NO: 191958 - DNA, 658 bp, Homo sapiens
ttaatcccaaagcaaactatttttacttgaccttgggcatcagtgacctatttgcatatgaggacatgaacagcttagttttttctgggatattgatttctttggaacaatgactgaataatattgtgttattttagtaatttgaatctgagacttaccacctaattactgttacaaagaaaagggtagtttaatattttttatacatttaaatgaatgatgatgcattagtaatttatggcctatgtgtttacctaatttaccctttattatgtattttctattaaatatacagttttacttgtgatgttgcagctttaagtcaggcaagtcctaagtcctttataaaattatttctcagttggaagacagggccttaccactttccaaaaatcttgtctctcatttagttactgtgtgcatctgtacacacacatgcttcctcactgttactctcagcaaatattttttgggtatctgttacatcccaacactggtagttgcttgatatttagtagtgaataaaacaggggtgttcctaggaattagagaattcatagtcttgtgaaggatgtcaacaagtaaaatggcaattaaaactgaaggactaagatgaagaagtgtaagccgctttgggagttcctgggaaggaatgagg

SEQ ID NO: 191959 - DNA, 165 bp, Homo sapiens
tgtgaactgatgaggacctcagaaaccacatgctatttaacacacagtaatacttcactgcaacattcccactctcttctggagggaatattaaaagaggtagaacagatgcttccccaaattaagctgatcccagcagtagaaagactgttcccagcagagtgg

SEQ ID NO: 191960 - DNA, 157 bp, Homo sapiens
ttacgttctctgtcagaggtttcattgagccattcaggtagtgtgtatttgggctgcaaaactaactgagggtccactcctgattacaaattcttagggggattttgtttttctctgctcaggaccaacctttaagacaagtgatttttcttgtatt

SEQ ID NO: 191961 - DNA, 425 bp, Homo sapiens
ccttaaaacttggggtgtttgtaattctagtcccaataaagtatcagtctggaggtttgtaaactcgaggaacacatgttgttttttcctttagccccaaaggctaaaaaacgtaggagtgcttgttccagaaacctaacggtggtacacagggccgaaatgctgctgatttagtatggcttaatttattgtttcggttctgcaatgaaatgttaatgaggagtagcatattttgtcaatgatgtgtgtactagtttgttgggctggatgttttgctttctaggaaatagcactgcgtgaaaacatcagagaactttccaggctttcgcctgaagaacacagaccttactgtgttaaactgccactgtagtttttaagttgtgccctttagagaggactcctattagttttggattgcattgtgt

SEQ ID NO: 191962 - DNA, 342 bp, Homo sapiens
atgcaaaggtgtaaaggcatgaaacaatctcacatgttcaggcaataagtataagaggttccctaccttaagaactttgtagtttataaagtagtttgttttttgtttttgtttttttaaatcttttcattttttttctagaagtgattcataattactactaatttataaggagtcagagctttgctttgggataattatttgcattcaagggttgtggaaaaaacctgatagtttgttggagttctacctattccctacctgagggaaccaataaaattgagaatttttgtttctttcctagaggttgactacttggagccatgtgaatgctgcacagtc

SEQ ID NO: 191963 - DNA, 467 bp, Homo sapiens
tgagccacctttccctttaggggttccaaattgatgatttactaattttatcatgccctatatatttattagctgtcattcttctaataaagaagagttgtcccttactaactcaggctgtttgctttccttgaaatacggttcctactggaaaggcaggacaaatgattaatattttcccactaattacgagctatcagagtaaggagtttctttaatagcagcctccaatggtgacgtgagttgggtgtgtacatgtgtgtctgtggtgagagagagagagagagagagaatgcatgtgtgtgtgtggttacttagattttcaatggatcagtctgattgtgtgtggcagcagtggatattgatgagattctgaatgtatttgaaggtaaaccaatagtgtttgctgatggattggatacaggatgtgagaaagtagagttaaggactattctgaagttttttgg

SEQ ID NO: 191964 - DNA, 429 bp, Homo sapiens
ctcttttagttccttttctcttcgtgtttctacttagggactcatcaagacatctacactctctccctttctttctttctttctttctttctttctttctttctttctttctttcctttctttctctttctttcctctctttctttctttccctttcttctctttctttctctttcttttccttcttttctctctctctctctccctctctctctctctctcctctttctttctttcttatgcatatatctcacctaagacatccagacttgaacttttcacatcttctcccaatttatcagttgctctctttgcttcctgcttccatttcctagctagcccaagtcccacagtgtagctcatggacttctttcttcagcactttgaactttcttacttcctcattcctctgggacacaaaacttgtct

SEQ ID NO: 191965 - DNA, 559 bp, Homo sapiens
tgcatcaacgcgttgggagcctccatattgtcgactgcaggcggctgcgaattcactagtgattatccccggatcctggggtaggtgggacagagaggactgcctgggaagggtgtaggggcagcacctcctgggcatgaaaccatctgcagggcacaggggccaggcctgcctctgcatgcactgcttggccttgtggctaaggcctgtgctttacccagttctctgggagcaggagcagtctttctgaggcctgccctcagccctgcccagggttcaaggatctctcctcagcatcattgctgctgccaaaaccaagaggctacccaccattcctcacccgcaactctgccacgcagcaccgtctgcacagctgcagttggccacatccacttgcttttaaatgtgctgtcatttcctggaaaccatccaggccttgtagcctgccctctgcacctcctccccaaggggggcctctggagcaagaatccaagaggtgccctggcagctgcaagtgtccccagaacatttcctctatgcatgaaggactgaagcccag

SEQ ID NO: 191966 - DNA, 219 bp, Homo sapiens
ggatcctgtgatgttatcgcccacacagtcacatttcataaggatcatacggtttatttagtccacattctggggaaaggggaaaaataccatcttccttaaacttaatttttaggtacttaaaaattttttttgactttcgttaaaacctaggagtaaaacacaaggggcaagtggagtgaaggaaaatggaaggtggggggatgtggggataaatca

SEQ ID NO: 191967 - DNA, 702 bp, Homo sapiens
agaagaaagaatttctgaatttgaagacaggtcttttgaaataacccagtccaaccccccaaaaaaagaagaagaaaagaagaacaaagaacaaaagagagagcctatgagacaacacaaatgaaatttgaatattgggtgttatagaagaaaaagagatgggcaaaggcatagagaacctatttaatgaaataatagctgaaaacttcctacatcttggaagagatctagacatccagatacaggaagcttaaagatacccaaatagattgaacccgaaaaagtcttccccaaggtatattatcacttgaggaacatttcagcttataactgttgaaagccagacaaaaaaagaattctaaaatcaataagagaaaagtgtcaaatcacatataagggaactcccatcagactaatagatcctcagcagaaaccttacaggccaggagagaatgtgataatacattaaaagtgctaaaggaaaaagaaaactgtcacgcaagaacactatactcggcaaagttgtccttcaaaaattaaagagtaataaagtctttcccagccaagcaaaaactgagggcattcatcaccactataccagccctacgagaaatgcttaacatgttctacatctgaaagcaaaaggctgatatttgcatcatgaaaacatgaaactcactggtggagcagatacaaatgaga

SEQ ID NO: 191968 - DNA, 251 bp, Homo sapiens
gtaaaggccttctcattgctttttgatgcctggtgagtgcttatcttttgacggtccgttcaaatattaccctttccacaaagatttttctaagtatttctcaaccttccttaggcagttaataattcctttttctctgctcctaaagcactctatatagatctaattacaatgtgataggcacgaaattatacttagctatttaactaagtatgcctgtttgatataattgggggctcctttaagactcg

SEQ ID NO: 191969 - DNA, 1273 bp, Homo sapiens
ggccaagcttgtcttgaactcctgacctcaagtgatccacctacctggccctcccaaagtgctgggattacaggagtgagcccctgtgcccagcctgaaattcaattctaataaatttttattggagcattaaaaagttacatctgtagttgttactctttgcaaaaaattgcaagaacacagaaaaatataaagaaaaaaatcacctgtgaagaattttaatgaatctttttctacttttaggcgattttgcttacagctgccttttaatcagaatagggaagaaagagattcctttctcaggaaaaaagtgactgtggactggaaatgctttgtgaaataattttggtcatactgatggttataacaagattcgtcttcaattgagttattgctgagctttgtccaacattaaaatgaaaggtctcatttgagtctcattgtggtttgcaagtctcccttggtctagaaatatgtttggtcaaccacggcatggaggtgttccagccactttctgtctcttaaaagtttttaggacctacttttattgggactgccagggtctcttaataatagttattatacttggtaactattgtgaccttgtctcataggcagcccagcatagaaactcatttagcttttagttgctcagctccattagctgtttaaacatgtttcagatgtgagcctgacaatgtacttgggcagcttggttcacccttgactgcctgggaactttgagaagtctgaaaattatatgtagccctaaggtcttcatggtattgtttttttggaggcaccatttcccaatagccctgaggacaccaggcccatgaagccatcctgtctcagccaggaggcagaggagatggaatggaaaccacttctggatacagatccagccacttccggagtgcttcagagcatgggtcagatagaccttgctgctttctagctggcagacttggggaaggttgtttgacctctctgagtttgtgtcccagactatagcagtacccccttactggcgttatcgaagataaaatgatataatcctgataaatcacttgacccagtccttggaggtggtggtgggggctggggtaagtgccccatgaatggtggtcatcatgctccccaccaacctcctttctctcttctcctttcccgtctttcacacccctaattcctggacctgggggtggtctctccagactagatgaagaagcaatctaattatctaggaaggtgaaaggtggttgggaatact

SEQ ID NO: 191970 - DNA, 247 bp, Homo sapiens
ccagtgccctcatgttactggattcatgggtctccagggtcatgctgcccagctcatcccagcctaactggctcttgttcctgacagctggacatattcattgttcatggagctggcaaggagcctattggagtgatgctatggattcttcttacgtgttaagaagaatcctgggcagtggagcctctatatggaatctttgagttgaatcttaacattggataaatcttaagagctgggtaatctc

SEQ ID NO: 191971 - DNA, 217 bp, Homo sapiens
tgctggcttcataaaatgaatttggaattgttccttcctttgtaatattttgtaggaatttaataaaagttggtgttacttctttttttgagacagtctcactctgtcgcccaggctggagtgcagtggtgttattttggttcattgtaagtttcgcctcccaggttcacgccattctcctgcctcagcctcctgagtagctgggactacaggcgca

SEQ ID NO: 191972 - DNA, 136 bp, Homo sapiens
ttggcctctgcactgtccccaacccagtcatgtcaactacctctgactcagatggaagaatgtgcttcctggcgttacatttcccttgggctttaatcttgtgtgtgattatgcattgatgtgaatgtgtcttaga

SEQ ID NO: 191973 - DNA, 477 bp, Homo sapiens
gcttggttcacaggtgggagggtgccctgtgcaggccgtgggaggataatttgagaattcccttgcctgtccctgctccgcggttgctgggcacctggcgagagcgttgggttgtttgctttgggtaactatggcagatccttttaattgccaccaaataacttcagctcaacctcgtcagtggttgttttgctgcgtcgctcggaagaatgcctccctctttgtaagagctggatggatgggagcttggcagaggcaggccaatgctctttaatgttttccttcccatttaataagtgttgagtaaaacttgagtttagggtgtttatgtggcacaaaaggtaaaccatttgtggtgttttggaacctgggctaagtgtttctcacacacatcctcatgacatggtaatgactacctttgtgttaaacttgggtcactgtcaactttcttctgaagtgctccctgctttgttttgg

SEQ ID NO: 191974 - DNA, 418 bp, Homo sapiens
ccccaccatgaaatgatgctgcaccactgactaggccatcctagggcatgatgctttgtggtagctgcctctgccatctaaatggggaccactacagccacaagctgagcaggcattctggttcctagcttttctcattgagaaatcagggcaagcagcctcatttacctaagttgcaggttctcttgagctgtgtaggcccattctcagctccctgtggtgtcttcttcatatgtacaataacgtgtaaacatttagatgtttgtctacatatttgaagaggcatgctgatgctgaaatatttttctcttttgaagagagggaaagcagcttgactgaaaaccaatagactccccaactttataactaacttataatcacttcaccttctagggctggtttcctctaccagaaaatg

SEQ ID NO: 191975 - DNA, 545 bp, Homo sapiens
  misc_feature (221)..(221): n is a, c, g, or t
tggccacaagttcttattaataaagcagttctgcataatccttctatccaggtttgattaacaaatttacatttttttctgagtaccttctgtgggccacacactggaacacaaagaattttccttatctaacaaatttcctattagcaacgttgtaaatagctagtatcttgaataggacttattttcacaccgattctcactccttcttaacaatttanggaccaactgctttttatgcatttgtctcttcaatacaaggaaggagctcagtgtatgggaatgttaaatggctgataatgcaaccttcttgctcgtgaactaaagaatgtcagccactgtgcccgactgggtgctattttatatagaaaaaatgtttgcaagattttaaggtaagtgttgacagttgcatacacacctgtgactagaagtcaactcagtagtttcacccttattagggtaaaactttaactccgtaagtctgctacctgacaggcacagcaaatgtttaaggaaatctgcatttaacttaaacagacatctgc

SEQ ID NO: 191976 - DNA, 327 bp, Homo sapiens
tggtctctccattctaaaaagctggctttagagctttttagatgagaggtatgagagatttagacctgaagttcctctttaacctttctcagttgcgggctttttgaaagcctgatgaacatcaaagatctctccccaccacacaaatatacatacacaaatatcctcaagattttgcacttgattttcaaggagacacagatatttctcttccccctccccaagattaaaaaacccagatgtacagaattcattacactcttttgaataggaggagtagggttttaatccacattcctttggatggtgagtgcatggtcctagggc

SEQ ID NO: 191977 - DNA, 984 bp, Homo sapiens
gtgacttgtgggaaatcacaaacagctctgagcctcattttcctcgtctgtaaaatgggggttgtcatgactgcagtctctgggggccgtgtgtgagtgctctgctgtgtgatacaagcccatctgtactcagactgagacgccggcgagttctctggacgctcccagcttttgggggcaagagttggccaaaaaactccctctttatgaagctgtgctggtaggtggtcgggaagcagcctgttgggcctcaggaaactcccgaagctattgcttccctgctgtggcctggctgtatcacagccctgtggtcacggtcagtgaattgccatactgctccttgtccgtaatttggactcagcacacagggtcctctgggtagatcccatgagcgaacacaagcagtgcccttacttcaagccccggtgcgcaggcagcgcagagcgaattgcgtctgcgttatcagcagtgctaatactgttcggttgtgggacagtggtcttcccagggtcggatgggggtgacaccctggtgcctggcttcacacacaccatggtgtgatagagcctgaaatacctggttctgagtccagctttaccccttcctaggctgtgtagatgactcggagtgggtaactgacctctcccgctgtctctgcacacaggaaggaggctctttcatgaaagggttaagtgaagtcaggtgaacagcacggtgcttcccgcacctgctctcactgaggtttagccctccttccttacccaggcaggcgttggcttttgctaagatcacagccgtggcctttcagggctggtgagagccaaggctctgctgtcacagaagcctggatttgactcctcatatgccacagctgtgtgaccttaaacctctgagcctccagttcgtcatctgttaagtggggttagtcacactgactttattgtgctcttgtaaagagtaaatgaactaaggtatagcccttag

SEQ ID NO: 191978 - DNA, 470 bp, Homo sapiens
cttcccatcttaggcttgaatatcccctgctcttctgatggcctccagggtttctcccgaccacatcacaccctcagtatccttaggagtagatacagtaggtagaagactaggcatttattcctcttgtaccaacagcggctgctggttgagagcataagctccggagccagctagcctgggtttggatcctggctctgcttcttcctagccaggaatgctgggtaagtcacctaagcttctcaatcctcagtgtcctgacctacttcacctaggtgtgaggagtgcatgagttagtacatgtagagtgctgcaaacagtgcctgggggagactgagagctcagtgtgtgttctctgctctacgatattaaagtgccaggccaggtgcagtgactcacatctgtaatccctttgcactttgggaggctgaggcaggagaatcatctgaggtcaggagttggagacaaca

SEQ ID NO: 191979 - DNA, 109 bp, Homo sapiens
tccagtaacagctgaatatgggtttggagcttagcagagaggtgagaggtccagcctggagatggaattgtccgcatgtgtaggctgtaaacaatgccttaggaaggga

SEQ ID NO: 191980 - DNA, 126 bp, Homo sapiens
attttagatatttcaattactattttcaagactttaaacaccccttcttgctagaaaaagaaagtgggggaaacctgcgtcaaagatcagacccttacctataaaaataacatacacattcgctgg

SEQ ID NO: 191981 - DNA, 684 bp, Homo sapiens
aatacctcccactgggtcctgtggaaattatgagagctacaattcaagatgatatttgggtggggacacagtcaaaccatattaccatgtgattatgtgtttacttcatttcttctaaagacttgtcattctgtatctattggctgtagtctctgtttcttgatttaaaatagtttcggagcataccttcacttgaactaagccatatcttatattttctgtcctcatgagtataccgtaattcttgtcttcacaagtgtttattaatagaccatctggattgcagggtgctattatgtaagcaagttaagcaaacttgatggacctttagctctttgcccttgaagaacatttaacctcatgctaataggctcataaccaacaggctatttagatgcttaaataaacactgaaaaaaatgcacacagtttacaaaaaaagtctaatattgacaggtgcaagcgatattttaagattttttaaaatgtgttgatcagcatagcgaatgatagaatattagaccatctggagattctttacctattgaattattagaaatgtaataatattcagttttgcttctctctgttgacattgttttcccatgtggcatccatgttggcccatgtgagtgggtttgtagcatgcatatgttttcattttacttattgatttcagagcttt

SEQ ID NO: 191982 - DNA, 332 bp, Homo sapiens
tgaagagggagagtgtggaagatgcggggcaaaaggttcccaggagcctcagcaagcagcatctggaaggccctggcaggccctgactctgggttttagtcaacgtatgatgctaggctatgggagggttttaagcaagtgagcaacaggttctaatttatattaggttggtgcaaaacttcattctgacagctgttctgagaaccaactttcacatttttttttcttaagagggagacagggtttccctggagtgcagtggcatgatcgtagctgactgcagcttcgaactcctggctcaagcaatcctcctgcctccacctcccgaacag

SEQ ID NO: 191983 - DNA, 272 bp, Homo sapiens
cctctattagcattctataaagtcccacttttctaggttattttccatgatgctggatgagagggactgaaaagtctgccaatttttctccccatccaagggaacggggaggattctgcaggcccatgaccaatattcgacagggcttcttccaagaatttcctggtgggaactgagtttttttttttttttttgaggtggagtcttgctctgtcgaccagcctggagtgcagtggcacgatctcagctcactgcaacctctgcctcctggg

SEQ ID NO: 191984 - DNA, 864 bp, Homo sapiens
tattttctctcacatttagatcccggtagcatttctgcaaccctgccaagaagcaggactgtcctaacgtgctgagtgcttatgcccttagcgagggagagaggtttcatccatgctgtgagagctcattcttcatttgcattacgtgagaatcgaagcctgagtacgtgagtattttgactaccttccatcctctcagaattctggagccacactttgttttgcctgccatttgggagaagatcggggttgctgtgaagcttaaagtgctacacattttgctgaagaaagagattgcagtctcagatgtccatactgccggcagacctacatgcttatagatgtgagtgacattgaagcaggggaaacaagtcctgttccactacactgaggaggccttggactgaaggcaagagagaggagagaaggcagagcatacagtcccaaagccgagtccagcctccttagctccttgcaactcacactcaaaccccagtttaagtaattccagactgaaaaataaaaaccttaaaaatattgcagagagaagtttggtattagagtcatgataaacccttgtatagaacgtgttgcaatgattattttttagggtcaaaatgaggaaacctgacatgcacactgggttttggatgttcagacatgaagcttgtactgccaagtgaggaaggctttatgcccttaagagattaaaggaaagttggactcatcagttgattctgaaatcaacccccaaacactgcttgatctgagttttcaaaagctaacctttgggtttctcttttatatttttgcgtgatttgtcatatacttatctttaagagttttgtgttgttgttgtttaca

SEQ ID NO: 191985 - DNA, 457 bp, Homo sapiens
cttgccggtggcagcctactggagacagggagcccacacagaatcctgacctcaccagaaatggggccccaggcacttggtgggcaggtttggctgtgactggagctggtggtgagggacatagccatcccaaggctaggccgggcttccagtccttcctcagggacttgtttatggtgcctgagggctccttcctggtcctgagatgatgctgtggccccgcctgggcagctgccccagccctgttcctgccaaccctgggctttggtgatgcagcacctcttgcaccccggcctcctggcccactccaccccctcaccctgctccgtctgtgctgtggcccagtcctcttaaaaggattgaacacctccgggtgggatgagaacctgtccgttcactgtcaccaggtgtctctcaggcatacccaggtgtcctcacgtgtctctcgggtgtcctc

SEQ ID NO: 191986 - DNA, 304 bp, Homo sapiens
tttcctctcagccaagttcacggccctcgcaattctacccattggcagtttaagggaccacacagttaaggcatccaggttcaggttactttctttaaatctgccagcctaaaaagctgccgaaggttttccaataacaggggaattcaaacaaacaaacaatttatacttatcctgccctatgagatctcaaattggtagtgttttgttttgttttgtaaagacaagtcctcattatgttgcccaggctggtatcaaactcctggcctcaaacgatcctcttgtctggccttccaaagtgctg

SEQ ID NO: 191987 - DNA, 393 bp, Homo sapiens
attcataaggcaggacctgagcactgctcagacatgttcagagaatacggacagcaagttagcactgggtataccacaccactatgttcaatctttgaggagccaatcccagcccaatccaatgctgacttctaatcagaatgtttcctaagctctaattctgataggacttttttcttcttttcagacaaagtctcactttgtcacccacgctggagtgcagtggcacgatttcggcacactgcaacctccacctctcccaggttcaagcgattctcctacctcagcctcccaagtagctgggattacaggcgcctgccatcacacctggctaatttttgtatttttggcagagacagggtttcgccatgttggccaggctggtctcaaact

SEQ ID NO: 191988 - DNA, 277 bp, Homo sapiens
tccaaatgtcaccctctcagagagaccttctgtgcccactctcctaaagcagcaccctcctagctccaccaaggcccctcactctccattgccctcactcaaggctttgttttgttccacaaagtacgttctcaccactggcacagtatgcatttgcttactgtctgcctcactccactaaagcacagttgccataggaagaaaggctctggtgttaaccctagcactccgaatagagacgaacacggagcaggtccagagtaaatctttgaccgtg

SEQ ID NO: 191989 - DNA, 348 bp, Homo sapiens
tgggaaagttccttaacctctctgagcttccaaaatgaagataagaaaacttagcccaccctatcagtgtttggattattaaatacgcaaggaagttcattctacttttggacagatcttttagaaagtctcttctacatgaggatctaaaatcttgctgatatagacaggaggcagagaaataggagattgttaggaataatgggctagatgagggttgaagctgagggcttaaatgagcggaagctggggtgtggtactggtagaatgtgatttgttaaataagaaggaatggatgtcagtttgacagaacgacacaggttgaatgttagtggttatggagaagtt

SEQ ID NO: 191990 - DNA, 357 bp, Homo sapiens
gcagaagcaacatgcggagaggatgagcagggacggaggctccaccatgacactctcagtcccagcatctcctcagcccagtcaccacactggagagggaggaggcccttcagaccccgcaggcctctgcaccctgggagttccgcgtctaactctcttcctgcaatcatcagaggcaggaactgggcccaggtggggtaaaggcaggaagacgtctgcctgccctgctccctgggcacttccctggatgctgtataccacaggacagagatcgagactgtcttttgaaaaacatttagagacaggatctcaccctgtcacccagactggtctcaaactcatggcctcaaaggatcc

SEQ ID NO: 191991 - DNA, 186 bp, Homo sapiens
ctggacaaagtcacacagcttatcagtaccagtaggaattcaaactcaggtctgactcaacagtctgcattcttaaatatacctcaataaagctgttgaaaaagtaaaagtcggccgggcacagtgtaatcccagcacacctcaataaagctgctgaaaaagtaaaagtcggccgggcacagtgta

SEQ ID NO: 191992 - DNA, 438 bp, Homo sapiens
cacaggacgatgcataagacaaagtttacattttaaatatgtaatgtggtcttataagtttttaagacagaaagcacaagaatatataattacatgtgaagatatacatattttcgcacacacacagaatgaaaaccaaaaagtagaacaaacaaatcctgtagaggaatgataaccagaaatgaaaaaaactagttatctaaagaagatgagtgaaagagtagaagggacagaagaaggaatgacatttcattgattacatatttttgtatagtttttatttaagaacatttaagagtaaatgacataattaatttttttttttaatttaaaagaacaggcacgtcagatgcagtggctgatacttgtaatcccaagcactttgcaaggctgaggtgggcagattgcttgagccaaggagttcaagaccagcctagg

SEQ ID NO: 191993 - DNA, 429 bp, Homo sapiens
tcaacacatatattttgtggagacacagtttagtccataacagcaggcacatggggtctgaggatcgtctggcctctgccagcttccctgcaccttgctccctcccagaatggtagtctgctccaggcctgaccatatgccttgccattctctaagcacatcacacacttcctggcccgacgtgccttgcaagtgctcttcccgaaatccctcctccccggccgactcctccttccctgaggatcagtgctgtcaccaccacctcctcaggaagccctggtgggcaagggggcatctgggttctcccttcacctctcccgtcacctgctctctgatgttagtgttcctgcccatctctccctcccctggctgctgccccaggccctgtctgtaatgtccccatgcctagcagagactcagtaaatatct

SEQ ID NO: 191994 - DNA, 434 bp, Homo sapiens
cccttgttgctggctggcggcaaaccccactgagagcccggaaggtccctctgggggaaccactggtcctcgaccaggacctgtctgtacaggagggggcctcagtgcctcctgcaaaagcgtggcccgtcagccacagaaatctgtcctcaaacacagcccccagctgaacccagtcccatgatgtggcaggcacagtctcctgagatgggggcctgacagtgttttgtgcagccacccagtctctgtttcacgttgcagcccggcacgtgcataaacaggtgtgggcacgtgcccgtgaagctttattgacactgaaattttaatttcttataatatcaaagtaatagaacactgttctttttttttttttttttttttttggggaaaaagggccccatttgggggcccgggggggggggcaggggaaaaac

SEQ ID NO: 191995 - DNA, 482 bp, Homo sapiens
gccagcaacagccaggtctcagctgggttcaggacatggctttggaagttctttgggttgtcttagagcgatggaatctctacgctgcgaaacaacacttaaccgctttcattttcccagagatctgaagcgaaattaattaccccgccttgactgatagttgttctgttggagtatggttctaatccttattaacattctctaaagtcaggcatgaaatatgacttttataccacactctttggcatatgtttttcttttccaggagatttttcaggctatctctaagcctcactgctgttcattatttttgccataggtctaaagttgccatccccaaagctagtcccgcacagagcacagccaagcggggaggggggtgtgggaggaatgacacatctctgcttgcgacgcaaattgcttctgattattgagctttgaatatttttctccatcgtgtttttattaaaaactccagcata

SEQ ID NO: 191996 - DNA, 151 bp, Homo sapiens
tgcagaaaaaaagacgccttccaaaatattactactcattcctttttagcatgctccctaaaaaagtaacatcactgctcactgacaatgcaccaggtcgcccaagagctgtgatggagatgtacaggtgattagtgttgtttctgcagca

SEQ ID NO: 191997 - DNA, 372 bp, Homo sapiens
gaatcagactcccaaacccacagcaagggcaggtaagcacctgctaaataaatgtacctctctgctggaatgcactctctggccttagagagtacattcacatagtccacacaaatatatttataatacgtgctttgtgtcaacactgcacttagtgctgggggccataccaacaaagaagatggggtataaagtaaaaaataagcaagacaatgacagagaattagaaatgctatgaaaacaagcagagtacggggtagagaatgacggggcaggagagttagtaaagaccatcacagggccggttgtggtggctcacacctataatcccagaaactcaacaggctgaggcaagaggattgcttcagccca

SEQ ID NO: 191998 - DNA, 361 bp, Homo sapiens
gatgcaatacagttaaatcttcctttctttgtaaaattactgttgttcaattacattttacagcaaaataagactgaatattaatggacatgtttcatgtaatgctacactttttcttactgttatttcatcatctattcaaagtatccactgcatgagtagtatgtgtaacagtaggcaggcattgttgaaaatacaaacatttttaagcccccttcttaaggagtttagactcctggagagataagaaaagtctataaatagttttaaaagaaggtagaatgtgataagtgacacaagaaagacatagctgggctgagataggaattcagagacaatttgagaggagtgaagggggtga

SEQ ID NO: 191999 - DNA, 398 bp, Homo sapiens
agctagtagccaaccagtaaattattttgtctgtcatcactactttcccccatttgactattcttccaataattattctaaattacttagcctttagcccccaatctctagactctcttctttaagcagacaactttgcctattacttgaatgaaaaaattgagccagtcattcttgagctccctcagtttctggccttccacctgttttctatatctgcaattctccttacctcctttccctcagcctcagaggatgatgtgtcccctcctgcttccccgccccagcctaacctcttcacctatacccttgatccaatccacacttattttctccatgaattttgtccttcattcattcgttctcttgcccctgtcttcagtatcttcccttgtgct

SEQ ID NO: 192000 - DNA, 266 bp, Homo sapiens
caccactcctatagatcagtgcccataattatgcagccgggcacagtggctcatgcctgtaatcctccctttgggaggccaagtgggagatcacttgagcccaggagttcaaggttacggtgagctacgatcatgtcattggactccagctctagcctgggcgacagtgtgaaaccctgtctcaaaataaataacatccaaagttctatttctgaacacacccatttgacaaaatgaaaaagcaagttacagactaggagatggtg

SEQ ID NO: 192001 - DNA, 497 bp, Homo sapiens
tccagtcggtctacatgtagttataatacaaggtaaagatgtgtgaaaggcacagtgagtaaaggagcgtgattttttttgtcgcatcagtatatttaatagtcatgtaaatgactaggaaaattaaggagattttccttgcaaggctcgaagaatgtgaacggcgtagatgaaaataatttagaaaacagagagctatgctgtttctaatgcaatttttataggctttgttcttaatacgcagtggtgatctgatgtaagtgcatcatttcctttggtggaggttgtcaatgcaattaggttacggaatctgctttatggactatctagcagcagatcacaagcacataacataaagtccttttacacatgaatattcaaaatactaggaaataccctcaaatctccaccccctcccccttcacaaatacacatccacttttgtggcttggcaaggagcatagcgtttttcatgatggcagaacttttaattaacc

SEQ ID NO: 192002 - DNA, 125 bp, Homo sapiens
cgcctgctctgtgcagtcttggttctagacctctggctttactcttccaacttccaaccttctatctgccccttgcatctgatgcctaagatagactgagcacagctcatcccctgcagaagaga

SEQ ID NO: 192003 - DNA, 442 bp, Homo sapiens
gctactgagagtaggaatggcccaaagggctttttgagcagtgcattgtttcgcccttataacaagcctgcaaggtaggagagatgcttcccactttgcagatgacaaaagctgcggctcacagaggatgaacaagtttccaggatcactcagctaacaagagggtctgtagttcaagcctaggtctggagcaagatttttagccctgtctggttgactccagtggtcagggtcctcccagccatgctcttgattaactgtggtcaaaattcctgatggagtgagcttcaggcacccagcttctatggcagctaggctgggaaggcacaggtcagtacccaaagttgaggcctgagagttgactgtatataaccattactgccctcactgctcagccctggtggagctgttgggccataggagctggtgtgagtgggggcag

SEQ ID NO: 192004 - DNA, 395 bp, Homo sapiens
ccacattcccctgttctctcatgtgcagtgaaccaggcaggagccctggaccacactctgggttgcaggcaccaccttccccatccccagtgagagccctgtttagagtcctgtggtctcatctctggccatggtgaggacacaggcagctgacagtggaggtgtaagtggattcccaggccaaaggtgtgttaggaaaatgctggcttcagaacaccagcacccactccttcacttactggctgtgtggctgtggtcaagttaaacagcaataactctactggcctggcagtgttgtgagcgtgttcagtgagataatgtataccacgagcttatcaggagcttgagcactgctgatttgtttggtttcttggacaataggatgtggcaaccaa

SEQ ID NO: 192005 - DNA, 472 bp, Homo sapiens
tagcaaatgtaagtcaggtaacaaggcgatgtggcacagtggcatgagaattagacttgatataaaaagatttgctttaaaggcctggcttagtgtcataatttctgcatctgtgaaatgaagcatatacttctggtgcattacggagaagttgtcaaaataagagtgtaaatgagagaggaaagtatggggtgttccattaaattaggctttatttatctttaatttcttggtaacagctttttaatcccacaaagtaagtttttacaacgtttaaattgtctgtgtctagtgattgcagcattaagatcttggacatagggctgaagggctcctcaagtacggccaaagtgggagcccaggcagaggaggtgctgagagcaagcgagggctgtgaggactgccagcacgctgtcacctctcaatagtataatcatttaaatatactatgtattagtcattaacattgcta

SEQ ID NO: 192006 - DNA, 437 bp, Homo sapiens
gtctgaacctggtctggatgtggaagtgtcacctcaggatgctttggagaaactatagtcctcttcgggggtgtagaatgtccaacctccgtagtaggttctggagtgatggtaagtcccaggtccaaaagttgaactgtaacgctgggtgacactggatgctgagcttgatcctgacctggtgttggatttgttaccccttgatatactcgaagttggggtacaactttcttaggaggctgagttggggtctccttcatggttggagaaagttcaacctctgtcttggattctggagtgatggtaaaccccagatccaaaggttgaactgtggcttgagtcaggtgtgaatgctctggaggttgagctacaactacattagggaactctggagtctgagctggggcctcctgatgggttagggaagactcaccctc

SEQ ID NO: 192007 - DNA, 384 bp, Homo sapiens
gtctgaacctggtctggatgtggaagtgtcacctcaggatgctttggagaaactatagtcctcttcgggggtgtagaatgtccaacctccgtagtaggttctggagtgatggtaagtcccaggtccaaaagttgaactgtaacgctgggtgacactggatgctgagcttgatcctgacctggtgttggatttgttaccccttgatatactcgaagttggggtacaactttcttaggaggctgagttggggtctccttcatggttggagaaagttcaacctctgtcttggattctggagtgatggtaaaccccagatccaaaggttgaactgtggcttgagtcaggtgtgaatgctgagtctgaacctggtctggatgtggaagt

SEQ ID NO: 192008 - DNA, 347 bp, Homo sapiens
ttacaggaggtctgggaagatagaacctgacctggacaagggagaaggccaagacttcaaagaatccaggaaaacaggaagtaaaacaaggaggaggaagttaggcccaagggaataacattaggctagggatggacatgaagcttctagcagcagcagagggtttgcttaggagaggaggcgtgtaatgtaggacattgaactctagcattctcatctggactctactacaaatacactgagtgaccttggaaaataacttcattctctgtgcctcactttttccaccaatgatatgggaggactagacagaatccactctaacgttccctcatatcagagaagta

SEQ ID NO: 192009 - DNA, 336 bp, Homo sapiens
gtgacatacgcacctcccccagtgccctggtcccaccctaggtggagggacccaccccagcagcagggcagggcgggatagaggaagctggagaggagtatatttctgagaactgcgtagggctgcagtgaggcagtggaaagatgagaccacatacaggagttcagtctccattgttccatcagagtacacctacaaaacacaattctagccgggcgtggtggctcacgcctgtaatcccagcgctttgggaggccgaggtggcggatcacctgaggtcgggagtttgagaccagcctgaccaatatggagaaaccccgtctctactaaaaatca

SEQ ID NO: 192010 - DNA, 659 bp, Homo sapiens
gaggctgaggcaggagaatcacttgaacctgggaggcagaggtttcagcgagccgagatcgcgccactgcacaccagcccaggtgacagtgagtctttgtctcaaaaaaaaaaaaaaattttacgataaaatgcatcaatcttaagggttgagaatgacaagtttaggtgactgtacacagctgaccatcacccgtcacacagaacatcccgtcacacggaacatctcacctgtcacacagaacatccctttacccctcacacggaacatcctgtcacctgctgacacggaacatccgatcacccgtcacacggaacatcccatcacacagaacatcccatcacttgtcacatctcacccatcacacggaacatcccgtcagccatcacatctcacccgtcacacagaacatcccttcacccatcacatggaacatcccatcacccatcacatctcacccgtcacatggaacatcccttcacccatcacatggaacatcccgtcatctgctcacatggaacatcccatcacccatcacacggaacatcccatcacccatcacacagaacatctcacccatcacacggaacatcccgtcacccgctgacacggaacatctcacccgtcacacggaacatcccatcacctgcagacacaga

SEQ ID NO: 192011 - DNA, 555 bp, Homo sapiens
ttatgttactctccttcactccacagtcatttactgggtgtctacaaagttggaagcatcatgctagaagctgaggtgatagtggtaaacttaccactttaggttaggtaaactatcagtttaggtgggacccttgccttcatggagtatgcagtttacttttcctctcgtctggatttcctttctgtttcttcttgactgtcgtagttcttcaaagcccacctcaaagcaaaccatttatttgaaattttctctgactattccattctcagtaatctcctcctctcccaattattgctcatagcctcaaatcataatccagcaatgcagcatctattatcttgtaatatttgattgctattattttatgcataattgtttctcatcacacggacctgggatctcaaacttaaatctccagggcccagtaaaatgagaaaagcatgccctgtctaaaggggacagctgttgatcatctccagctaatttttcccttgtgccaatgtacactctgtattataaaatctctcagcttttttagaaaagcaagaaata

SEQ ID NO: 192012 - DNA, 939 bp, Homo sapiens
atgtgtgtgtaaatatatatataatatatataaaacacacatatatgtaactcatatatattaggctttatgcattcaattttactacatgttaaatatcttgaggaccctgaaggagatataagatgtggtttctactgtaggggtggaaaggtgtgataactttcttccctatcataagggtcatggctgacactcctataataaaagacaggttgacaagacaaaaacataacaaatttaatcaaagttctgcatgacatgggaacctgaagacccaaagacccagggaaaaaacatctgtttttctgcttagatttgaagatttgacagccatgtagaaatgtaattacacaaagggtatgatctaatggtaatagactgaggggagaaacatagcaaaacccgcctgttcggattcttcttggtctctttgtatagtatttcttcttctttgatatacagcaggacccctctggaatgagggtcttatgatctagacaaggtaggtcagagaatttctttatagccagctcctacacagaacgtggagggttgggggttgttggagtaactgatctaggtttcatggctggttttgaggaagagggattctagtgtccataactcatctttgagaagaggaattctaatttctgtggcctgctttgtgggagaaaggtgagtggaagccatcaaggcatgaggaagtcaaagagagactttccttctgaggctgcttctgaggccttccaatctcctatagttcaaagtactcagcacgccgaagtgccgtaatttggggtatcattttctgaccccaacattggcttttattgaattagaaaatctttagagaaaaaaagattacattgtggcaaatggtctagattgtgtggtaactattcttagtgttgtggggattcaaagaggaagatt

SEQ ID NO: 192013 - DNA, 452 bp, Homo sapiens
aagcagtcttttttggagctgcaagctgtgctgcctggggttgggggagtggtaatgcaagtactcctttagctgtcctgtctggtgtctcagtaggtttcatggctggttttgaggaagagggattctagtgtccataactcatctttgagaagaggaattctaatttctgtggcctgctttgtgggagaaaggtgagtggaagccatcaaggcatgaggaagtcaaagagagactttccttctgaggctgcttctgaggccttccaatctcctatagttcaaagtactcagcacgccgaagtgccgtaatttggggtatcattttctgaccccaacattggcttttattgaattagaaaatctttagagaaaaaaagattacattgtggcaaatggtctagattgtgtggtaactattcttagtgttgtggggattcaaagaggaagatt

SEQ ID NO: 192014 - DNA, 155 bp, Homo sapiens
atgaaatctcagatgtcaatacctgtatttccttatatgcctactatacacacatatacgcactcaatatctaggaggccagaaagaaactaaagaaagggtgtcaacagtttaaataaactctgggtaaatgaattattcaactgctagctcag

SEQ ID NO: 192015 - DNA, 380 bp, Homo sapiens
gtgacagctccccgcataggaacggttcggtggcttgggactaagctactgtctgaattacttttgtagcaggctcacaggccttgggtaaacaggtaagttaggtcacccacaagaaaaacaaaagtactcgttctctgtgagggtggaggggaagggagttccattttgccaatcaagtgttaaaaatagaacctgctgtgtctgcttagcagctctcacgttactgctcaccagatcccatgttgtgtgtacgtttctgttttgtaaagcctagcgtttacgtcagagcctgggaatgcagcactcgtgtctatacatgggagtacatgccttagggacatcatttatacaacccccttctctacagagctatgtca

SEQ ID NO: 192016 - DNA, 580 bp, Homo sapiens
cctgagattgggagttcgagaccagcccgaccaacatggagaaaccctgtctctactaaaaatacaaaattagccagacatagtggcacatgcctgtaatcccatctacttgggaggctgagacagaagaatcacttgaacctgggagacagaggttgcagtgagtatgtgatgaagttgaagggttaggataaacctggatcccaggcctcacaagctgcagtaaagacttttaatttgattccaagtgcagctgcagagttctaaaccgggagtgggagcaagtgggtctggtgcaatttgatttgtgtttgtaaacagtgagcctagctacaaagagaaggattgaaagaaaagattaggaagattagaggcactaatttgacagaggaaataaaggacataatactagatttggtgtgttgccttatttattggtaaattgtataggtgtgctgctatcattagctaaagtctcaagataagatatactttgagcgggaagtatcaacaataatggatgtaactaaccttgcatttctaatttattagaatggcatcttgtcagaactaacgaaac

SEQ ID NO: 192017 - DNA, 123 bp, Homo sapiens
acctctttgctttgcttcgtctcacccacgttgccttctaagcttcctgccctcttccacctgacttgcttattttttaagacatggctcaggtgctacctgccccaggacactttgctttac

SEQ ID NO: 192018 - DNA, 243 bp, Homo sapiens
gaaaactgtaataaatttttaatgacaaaagccaacaaaaactgggagagatgaagggtaagaggaggttaaaggaagtataagttccctcagggttcactgtggagacaatgcctcctgtctaaatttgaaatgtgaatttaaaacaaaagaaaacaaatatgtcagtctcccagtggcttttataatgttgaagagctctcacaggaattaatatccttggtgatgaacaaagatttatct

SEQ ID NO: 192019 - DNA, 334 bp, Homo sapiens
atggatacatattcaaatgagcttttatttacacttattaatctttctggtagagagaatgtctatttcgtatatggagaatctgtaaatattgagtaaagttgtcaggtatagcattgactgaagcagttctagaagtggtgtttttgattcaggtttattagagggaaataaatagctgctgttaatagtgcaagccgtttacaccattgagttttgggagatttgagaatcatggaactgatgctagcactagctcaccctgctggttggctaaaagatttctcctcttccccttaagaaacaaacatgaagatcacaggagacccagagg

SEQ ID NO: 192020 - DNA, 506 bp, Homo sapiens
aagtgtgataggtagttgaaagtgacagtgatttatgatcaccattaccaaaaaatgatactcaataagttcaagtcaaaaaatatggacaaaagaaaaataaaagggagtaaggcagggagggagggagatagaggaagacaaaaaaaaaaagaatgaaaggaaaggagttacatttcaggttactgatggaatgtgaagaacaactgaactgattatctgtacgttggaacccaaagattgggtttatctaccataataggattatcattcctttgagaaactggagatatatagagctgataatactgttagtcattccttcagaatttgctttcttgacaattggaacaggttcttctgctttccaagtttcctccctggctccagtgggctggcaactggtgaggaagatgtgggtggggccagtggtacttcaaactagtttttttaggagacagttgcaggcccacagaattttagtgggccttcacctcataaacatc

SEQ ID NO: 192021 - DNA, 382 bp, Homo sapiens
aaatcattcctgactgcgggttatagtcaaaaccccatgaaaagcatcactacagcccacgggtgtgtcagggacacagtgttgtgagccctgggaaggcagggcctgtggccagcactttatcaacactggcgcatgcaccctatgaggcaaagggatttgcattgtccccttacagtgtgggacactgaggtcgccaggggcgtggcgactgtaagggacagtgctggatgtgagcctcgcctgcaggaggcggtccaggaagcatgggtggaggggctggagaagttgagggccgcgtggcccgggaggctcccggaggagggaagggcctatctcagcgaggggcataggcggggaaggtgcggggcgaggcggccgc

SEQ ID NO: 192022 - DNA, 292 bp, Homo sapiens
tatgagtaaactacacacatattcaaagcatctggtacaatgcccagggctgagtacacaagaaatattaactattatctttattactaccattataagaacaacccatgtctctggccaaggccaagaggttcgcactgcagtctctctcactgaaccaagagacagaagaggaaagatgctttgcggagaaaggtaactttggtttttagacatgtttggtttgctggagtctgggacacatttccacggatgcaggtgggtgtgatggagaacacaggagttgagggtg

SEQ ID NO: 192023 - DNA, 580 bp, Homo sapiens
atcttttccagtgttttgtgtaccttgtttcatttatgcttcattcctatcctgtgagacaaatactatcaatgatactcattttacagataaggaagctgattttcaaagagattgacttcccaaagaaagtgcatgccactagcaagttgttgatcttgaaacacatgtgtctaggctggttgcaggggctcacgcctgtaatcccaaattttggaggctgagatggggagatacttgaaaccaggcatttgagagcagtttgggcaacatggcaaaaccccgtctgtactaaaagtacaacaaagttacctgggcgttattttatttttaattttggtggagataaggtcttgcttacgttgttggccagtctggtctcttaactcctgggctcaagcaatctcccacctcagcctccaaaagttttttgtttatactctatttaaaatgtgacctcattttaaggttcggtcatagtggacatggcttgaatttgtgatgatacgggttttttttttcttttttatgatgtaatcttactgcatcgccgaggctggagtgcagtggcgtgatctcg

SEQ ID NO: 192024 - DNA, 699 bp, Homo sapiens
tcctcctgattcttcacctggcaaacttctacttattctgtatgctttccttaaatattaccaaacttttcttttctcttttctctttttctttttttgatggagtcttgctttgttacccaggctagagtgcagtggcgcgatctcagctcaatgcaattcaagcgattctcctacctcaagcaactctcctacctcagcctcccaagtagctgtgattacaggcacgggccacatcaaccggctgatttttcgtatttagtagagacgagtttcaccatgttagtcaggctagtctcaaactcctgagctcaagcaatccatctgccttggcctcccaaactgctaggattacaggagtgagccactgtgcctggacactaccaaacattttaaagctttaattcttcaccttggatataaaatttctgacacatgctgaatatggtaacaacatgacataataagtaataattataagctccaaaaggggttccggcacagagtaaacactaaataaataataaataataaaaaagataataataacaagaaaaatgtttagtatcttaataaagaagcaaataaaaatgacaatgataataacaaggaagatgcttagtaccttaaagatacctgacagttatttgttaagtggacaagtggataaatgaataacaaactttttaaggaaattct

SEQ ID NO: 192025 - DNA, 497 bp, Homo sapiens
gcttacttcgcactcctaggcgttctgtaggtttgtaaaccagtatttatacagaaatactttctgtagaaagacaggcatcatcagattgtgcatgttaatccgggaacagaccgaaagggaaggtctcagaggagagaggcataaagggagaaaacaaaacaaagtcacaagcaaagcaagagtagttgcttttattcctaaagtgttcattataaaagaaaccagagggcagggcactgtggctcccagcactttgggaggcgggtggatcacttgaggtcagtagtttgagaccagtctggccaacaaggtgaaaccctgtctctactaaaaatacaaaatccgctgggcgtggtggcacacacctgtaatccctgctactctggaggctgaggcacgagaattgcttgaacctgggaggcagaggttgcagtgaggcgagatcacaccattgcactccagcctgggcaacaacagcaaaactccgtctcaaa

SEQ ID NO: 192026 - DNA, 187 bp, Homo sapiens
ggaaagaggtcttatgacctagctaggtgtcagacatagtagctttgttccagattataggattcagtctcagggtctgcttgtactattcagggtctgctgaattaacgtccagaaagaaagaataagttgactataccccaggttattagtgggaagatgccaatgctgatcttaaaggaatacc

SEQ ID NO: 192027 - DNA, 385 bp, Homo sapiens
aaattcatatattgaagccctaacctttaatatgatggtatttgaagatggggcctttgggaggtaattagggttagacaagttcatgggaggaattctaatgatgagattagtgcccttggctcatgcctataatcctagcacattggaaagcctcagcaggcacatcacctgaggtcaggagtttgagaccagccttgccaacatggcaaaatcccatctctactaaaaatacaaaaactaggtgacagggctgtggcgggctggagtagggtgccacctgggctcaaattcccaccattcagtcacataggtattctctccaggtcactgatggctgatatgaactgaactgaattgaccctctgacaatcatatattgaag

SEQ ID NO: 192028 - DNA, 464 bp, Homo sapiens
tgcagcccggctcggtgccgggggtgggctcagcgctggggtcgcctggcttcgttcccccgcggaggccacggccgggcgagcagtgccggggcgggtaacccgacccggctccccagagccgctcaccccgcacggcccggcaaggggagggagagggatggggggagggggaagggaaggggtggtgggtgaggggctgtgggcaccgcagggccgagtccccggcccgtctgcgctgctgtagggcggctgcccgcggcacccgggacgatccagcctctgcctcgcgggcgtcgagcctgagacaggagggagccctggggctgcacaggcttggctcagggaggcagacccgagctgctgcctccattttgtttcctgctcagcttggtctgtggtggtggtggtggtggtggtgtgggtttggggtgcggccgggtagggggttcgcctgcggccgc

SEQ ID NO: 192029 - DNA, 111 bp, Homo sapiens
ttatacaatcctgatgtttttcttaaaataatttcagatgttaaaataaaataaaaagccaatagagtcaattcagatcaaatcacaggatgctgaaggtggacaccagca

SEQ ID NO: 192030 - DNA, 541 bp, Homo sapiens
tcaaaacaatttaattggccacaaaactgcatctccctattgataggtctttagtcaatatttttactctctatgcttcagattctggtatctgatataaatctgagacttacgccacagtgttggcctaattcgtcttctagataatgttatggaagactagttcttcaggatattaatagatacccattgggagatgagagagggaggtttttcctggtaagtttgggaaatgctgagtcaaattctgctggtctttcttctagggctttgcacaacgtttgaggtactagcatgcaccgcaaatacttagatgcagtattcagcatgtcccaaacttttgtgaaggcagaactctttttttttttccccaaggatcaccttacagggagatatattggtgatggctgaagtgcattttgatttcatgttaatggagccaagtcatgaaattcaatcacaaagtggttggactgggatagatgtgagaaaaccatcttaaatatttgcagaatatcattcagattagaccaggaatgtt

SEQ ID NO: 192031 - DNA, 541 bp, Homo sapiens
attgtcctcatacactatatacctacttcccgcccacctcaagtttggaggggatcagatcaattcctgtctgtaaaaccatgtttttgaaagttcctatttactttcattaaagtgagctagggcaaatcaagagttttaaactactccccaaattgacgggagatcttatttggtctataaaactcaagcacgataactagtggaattaaaaaatggggaaaattgttttctttgaaaatccaaaccaaaagtccagacatcccagagtcatataagagtatgaaacgtagaattgtttggtgtttaaaatacactttcaactaaatctacacctaggtcacttttcttacacatttaaaattaaaactaggatcaaatacaatatattcagataaattcagcatacttctatggccactgcaagggataccgaagactcataaatgagtaattaaactgctttaataacacccagaagttcacagcccggaaagattagcttaagtgaaatacaattcaacaggtcttatcaaagagt

SEQ ID NO: 192032 - DNA, 140 bp, Homo sapiens
ctgtaaaacatcaggagattagttttcagaccagtgtggagacaaaaaggaagtattatacgcacgtaatttccaccagcaatgcatatgtaactaactagcacaatgtgcacatgtaccctaaaacttagagtataata

SEQ ID NO: 192033 - DNA, 510 bp, Homo sapiens
caaccaatcagaggaactgtccattttccatctgcagagcagaaaagcagggggtttgcaaagggagtagcttctggtccttttgttacttaggcatggaaagttgggattttcctttcgatttagctctagaaattcagtgtgaatcagccttaggttccctgcctccagaccctattctcctgcctcatactctcttaacaaatttttaagtaaacaggtacacagtattgttaactatgagcacggtgttgtatagcagatatctagaatatgtttatcttgtataactgaaactttatacctcttgaatagcaactctccattttgttaccgaaacaccagggattcagtctgagtcctgctgtttgctgcacagatagccaacggctgagatgattactgccaaggaagaaggctttaatagagtgctgcagtaggggagatgagagatcagtctcaaatccatctccctgactggctaaaattaggggtttatatagcagagaa

SEQ ID NO: 192034 - DNA, 379 bp, Homo sapiens
gacgattatctagggagaaatggcagagtgggaaaaaaaagatggccttgagaaactctaacacctagaggtgaagaaaaagaggataatctagaaaaggactgaagaaaaagtctgaggtaggagaaaaaaaaacagaagaaggtggcatccccaaatcccagtgaagaaagtttcaaggagggctgaactgtcaaacactgttaagaggtcaagtaaaataaggaattctctattttcagtttatagggaaactgaaatgcatgcatcatttagaggaaatagtataatcattggcaacatgaaagcatcatttttttaatttaagttctgggatacatgtacaggacatgcagatttgttacataggtaaacgtgt

SEQ ID NO: 192035 - DNA, 427 bp, Homo sapiens
tggattttcaaccaggagaaactggaaggtggggaggatattccatgtggagaaaatagtataaacacaaagttcaggaacaaaactgtagagcatgttcagtggaaaaatggatcatgcagtaaggaaggaatgtcagttacgagctgaaaaaaacagtgggaagttagtctggtcgaggatgtaaagctgaggattctgaaggcctgcatgaagaacctgcgtttaatttggtaagccatggagaattattgaaggtgtagaaaaactcaaattttccctctgaaggttttagtctaagtctgttgaaatgaattgaaaatagacaaattagcagggaaaaaaagcatgcaatttaattaaagtgcattagcatgggagaattacagaagactgatatcccagtaacccaacaaggtttagatgc

SEQ ID NO: 192036 - DNA, 310 bp, Homo sapiens
aaaggaggaagggaagagggagaaagaagcaaaagctaccactgcagttgagacattgagaatttactatgtgctgggtgatctcatttactactcacaaaaatactcttgaggtcatagagaactatccttatcttacagaagaaaaaactgatatttagtgacgtccatgaagtcacttgcccaaggtcacacagtggcagagttggaacttaaagccacttctttcagcctccagagcccaatactaaaaggtccctctaggatgggctgttggaggcaccaggataggagctgaacaccacctcct

SEQ ID NO: 192037 - DNA, 199 bp, Homo sapiens
ttaaaaacaaacaacaaaaaagatatggataaaatgaaaaatatgaaataaggttgaggaaggccaggtttggtcaaatcataaagaaccttgaatattgacctatgtaggcaatgggaaccatcgaagattttatagaaagaagcaaaatgatcaaaattgtaattttaaaggtctacgctggctttatttgcacaca

SEQ ID NO: 192038 - DNA, 507 bp, Homo sapiens
ggctgccgggcagagaggctcctcacttctcagatggggcggctgccgggcggagggcctcctcacttctcagacggggcggttgccaggcagagggtctcctcacttctcagacagggcggccgggcagggacgctcctcacctcccagacggggtctcggccgggcagaggcgctcctcacatcccagacggggcggcggggcagaggcgctccccacatctcagatgatgggcggccaggcagagacgctcctcacttcctagatgtgatggcggccgggaagaggtgctcctcacttcctagatgtgatggcggccgggaagaggtgctcctcacttcctagatgggatggcgtctgggcggatacgctcctcactttccagactgggcagccaggcagaggggctcctcacatctcagacgatgggtggccgggcagagacgctcctcacttcctagatgtgatggcgtcacttcctagatgtgatggcggccgggaagagg

SEQ ID NO: 192039 - DNA, 500 bp, Homo sapiens
aatcagaaagcacatgttcttcttttttattatgccctagagttacctaattctcctattccctacatatattctttgaaaagaaacagtagctggcttggtcttagcagtttttaaacacattttcttggtttttgcatgcaattccaatatcttacaggccgtcattctaacactgtcattcaaaatgggattttcttccttgacgcgtattcaacgctaacattctaaatgtcacataaaaataaagatagaagagtcttattataattgaacaatcttcctgctttaagttcaaagcactctctgacatcagttatctcttttttttttcctcccaagatcaccatgaatgaaagggctggtattagtttaaccattttttagttgaggaaatcaaggcagaaaaagattaatgacagtcaatttcacagtgtaaatatatagcttagtcagaaaagaagagaaattaggaaggcataaaaagggaaattaattga

SEQ ID NO: 192040 - DNA, 401 bp, Homo sapiens
caaagagaaaactaaattttaaagatggtaagtggtcaggcgcggtgactcatgcctgtaatcccagaactttgagaggccaaggtgagtggatcacttgaggtcaggagttcgagaccagcttggccaacatgatgaaaccccatctctactaaaaatatgaaaaaattagcttggcgtggtggcgggtgcctgtaatcccagctactcaggaggctgaggcaggaaaatcgcttgaacctgggaggcagaggttgcagtgagccaagattgtgccactgcactccagcctgggtgacaagagtgaaactctgtctgaaaagaaagaaagaaagaaaaagaaagaaaggaaagaaggaaggaagaaaagaaagaaagaaagaaaaagaaagaaaggaagg

SEQ ID NO: 192041 - DNA, 112 bp, Homo sapiens
gaactgcaaggtcacatgataaatggaatggctagagtgtgaaggatggagctatgaatgccatccctccactacagtaggtcagcgccagtaatttactaacactcagtaa

SEQ ID NO: 192042 - DNA, 419 bp, Homo sapiens
tacctcagttctaatgctggctttgcctctgctttttgatcacatttagaatacagcactcagttctgggtatgtccaagatagataggggagaaaggtaaaagagaatattaatgcaacttgattgtgcagctgttctttccacaaatatttattgaatgactgctgtttgtcacatgttgatgcatagggacacggtgcacacctgagattccattcctgtagacaggacatttgcctgcttcctggcacttatacctctccccaaattgacaccaagcattattttagaaaggcatttagtagaatgcaatatcagcaaatgaaaattgtagagttgtatcttgaagaaacttgaccccaccccccactctcacctgcatccccacatagagccaggacatctcttaagacccacc

SEQ ID NO: 192043 - DNA, 291 bp, Homo sapiens
taactatgaaaggagtcttggatgtttattaaaggaaggaaaatgaaaatagctgctaacaattacatttggaaatacttgtttttaccataaacactattcttttttgtttgtttgtttgagacaggctctccctctgtttcctagactggagtgcagtggcacaatcatagctcactgcagcgtcgtcccaggctcaagcaagctatcctcccgcctcccaaataacttttgaatgcatcatctcatcttcattcttctgctgttactgtaattcacatctccttttgt

SEQ ID NO: 192044 - DNA, 309 bp, Homo sapiens
acctgagcatgcactccatggtcctgtgcatctaggcctgtgcccctgtcctcatgtgcttggggatccagcaccacagcgggctttcaggcctggaaattcccttctctcagcgcctctgctcatgcctgttgggcctgctcagagcactcttttctactctacttgctaaagtaacttctatcctcttggatatttggtctcaaacagccctttatccaaattgtgggagaaggtgaggcctaacccgaacctcatagcatctcatcagtgacctgcacacacagcccgtgtgtagaataccctatg

SEQ ID NO: 192045 - DNA, 271 bp, Homo sapiens
ttgtttctgcaaaaaataaacaaaattagccaggtgtggcagcacatgtctgtagtcccagctacccaggaggctgaggtgggaggatcacttgagcccgggaggtctaggctgcagcgagctgagatggtgccactgcactccagcctaggtgatggagctagacccagtgtgggcaagcaagtaccatcatgtgtagtagcatatagttcaccttctagttggacagaatcactgccataaacaaagtaaattgctcttggcatatgtg

SEQ ID NO: 192046 - DNA, 164 bp, Homo sapiens
gtgaacgctgaagttaggaaagatgtgccaggaaggggccaattaacttagggaagcaatatcaatatctgattagcaatgaagatgcacttctcaggacactggaatagaattgcatcacaagtgtcttatctgactgtgtaccccttgggctgtcttagcct

SEQ ID NO: 192047 - DNA, 251 bp, Homo sapiens
tactgagaagagtttagcagaaattctaaatgtcttagctagcagcagctttcttccctagagagcccctggcaagagtatacagtcagaaatttatcattaccaccagccatcatcctcattaagtactgtgggaaaactgcattaatgattgtttttaatgctgcattgtaaatctgtggatttggttatgtatcattttcttcttaaggaatccctggattttgagccaccaggatagcttctgggga

SEQ ID NO: 192048 - DNA, 390 bp, Homo sapiens
gtcagtcacagagctctgtgctttcaccctgtgtaaactctttctcacgtcctgttctctcctctccccgcaacttactccctcaagtccggtactcctgccagtctcccaactagtaacttcaccaccatgcaaccttcatggccccagattagttttctacaacccagcatttcatcccgactcttctgctggatttttaaaatcttttcctactgatcagtgtaagatctaaaatttcttagcttagcattgagagtcatcacatctggtcctaccagcttttctagtgttaccttcactgacttccttacccagtgctactgtttactccagcaatgctgcagacgaattccagcccttgctgctccctccaccttcaatttctac

SEQ ID NO: 192049 - DNA, 244 bp, Homo sapiens
gtcagtcacagagctctgtgctttcaccctgtgtaaactctttctcacgtcctgttctctcctctccccgcaacttactccctcaagtccggtactcctgccagtctcccaactagtaacttcaccaccatgcaaccttcatggccccagattagttttctacaacccagcatttcatcccgactcttctgctggatttttaaaatcttttcctactgatctataggagtggtgggggatcctc

SEQ ID NO: 192050 - DNA, 212 bp, Homo sapiens
atatctcacctggattactgcaatagtttcctaactaactatgcttcagtctttgctcctagtctactatgaacacagcagccagagtaagcctgtaaagcatgagtcaaatcatagggctcccgtgttcaaaatcctgcaaatgttcatctcagctctccattatctgctcctcaccaccttacctctcctacctcacctcctattaccag

SEQ ID NO: 192051 - DNA, 860 bp, Homo sapiens
cctctgtgaaattgtgaagaaggaaaaagaaattcatgcatagtacacttgcatgtttagtactatctgtgtcttcaggcatccactgggggttttagaacgtatcccccacggtaagggggataccgcatttttctaggtgtctctaattgtgctgtcacagctctttccaagtctagactcatgaaatatatatattttgttcaactattattgaaaacaactaagtattgttccactaagaatataataaattttgttgtatttatgaaacttccattagagcaacaacattgttagtttagccttcccatacatttctgtttttttctctggagtgaagatagaacagcaagggaaaaaaaaactgatgcagtaatatgacctcttaaaactgaaattcatctaaaatggtcttttgaccatgatggactgcgtaagttgtaatacaacaaaatcatttcaaaatcttttttccaatagctgcacgtgtatattatttgatccaacactgaaacgaaattgcaaacattttaacagcttctttgttgcagctctgaatcagaaggggaaacttgccagaaatcctggtttttttttccccaaatcattccatccacttctaaattaatgcattggttgtattctgccccctttggttgaattacattaaagacaaatttattctttaatcttctacaataaaaagatgttaattccactatttaatttattttctagataaaataatatgtgtttctgatacatctgtttttaaattttcccatttttataagttgcttggatgtgaccaggaaaattcctcctacgatggctttaaaataaattttattaaccta

SEQ ID NO: 192052 - DNA, 384 bp, Homo sapiens
tcttctcttcctaatattcccataatgtgtaagttggcctgttgttctgctggatcacgtcccacaggtcccttaggctctgttcacttttcttcatttttttccctttctgtccctcagactcaataatttaaaaggttctatcttctagttctctgaatctttattccgcttgctgaaatcagcttttgcactaattgaatgtcttttgagttactgtacctttcagctccagaatttcctttgcgttctttattcataatttctatatctttattgatactgccattttgtacatacaccattttactgtcattattcatgtcttcctttagcattttgagcatatttaagatcacagttttaacatctctgtctagtaag

SEQ ID NO: 192053 - DNA, 203 bp, Homo sapiens
aacaggcgattttaatacagattagaaaatgtggaaccacctaggaacatctggagtctttaaaaaatagtatcacaaatatagaactaatcatgaatgccaatttcaatgaaatacaactaaaggagagggtaaagtataatcaaactctaaaaaataataaaataggccgggcacagtggctcatgcctataatctcagca

SEQ ID NO: 192054 - DNA, 239 bp, Homo sapiens
tcagatttgcttccatgatgcggaaatgaaaacattttacacaggctgcatctaaatgtggatgagtcaccaatccatatctggccttcacccatgtttgtgtcaagctgacacaccgaaataaatcccagctggtctccatctcctctctgagttttttttttttttccctttcagtttttgcttgaaagcattccttggggctgggcataagacaaagggctatggtggagcttctg

SEQ ID NO: 192055 - DNA, 399 bp, Homo sapiens
gaaaaagccaattgtaacagtacctctttatttcttggatcattattaaaagactggatctttcacgatggagtgtttttgaaactgtctcatggggcataagaagatccagaaatttgaaaatacatgccatctcaatgtgagattattttattttgctacaactgccattgagacatttgtgagatcattttatgtactacagctgctactcaaacacttgtctacataaaggaaaaacatcagagcacccacaagcgctcaaggccagcattccaccccacggaccagccttgatccactgggtagaccaagtgtacacgctgcaaagtcaacgactctattttattgttgtaaaatgaaatgtctctggctctactcctcactaaatgggctgca

SEQ ID NO: 192056 - DNA, 442 bp, Homo sapiens
gcaaacagagaatgtcttacttagtgtcgtgttctcagtgcctggtatatagtaagtactcaataaatatttgttgaatgactgtttaaaacaaattggattaacagtgttttccaactctatccatggagagatcagattcttcacatgatgtaaattcccacatacgtaaactccattagccaggttcgggatggtttacaactttgtctctttactatttagttgtcggctttgtgatcatcttgcttgcttgcttatcttacatttctacatggggatggtcacacagactgggggtgggtttagccacacagctcttcagaggcagaggaacgtggtcacccattccaggctgtgtccaacctgcttccatctttgtctccctgaacatgaagcaatttcctaacattttctaatctttgtctacattcacactgta

SEQ ID NO: 192057 - DNA, 225 bp, Homo sapiens
tcctcctaccccacgcttctgcagcaccaacactacttaaacctctttgtaactcccccaacccccaagaaagaaattatcgaacctgagggggttgcagatacccatgatttgtagtgaactcagacagaagtgtgggtaccctgaggtcctaatagttgtggctggcatctgaagtagggggcagtcttgggggctgagcccctaacccgtggggtctgcact

SEQ ID NO: 192058 - DNA, 486 bp, Homo sapiens
gagggaagagtgggggatacaagaagagcgatggtgtgaaggaatcctcagagagcaaccaacaccaccatcgaggatgaagacaccaaagtgcggaaacaggaaattataaaagtgacagagcagctgatttggagccataagcaatggagattttgagtcctacacgaagatgtgcgaccctggcatgacagccttcgaacctgaggccctggggaacctggttgagggcctggacctgagcatcgtggggaatgagaacttcggtaaacaaatgatccacccaaaggcacacaacaggctgcaataacattaatgcattaggaagctccattgtctcagaagttcctcaagactacatcttaaaatgtgtaggaacttcctgctcatggcaggcttaaaccacatcacatggagcagaaggcagtattgggcaagtctggggaacatgggagcaggccatctgggccttgaagactagggggg

SEQ ID NO: 192059 - DNA, 293 bp, Homo sapiens
ctggtctcaaactcctggattcaagtgatcctcccacctaagattctcaaatagatgagagtataggcacacgccactgtgcctacatctctcattctctcattggtaaactgtaccttctctttttcatcatgtaggcagaagattagcacatataaaatatctttttctcatttatactcttttaaaaagttaattgtttaacttttctttttttttattgagacagagtttcactcttgttgcctaggctagagtgcaatgtcgcgacctcagctcactgcaacctccac

SEQ ID NO: 192060 - DNA, 362 bp, Homo sapiens
gtagcctcgcacaatttatttcttccccatgatgccctcaaatacattctcagtctgtttctctgcctttcctccaaaaatgaacttcttctcctttccaagatctcccctaagcttctgctgccatattaacctgagttctccaaatgtgttctgtggaataccaggatattggcaagtttcatgtcatggaaaaaaagggttttggagtaagataaatttaggaagcactgagttacattggtttcttaattcaggacttctcattgtacatctttgtaagaggaattcctccttataagagaaatccatgaatcaaatatacagtatttgactctagaaccttttttccaaggaccatc

SEQ ID NO: 192061 - DNA, 1044 bp, Homo sapiens
cttgttcatttaatgcacttttcccgtgcttcatgctttccatctgtcagaattccatagctttcaaggccccttcaaatgtccctggtctcttcctctgcccctccctaccccaacaagcggtgtgtatacacatagtcccctggtggtgtgtgatcctctgttccagtacgtcgtgttctggtctgtgcttctgttcttttgcagacacacctccactatgcagtcacgaggcccttgaggacaggaaccatctctttcttcgtaatgtcacctttcccagtaggcacacggctgtttattgaataaacacagatcctgtgtacacttgctcaaattgtacaaaatttgcaggagattcaaagtggaaacattttactgaagggaattcggtcaaattacatccttgattcttgtataggtggtacagttttgtaaaggatcatcaagtattttggaagactcattggctctgccagtggcttagataaataaattcgggcaagttattgatctctctcctcagagaaaaaaattgatgtgttttcttttatataaagagaaaaagaaaaagaaaaaatgtgatctgtaactcattatgtttccttgctagaaagctcaaagatacgttatttgcctgtttttagttgctatccagttttcttacaataatctctctgcctcagtctcctcatcggattacttgtcacatgtgttaaatccttcttttaattgatggttctgttgtatatatcttttatatttatataggtagcctcaactctcctttttttggagagtggtaatagaaatataaataataaatagttgccctttggtttccccaacctgtggtgacaacaagataataaaacagatacttatcctatataaaacaggcaaaaaggctttgggacaatatgggaatcatgatgtgggtttggtggaaaacgagcaaagcaccttgtaaggatcttgtagtctgaagattaaggtgtgcttggggtaggtcatgtcctcccagctctgtgggatttgtagcac

SEQ ID NO: 192062 - DNA, 718 bp, Homo sapiens
agggaaggcggacgtggtcagtcataaaatcttgacgctctttttcacttcctctgctcgttcgtgttccacggacagttaacagctacgtcctgccaattctcctccaagcctctctgggaaccagttctttgcctctgatctcggttaagaaccgctgacctgctgcccagagtaaaaggtggcgtgcgagagctctcgtacttaggaaggaaaggatggtgccaggcgcttggtgcttgccttaagccggcagttttcaaccggggggtggttgtgcttcccacgggccatttagcaatgcctgggaacgttcctggctgtcacattgcggggtggagtgttactgacacagtaggtagaagccaggatgctgtccacgttctaccaggcgcaggacagctcctcccacagcaaagaagtacctggctcagaacgtcagcagggccaagaaaccccacaccaagcctctcctgggattattccagtctccatttggcccccagtcactttctgattccagttctccagcccaggaatgcaggacgtggattagagaagcaaagggaaagttcatccagaaagattccggttctgtgagtgttactaacggggcaagcaccttgaaggtaccgtgggacgtgggtgattcatgagcctgaattgtctcactgttatcacgtgatcagagtgaggcggcctaagggagcatcacagg

SEQ ID NO: 192063 - DNA, 477 bp, Homo sapiens
agggaaggcggacgtggtcagtcataaaatcttgacgctctttttcacttcctctgctcgttcgtgttccacggacagttaacagctacgtcctgccaattctcctccaagcctctctgggaaccagttctttgcctctgatctcggttaagaaccgctgacctgctgcccagagtaaaaggtggcgtgcgagagctctcgtacttaggaaggaaaggatggtgccaggcgcttggtgcttgccttaagccggcagttttcaaccggggggtggttgtgcttcccacgggccatttagcaatgcctgggaacgttcctggctgtcacattgcggggtggagtgttactgacacagtaggtagaagccaggatgctgtccacgttctaccaggcgcaggacagctcctcccacagcaaagaagtacctggctcagaacgtcagcagggccaacgtggcgtctgtccgggtaccgagct

SEQ ID NO: 192064 - DNA, 435 bp, Homo sapiens
cccagagatgctgcctgcagggagttacacagatgcggctgggccctctcctccagacaacccgggacacccaaaagctccagccctggaggatgtgtgcctgggggcctaaagcacggcctacagagagagacaggagctcagcggcgggcccgcacccagcacaggagacacagtgatggagatgagcaggggagccttggcaatgaaaccctccttcctctgaccctcctgcctcgcaacaggctgaccacctctaaccttggcctgcgctgggccttctggggctggggggtgtcctctggtgtcacagccacagaggagctctgccctctgtctgctggggaagcccttgactcccaggggctggtgagcagctgccagaggctgggagggagcaccaggtgggggtctcaccacgtgaaggagggcagg

SEQ ID NO: 192065 - DNA, 495 bp, Homo sapiens
tcccccttctcggtaggtctgggcctggagttggcgggcagtctgggataggaagctaccgggcgggatggcaggaggaggagggaaactgaccctacgcgcctctgcgctgtcctgctcacaaatggagagccagcctgggagaacacccgggggtgccagagtgaggggccccatttctggaatggggccttcccaggtctgacgttctgttcatacagccccgggggaccctgcccacccgggcgtgggctgctttggggataacagggtcccagtctgtttcctgggcggacacacacccaagggccagcggcctgctagaagccgcagcccgacgggcgggcggcgcagaggccgctcggggcccagcgcgccgtcccggtccccaggccagggaggccggagccgcggagcgcagaagttgctcctcccgctccggccgggttcctgtgcggcgcggctgcagctgggcgccggggcgcaggcggccgc

SEQ ID NO: 192066 - DNA, 511 bp, Homo sapiens
ctagcggatcctcatttcaaatccataccctcactgaaaataacacacacgcaaagtctcccttaaaattctgggtaggtggtgcccatgaatcttctggtgcttcacaatggaacttgcgctgcagagtcaaaggcagtacatgccgtgtgacacaaacaagaaaggcacaaataggagagctgggttgtaggacgctaacaccagctcagaatcctaattacaggactcagaaggtccaatgtgcagctctgctgaactcttgaggcatgcacaagtatatgaactgacctgtgggatcagatgagaagctgccaagccataaccctgaaagaacagagggcaccccacggatgtaaaaccacagtggatggctccccgccaagagcgcttctaaacacctttagcgcctcataattctaacactggcctagggtgcaactcttctcagctagactcttagaaccaattcatggcaaggacagtataataattatgaaatataataatt

SEQ ID NO: 192067 - DNA, 469 bp, Homo sapiens
tctgctgtatagaccaaacggatctaatagataaatacagaacatttcatccaagagctgcagagtacgcattctttacctcagcaaatggattattctcaaagaaaaactacatgttaaatcacaaaacaagtcttaaaacctcaaaaacactggaataatatcaagcgccttctctgactacaatggaataaaactagagcatgcataaacaaaagaaattgtgggcaactatacaaacacatgtaaattaaacaatatgcttctgaagtaccagtgggtcaatgaagaaattaagacagaaatttaaaaagttcttgaaacaaatgacgatggaaatacaacataccaaaacctataggatacagcaaaagccgtaggaggagggaagattatagctgtaagtacctacatcaaagaaggaggaaacaaaaaacaatctaatgattcatcttaaggaacaagaaaa

SEQ ID NO: 192068 - DNA, 672 bp, Homo sapiens
gcgctggctactcgagaggctgaggtgggaagatcgcttgaacccaggaggtcaaagctgcagtgagccaagatggtgccactgcactccagcctgggcagcgacagagcaagaccctgtctcaaaacgaacaaacaaaaaacaaaaaattttcttggacttatcttgggataaaaatcactattttcctcatatccctttccatctctacatgttctttctttggaattgaaatagcaaccatgttttcctactaaagttttctggccatgttcagtggctcacgcctgtaatcccagcactttgggaggccgaggcaggctgatcacttgagcccaggagttcgagaccagcctgggcaacatgagaaaacctcatctctacaaaaaatgcaaaattaaccgggcatggtagcccacacctgtagtccccgctactcgggaggctgaggtaggaggatcgcttgagcccaggaggcagaggttgcagtaagccaagagagagccactgaactccagcatgggtgacataatgagaccctgcctcaaaaagaaaaataatttatcaacatgattgttacatagaaaaatgatacaagattacaggaaacacacagtgctctgtacttgccccacaattctgtatctttcccggtatgatatggctcaacta

SEQ ID NO: 192069 - DNA, 1032 bp, Homo sapiens
gtgttctgacaggtctgtcagggatactacaggataagaaagctcaggcatcctttgaggaagaagataaaatatctcatatttttcacagaactacctgttcccattcccaatagagcttcagtatcaccttgaaagaaaatccacaggtgaccatgaagctgctagtccagtgttctggacaacggactctcagatcactggggctgaggccaaagctgccatggacagctgtggaacatgggctaaacctcacctggaagacagcacaacaacatgatgcctggcacataccaagctcatcggccatcatgacagtcacgcatgctcagttagtcccacagggcagtcctctactcaaaaccctcccgcatcagcttggctcatttggagtaaaagacgaagttcccactgcagccacagcgccctcctgtgctcactgctccctggccttgtccatttccaggcacactgacctccttgctgtctctgggcacactggcacttttgctcttcccgtccgtctgtccagaacatcctgcccagagactggggactggtggtccttcctgacacagcgaataaacccacaaaagtcccccaccatgtggatactccctactcccctgatttttctgatacaagcctttcttatgcttacacaagcactccccaaagcctaaagaaaagtcaaatgtccaaacacacaatccttcaacaaacttacacatgatttgccttttcaaatgtgccacccaccttcacaccacagtgcaggaagtcaaagcttctggaggaagggacaggtccctggtccccggtgccccttggaatcaggctgcaagctgggagcagttacactgcactaccccagcatgcagcatagacacaccagtttctgcggcccagaacaccgtcgaagcttcgacggtgttctgttcaggtgtgagtcagctcctggtggtgtcagaagtttacatgattgcggatatcattgattgcttcaccattccattatggttcaggaccgac

SEQ ID NO: 192070 - DNA, 534 bp, Homo sapiens
agatctggcagctctctttgtgcccaggctggagggcagtggcaaaatctcagtctcactgcaacctgggaaacaagagtgaactccatctcaaaaataaataaataaatataaaaataatcacatcatgaaattacttatactacacaatattataaccaatgagtcagggtggcctacagaatttttagcaaagagtactataagtatacatctgaaaattcatctttcacagctgattacgctacaatgcaaatacaatgatggttacgttgttaatactttttacatggtataatattatataacattaataaatagggaagaatgacatggtacctaaaatatctaactgaagcagatgaatggtatttcaaaatatcctaaagtgaatttctcttgtggaactgtagttcactcaagtagctgcaacttggtatttatgtaaagcttatcagggtctgcagaagctacaaagtgtcccatccattaaatctgccattaacttaaattccagctgaattaaacaggatg

SEQ ID NO: 192071 - DNA, 216 bp, Homo sapiens
tttacattttaacagatttttttgttgttgttttctttgaaggtctcactctgtctcccagcttgatcatagctcaccatagacttcaactccttggcctcaaacaatcctctcatacctcagcctccagcgtggctgagaccacaggggtgcaccaccatatctggctaatagttttatttttattttgtaaagacagagtctccctacatttcc

SEQ ID NO: 192072 - DNA, 188 bp, Homo sapiens
ttgcacgtttcattctcttctttcttttctctccttcgttggttgaagagtcaagggcagaagatggtggtgatagggagggggcgtgtgtaggcaaggtacttcgtcccggtcatcttatctttttcctaatttcattttatattatcgtggttcacaatagtggggcttgtggtagaatatctgtg

SEQ ID NO: 192073 - DNA, 142 bp, Homo sapiens
gcatggctgctctgctccttatccagggcctggattagcataagaatatcatcttttcccttaacaagcaactcatccattccttcccgttctctacactcctccccatcaatccttagaggaatacacacttgtacaactg

SEQ ID NO: 192074 - DNA, 435 bp, Homo sapiens
gaagataggctggagactagacaaggagggagagggcttatcctttaaatgtactgtgtctctttaagaagaagctgatgggaaagtactgtgtaatatggataagcagacaccatgactataaaaaagagaaatcggcctaggcaacatagtgagaccccttttctacttaaaaaaacaataactcttctaaatattttaacatattaatggaaatcttgaaaactaagaagtcttcagtacctggaattttaggtgttataagccagagagatactttgggacacagggaccttgctagcaatacaacttagtaattcttatcgaagacccactgtgtgctagggactttgctgagggctaggaagacaaagatgtataaaacacaaagacctaactgtggagcaagggagattcttctgtcagtaagatggt

SEQ ID NO: 192075 - DNA, 393 bp, Homo sapiens
ttttctgggtttctggaggggagcatgcagggagcctggggaactttgctcatgggcatggtgcaccatgatgctcgtgggcttggctccagctaacctggtgggcagccatctttctgaatttggcccctcacttcttggtgggcacttaggctgatcagtaatacctggactctgtgagcctcagagtggctgtgctgggagtgggagtctgggtgagaggaggtgctagtcactcctgaggaccttctctcttgttttctgggaatcttgtgatgccagtctcgaaagtagcatagtgagcccaatgtggatgggcagcatgattcttagtcctccctgatctgagggcagaactaaggcatgggaagggcaggggcggttcctcagagg

SEQ ID NO: 192076 - DNA, 545 bp, Homo sapiens
ctgagtcagcgattcctgtctccacactcagggaatacctgctccatgttccgatgtcccagtgtaacatcccagtctcaaagataataataggaatctcattgtagttatcaaagtgtgacaaacctttccaaagcgtgtcagacaccatcctaaatgtctagatttatagagccatttaatcctcaccacagtcttatgaatgtaatacactagtaattctcatgttacaaaacagaaaactgaggcacagacaggttaatcaaacttcccaaacccaaacagcaagtgagagagccacaatttgtgccagccaggcagactccatgctcttaactaccactcagggtcttctcttataaattatgtgtgtgtgtgtgtgtgtgtgtgtgttttatgagaatctaataatattttacatattaacaaaaccacttatcttgaaaatttttagttaatcttgagggtgagttatttggtgattgttaggaatgccaaaccaatttaagaataatgtatttatactggaatgcaatttctgtgtc

SEQ ID NO: 192077 - DNA, 428 bp, Homo sapiens
gtcatcttccggtcgtatcagtacttcctggccagcccgatgagtaatttatgggtgtcttgattttgagtgtgtgtgtttgagaggcatgtggcttttccagaaactcagtcccagtggaattagaaggcagcttttcctggactgccttggaccccttagatttcaagccactgaagagctatggctagtcctgcagtctactgtttaaatagcttggctgaaattagcaccaccctgagggcctctggctggtcttggttggcaaatgtgattcatattcaggatatatagctctcgtgaacatccaaaaagcacttgcctctgtcctctccctaccaagcttttccttctccccagtaagcagaacacaggtctggggagtaaattcatcaaaagtccctagtgatacccattaacattcacat

SEQ ID NO: 192078 - DNA, 397 bp, Homo sapiens
agagggtgactacagtcaacaataatttattgcatatttaaaagcaactaaaagaatataattggaatgtttgtaacacaaagaaatgataaatgcttgagatgatggctcctccatttatcctgatgtgattattacacactgtatgcctgtattaaaatatttcatgtgacccataaattcatatacttactatgtactcataagaattaaaattaaaaataaaaataaccaagaagaattcttcttcagaaaaatggaattaccacccagagaaaagacctatagtactggcattagatggttgcccaataaagaagccaagggtctttattcctcaattaccccatgtattaggccattattgcgttgctataaagaaatacctgagagactg

SEQ ID NO: 192079 - DNA, 119 bp, Homo sapiens
tttaacaaaatatgtcattttagcatgtagtcaaaatactattgagatattttaccttctctttgaaatgtgctgtggattttacacttatagcacatctccggttgggtagtcacaga

SEQ ID NO: 192080 - DNA, 340 bp, Homo sapiens
agtggaacttagaatacttacttagggtttctttaggaaaaatgaatggtatggctggaagcagttgtttccacctcaacttttctatagacatgcgggagagtggacttgagggtttgtaataaagttctgcctcactttggtgaggtggcttctgtcattcaggtcacaccgtgcactgcacaatcaaggcacaggagcctacacagttctggaataacatgcaggcatgaaaaggtgcagccctgaggcttatattctacaatgaacatgcaggatgagcaggtgtgagtgtgtcagtggtgtgcacatacctgtgtatccacaagcgtgtccactc

SEQ ID NO: 192081 - DNA, 534 bp, Homo sapiens
ctacccacctcattgtcatctaaattaggtcaatgtctatatttatttctcagactttttgtctttttccttataatagtcttcgtagtctacaattacacccttgtttgtgtttatttattctatctctgcctgtttcactggatcgtaagctccaccatgggtgggaaatcagtcttatccccagattctctgaccctccgtggtgcctggcagacagcaagcatggagtaaattctggttggatgaatgtactggaagtgtttagaggaaggaaactgacctgaggtagttgggacaaagaatgggcaactttagtttctgtaagattgagatacagataacagtacttgagtacttgtgtacttaccctttctgattaaatagaggctgagatcggataagataattttgctaatgtctgttgtggcctgaaaagcgtgtgttccttggctccttcctaggctcattcattcgctcatcaagctttgagtgagctcctgccctgtgcccacatgtaggaactcccctctc

SEQ ID NO: 192082 - DNA, 389 bp, Homo sapiens
acgatggtggtggtggtggttggacgaaggctcatgtccacgaagttgcctgagggcgcttcttctaggctgcatttgacgctgagaagaagcaggtcacggtgtctactgaataagcgtagcgtagtcaaccacgtcattgagcaccatggaatggcactgattccgggaagaatcaaggtctcctccccagggatggcgcgatttcccaaggcagaacttgatttaagaggagcgagattatgccattttgcatcatgcagaaaaacacatgccatacagaaaatcatctcttcgggtgtcatggagaagtggtggtgggtccaaccgttcctccccgaagacagcgttgtttccaggagcctcggggatggatttgatactgaggt

SEQ ID NO: 192083 - DNA, 305 bp, Homo sapiens
acagaaccctgacaaacaaaagatgtaagggagagaagggagtgggggaaaaataataagaaagtgctgtgcattggctaagaggaggacaaaacaaagcatggtgtaacttaaggcaagtgaggaaacggtctcaagaaggtaatcaaaggtgtcaaatgcagtagagatgttaagtaaggtaagaaataaaggcgtccaactaggaaggtcagtagttaccctggcaaaagccaaggtttgggcagaagccagaccttactgaactcagaagaggatgaaggtgggagaatggaaatagcaaa

SEQ ID NO: 192084 - DNA, 138 bp, Homo sapiens
cagagagccgatggttttaaagtgtggcacttccttgttctcacactcactctctcctgctgccttgtgaagaaggtgcctgcttccccttccccttctgccatgattgtaagtttcatgaggctcccatagccatgc

SEQ ID NO: 192085 - DNA, 536 bp, Homo sapiens
taaacactaagtttttgaagcaatatttcaagtcccaagaagacaaagtaagaggaaaatattaagagacagctgagctcgcacacaatagaaaactctctggcaatataaataatctcagaaagaaggaaaatagaagcaacaagcaaaagattactgagttggaactaaggaatagcaaagacaaaaaaggtgacggaggagaaagttgtaagggagaggtccaggaaggagagctttcatctcagtcctcagatagaccttgccatcccagcacctctgcatcactcaggttgcagagaaatctggagggaagaacgcaatctcatcctacaagctgagcacatcaggaggggctggggctggcagtgctctcggaagcacactttgagacagtaaaggaagtcacagatcaacagtggaaaacacaggagatgctcttgctggttgtcagcgcaggacactgagaaccccagagtccacagaagattattttaagctcaagatagttgagattcgacagatacagcaagaag

SEQ ID NO: 192086 - DNA, 592 bp, Homo sapiens
cctcttttactaatcctcctcagcacagacccttttttgggtgttgggctgggggacggtcagttctttcccttcccacgaggccacatctcaggctgtctcagtggagggaaactttggacaatgcccaggctttcttaggcagaggtccctgcggctttccgcagtgcattgtgcccttggttaatcgagactggagaatggcgatgacttttaccaagcatactacctgtaaacatattgttaacaaggcacagcctgcacagccctagatcccttaaaccttgatgccatacagcacatgtttctgtgagcacagggtcggggctaaagtttacggattaacagcatctcaaggcaaaacaattttcttagtacagatcaaaatggagtttcttatgtcttccttttctacatagacacagtaacagtcggatctctctcttttccctatacaatgctctatatgtttgagatgcccctgagatattagaacagttaacacttatggaatgcttaacaaatgccaagcactgttcttgttaccaaaacagcaggggttcaggcgaggtcctgctgcttgccgcacaga

SEQ ID NO: 192087 - DNA, 672 bp, Homo sapiens
tctcagctggcccctgttgctgtctgtggagcagtagtgtgacatattcagcagagcaaggacaattgggccagtgattattaattctgaaagatgcccttaagtggtgtcatgaaaccagatctggaggaggcaaggatttccccccaaaataaggagattaacatcccaaaggagggagtgagaaagctgcctgctaaaaaacaaactttgctgccaagtttatttttatctcatgtgtttgaagattaagcagatgtaccctgaaatatgcaatgctttgtttgagttactcaagaacacaaagtttactttaaggacaaaattattatatgattatcaacttttctttctccctacatttgagacattggtactttttgccgctgagtatatagccagagggcttctgtggtaaaattctctggacaaatccctggttttgccatctcctcagcaaacctcggtatcaggtgggctgtcacctcccagttccccttcctccttgctggcctttttcacctgcagacttccttgttgtctttccacctcagaccctctaaaaatgccccagtaccagagcagctccaatgctggcataaggttggatgcctaattttcctcacgattgttcgtacgctggtgccttcactggctgactgttctgacttc

SEQ ID NO: 192088 - DNA, 333 bp, Homo sapiens
gaagactggcatttaatttctcattaaaaggaagtctcacttagtgggtaatgatagttgattttttacatacttgtcaattatatattttaagttttacaaagtcacctgacttcatattatcctaggaatgtccttcctgcaggataattaatagattacataaaaatgtttcaatctgttcatttgcaacctctttcttagttttattgtttctttactgtggaaagaacagggatatacaattaggtttttggtaaatgttttttagaataactctattatccttttttgcttacctgttttctcagtcatttatataatttttatgtg

SEQ ID NO: 192089 - DNA, 149 bp, Homo sapiens
tctaataaatgttaatgtctgttacatatctcactgttctttcttaagtttttcataatgagaattactttgaacttcacataactgtgttatgtgttggcattttactgagattcagtctttccatccaggaacacagcgtgtctttc

SEQ ID NO: 192090 - DNA, 215 bp, Homo sapiens
caggctattattatattattagttaagttttggaggagtcaaaagttatatgtacattttcacctgcatgagggctggccgctctaaccctcacattgttcaagggtcaattgtatattgcttttaaggtaacttacattttgtcatagtcagcgactctctgaggctggcgtgcgggtggtaaaggaatttaccaagacattaatgagtgtaga

SEQ ID NO: 192091 - DNA, 326 bp, Homo sapiens
tgcaggggacatgagggagagggagggaaaggcatctctcttctgtgcaatgaccaaaacgattaacgtgccccctggaaggttgctgtgggcaccacgggcatcccgcaaagggcagtttccattcccttaaaggctcccattaaaaacacataaccgtgttaacaagggcagacagacaaaagctgtctctctgctcaatgccagctctgaaacacttgtgggtggaggggcaagaacgggtaaaggaaggagggcgacagcagcttaatcttaggggtggctggatggtgggtgaaacttttaaaaatcgctacttgtaattg

SEQ ID NO: 192092 - DNA, 435 bp, Homo sapiens
tcacagcctcattttcttgccaagatattttcgggaggtcctcaggacttcagtggcaactcaggaactatatataagggagtatgtctttgtttcccctcatctttccatgactaccttctttcctaatattagaggttgtccgtaaagttacttgaaggcggcatctcatcactgtcattgttttcagtgctttctacaagaattttaatatctgggccaagagtgttttcactcaggattcaccacaaggaaaccttaaggtgtgaagaaggtttcatgttcctgagagtcctctagaaactgagatgaggagaatggggattacccattctgtttcacattttgttatctgggcaccaaagcagtttttttttatggcaccaatatcactcaaaatccctcacaaaaacatgttacacccctacatgcatc

SEQ ID NO: 192093 - DNA, 998 bp, Homo sapiens
agtcatcccacctaatcacttagccattgttgtggtattgcagtgcttctgttcaagtaacccacattttatttaatgatggccccaaagtacaagactagtgatgctggtactttgaatatgccaaagagaagccataaagtactttttttaagtgaataggtgaaagttaaaatcccagcacgttattctgtggatatcaacacacagattttggagtttaaatggagacggcggtaaaccccaaaatagccaacacagtattggaggaggagaacaaagttggaggactgacattacctaactttcaaacttactatagagccacagtaatccagacagcgtggtactggcaaaggaatagacagatcaatcaatggaacagaataaagtgcccggaagtagacgcccagaagtagacctacataaaccaaatcaactaaattttgacaaaggagcaaaggcaaaacaatgtagtaaagacagtcttttcagcaaattgtgctgcgacaactgggcatgcaattgcaaaacagaaacgaatgtagacacagacctgacgccatttacaaaaattcacccaaaaaggatcacagacctaaatgtaaatcacaaactatgaaactcctagcagataatttaggagaaaacctaaattaccttgggtttggggatgagtttttctgatacaagaccaaagacatgatcccagaaataattgataagctggacttcataaaaattaaaaagttttgctctgtgaaggatgctgtcaagagaatgaaaagataatatatgagaaaatatttgcagaggacataactgataaaggacttttccaaaatatacaaagaactcttaaaacttaacaataaggccaggcgcggtggctcactcctgtaatcccagcactttgggaggccaaggcaggcagatcgcttgaggtcaagagtttgagaccagcctggccaacatggtgaaacctctacctaattctc

SEQ ID NO: 192094 - DNA, 441 bp, Homo sapiens
cctactcctacattatctgccacagccctgtgcaggaatccttgccacacttcttgctctcctgcgacacaggggcctaggatcatgactgccctgagtaccattctgtgatgttccatcacatgccaggaagcagtttggattccccaactgagcagaattcctctgtaaatatctcaaatacattttcctgggattgacctctcctttcttttaaaaaatattcagtgaacactactttgtgccaggaaactctgagaagtgatctttaggaaacgatttgcaggtagaagtgacagggccagataagggatgcatgtgtatatgtgtgtgtttatttatgaatctgtatggatctatgtgtttgggctgcggaagatgaatgtacaagaggcaggatgacatgtaggactcctgtttaaacaactcagccaatgatgg

SEQ ID NO: 192095 - DNA, 372 bp, Homo sapiens
gggtgtctagaggaccccctcccaacgataaggatatggaacacgaccatgcaacttcagagtcctagtacttaaggcattcagtctttgctgcctataaccacgactccacagtaagaaccagggtcagagagaaaaggaggtgacccaggaggatgatccatcatagtcttgtggaaggtaggggcctgggaatgaacccagtccaaagggagtaaaactcctagtccaaactgtgcccccaaagcttctgcatttgaacgaaggcctgaaacagacatttacaatagagtgagccagtttggactgttgaagaggctctgagtagggagttagctaccctgaagaataaggccagaaatttgccagttt

SEQ ID NO: 192096 - DNA, 493 bp, Homo sapiens
cattacagctgggttgggaaggttggaaatagaactttcgacttctattctagtgtctattaaaaatacactaaaatttatgcatggaaatatttacttttatttctgtaccaaagatgatagaacacagcccacttagaagtatttctgtgtgcatgtgtatgtaaatacacacaaacatgctctgcagctggctaataaaacacagtaatcaaagcctatagtggatattcagtgtaaaggtaagacttgctgaattttgaggcccattggggaagggcagggtcagggtgagacaagcatgtggtcacaaccagggggcgttttcttctgttgggagtcaactactgttagggaaaattcctggcagcgtggagcaaggttggtggatcccacctgtcagaaaatcctgagactgggtttagtccttgagggatggaaggacaaggcaggtaccctggaccaaagaggcaagggatccaacccaggtagt

SEQ ID NO: 192097 - DNA, 666 bp, Homo sapiens
cagcataattaggtgacaggaagaagtttaggaaagctagtgtataggctgcaaacaaaattgtatgtataagtatctgtgatctaatcctcagaaggacaggtaagatctggacacaggaagcactccatgctgcaggtacactatgaccaaagacatggatgtgcaaaagcagaagcatgtatatgaaacagctggagctgctagtttagctagagcaagggtatacagtgggaaacagacagcaaccagactacatgtacaccaaaataatttaccctgaatcctcagaaggcaagtgtgacagttaattttatgtgtcaacttggctagactttggtgtccagttgtttgatcaaacaccaatctagatatgtctgtgaaggtatattttagatgtgattaacacttaaatcaacagatttctagtaaagtggattaccctccataatacaggaaggcctcatctaacaggtaaaggctttaagagcaaagactgaggtttcctggaaaagaactacaacatagaaaccctgcctgtgtgtccagcctgctaccgagcagaatctggagttaagactgtggcaggccaggtctcactaacgcaggcctccataacaactgtttcagtactgactgagtggttaagttaaatattaaaagcta

SEQ ID NO: 192098 - DNA, 653 bp, Homo sapiens
gtaaataagtaatcattttacagtaacatcttttttacatagcacttgacatcacagaacccgtttctgcaatcaccatcccttccattcccaatcaatccatctgattctcctacttcaagaaacatttttgtagtatccacacttgactctggtccttccgtttctgtgcctatcccaatggcaagcatagctttttggtctactggagggtgagtttgccaggaaccaaaagtaagggagaacattccaagacttgtggtccatatactggtttagtaatttatgaagccacggtggacaggatggagtaggatgattggaggagggcaaggttggaggctcaaaattggggcttgaaagatatccgggtctactatgtgcaagcaataggctgtcggaaatctggcctgaaccctagaagaaaaattgctactgcatatacgaacttataggttcaaacaatgaaccacagtgagtcaaccaccagttcaggaaactacaattacagaataccctgaaagcgtgaccagactataagctgcatccataattctcttcccaggttataaggaaccgcaaattacctaataagcttgcatacacttatttggcttggacttatctgcccacatgctgcgacttcagatacg

SEQ ID NO: 192099 - DNA, 485 bp, Homo sapiens
aaaacatccctataattcttttaaggacagtacagggtcaagtggcttcctgggagaatgcaaggcaggcactgagcctggagagaactctgtagccccattagtattgagggcaacccccaggccagccctggtggcagccagatggtttggagccctcgcagtctccacagaaggcttgccgggaagcggcagatgctgctgctggaggcaggccttccctgcagggcatctggacctcataggaattcctggagcgactggagaaaggtgtcttcctgtcctttcaggggctcctgcggggaattccagaacttcagggctcctgatcaccactgtacagggcagtgagctggagctggctctttccagctcacaagaaccgagtattaaatgtttaggaattttgtgaggcaattgttaaataaccgttatcatcaaaaattgttataaatctataattaaataaactatattaaaatcta

SEQ ID NO: 192100 - DNA, 617 bp, Homo sapiens
gagaacagtttggacattcctcaaaaaactaaaattgagcttccatatgatccagtaatcccagtgctggatagatatccccatcccccaccagaaaaaaaagaaattagtatattgaagagatatctgcactcctatgtttgttgtagcactgttaactaagctaagattttgttacagcacagtttactaagctatggaaacaaccttagtgtccatcaacagacgaatgcataaacaaaatgtggtatttatacacaatggagtactattcagctagccataaaaagaatgagatcctgtcatttgcaacaacatgagtggaactggagattattatgttaagtgaaataagccaggcacaaaaagacaaacattgcatgttttcactaatttgtgggatctgaaaatcaaatcgattgaactagtgaacatagagagtagaaggatggttaccagaggctgggtagtgtagaggggggttagaaggaggtagggatggttagtgggtaaaagcaaacaaacaaaaatagaattaataagatctactttttgatgtcataatagggtgactatagtcaatgataatgtatattttaaaataaagtgtaattggg

SEQ ID NO: 192101 - DNA, 361 bp, Homo sapiens
tataaatttcacactaaaaaagaatagattcaggaaacattttttaaaaacccccatgtcctctttcttcttactcaattcattatgtaggatgtagcctacttattacagtaagttcgataaaagtttacctattctcaaacaggtaattaggggtaagacttctaacaaaattctctaggcacagtaaaaatgagatgacaagtcaaaaaagcaagtagaacaggtacccattataatgaaatgaggtgatatagcaagagtattattttttaaataacgataatctacacaggaatgagcagttgtaccatagcaatttgtatcaaatatcagagcctccccattttatgttcattgt

SEQ ID NO: 192102 - DNA, 172 bp, Homo sapiens
ttcaatatttttgtgtctcagtgaataaggaggccaaggacagcaagagaaacaggggaacaattggttagtggaggaatcagagcatacacatttattacacacaggtttacagtcttttatgaccacagtttgtggcaccccaaaacattaccatagtaacatcaaagat

SEQ ID NO: 192103 - DNA, 410 bp, Homo sapiens
agtaagacctgctttattgagcacttactatgtgccaggcaccatcccagttgctttccatgaaggattgctctttaattcttatcataatgaataggtactattattatcccagtttatgggtgaggaaaccaagtcttaggttgactaacttattaaaataaagcacatacctagtaggtggtgaacaagagccaaaacaagtctgttggtcagctaaccaccacgttatagtggctgctgcttaggggcagcatatatcctctgcatttccccagaggtgacagaagtagtggagagggtagtgctctctaggctctgacacacagcccatgtttgctgactcaacaaccacacaacgtaatgctatggcacctcaggtggcagggagggtatcgtgggctggactg

SEQ ID NO: 192104 - DNA, 199 bp, Homo sapiens
aacttataaaattggatgagcatacatctatctgtataaaataatggctttctgcaggctatgataaatagcctacagaaacaccacttggtaactcatcacatctgacaaatcaaaaaacccttccttcatttctttggctgatacataaaatttctgtataatgtaaaatacactgagtcaattctcaccattgatg

SEQ ID NO: 192105 - DNA, 611 bp, Homo sapiens
cctgcggagcgatgatcctaagctcggtttccaaagtattggcattacaggtgtgagccactgctcactaactagtgagctagttttcactgctagaaaaactagccttgttttgcttggtagagaatctctcactctcttcactgatggcttcagagggagatgaatgtgaagataataaagtctaaagtttcttcagagctcagtctgtctctctggggtcccattgcctatttcagattctgaatggtatttcaggctaccccaaaagtgtcagatctggtcaagagtgttgttcttatgtactatagagtgtgccactttttgagcaagcagtcaagtatggtagttaagagcatgcactgtgaatctttgctataagatggtggcgtcttgtactttccagacatgttattttccactttcaaccccttgctctttatagccttcattgagaagaggggtctctatcctttcctcttgaatttgcactggctcacgactagccacaactagattatgaccaatagaatatggtgaaagtaatgcacgatgactgaggctaagtcagaaaaggcagtgcagccttcaccttgttttctgggacactt

SEQ ID NO: 192106 - DNA, 194 bp, Homo sapiens
cactcccaaccctgaggttttaaaatgttttctgacaacatatatcccctttatttccacttccacatagaatctaggcaaaatacctattctttagaaagtcaaataatattgtagtttaataccaaacctaaatactgtatatatatttcacataagcaaaacacaggtgatattgtgttttcttcattgct

SEQ ID NO: 192107 - DNA, 207 bp, Homo sapiens
attccctctggtgccgaaggggtagctggtaggttcttccatgatatcatcaggatgtaggagggcatgggctccaaagtctgctggtttccaagggctggcagaggtcctcccaccaaccccaggcctgttttggggctagtctctgcctctagtcctttacgtggcctgtcaactaagtggctggagacacagtggctcatccaa

SEQ ID NO: 192108 - DNA, 585 bp, Homo sapiens
gacatcaagaatgagtcaagaacaattccacgattttggcctgagcaactagggtgatggaggtgttatgtgctgaaaggcggaaggtatgtcagaggagcaagtctgagaaataaacatccaaagctcagtttggccatggccatgttaagatatccaagtggggacactgagtaggcaactgatgtttgtgttggaggctcatgggagcagtccaggtgagaggatcatggtacttaaacctgtgatagtgaagatcactgaagaagtgggtgtaaaagacacaagaaggggacaaaggcagggcctgacgcacaccactgtcaaaagatgaagaggattgagcaaagaccactgagcaagaacagctagaaggcaagtgtgtggtgtcctggaagaaaatcaagaaaatgttttaaggagcaactaactgtgtcatatgctgctgacatatatcatgttgttcaatactttaggcttgtctattttttaacccacaaatattattttaccaggataatgtttgtttagatttctatatatgattatacttttatttactcactattctttcttacactttag

SEQ ID NO: 192109 - DNA, 164 bp, Homo sapiens
ctcctatttcacactattctcccttttacctatagaaggatagtatgcaatttccaggaaacaaaagtacaataccctatatccttcctactccctcaatgcatttcctgttgcaaacatctggttttctatatcttagctgcacttgtataacccagggacaa

SEQ ID NO: 192110 - DNA, 226 bp, Homo sapiens
taggattgaaagagaaactctaaaggggaggataggattaagctaaaaagggtcaagacactgcccaatgagagctaaacacaggatttgctgtcagagggtcttattgttctttaccaggcctcatttgcagcccatcagactcgacacctggacatccctattcaacctctgattctcccccaagcacaggttaccacagacatgccaaatacaacagcatctg

SEQ ID NO: 192111 - DNA, 424 bp, Homo sapiens
ctgtggaatccatctggatggaagacgccatccaattataaatccttaggatactttttattgccctttaagagttctgatgcttgctcttccatgcccatatgtttctgcttaagaggcttcattcaaatcaaattggaagagaagtccagatcacccaactacaattacctgagcaaaaatcccctcaattatcttggtaatccagataaattcggagtacaaaggtgagttgcctggatagcactggctaagaactgctttgtctcccatttcaccttgcattattataatctacttgattacacttcatttataacaatagggagggcttgttttatgccacacattgccacttgctcaagtgtaaaataaaccttaaatgactgatgtactgctaaatttatctcaaaaaacaatcata

SEQ ID NO: 192112 - DNA, 364 bp, Homo sapiens
tctagggcctgtgtctttcaagtcttgaataagtttgcctatttctacaaaaatcttattggtatttttgtaagaacttcattcaacctacagaatcaatttggggagaattgacagtttattatactgagttttctaatccatgaacatggtatgtctatttgtttagattttcatttattttttatcagcattttaaaaattttcagcatccagtcctgtgtatgttttgttaaatgtaaatcgaagcatattactttcgttggagtgactgtaaatgaactttttagttttggttttcatatgttcattgttaatatacagaatacggccaggcacagtggctcacgcctgtaatccagca

SEQ ID NO: 192113 - DNA, 513 bp, Homo sapiens
cgaaatccgggggtcttggcagcacataaacaatgaaatatttgccaaagcagtagggcaagaattgcaggtttactgtcttttatactctcactatgtcagtttccagaaacagctgatatcaccacttgaggcaactgttccctacagagcaagccacattacccactgtaaggtctgggttttaggccttgaactccttcctgcactaagacttcagtctccttttaactgaggagagcccagaaattatctgtttgtgtctccttcaggatgctctatgggtagacctggccttggcttaccaaaccccatgcaaataacctgttacctgcccccttttctaccccttccagtgggccactcctttaacatctcatcttccaggattcaccttctgccaacttctcttcaccacacaatctgcagaagcaaagaaaccctccaaaaaccaactttctacaaaaaagtgagtgtacctaacagaaagcttacatactcaccatatctttt

SEQ ID NO: 192114 - DNA, 241 bp, Homo sapiens
atgcctatttctccatattctctccagcaatgaggactccctttgaaacacctggcttattttatatgtggctctaaaatgtttgtattttacaatgttgataaggataaatattttcacaaatgtttactactcatttgattttttggaccatttgggaatcagtgatttttatttctatgtgtattcacaaaaggtacttataactggttgcagactgtggggagaatatgagcgaaga

SEQ ID NO: 192115 - DNA, 371 bp, Homo sapiens
ccatttcagctcaaccagaatctctcttttttttaaatcaagccaagaacttccagtttttattttttaaacattatttaacaagaaaaacattcaaccaaattaaaaagaattaggttggattaatttaccataaaataatcaaccataaaatatcagcccttccatttagggccagggaggccaatagttcctgtttaaacagcagaattgcactattgatatttttacctatatttgatggcacaaaaacataaaagtcttacaatgtccactgacatccttctctccctccagagtagagttcatataattgcatcttaggtactcaggcttttaaaaatcatcttacattttgaaatataatacaa

SEQ ID NO: 192116 - DNA, 478 bp, Homo sapiens
acagttggaaatgcagttattctgtagcatacaggttaggtaaagtttctttcttctgtttctagagcttgtaaacataggagcgattggaatagtttaagcaaagtcaaagtgagaaaatatgcagtgccagaagcttgtgtgagggagtggaaatttttgcacaaaagccagaatttgactagataatacttttcaaattgtggtccctgcagtggcattacatgggaacctggtataaaagcaaattattgggtctcaactaaaatccactgaatcaaaaaccttagggggtttttgagcccagagatccatgttttaacaagcccctcagtgattttgttatgcattaaactttgagaaccactggactaaattatgttggtttttcaatggcaggtgaataacaggcaatggaaatgcatggaaatgcatttgtgagcacagttttggaacgattaaagcattttatttaggt

SEQ ID NO: 192117 - DNA, 423 bp, Homo sapiens
gttctaccatgtgaagaaacatattttcagataaaaggaataaagccagtatgcacagagtataagtacggaaaggtcccaactatgggaaagttcccaccctagctcttcatggccatccttattcatacaatgcctattatatggtcatatgaaccaataactttttcccctacaggctacttcaagctgtatttctgttacttgaacaccaaaaagtcctaactaataaaatagagaaaccaaattgataaaaattagacatcaaaggattttttcattcaggctataaaagggcctggtatgccttctctggcttagaaaactttcatctatcaaatataatgtccctttcctctctgtattagataaaccccaaaattactatttcattctctttcaatacactctatgcaaatcaca

SEQ ID NO: 192118 - DNA, 395 bp, Homo sapiens
tcgagctcggccagtctgtctaccattagtcactgtcctaccagcctgctcgcagaaaagaaaaagttgcctaaataccatggctccaatgcctgaattcctttaccaagaaaaaacaaaaacaaaaacaaacaagtatattacaagactctggaaaaccgaagtcttacatttacaatgtacttattcagatttgtaaactcctaagtggcaggagaatattaacatgtacttttaaggaattttcatgggcaaacaggttaacttcagtaactacctgtacaaggtttataatgagctgtagacccttttttctaactctcttggccacaactggtatattttgccttcagagtattatcagtgtgtatgtattgaacattggcacagtctat

SEQ ID NO: 192119 - DNA, 322 bp, Homo sapiens
tgagggaaatgattctgaaataattattttcatctgtaaatctagtacaaagagaaaatttctatgtaacatttagaaccttagcaataataaaccaaaaactaagttcccaactcagctctactaaaagcagttcctaaatgaagtgcgaacacttaatcctcctgaaaaggtttctctaggcaatccatgataaatgatctgctgttcttgttacagaatgaattacaaaatgttttattacttattgtggtagtatgggaagcaatgccatattattgttgctgttattttccaccataggcagtcacaacttacaaac

SEQ ID NO: 192120 - DNA, 297 bp, Homo sapiens
actagccaaaccaaaatggcatttggaaaagaaaacccaaattcaccgtgaatggaatccagtgaagaaatgtttaatctagttagtgggtgggctttggttgtcatggaaactcagctctgtcatcctgtgttgttactaggcaggagcagccaggtcattccataaatcatttctgtcatagctgacggtgatgcattccatctgctccatcactgcatgccatagtctgcacatttcaaatcccttccttcaatccatctgcttccccacttcccagccggacacctccccaaa

SEQ ID NO: 192121 - DNA, 260 bp, Homo sapiens
gaattggttggtgacaagtgatgctgacttactcaatagcacgtatgtgcatgttgataacccattgagagtcataatcagatgagtgaagaagccccctgtgcatcccaaccaatccttctgaattcagggttaaagtagaaaaagcatcctcaactaacaggactattcgtatgggtgatgtcatccttctctaaacaattatttgatctaacaaattctagaattctctataaggagctgcctgccttgctctgaaa

SEQ ID NO: 192122 - DNA, 339 bp, Homo sapiens
ggcctcacaaagtgctggagttacaggtgtgagcctgtgtgtcctttctattgaggcttctctccacattttctgatcctcagtctccttatttcctgtaaggctgaggtcccaaatccagcctgtgaaagagaaatgccagcagaggcagcacccagcacaggatctattattgcagcatgccctgtggtcagggccttcagtaaaagcccacagaccctgactactttctggcggactctggaggaaggccttaaccacagacaaaaggacaaggacagtgctgtggagggactgctggctgctgcagcgtgaagagaatagggaatgcactctaca

SEQ ID NO: 192123 - DNA, 237 bp, Homo sapiens
atttacagtacatccacataatggaataccattcagcattaacaaggaatgagctattgatatgcacaacaccggggtgagtctcagacattatgctaaatgaaagaaaccaaacaagcagctatgtattttgtgattccatttatgtgacattcttgaaaaggcaaaactttggggaacagaaaagagatttgtggctgcttgggagttgaactttaaagggtcatgtgggaggtt

SEQ ID NO: 192124 - DNA, 535 bp, Homo sapiens
tcttctttatgattttacacatttatgggcttgcccaacatgtggtttttatgcaggtaccatattagctcgaaaccacgcgtgcactgctgtctcacggtgccttggattcctgcatcactgctgctttcaaagcctcagcttcctcctctatgaaatgggataataacagcacctccctcccatgtggatctaaggtgtaaagtgagtaagccttgcctacagcaagcactgaggttaccgatgctatccatgtacagaggacaggaggctctgagagctgaatatcccgtccgcccacattcatagattgggggtggaactcaggccacctgacttttttctttttttttgagacggagtcttgctctgtcgccaggctggagtgcagtggcgtggtctcggctaactgcaacctccgcctccctggttcaagcaattctcctgcctcagcctcccaagtagcatggactacaggaacctgccaccacgcccagctaatttttgtatttttaatagagacagggtttcacca

SEQ ID NO: 192125 - DNA, 357 bp, Homo sapiens
aactaaagtctagattggttagctgcctgaatcacaagaggaaaggggaaatatttaagagaattccccaacagctttaaaattgctctgtctttggccacatgaaaacaaaataaaatcatataattttattgctataagtttaaacctctaattttacaaatgtttgggaatgattttctcatctcccctttctcattgcccccagtttcaacctacctcaacctactcatgtcctctactatattaaagagaatttgccagtgccagagatctgggcatcatttctgttgagcccacttctaaatctctgtggttgatagccacttctgtccatccttgtggtgtctacccagg

SEQ ID NO: 192126 - DNA, 478 bp, Homo sapiens
ctcaaagtgctgggattacaggcatgagccactgcgcccacccatgctctctcctttaaggatggtggctacccccaccctcagctgtgcctggtttctctgtccagagcctcagattaacccaaccaattacagccacgaagttaaataaattccaagaggctttggctaaaaaggcaagaagttttgcactagagtttctgaattaaaagaaaaccaaaaaagttccctctcatctgccaaaatgagaaattcacccaattcaagcccctttacccctcccacttcgccatgcttttttcccccccgctttgataatgcctcagaacaagtattcagggtccaagtttgttttaaaataacccaatgagctgacagacggagctcctggaattctgcagcttgtgcgagagtccacagatgggaaattgcagtcagttatagggtggtgctattaccatagcccaatttttgaaag

SEQ ID NO: 192127 - DNA, 234 bp, Homo sapiens
cgctcgcgctcctctccccgcgggggcgtcccgggttccatgcagtcccccggctccgccaccccacggtgcaggagcgctcgagaaagcaggacgcggcgagcggttatgtaagcgcaccccccgcgcaccgccgcccggcttgtgcccgccaggcagcagcagccgcagccctaggagagagacgcgagaggccggagccgggggaaaagtcaaaagccccttcacgcacag

SEQ ID NO: 192128 - DNA, 384 bp, Homo sapiens
tgacttgaataactctttagaccaattggaactaacaaacatatacagaacacttcacccaacaacaggggatacacattctcaaacgcacatgtaatattctccaagacagactacatattagaccacgaaaaaagccttaaatgtaagaagattgaagtcatacaaatatattctccaacctcagcacaatgaaactacaaatcaatagcaaaaaaaacaaaaaacaggcaaatccacaaatgtataggaattaatgcagtttttaacaaccaatggggtcaaataagaaatcacaagggaatttagaaaatatctggagataaatgaaaatgaaaacacagcataccaaaactgatggaatgcaacaaaaacagtattaag

SEQ ID NO: 192129 - DNA, 656 bp, Homo sapiens
gtttcccaagagtctctgcctctgcaggaggcttctgcctgcaaacagtgggcggtggtgtgggtggtggttccttcaccaatggttaatcttcttgatgctgatctcctgatagtgagttcttatgagatctggttgtataacaggatgtggcacctcctttctctctctgtcttgctcctacttctgccatatgaaatatctcattgtcgcttggccttctggtatggttatgagggccctgatcagtgtgggcctcatcagtggacctagtcagctgggacttggtcagtgaggcctatttattgggggcgtggtcagcaggggtctacttagagagggtctcattagggggacctagtagtggggtcttggtgagtggggacctagtggcagccacttgtttggtgtctggtcagtgtaaaaactaggctgcaggactttgtcaatggagacctggtcagctggggcttagtggtggccttgtcagcatgggctgggtcactggtgaccagctcaaggggtgctattcagtggaggcctggtcacatgggacccagtcagcagggcctgctggccatgtcctcaccagtgaggcccttgtcagtggggccctggtcagcgcagcctggtcagtggaacctaatcagtggggg

SEQ ID NO: 192130 - DNA, 240 bp, Homo sapiens
taagtttttaagcacacataaatactttctcttaggttatttttcccagattactggagaggtcagtattcccactttcctgccattaagggtatttaggaggaaaatttgagatgtcttattctaatctagtagactacccttaaacatgacctccatcacaatttactgcttagattctctagttactctcaatagactcttaggccattagttggcctgactttgcatgaattctgc

SEQ ID NO: 192131 - DNA, 677 bp, Homo sapiens
ctctgccctctcatttataacatgggatcaaaaatatatatatcattctacctcctcatagggttgatgcagactaaaatgagataatatctgagaaagtgctataaaaacagctgttatcaaaaaaccatttaagtgctttatatatgtcaaactatcctaggaaactattcgaataattttttttctcagtaaaaattatactattgcagattatgttgggggccgaggatcttaaggtacagtagtatgcaatcataggtcctgaccagaaggtggcaggagaaagacttagtcagagcttcttgaggattccgtatttataatcctgaacgaaaagttcattttacttatacattacatataattagactcccagataaattcttcctatccttagctgcatgtggctctacacatttatttatccactgaccatgtcaactcatctgtaatatagaaaatggaaaaaaagaaagggagtaaataatacaatgactactactatatagtgaatacctctgcgtgctagaaaccaaattcaggatttctacacaatattccatttaacatcaatacaattccatgaggtaggtattattattcctcattttaaagatgaggaaattgagattcaagcttttgcaagtgaaaataagcagtgccagagttgcagc

SEQ ID NO: 192132 - DNA, 651 bp, Homo sapiens
tcgaaactagaggatcccccatgttacctcctcatggaattgtattgatttaaatggaatattgtgtagaaagtgctataaaaacagctgttatcaaaaaaccatttaagtgctttatatatgtcaaactatcctaggaaactattcgaataattttttttctcagtaaaaattatactattgcagattatgttgggggccgaggatcttaaggtacagtagtatgcaatcataggtcctgaccagaaggtggcaggagaaagacttagtcagagcttcttgaggattccgtatttataatcctgaacgaaaagttcattttacttatacattacatataattagactcccagataaattcttcctatccttagctgcatgtggctctacacatttatttatccactgaccatgtcaactcatctgtaatatagaaaatggaaaaaaagaaagggagtaaataatacaatgactactactatatagtgaatacctctgcgtgctagaaaccaaattcaggatttctacacaatattccatttaacatcaatacaattccatgaggtaggtattattattcctcattttaaagatgaggaaattgagattcaagcttttgcaagtgaaaataagcagtgccagagttgcagc

SEQ ID NO: 192133 - DNA, 350 bp, Homo sapiens
cacacccgcccaatcgatttactaaaggaagagaaagattatctgctgctctaaatatctctaaggtaaaaaccaaaactaacttatcacactcatatgcacatacaaagaatataaacaaatattttgtatgtgtatgcacatacaaagaatataaacatcagacaaaatatgactaagagggagaaaataaattttcctttctacttagagatgactatgcttacagggagattgctgtgtcagtgtgtctgatatggaagaaacattcagtaaatttcaaggtgaggaatatttcctaaaataagcttgctcaaacacctcaggtattgtgcagttcaacagaatcc

SEQ ID NO: 192134 - DNA, 499 bp, Homo sapiens
tcgcacctaccaacaattaaatgaaaataaagacaaagcctgtaaacacattttaaaatgtcttagtcgatactatctacgtgacaaacagtaaccaccctcattctatagcatgtgactttcttgtgtttagaaaggtagaatcaggctccaattccaactttgctgaacagggccttaaagaatgttagacactttcttcctccacccacattaaatatacaccccctaaaactgttgattcaccggattctcagctgccaaagaaagtagactagcttagtgtttgacatttccttttggcagtcattagtccttaatgtgtcactgtctagaggctaaaccgaatagttttattcatttctactttagcagctcattttcgtgggcctaagaaaatgtatcaaaggctaaatccaccctagaagaaagttgccaatctaagattttatgacacaaaaataacaatatgatcaaaacatctctttccacaagcccc

SEQ ID NO: 192135 - DNA, 666 bp, Homo sapiens
ggtcctcacttccatttcccttcctttacccccaggtaactattctatgtttgataaaggtcttccaaaatatatgtaaagtacagggtgttacctatatacatgattttaatttacctaaaggacattgtgctacagatataattctgtttctgctttcaactaacgctgcttttaggaattgttcgtattgttaggtatctgcccacttcattgtttctaattgctgcattcacaaaatttcattatccattctgttttgttgcatctccaggtttcttctaatttcccactgtgtgagaatccagcattcataccaccacacaatacttacttatgtgccttaggatatatgcatgcacaatttcattaagtactgccaggaatattctaaaatatccgaccagtttatattctcaacactggttcagagcagttccagtttccccacctgttccccagtccttggtatccttcagttttctaattcttgctaacctaattggcataaagtagtgtttcattgtccttgttactaacagctttgatcctaactctttacttccacctgtccacgagataggcgactgtggcatcagagactggaaccagggcaaacaccacctgggaatgcctgaaataaaatgtttgattctacaagacagt

SEQ ID NO: 192136 - DNA, 502 bp, Homo sapiens
gatgctcaaatttctccaaattcaccattagagagttcattgactctgcctcactcgttctttggatagtccttagagatttttttttttaggattttttttttaattattatactttaagttctagggtacatgtgcacaacatacaggtttgttacatatgtatacatgtgccatgttggtatgctgcagagacttttaagaaaactgggggccaggcgcggtggctcacgcctgtaatcccagcattttgggaggccaaggtgggcggatcacgtgaggtcaggagtttgagaacagcctggccaacagggtgaaaccctgtctctgctaaaaataccaaaaaaaaaaaaaaaagtatctgggcgtggttgtgagcccttgtagtgccagccgctcaggagtcaggagaatcacttgaacccaggaggcgaaggttgcagtgagctgagatcgtgccactgcactccagcctgggcgacagagtgagactccatctcaa

SEQ ID NO: 192137 - DNA, 330 bp, Homo sapiens
cccgaagactgtgctaaggttaacttggcactggggatccattggactggtggccaagttgttgtctggtccacatgtaaatcccatgatccctgagttagctccctagtggttgcaaagagtttctgcactcatgcagggcatttgtcctttgagaaagtggccattttagcttcaggaagcctgcccggtgcctagtgcctggtgccacatgagtcttgctcaaactgagaagcagttaacctcttataaaaccagccaccctcttagattgctttcaagtgtctcatggcaatacaaatgtacttcaccattgtcttggggtcactg

SEQ ID NO: 192138 - DNA, 423 bp, Homo sapiens
caccactacacccagataatgtctgtatttttagtagagatggggttctgctatgttggctaggctggtctcgaactcctggcctcaagcgatccgtccgtcttggcttcccaaaatgctgagattacaggtgtgagccactgcgcccagcctgcccctgactgtcttcagaaaagtagaagcaggaggtctgccacattctcatcccacccttgacacctgggtgatgtgctagagcttgaggggaaggtcagaggtaacccagttcgggaagtgaccccgtaggaggagaagaatccagccatgtgacacacagtacgaagagaacagtaaatgcaaagacctggaaacaagaggaacagcaaggacagcatgtcccagaacctggggagagaggagggagcagccggagctgagggcagc

SEQ ID NO: 192139 - DNA, 478 bp, Homo sapiens
atgtctgtagccttgcataaatattactaaataccaattccagaaaattgttgagtagttaagtaaaaagctaatttgtctggttatttccctgttatgttaaaataacagtattttacacatttccctttaacaatattattcttattcaaaatgaacaagtgaacaaaatcatattaaattgttatacctgagactcgtatctttatacttaagcctttaaaatatcacttaattataaccccagagtcattttatgtacagatacaagaaaacaggagaccctgcctgtttttttattgttaagtctgattattatgtacagcacaaggtatcactccggtcgacatgattcatctcagatcataacatatgcggtaatgaaacattttccttcccaacatgtgactgtgtcttctctctgccaattcacagtgcaagatttgctaattgagaaaaatgaaatatagcttctgta

SEQ ID NO: 192140 - DNA, 392 bp, Homo sapiens
cttacttttttttttgagatgaagttttgctcttcttgcccaggctggagtgcaatggcactgtctcagctcagtgcaacctctgcctcccgtgtacaagcgattctcctgcctcagcctcctgagtagctgggattacaggcactcgccaccatgcccggctaattttcttgtatttttagtagagacggggtttcaccatgttggccaggctggtcttgaactcctgacctcaggtgatccgcctgcctcggcctcccaaagtgctgggaatacagatgtaagccaccgaacccagcctacctaacatggcaaattttgtttttttaaatattgagtgggaaaaacagatcataaaaccatgtgcctatgtacgctgatgttttggtgaa

SEQ ID NO: 192141 - DNA, 144 bp, Homo sapiens
attcacgaaacttaggcaatgtcaagttgttgacattagcaccacaaaacttgtaaactgaagatccattattctattatttgaggaccccctggaaatgcagaaaagggactgtcgctgatacctagggaatcagtcttatcc

SEQ ID NO: 192142 - DNA, 336 bp, Homo sapiens
gtgtgtggggacgttccgggagtggagagaagtgtaaagagaagctgctatcctgggaccccaaggccttcaccacagggaggtggcaacatctggccagctccccaaccctctccattctccacgtgctctgctgtgttaccggggtgaaagaacccagctgtgttcatgccattagcaggagctgccattaattagcagggagtagggagtacctactatgtgacaagtactttacacgcgttgcttgatccccacaacagtaacgcagggtaggtgtttttgtccccattttacaggtgaggaaactgaggctgttaaccactcccgtaccag

SEQ ID NO: 192143 - DNA, 926 bp, Homo sapiens
  misc_feature (127)..(127): n is a, c, g, or t
tcaaaaaaaaaaaaaagggcgggcgggggagcactttcagtgttgatgaaaccaaatgctcgtaacctgagaccaccgcccaacacctgcagtccagccttcccccagggttgacagcatcagcctntggaccctgcagttgcagttcatttctgcgcagctctaatcgttagaaagttctgccttaccggctgggcgcggtgggttttactcttaaaaacaaacaataaaaaaaccacacactattctgcagtctcttgaatcttctaagattaaaattaaatctgagaaaatttacttcaactttcccacccaccaaaaaaacagaattaactgaagatatcaaagaaaaaacaatattttaaaggtatcactgaagagcactgtcagtacttgtctgatgagataactatggttctgtcataaattcagattacgcgagagaaatagcttttggccagtggatgtgctcttttgagaaagtcaattctgagctgaaatttcatgttggaacagtttcctctataagactcatcttgaaaggttcccgcagaagataaaatgtcatcctcacactgggcctgggcagtgcgcacttaactgggagggggcacaggcacctcagaacttaactggttttccaaactctcaatctcaaaaaaaaaaaaaaaggcgggcggggggagcactttcagtgttgatgaaaccaaatgctcgtaacctgggaccaccgcccaacacctgcagtccagccttcccccagggttgacagcatcagcctctggaccctgcagttgcagttcatttctgcgcagctctaatcgttagaaagttctgccttaccggctgggcgcggtggctcacgctcgtaatcccagcactttggcagatcaaggcgggtgaatcacctgaggtctggagttgga

SEQ ID NO: 192144 - DNA, 367 bp, Homo sapiens
accaaaagctcatatcccaaaaatcattgcaaagactaatgtcaagaaactttctccctatgttttcttctaggcattttacggttttgggtactgcatttgggtctttaagccattttggattaagttttgtacatagtgtgaggtaacggttcagtttcactcttttgcacatggatatgcagtttctccaataccatttatcgaaaagactatcctttccacatttctattcttggaacctgatcaaatgtgattttttttctaaaaaaaaatttgctttctaatttgtcacattgttctatgtgtctgaaaaaaaaaaatgtattctggccagcatgtcataaatacgagagtaataaatgat

SEQ ID NO: 192145 - DNA, 446 bp, Homo sapiens
tgaaagtaaatggatggcaaaaaatatgctacacaaacagtaggcttataaaggctggagctttattaatatcagatgaggtagacttaaagacaaagagtattaccagaaataaaccagggacatttcaaaatgacaaaagggtcaatgcatcaggaggcataacaactgcatgtttatgcctaataacagaatttcataatgcacgatgctgaatctaacagaattaaagggcaaaacaaacacttccataatcatacttggagatataaaagcctttttcttagtaattgacagaaaactaggcaaaaatatcactaagatataaacttgaacactaccaactatgttgatctaattgatatttatacaaaacgacactcaacaactgtagaatacatcttattttcaagtgcagatggcacattcctcaaaatagaacatat

SEQ ID NO: 192146 - DNA, 368 bp, Homo sapiens
cacagtattcctccttctagatttgtctgatttacttgaggtgccatttagtttgtatttcctataaacttgacattatgtctaatggagtcaagttttgcctaaaatatttcataggtgatgttgtgttgtctgcttaatgttgtatcatgttagacctgttagtggactgttactcatattaagatggctctcttaattggagtgaagataacagtttgacccttacattccatttttttcttgccaaggtccctcctggaaccctccatcctccctttcctctctagactgttctctgtgcctgctgcacagttactgttctggaacttttttttttaacatcatcctgggaaatccttttttct

SEQ ID NO: 192147 - DNA, 824 bp, Homo sapiens
ctcaagaggtcaaaaccagcctgggcaacatggagaaacctcgtcttgacaaaaaaaaaaaaaaaaaattcaaaaaaaaaaattagcggggcatggtggcgtgcgcctgtggtcccagctactcgggaggcatcacttgagcctgggaggcagaggttgcagaggtcactgcactccaacctgaatggcagtgagaccccatcaaaaacaaaaacacaaaatatgactttctgacatttagctagctatcctgaacctctttataaaagaaactgacatctgtaagggcatctcccttcctgcactcaagccactataaacttttacaatgaaaaaaacattggcttaaagtttacagagcaaaccttccctttgcttgatgcttttcctggcaattcctgactatccctttttgattcaacaaataatagtgtttagatctaagttctctgcctttgggatgtaagttttcacctgagagtcatgtctttggaagtgaaaatttagggttgtctagcaatctgaattgtttaggggagtggaacagataattaagagactgatagtctaaaggagggggggaattattttcactagcaaatgaaaaatcttataaaactgtaagatctgcttctgttagtgcatctgcatgtctttacttttatgtatcatatatatgtgatatttcactaccaaaatatatgaaacacctctaattaaccagcttaaagaaaacacaagtgcttaaatcaaatatttcatcagacaaatagaaactcaaatgtcttttagttcatgacttgggtagatctttggtaaataaa

SEQ ID NO: 192148 - DNA, 435 bp, Homo sapiens
ccaggcaatatagtgagatcctgtgtctacaaaaaaatttttttaaataagccagatgtagtggcatgtgcccatagtcccagcaattcaggaggctgaagtgggaggatcacttgagccctggaggtcaaggttacagtgagccacaattgcaccactgcactctaacctgggtgacacagcaagaccccgtctcaaaaaaataaaatagagttaacttcaaattctgtacaatctcctttagaaaaaaaaaggaaaattttctggtttgtaggtttaccctgataccaaaaccagacaaagacagtacaaaatccctgtagacagatagtcctcatgaatataaatacaaaaatcatgattagtgggacaaacatggtagcccatgcctgcaatcccagcactttgggaggccgatgtgggagaatcacttga

SEQ ID NO: 192149 - DNA, 419 bp, Homo sapiens
ctgtctacatttccccagtctgccatcatcatcacactcaatgaataaaaccaaggctgagttaaataaaactaagttaaatttgttatttaattatttgtgttagtagttttctcaaagtcactcggatgaatcatctgtaaggtagggataatgcattactcaacttccaggatcattgggatactttatgaaatgctaaagagctgtgtggcgtccctggcacaaaaaaaaacctcaattaatataagtttctaccatttccccagtcttgccatcatcatcactactcaatgaataaaaccaaggtgagttaaataaaactaagttaaatttgttattttttatttgtgttagtagttttctcaaagtcacatggatgaccaatggcagtgccaaaacaggaatggaatgccttt

SEQ ID NO: 192150 - DNA, 192 bp, Homo sapiens
tatagtcctttcctgtgataggcactgttaatttgtcatgttttatgaatgcttagacatttgaaatttgattacagttgttgatagatcagttgagttatggtagctctgctctttggaataatatggagaagttaattttccattcgatataaccgacctcaaatataaagtgctagtatgttttatatt

SEQ ID NO: 192151 - DNA, 451 bp, Homo sapiens
catttctcacttttactactgcaggcatctcctcaccaggcgccttagttccacagctcactatgcactctcttgcatatgatctacaatattgacacctgggatttctctaacctttattttgattgcggcctttagccctcagagagcttcatggtaacttgctgcattagtgaacttgctaggaaggaaggcatcccctgcttccgatcctttctcatttctttaattctctacttattcatcccctgcttctgcttctgatccttcctcagttctgctttttttttttttttttttttttgggacacaaaactttgtggctggtgttgccccggggggaagggcaggggttgtttttgtggcccctgggaagggcccccccccggggttcaacctttttgtgggccccagttccccaagagtatggtgaaaaaagactccgggggac

SEQ ID NO: 192152 - DNA, 370 bp, Homo sapiens
caaacacaacgcagaagaaaggaaataatgaagagcagaaattaataaaactgaacatgagaaaatcaatgaaacgaaagaactacttctttgtgtgttgttgttgttgctaacaagagcaagtctttgaatttcccaaatgtatttgtggatttgtctattgttgaatagagcattctataaatatcaattagatcctgttgattgatgctgttattcagttctttgatattctcacatattttatcctggtagttctatcaatttggtgagactgacgtttttaattctccaactatatttgtggacttgtctatttcacctttcagctctatcagtttttgctttcatgtacttgaatctctgttgt

SEQ ID NO: 192153 - DNA, 214 bp, Homo sapiens
agacgaaccagctcttacccgtcctacatagtgatgggccaagggttttacctgctgaccttttctctggaaaatttccctttaacagcttctcccaagaaggcttaagtctagtcttggcatttgttatttaccatttcagggggaacagtcttaagcttttaaaggaacattatgctgggcagcgtggtggttcacacctataatcccagca

SEQ ID NO: 192154 - DNA, 664 bp, Homo sapiens
ggaacaaaaaaatggaatccaagcagtaacaaattaatctaactcaattacaaatgaataaaataaccacattgaaggaggtgaaaggaaaaagcaatcttggaaaacagtattttgactgggacaccataaagctaaagacaaaaagagccgtacacaaaatctatattcttggactttaagagtcagcaaaccatgtccataaagggtcagacagtaaagcttttcagctttggaggccatatggtctctctcgcaaccatgcgtgatatataaacaaataggcggggctgtgttccaataaaactttatttacaaaaacatcaagcgggccagattgaacccatgggctacagttcactggcatgtgttctagttaataaagctgcttctcagagggatttgggttagcaaatttgaaactactttgatgttatactagagttgagcaaatgagtaaatgtattacagacagcggagtatggatttctcactgctggagaaaggagttaacaattaaggaaaagaagaaggttagaatgaatgctatggtgttaaactggaaatggaattcatcaataggaactcatttttaactgcatatgcagagagatccatatatagagattccattgggggattccatttgggatgattccacatg

SEQ ID NO: 192155 - DNA, 108 bp, Homo sapiens
aaatctctcccttttccatcccactaaatgccagtaatcccactgtaatcccaccataccatctaaaatgtatgcttcaaggcccagggttaaggcccaactacatga

SEQ ID NO: 192156 - DNA, 424 bp, Homo sapiens
tggcacccaaatgagtgcccagaaatcactctgaatggtcaaaagtaaggcagggcagggcggtagagcacagggtgtcgaattaatttcatgtgggggctgaaatcccaggtctgtcccttcctaactgtgggctgctgctggcaaggtgctggccttgctagcctcagagtcctcatgtttaaacctcagcagtttgttgtgagtgttctaggttacagtggattccaaactagccacaagtgaagcacatggctaaatggtagtcattggtattgttatcaaaagcaagttgcttagctgggtgaagtggctcatgcctataatcccagcactttgggagcctgagacaggtggattgcttgaagccaggagttcaaggccagcctgggcaataaagtgagaacctgcctctatagacaaa

SEQ ID NO: 192157 - DNA, 491 bp, Homo sapiens
taagaaaagctcctaccagaacaagctcctttcctaaattcactgggtgccccaggcactgtgaagactggggccttgcccttgaggagtttataatacactagcaattataaaaatacaagagtatatgtcaggtatacagcaacagaagtaaggaccacagaggtactaacgtgagcctgggtacaggaaggctccacgagggcctatctatataagctaaaatgtttgctatttatcacatatagaacaggaggtgagggtagcactgaacattttcagctgggataacagcttcacagcaaagtgctgagaaaggcaatctgctataggattcaggatggtttggcaggggaagaggctggtggcaccccacaaaggagtggggtatgcatgcatcatccagagtcctaagaactgacagaggaaaacagatgcccatctatgtgagaatcaggtaaattagccccttctcggcacctccctccccc

SEQ ID NO: 192158 - DNA, 564 bp, Homo sapiens
gcaacccgctttgtgcaggttctctgattctaactgtgagtctggaggcttaccacaaggtcctagtcctatcacaatgtaaagttatagtattaaaagtaatttattgaacatcggttaactgagaaacttgacatgttttctagccaacaccgagtactttgaatcaatgaaatattcttaaacccccatcaggctcaatcctaaacatatttgaactacacatccaaaagtgatattttgaaagccagagggacatacaggatttactctgcagaagaaaaatggttccaattatttctatgaactgttgtattgttaacctaagtggcagagttcatcatctttgggacaggggtctgctctggctataaaggcttcctcacaagctctgtcacaatatcatagaacacactgcaaaataagatatggaaataacctatgattattttatgaactttcaggggtatgaaaaataaatgagttctagaatagctttactgaatttcttataatgtatcaagtgacacaagagacactgtgtatttcagaatcagaataaag

SEQ ID NO: 192159 - DNA, 533 bp, Homo sapiens
taaaatcctcggcacagtgtgtggcagctcagcttctaaagcacacagcagctgttgcctggctcgcatcttagaagcttctaagcctgttctctactttgcttcttttgtaccatagccatcttttggagttcttgattttggttcccctcctcatgttgtcacagtactcccaatgaccaacagtctccaatggccattaatatctgaaactcttaactggcaacaagtatgactgctaaactctgcagagctaggaaaccaaatatacttaactctgagactctaggcttcatggtttcctaagtttaaactacaaccaaaaaagtgtgtttgaactaaggactcgaccaactgaataattatattgaaaatatagattcccacctaagaagcaaagaaatagtttttttctaacaaaaatcagtttgttgtctatgtcaactgtcagattgttagaggtatgcttattatccgtatagaaaactactaatttcccatccagttttttttgggttttttttttttttttt

SEQ ID NO: 192160 - DNA, 488 bp, Homo sapiens
tttctggtcctgctgccatcaccttaaagtcaatgcttacaacatctcacctcaactaagagacctgtaacctattggctacagtctgtcccaaacaagaatattccattatgggcttgtatcttgtcagcactccgcctccatatctacaattactggttgcctatgtaataaattccccaaccacagccaggcaaagctagcacattttaatctttccaaaggcagcagctacgatctgcccactcgcaggctctgctgtaatgctttgaatctttttcctggtaaattcctaccctgcagggtctgcgacctcccactctccctcatgggaatgccttctcccacccaatcccatccattctttatagtcgggcatcaccgggccgtggcaagcccccagaatttctccctgtcatcaactccagcccttacttatctgtcccactcaaccggaccttgtaactatatggacacagccctgtgat

SEQ ID NO: 192161 - DNA, 316 bp, Homo sapiens
gagctctgcacctttgcaacccctgcaccggcccaccgccagcacgggcatccctgctcactaaagcgtcgcccgtcactctcccctactgtctgctgtgcctgctctccctctggccctgacattctctctctctctctctctcactctaacagcccactgttggtctcttctcccaattcccaatcctccagcctcactagaatgtctcttttcaggttctgtatgagttgagtaaaaattcttcatgcttggcatcatcttggtctctgaatcttgtttgttcttatcaccacttaaaaattttcaggctctt

SEQ ID NO: 192162 - DNA, 761 bp, Homo sapiens
cctcttcagtccgtggactttcccgctgcacactgccctccgaagtcggggacgcgggctcgtgagatggaagattttcgaggtatagcagaagaatcatttccaagctttctcaccaattcgccattatttggtaacagtgggattttggaaaatgtcactctttcttcaaatcttggcttgcctgttgctgtttctacacttgctagggatagatccagcactgataacagaatatggcaacacagattctcaaaagacatctatgaattacatttctagctacacaaggagactactgaactgtctcttgatatctcatgagtttctggtccatcttaggttaggtgtctgttccaaatacagtcacctgtgactagagttttgggtcattggatctatttagaggtatcctgatatccaggcatcttacttagtagaagggagattttcagttccatccgggtcatctcccggaagccagagtgatgctgaaccaagagagaggttacagcttagcttccaggatgatgattctatctctaggaaaaagagctatgtggaacagtccaacgttgtcaaatgctctcagcaaacagtcagctttacacaatggggaacgcaggacccagaagagagccagcgggaggtacagaattcttgcagggccaagatctcttcaacagggttccaacactgggaccaaagccccagaattcacctattggatttcctttacagcctgggtaataattaggagc

SEQ ID NO: 192163 - DNA, 452 bp, Homo sapiens
cctcttcagtccgtggactttcccgctgcacactgccctccgaagtcggggacgcgggctcgtgagatggaagattttcgaggtatagcagaagaatcatttccaagctttctcaccaattcgccattatttggtaacagtgggattttggaaaatgtcactctttcttcaaatcttggcttgcctgttgctgtttctacacttgctagggatagatccagcactgataacaggtaagatttgtttgagcagatttttttccaggtccataaagcctatagcatgctgatatttatgttctgtttctcagtcaagcttgagctttttgttttatctatgagggggatggccaaatatgtgaaatgaatatagaaaagacagaatttactgtctttttcctcattgctttgccttttcagtgggtaggtttgggcgggtagggatttgagcac

SEQ ID NO: 192164 - DNA, 384 bp, Homo sapiens
ttttgattcattcaggccacatacagcagcaggagtttctgggtggtgcctcaggtctaaattttactgtaatcctacaggttagaaatcaatgagctgatcagaacatatccagtttccaaagatatgagtggcaccatcaatataaattagttctccagtaatgtcaaagggcacacttagcagtgctgtcagaacaaccagaaaaaccacattcaaaagggaacacagcctaaggcacacaactcatgataaatacctgggaaaaaaccagttagctctgcctttagctgttcccaccccaattttcacgattaaaactacaatcgacatactaattagtcggcagacatctctataatgtttatactcctaaaaaacatg

SEQ ID NO: 192165 - DNA, 373 bp, Homo sapiens
gcagcatatatatatttttaagtgaataagtacgaagagatgggaagatgtggtttgactgtaatcccacgtaaaacactctgaccccaatttttaaaaaagtatttcattaaaatgttgtaggagactattactgagaagaagaaagtttctaagttgatgggactcttgtgtctcctagtgtagagttgattttgttttttggggtcaccatggagatgagaagcatggggcttcatggcgtcatctgcccccattgggggagggcttgttggcacaggtcacctctggatcaacctcagcctcatctgctggggatgggagaagctcaagttggccaggggtttaccctatgccctcctcaaccagaatt

SEQ ID NO: 192166 - DNA, 583 bp, Homo sapiens
actagccccgtgtttctgattcagtatcactgaaatactttggaaccatataaagggcaaagtacattccacatgttgaaggacagtgcctggccctgtggggtgtcatccccaagctgtaggcatagtggcaacccaggggttcatctcaactcccatcagagttcaaacattgaattagttgtgcaatggaaggagtattaccaggacccagatgcagcccaaggaaaaaagaaaacaaaaggagacacacacagtaagtggtgtctcattgtgatttggatttgcatttccctagtgattagtgatgggaaacatattttcatgtgttattggtcatttgtttatcttctttggagaaatatttattcaagtcctctgctctcttttttttttttttttttagtcagagtctcgctgtattagtctgctctcacactgctcataaagacatacctgaagctgggtaattcataaaagaaaggtttaattgactcacagttccacattgctagggaggcaaaggaggagcaaagtcacatcttaaatggcagcaggcaagaaagtgtgtgcaggggaactt

SEQ ID NO: 192167 - DNA, 489 bp, Homo sapiens
agatagcatcagataccataggttgaaggctcagtgccacaagatggctcccacttcagatgacaatcagaagccccagatggtgaccaagggtcctaaccaactagctataagttagggttcccataaccccttcttgagctccattagtttgctagagaggctcacagaactcggaaacactatacagtcatgctgtacataatgacatttcaatgtcagcctgcatagacaatggtgatcccataagattataatactgtatttttactgtaccttttctatgtttaggtatgtttagatagacaaatagtcaatccttgaacaacttgggtttgaactgtgtgggtccatttatacatggattttttttcaataaatgtattggaaaattttttggagatttgcaacaatttgaaaaaccagatgaacctcatagactagaaatatcaaaaaaaataaaggtatgtgaagagtacataaaataca

SEQ ID NO: 192168 - DNA, 603 bp, Homo sapiens
ctactgaaacattttctaggttttatgaaaatcagaaacaaccgaaaaattagaaaatgtaaccaaaagtgtgtcttggagaactgagaaatatgcccaaagaaggtgaaagatgttttattggttcttaggaaaccaaaatgcatggagacccaaagaggctggggatagcaagcagactgagtttaggcaaattgtagagcagtatgaagttatctctcagtctgtccttaccacttcctatcccttgtgtttcagctcagcacagtaatgtactttatctaataaatatcagattcagtgaggtttttctgttagagctctaaactatttgtttaagtgcttatgtatttcaaacatctgcttgtgttacatgattgctcacaattttaaaagagggaagcttggctgtggtcttcttaattgaaaaaggaatatagagtaaaaagaaatgatttccatcttgttcaagagtataaaaagaatcctaaagcataaattgtaatacttcaaaatgctataaaaaaataagaatgttgattcttcagtaattcagttcccacaaggtgagtatttctttctatcacagagaaggacaaaaga

SEQ ID NO: 192169 - DNA, 373 bp, Homo sapiens
ggtagagataacagttttacaaaagggaactttacttctgcctcacattactgcttagaaaataagaacttgaatttcttcactactgtccaaccttaaattgttcacagtcttgtattttaaagcatatcctttgaatcatgtgtccaaagagaattacttgtgggtcagagaggtaccttaaaatggctttaaaaacttaaaaccaagattattttcagattgtttacccccttgaatcttaaaactgttcagatatccaattactgagctttctaaattagtgctcccagtttttctaaacttttaactttttttttttttttttttttttttttttttttaataaaaaaggggttacaaggtgtttccc

SEQ ID NO: 192170 - DNA, 905 bp, Homo sapiens
cagctgatggctgcggtcgatcttgaggatccccctgtaactctatgctgtgaccatctattctggtaaccatcaatgtaatttcgccacatacgatcgtcaaacctaaacaaagacaaaacacttcagagaccaattaatttcacagtgaaatgttttaggctcaggtttctcctatttctcttaacactgccctatcagtaatgtaacacactaatcagaatgggcaaggctgtattgatatttcaccaccaagcaatccaagagaaaaaaaagccctgaagctacagtctgactgatggtgaggcaccacaatcttatgaaatacagagagcccagattatcctataacacaattactcccaatatcaccataacccagagaaaacttctaactactgtaccaccagctaaggacatacctttacaccaatgttgtaagagttccttacaaaaggttgaattaggaaaaaagacaatatgaaattctttgcaaaagtttggcaaaacaggatgttagaagggaacatagaaaacctgtccactagaaatgttgagagaagttgcattagtctgttttcacaatgctgataaagacataccagagactgggcaatttacaaaacaaagaggtttaactggatttaacagttccatgcagctggggaagcctcacagtcatggcggacggcaaggaggagcaactcagtcttacgtggatggcagcaggcagagaggagcacttgtgcagggaaaatcccctttttaaaactattagatatctcatgagactcatttgctagcaagagaaaagcacaggaaagatctggcctcatgattcaattatctaccaccagtccctcctacaatatgtggagatgcggtgtttaggagctacaagatga

SEQ ID NO: 192171 - DNA, 178 bp, Homo sapiens
tagccatgacttcccaatggaagaaaaaaagactataaaagcctttgttattggtgcagatagccacagccttggctgttaaagatccctggggtttttgctgacaccaacatcagctgataagcttcacagagactatgaccactgtattctcatcagagccagaacatctgcacga

SEQ ID NO: 192172 - DNA, 568 bp, Homo sapiens
  misc_feature (20)..(20): n is a, c, g, or t
tagctgtcgagaagggtaancgaccgcttgaaaatataggaaagaattgcatttacctaattcaatgaattaaagtattttttttccatgtagatttcaagaatactactttggagctaaaattgctgtttcttctttgtctttgggaaattattatggggaggcattgagcattttggttcacagttaaaattgatgtttatctttattagcagaataagcttatagtcaagtttgtgaatttatgcaaagtgcatatgacctgttaggactttgatgacagtcagataaaagatacttgactttcaatatcagttgttgtaatatttatatttacattatattcacaggggaaaataaaattctgggagacttttatatgagctaagttttgttgattttttttcaaaactgtccagatggttcaagaattactttgatgctaatgccagaaaatacatattatattaaagtctgtttcaggttttcctttttcaaatgagtagtcctttatgaagtaaaaaggagtgatatgaattttcttatactcagacttttctaactagaa

SEQ ID NO: 192173 - DNA, 345 bp, Homo sapiens
ggggtgctggaggacgaggtttgaaggaatcagtgcatctttacagtgctagaaggctacaaatcaaggggaaagtctcatggcaggagtagtcgagtgagatccccacaactgttcttagtttctttgtcattatttcaagagtcaaacagcagtgaagggatctaatttgtcttgtttgcgtcctgggccttggctaaaagagaacaggcaggtggcttcagttctaccaaactatgttataaaatgtggtagtaagagctgaatgatgggaccagattttgtgggttcatattctagcactacgacttacagatgcttgtgctcaaacaattcatttaacct

SEQ ID NO: 192174 - DNA, 161 bp, Homo sapiens
gaactgtacctgttactgggcgttggttaagagcgcattctttttggcatggttatctatcatcttgcttgtcctaagcatgtcctcttgttttcccctgcagaggattggggtttctaggtcattctctgtgatgccgtgattctgcaaaccttatagtt

SEQ ID NO: 192175 - DNA, 301 bp, Homo sapiens
aatatacaaacatgctgtaatttctcccatcttaaagaaactccaactactccctacttctctatttcactgcaaaattgtcaggagtctccaagttctctattccttgttactttattcaatcaagctttaatttcattgctccaacaaaattgcatataaaagtcaccagtgtctaggactcctgataagccaaataagaataaggacctaaatagccattagcaactcaggagtcctagacactggtgacttttatatgcaattttgttggagcaatgaaattgaagcttgattgaat

SEQ ID NO: 192176 - DNA, 377 bp, Homo sapiens
tttctataaagagtctccatttagatgattcaaagagtatccatgaagaaatgcacattttatggaatatacagaagtgtgattagtggtgaaggagggtgaattttgtttgttatatgactatgacatgtagagaacttctcattcaaggtgagtgtgcaaaaatattacaaaacatgtggagaattaactattagagagataatgaaataattatacaaagaaacctcctagagatgaattcaccacagcaaatatgagaaatattatagcaaactaaattttccttttaagtgagtacacttagaattctcaactggctttttaagaagaaaacatccagggccaggcatggtggctcacgcctgtaatcccag

SEQ ID NO: 192177 - DNA, 410 bp, Homo sapiens
caaagttcccagaacagatgtttgtgttttgtgtcctctttcatactctcatttattcttccaccctgaagctacctccgaaatgctaccaatcacctctcaattgccagctgagtattttgttctatttctgctgtcactaatgctctctggcatttgatctttcaactctcttttccaagacttcactatggtggctggccttcttctgatctaactactccatgtgggcccctctttctctgctgactcttgagagtggtcctgcccttgccctttgatctctcacttgacatgctctgccatggacttttcttccttttggccagagttgcttcagtagatctgcagccatgacttttcctctgaactccaacttttccttttccttttcctttcccctttcccct

SEQ ID NO: 192178 - DNA, 654 bp, Homo sapiens
ctgtgccgtattatgacacgtgtgcaacctcaaacacgtgggctcaaacgatcctcccaccttggcctctagagcagctgtctagccaacttatttttaggagccaccatgtccagctaatttttgtatttttagtagagacagggtttcaccatgttgtccaggctggtctcgaactcctgacctctggtgatccacccgcctcggcctcccaaagtgctgggattacaggtgtgagcaggtgtgagcaactgcactcggctggctggcttgtttcacttaacataatgacctccagttccatccatgttgttgcagataacaggatctcattcttttttatggataaatagtactccactgtgtatatgtaccacattttctttatccattcatctgttggtggacactgaagttgcttccaaatcttggctattgtgaacagtgctgcaactaacatgggagtgcagacatctgtttgatatactgatttcctttcttttgggtagatacccagcagtgggattgctggatcatatgatagctctacttttagttttttgaggaacctccaaactgttctccatagtggttgtacgcatatagtacatatagtacataacatatataacatatgtatactacataacgtat

SEQ ID NO: 192179 - DNA, 326 bp, Homo sapiens
cccattgcatagcctccttttccacacattgtattccacattctgccgtaatgaactgtttatcattttcaggtacatagtcactgtttaatccatgtgttggccctcatgggagttcctctgtctgttccttccttcccttcttttctgaataataaatttatattcagccttccagatctacttattttttgaaacctttcctaactaccccaatttctatgccactattccttctatgctactattgtactttatgcatattgttaagaatattgttctgttttttgtttctgtctctccaaatgtgagcaccaaatagacag

SEQ ID NO: 192180 - DNA, 403 bp, Homo sapiens
tgccaataacctcctagagactgcctttggacaaccagtgctttagagaaactgtagattgttcattactgatggctttttttggtttgtttgtttggaggggggttttgggaattgtggtttatgaaataagcaaatctagatgtagatatgaattgatgttgaagtatttggacttcatcctgaagctatagataataactaaaatactttaattaagcagagttgtaatgatccagtttttgttttccaaaggtgattcttgcagcagtgtagggaatggattgaagaaaaacaaggctagggagggggagattagtaaagagactgttttaataatccagatatgaaataatgaggacttctactaatgacaggaggttattggcattgaaagatttga

SEQ ID NO: 192181 - DNA, 437 bp, Homo sapiens
taaatgtcctttccttcggagcctgttactagagactatgttcctttgggagtgtcatgtccttactttttcttgtttcttgtgtccctttgttgatatctgcacatctaatagaatagggatttttttttgtttgttttatggagtagcttttgtaggaagagatctttttcttgtagacgcatctagagtattaattgggtatggtgcgttggctttatttctggtgaactcagtaacatggtccccatgcagtttcttcagctattattctcatcagtgatgtctgtgattgcttcagtgacctaggctgtgggagttttgatggtattggcacaggtttgctgggagcaggggcactggtctggttgtcaggctgggtacatgcagtcacagagggctgacaggctatctggtgggctttctggagaggcaga

SEQ ID NO: 192182 - DNA, 364 bp, Homo sapiens
aggggttcttgaaattccggaagatgggaaaagataaagatgtgaatcagaagctggggttaaagagggtttcttaaaaaggtctcccatagctcttgcgtagagccctcaatagtagggaggtgagcccagaaagctgctcccactccatccacaccatttcggccacatttaccaatggccaccaaggacaaaagaaacaactggaggcagaggaggccatttgtgactctaaattccgctgcaagacatctgcctcacactgactgggagctaatcctaaggaaactatcttctactgcctggacacaactgaagccagggacaaaggattcttcacaaccaagaaaagctggttctgaca

SEQ ID NO: 192183 - DNA, 269 bp, Homo sapiens
ctgcagtaagagttagtataaaaatacacccaaaaggtttaacaaatccatcgtcttttgtttctctagaagtttccatgttaaaagatgtaacattaacaggaagattcattaaacggaaaagacaagaagataactgaaattgtatgagagggaactgtttccttcccaaacagaactgctttggggaagaaaaagtttggtgatggtagtagtagtagcagtattagcaggagtgggagttattgttatttaaaattggaggcaga

SEQ ID NO: 192184 - DNA, 451 bp, Homo sapiens
tcccattcacaccgtccacctaacaccccaggctgagagttgcagcttgcctacgtctttacatcccttgtggcctcagagggttgcttcttgcttgtctgatattatagaccagctccaacctgggcaaaccaacttctctgccatccagtgggctgcaactgtatttttccaacgaggtctgaaccctagcctgaagacaggctccctcttccaagtttgtcattccttgggtactcttccttggccccaggctatcataaaattttcttatatctcatattctttttcttttttttttttttttttgacagtcttactctatcgcccagctacagtgcagtggtgtgattggctcactgtagccatgacctcccagggctcaggtgactctcccacctcagcctcctgagtagctgggactacaagtgtgcaccaccatgcccagctg

SEQ ID NO: 192185 - DNA, 211 bp, Homo sapiens
tgttctgggggaataattatgttccctgtcttgggagcctttcttcagggagcttgatggttccaacccacccaggagcctgggacatctgtgcccctgggcaatcccctgcagtttcctgattccaagatgagggggtagaatccgaagattctccaaggccttgatgagtgctaccagtctgcaaattcccaagccaagttcttcaatg

SEQ ID NO: 192186 - DNA, 342 bp, Homo sapiens
tgcagttcttattttatagcttggccttctccccttcaacccccgaaagactgaaaacccactatctaatgcctaattagaattagccttcaggttacatagtttttgtgactgtttcccttggttatctgccattccttcatttcacagtaatggtagatttataacagtcctcataactgattaaatgtctcaattcttttgctttatgtggcgttcttgggcacttaattatactacattaaatggtgtcttgttgctgtcagtgcagttggattgcagtatagatagcatctttggatattttttaatatgttcctatcatacactttaagcttgtaa

SEQ ID NO: 192187 - DNA, 431 bp, Homo sapiens
acctagaacaatgtttggtatataattggtgctcaacaaatatttgttacaatatttcttttaaaagtattcagggatcttatttcaacatttctatttaccccaaagccatgacctgtagaagacatatgaaaaaactatgcctgaaggtagaaggtgtagtatgagtattggaagagaaggaacctatactattccatttctcgttagtatcagtggtaggaaacctaaaaattgatacatgcacattacaagaagtttgtggctgatgggggcagtagcaatgaaaagaaaaactagatcaatccctgaaatggcaaaagagaaagatctggtcactgtgctgacatgaaaccaaatatatatctcaaacccagaggtgtttacaccaaaaagaggccctaagaaaactctggtcctcaaaccttcga

SEQ ID NO: 192188 - DNA, 248 bp, Homo sapiens
aaactgacgaaaggatgaacagaataaacaaggaggaaaagacacatttttaaatatgtaatttagaaactgtcaaaaaaagtgggacatgtcttatttaactggtgtatgagaagaatggatggttttacaggcacataaatgcaggtacagaaaggtaataggagctttgtattacaatggaacttaaactcctctgggcagtgatcagctaagatggaacagagacagttacaatgcaatgatta

SEQ ID NO: 192189 - DNA, 1321 bp, Homo sapiens
ataattttctttaatactaacaattattctaagagaattcaaagaaaaccctttcatttcagaattttccagtgaagactttcacttacatttttactttttttcctcttctgattttatatctgtggtatcctgtaactgaaggaactctgaaggaactttttggtaggccacattgagaaatccaccaaaattctgataataaaagcaaagcggcaagagtttggtactttacacacctctggaccacttacaaagtattttcttcactgttgcagtttaattagcttcagcatttctcttcatagcagaaaagtccacataagtatccatgttgcctccttaattttagagaactagtcattttctcttttctttaggttgactttgaacaatgaatttattgtaaatgtacagttcacggagagcacagtggcacataatacagggcccagagtcagttctgactttgttttaactaagtcttataaatttaatatccactctttatatttgtccatctttatatcctatagttttataaatgttgatcttctcccagcatatttcctgaccttttcttccctttcctttccctgtaatatataaaacttttttttctgcattcaaacacatttcttgacttttatatattagataattaaaagcttcagcaattcactaagactctttgtcaggtaagagatgtaggactataaccctaacaaaaaaatgtgtaggactgacaaaacaagaaaagtataaactttattcataaatattaatatgagagaagatttgagtgaatgtaaaggcatattgtgttcctgcatgaacagttcttcccagattattacaaatttaatgtaatttcatcaaaataaccatgggatttgaggattgagaatggagatagaacttaaatgattctaaattctacataaaagtgcaataatagctaagaaaatattgaaaggaaagagacttgagacttaatagtacagatgtctgaacactttatagcagtacaataattaaaacatacatgtgcaagaatcagccatcagatcagtttaagagaaacagattgataaagaagcatcacaaactgatgagggagagattaaatcatttaataaatgaggctgggaaatgacttaaattaggtcttcgtcttcaccgtacaccataagataccaagtatgttctgcctgtatttaagagttgagtagggctgtgtgtggtggctctcgcctgtaatcccagcactttgggaggttgaggcaagaggattgtggcaggaggattgcttgagccccag

SEQ ID NO: 192190 - DNA, 329 bp, Homo sapiens
aacaagatgtgattctgccttcagaaggccacgattcagagggaagcagacaagctagatagaccagaaaatactgagagctaagtctgtgattggaaggacagggctggaggagggcaggtccaaggtccaaggctggtctgggaagtgagaagctgagacctggagaccaggaagaggggggatcttctagcagcgagaacagcaacgaaggggcccagccaaaggccgggtccacagtgggccctgacctgtggcatgagtgaatcaatgaacctaaggatgcagacaacattgctagtttgaagggccctgaagtccagaattgc

SEQ ID NO: 192191 - DNA, 302 bp, Homo sapiens
aacaagatgtgattctgccttcagaaggccacgattcagagggaagcagacaagctagatagaccagaaaatactgagagctaagtctgtgattggaaggacagggctggaggagggcaggtccaaggtccaaggctggtctgggaagtgagaagctgagacctggagaccaggaagagaaggattctggaagtatctctcaggcaaatgaaaaatgaatgaatgtgtgaattccaagtttctctcccacttcctccaacacaacaccccaatacagttttttgcctatggaccccttcccc

SEQ ID NO: 192192 - DNA, 628 bp, Homo sapiens
ttcctctcaaatggaatcactgatgcagggaaaggagactaatgagaaaattggggcaagaataagatcagagcagctccagtttctgaggtgacgaactggataacgtcattacactaatcttacctgttaccaaaaattgaggttgaggaactcttcaggattgaggactgagagactcttgctgactgctcccatggttgcttgatgctggacacctctccctggcccgatggctttgggccaccactggcttcacaggagtcccggtggaaggaccagagtgtggctggagctccctgggcagagctgctagactgatgttgaccttactccatgaagcgcctattgttttccctccttccagatgaggaaactaagtcttcatgaggttcggcactcccaaccttgatatgaactctgtgtccaggtccaggtccgtttgattccaaagcacagctctttcccatggaaagtgttatagtctatccgggtaggtaatcctaacgtgtaaaatgcttttagaaaaatgtgactatggttattatgaaattgggattacaggcgtgagccatgtctatattttatttcaaccttagtggatatataagaagattccatttggggg

SEQ ID NO: 192193 - DNA, 125 bp, Homo sapiens
tatttccttctcataattaacctgaacgtgattgagcctggggcaagatggaaaagtgtgtggttagcacctgtaggcaactagagttcaaaacaaacaaacaaacaaacaaacaaaacaggctt

SEQ ID NO: 192194 - DNA, 372 bp, Homo sapiens
tgactcagtgacatagttccgaaggccaccagataaggactaggagacattgtcttactgtaagtgatttgtgtttttattattgctgactttactgttctctgagtcttttgattccttcaaattgctaagaaatctagtattcaaatgtatgttgtgaacacaaaaagattgagaactactgatcttgtgttttagaaaataaactagaagttgacaggttgttctcctgactccttcagtaattctctatacaatttgagtgagtcatttaacctctgtccacttgacaggtgagggtgtggtacttaccgctatgttccttccagaatttaagtaggaaaaattggtaaagtgctctaacttcatttg

SEQ ID NO: 192195 - DNA, 155 bp, Homo sapiens
tcctaattagtttcccctctccagttctacacaccacatcaaactaaccttatttaaaaaaaataaaaaaatttaaaaaataacagatctgagtaggtcacttctctgttgaaaaacttttggtggttttccactctctataaaattaagtctaa

SEQ ID NO: 192196 - DNA, 236 bp, Homo sapiens
aatgtgccctcagcccctcctgctgtgcgtctctggaagcagaggtggcttctatgcatgtataaatgaacacagacacaagtcatcacacctctcctcacccagctccacattccctgtgaccagaccagagtaggccctttgctgcacccgcagcctgctccttctgtcattcaggtctcagttcaagtgtcacctcttccaggactgtcctgtctcactggctacccagcatg

SEQ ID NO: 192197 - DNA, 439 bp, Homo sapiens
cccaatggctgtgtttctggagcgacccaaggcacaggatacaaacctgtccatgccacaattattgcatctactaggacgcactgattaaaattctgttttcccctgagaagacatttatttctcaataaattcaggaaaccatttgacaacatccagtactctttaatgataagaacactcaacacgctggaaagagaagggaacttcctcaacctcataaaggatatttatataaaagccacagcaaatgtcatacttaatggtgactgactgcttttgctctaagactaggaacaagagaaggatgtctactttcactgcttctattcaacattgtactgaaggttctaactagaggaatcagggaagaaaaaaaatcataagtcatctagataaaaggaagaagtaaacccatttgtatttgcagatgacatga

SEQ ID NO: 192198 - DNA, 269 bp, Homo sapiens
ccacacctggctaatttttatatttttagatggccaggagctctcttgacctcaggagatccgcccgtcttcgccccccaaagtgttgggattacaggcatgagttgccacacccagtccctaacatgattattttggattccaagacactgcactgtattgtttcattcctttaaaacctgtagaggtttactttatggtccagtatatagtcagtttttataaatatttcctctgtgtttgaaaatgttctgtattgatacaaaaat

SEQ ID NO: 192199 - DNA, 452 bp, Homo sapiens
attttaaactctacataaagatattgctgtggtttgaatgtgtttgacccctccaaaattcatgtgttgaaacttaatccccatagtggtggtattaagagatagggactttggggaagggattaagtcatgagggttccttcaaaatgggttagtgctttataaaaggactagagggaactagtttaggtccccttgcccttctactttcctccctgtgaggacacagcaacaaggcgtcatcttggaagcagagagcagtcctcaccagacactaatgccagtgccttgatcttggactttccagcctccagaaccataagaaatacattaggccaggcgtggtggctcacgcctgtaatcccagcactttgggaggccaaggtggacggatcacaaggtcaggagatcgagaccatcctggctaacatggtgaaaccccatctctacta

SEQ ID NO: 192200 - DNA, 308 bp, Homo sapiens
agtatggaatttcagtaatggaagatgaaaaagttctagagatctgttgtacaataatgtacatatacttaatagtagtgtacattaaaaaatttgtgaagaggatagatttcatgttatgtattttttttaaccataattttaaaaaatggagagcaggagagaaaagtcaaggctggaggaattatggtcccattacttcccattaaccaaccctgaccaagttatttaacctttcttagcctgtttccacaacataaaatgaattaatcaaaatatccacctgatagagtgttccacccgacaga

SEQ ID NO: 192201 - DNA, 3066 bp, Homo sapiens
aagcatgagccactgcgcccggccagctttttcttttttgatgatacaagtgctaaatgagttagttaccttagttttctctaaagtccccttctgaaggaagccgcctcacctatggtcattgcagaaagagagatctggcctattactatgtgacccttcccagctacaatgattaactggaccagcagcagaatctttatccaaatgaaaaaaaaatgctgacttctggccttggagatagcttttctcaaccatgatgagctgggtcacttcacatccttgctccagattctaaaccaggtaattctaagtactggctggcagtgagagaggaagctgaaaggatacaaagaggcttaaagcagaaggaggcacacaagagccaacattcagaaaagcagaaaacatgagtaagaatgaggtggagagaactgatcaaatggtaagttgtcccttgatagagtaaaagcagagtatagaaacacagagagaaacagctggagagttgcttaagttacattgagatgaaagttcacttggctgctgttgagataaaataatacagtccccagttctggtttgtttccagaacggcttccagttccaaacagaatcaaactgggctgtgccataattccttacttacctgttcctttgcctccttgtgtgttcaaaatataaacaacaacaacaacaaaacaaatataggcaaatgatttcaggtatagctgcagtgaatagtgaacaaaatgctgatctgcactttataaaaagaagaaattgggagaaggaaaatgtcctggatgacaattctaaaaaacattacttattaaatgtaccaaaatgtttaaactgaaatgtttaagacggatcttctgatcttatattgtcctccgttctactccctcctccctccatcctcccaaaatacaagacacctaagaaaacactctttgacacacatagccaatttttgattggacatcccattgagctggttctcagaagcctaatattactatcatgttcctaactgctgtatttgttaagaatgtattaggttgtgtgcaacaaaactaagtaatgtttaaataaataatttttttaacaaagcaagaaatttagaataatgcagttgcagatattgatagtgtcttaaatatagactttgggagactttcataggcttttcctcactcattcatgtccacatttgaggcaggataaagggaagagggatcctcttgtcttaccagataaagtgaaagtctttccagggtccccaacagtcttccatgtatgctttcattgtcaagaattgtgtcacatggtcatttctgcttattagggaatctcaggaattacttggtaatgactggtgctgggcaccacgttcttctgcaggaaaaggagtttctattagcaagtaatagatgttataatagagatgataatactgatggaatggactctgtgacaatatggcaccaaattataaacaagtcccctaaggccataccttgagataagcaatattaaaacatttgcagctcactgactgccagatgttgactgataactctcccacccctattccacaagccataagtacagctttgatttgacaagagactgatttcagtaactttctgctgatgagagactactgatcatggacttgttctggccagtttacagaggctgcacactgagtgtcttagcctctgctgcttcaccttttgacatattgagcttcaccttttgacatattgggcctaaatacgtttaaatgttaagtctctatgccaaagatgcatgcatgcacgtttgcttaatacacatgcaggtgtccccctttgtcaatattcatatctcctcttataacctgttgaatatatatacctagctaacctgcgtagcataaattcctgtcttacctttcctccaaagtgacttgtttttcgcctctgctggagggtatctatacttccctgcaggctgaaacactttataagaaataaagttctctcgaaatttatgaaccttgagacgaatgagatgcagacaggcagcactggagaatgaacactagtcatggatgcctgggcatagcccagagccagggacttccctgggtgaggttgtcctcatactcaactagccatctgttggtgctacaacagctcaagcctaaatcctgaaatttgcacttttcttttagcttgaaaaaaatttaaagctacagaagaattgcaagaattgtacaataatatgtctatatgtatgtatgtatcattgttatataatatgtattatcatcattgttgaactaattttaaatgttgcagacatcatgaccatgaccttatcctaaatacttcaccatatatctcttaagaacaagtatatattttttacataacttagggcaataatcaaattcagaaaatttaattgatttaatactgttatctaatatacagtcatatttcaattttgtttatccttccaatactgttccctccccaccctcccaccccaattcaggagccaatctaggattatgacatggatttagttgccatgtatcttcagtttcaatttttctttgtcttttcataacattgactttttttaagagaacagctggtggttttatagaattccatcaatttgggtttgtcagattattggcttatgattagattcagttatgaattttggcaaggatattgcagaagttatgataggttcttcttagtgcaacttatcacgatacacatgatgtctgtttgtcccattattggtgatgttaacttccgtaacttgctccattgaaaagtacccccttcctttctgtaattaagtaatctgtggagaagatgctttgaaattgtatacatattttatttcctaagaaactttcatctattgataattatttcctgaatcaattattattaaagtttgttgtaaaataatgaatttctaactctattaaaatttctttactcccttccttcttcccctccttcttcgcttgcttccctcccttcctccctg

SEQ ID NO: 192202 - DNA, 232 bp, Homo sapiens
tggtgcctagaagtccaagatcaatgtgttagcagctttggtttcttcataggcctctctccttggttggtagatggctgccttcttgtttcttcacatggtttctttcctgtctatgagaggggccctggtgtctcttttttgtcccaatgtcttcctcttataagaaaaccagccagactggatgagaaacaactccatcagcctcattttaacttaatcatccctttag

SEQ ID NO: 192203 - DNA, 465 bp, Homo sapiens
cttgtccagcgctgggaatgatgaggattcctaaagtctttctattaatactaactttcctaagcattactgccttcaaaacagatgtataaggatattcctataaaagcaggaattttcatatggagttaagagggagcactgttaaaagtctacatgtgaccaccactgccactccatcccctcccttcactcctgccatattctaatgtatttcctagggaggccagtccttgtacaataacggttcagcttttagtggagttaaaactaagcaatattatcttcaagaaacaaacttacaagaacagtaagccttttaaaatcaaagagaggtttcatccattttataccttttggtgatcatgctactactatttggattatgctagacaactctgaaagccacattcattctttaaggtttctaggatactctaaatgtattccttcaatgcagttaag

SEQ ID NO: 192204 - DNA, 418 bp, Homo sapiens
gagatggagttttgctcttattgcccaggctggactaaaatggcgcgatctgggctcactgcaacctctgcctcccaggtccaagcgattctcctgcctcagcctcctgagtagttgggattacaggtgcctgccactatgcccaggtaatttttgtatttttagtagagacggggtttcaccatgttggccaggctggtctcgaacttctgacctcaggtgatctgccggcctcccaaagtactaggattaaaggtgtcagccaatgcacctggctactcttcacttttctgattgtttcctctgttgtacagagcttttttaacttgatgtcatcccatccgtccatcttttctttggttgcctgtgtttgtggtcgacgcggccgcgaatttagtagtagtagaaggcggccgct

SEQ ID NO: 192205 - DNA, 409 bp, Homo sapiens
cagtgtccctcgtcccctcattggtggtagtagttttgattgcccatttgagagtggcatccagtttctcctcttgcgaggcttttaaaacttatttattccgtttttaagaatgttccccggatactttaggcaaattaagatgcaaaaagtaaaacagcactttgggaggctaaggcaggtggatcacctgaggtcaggagttcgagaccagcctggccaacatggtggaaccccatctctactaaaaagacaaaaattagccaggcgtggtggcgggcccctgtaatcccagctactcggggggctaaggcaggagaattacttgaacccaggaggcagaggttgcagtggcccgaggttgtgccactgcactccagcctgggcaacagagtgagactcagtctca

SEQ ID NO: 192206 - DNA, 386 bp, Homo sapiens
tttcatgacctactttttatttaattaaaaagactgttttgtcagttacctttctgtaaataaggctgacattcagccactgtgcaccaatacagctgtatcaattgttggtagccgatattcattctaatttgtgggtcccagctgttcaatatctaggtatctaaagccaacattgagatttatttgaacattgttcaaaataaagaaattgagcacattccccttaatatgaaaaggcttgtaaggactgggatatatcctacttttctgagggataatgttggggtgaggaaaaaaaacctcgccctgtttttgggtgatgtaggagatgagaaaatcacccatgaagagatagtagataaaagaaggtggccttggacgga

SEQ ID NO: 192207 - DNA, 698 bp, Homo sapiens
gtccggtcaggcccagacaggagcctcagggtccagagccttgtgtggcattcagattgtgtgggggagagaggcagaagtatcatgccaagaaatccattcctggaagaggaggaacagttcccaggaaaatggggctgaggcagtaagaccaccagctgggatacagaggagccgcctatagggacagagaaatcctaggcaccccggagtgccagaaaggcggtgggttacttcgtggggcactgagattggctgaagctgtattcccagatcccaaaggtgaacaaaccatgagccccggctctgcagccctgctggcctcgcagagaggcagcttgcattacatggatgcctggactcaggcaagaccagcagaagatcccaaatgctcacttttcccaagtccacacgataaacagtgtgtgcttctgactgtgtcccaagctacttgacacctccactaaacccaaagagttaaacagaattcgtttctgggaagaattccactttgcattctgctacattagttcaaagctcttcttcgaaacaagtttggaaacgacacaaaactccagaaaattcaggagtggcatttggaaaacctgaggctgagggtggagaatggcccacagagatgctgtttgtcttgtctttcttcacacagaggccacccacctaggaagaggcaggagagg

SEQ ID NO: 192208 - DNA, 272 bp, Homo sapiens
gctctagaggatcctatcggcgagatgacgcccatatatttatttatatatttatttattttattttcaggtaattttttaattagaaattccaaattttaaataccacaatatgttatatcacagatgcctctttttttttctttttttttaattttttttttattatactttaagttttacggtacatgtgcacatggtgcaggttagttacatatgtatacatgtgccaggcgggtgcgctgcacccactaactcgtcatctcgcggat

SEQ ID NO: 192209 - DNA, 413 bp, Homo sapiens
gtcggaatcccagacttgctacttgctacttaggtgatgttaaggaggttgtattttctctacggcctttagtgtccttatctgcaaaatgagtctatcctaggtttgttgtgaggctttaatgatagttatataaaatgcctacctagtaaatgtgtgatacttaacagtcaaagcggaagttactattattattttgttaagtgggctttattagaaggaaaaactgtggaaggagaattgttagatcagaaagagaatgtctctagtgtgatcaactaaagattgagagatatgagacaggaaatgtgtgtgtgtgggtgtgggcaggtaggggacagagttgaggagttgggtgccccccttaacgagtggggagaagctggtggggagatagatcccttgcatcagtc

SEQ ID NO: 192210 - DNA, 388 bp, Homo sapiens
acatatactatttcctttttatttttttaaaatttttttgctttttgtctttacaaaataatctcaacataacagtgaagtcaaaggctttccttttcttactctgtatgtatattttccagttggttatttgaggctttgaggtatttataaacacaaaaggctgtatttctgctcccctacctcttcttatgtctgtaatgaagttttgaaatgagtcatgatttttaagtttcttttgcttggtatttattgcctaattaaaagtgtatgagttagaacaggctttttaaattatggagtaaaagaatcttagcatttttgtcccctcctaaatctgtttcttgaatgagatttatcaccatgcctgctgttgtgcaccataacg

SEQ ID NO: 192211 - DNA, 470 bp, Homo sapiens
  misc_feature (332)..(332): n is a, c, g, or t
gggaggcaaaaaaatagcaaagggaacgagatgtaaaacagcagagtgtgtctgccctgggacaggagtgaggagaagagttgcgggggccctcagggatatgtgggaaatcaggattttgaggagtagacttggcttctcaacccaacctcctcgggtgtgatctgcaaacagaccttgtttccctgtggttggacactaagtgtggtgttttttgtttttttttggtcacctcgaggtgacaaaaaaagaggatgaggcaccagaacactacaggcctaaaacatatgctcatcttcctatgaaaggacgtcaaatagagaatttctcanggaatattaagaaaatcatccacccgaaagagaatacatacagtccccaacttatgagggtgggacttcggactttttaactttacaagggatttatgaagtcttaaaggcattttcaacttagaatatttttttttt

SEQ ID NO: 192212 - DNA, 327 bp, Homo sapiens
tcaggagaaagatcagggagtcatctttgactcctgtttttctctccacacctcagagttgacccaagtcctatctgctctttccctaaacaaaaggagaatctgaccagtccccatcactgctcatgccctggtccaggccagaatctatcactcaggttataactggtctccctccctttgcctttgcacccttaggatccattgcaacacagcagattcagcaatcctttctgtgaggtctcttcttcctcagaataaagggcctatgtaaactgatcatcctctcccccagctgcttactcactcctctcccaccacactccc

SEQ ID NO: 192213 - DNA, 598 bp, Homo sapiens
actggtaagcctaactacatatttctagcaggctactcacatggagttcagtttaaatcattcagttttacaattgaaagttttttaacaataagaaagtaagttattccattagactgtgcaactgtttctgcctggaacagaatttctaatgcaaaatgaactgctattgtttttgttcaacctgccatttatgtcaaaatttaaaacaataatgtcaagaaagagctagtaagcaataaagtttaaaattatattgcacagagaaaaattagccattttacaatttacatttaaaatttatttaatgtcattcaaactcttaaaaatgaaaatctacttcaattatcataggcagttaagacaaatacctatttgtttctagtatatgcaatcatatgtcttacaatctaatagcataacgattccctgtacattaaaatgaagtaaaaaatgaaagaggcatataaaaagcacaatattacaattaaaaagggcagccatttaaatgtgtcactaaacaggtaaatactaaacaataaattttttgtcaaaagagtgaaatagtcccatatatatgtcagctgataaatatgaa

SEQ ID NO: 192214 - DNA, 335 bp, Homo sapiens
aaaaggatgtctaagcagctgctgtcatagtgcccatgtacagatggcacttgaaaactgttcattcattgaactaagatttactgagggccattatgtgtcagatactttcctgggtgctgaaaatgtagcaggaataagaatgtaagtgggtagatagagacaatagttagttacataaacaagaaaaaatcagatggataaattaaaatagaatatgacagaatggctgggtcctactttagactgagtggtagaaggtctctgagatggtatctaagctgaggtttgaatgactaaagaaccagctatctaggggatcaaagagaaaaacg

SEQ ID NO: 192215 - DNA, 445 bp, Homo sapiens
tagctgggattacaggtgtcttccaccacaccctgctaatttttgtatctttagtagagacagggtttccccatgttggccaggctggtctcaaattcctgacctcaggtgatccacccaccttggcctcccaaagtgctgagattacaggcatgagccaccatatccagcccaggttagagaattctaaaaccattaattcttcacttaataactggcccaaggagcattttaattttccataccattgtattagattgtaaagctccatgaaaacatgttagaactatattattttctacgtctcaaggcctggcaccagtagccttgtatataatgcaatccaataattgagtgaatgaataaattctctgtgagaagggaccatagagttaatttccgaatgcccaatagtgccaatctcatgattaagttaactctaacg

SEQ ID NO: 192216 - DNA, 283 bp, Homo sapiens
tttgccagaggagcgaaggatgctagaagacgtgtatgaaatcagaataaaatttcagatgaagaagaaagacaatagaagaaaatttccaaaaatatggaatataacattaggctaagactttaaaaattctatgaaaaaaaatcaataatactagtggtcctgaagaatggaagaaaacattttcctttttaccttggggaggataaaatcaaatgtaaactctgtgtcctctaatactgttagaagatcatacatttgaaagctaatacagttctctata

SEQ ID NO: 192217 - DNA, 497 bp, Homo sapiens
cacacctgtaatcccagctacttgggaggctgaggcaggagaatcgcttgaacccaggaggtggaggttgcagtgagccaagattgcaccattgcagtccagcctgggcaacaagaacaaaactgtgtcaaaaaagagtaaaaataaataaataaataaatttaaaataacaattagccaggtgtaggggcacacacctataatcccagctgctcaggaggctgaggcaggagaattgcttgaacccaggaggtggaggttgcagtgagccgagatcccaccactgcacactagccttggtgacagagcgagattccatctcaaaaaaaaaataataatatatcattcatgaacagttgttggccagagattcatttgatggatctgatttttctgaaatagacaatcctgatgattcagaccatcctgctgttagttttgtttagaaataactccaaagacagtttttatattttatgttcaccttgaaaatcaat

SEQ ID NO: 192218 - DNA, 371 bp, Homo sapiens
gtggtcagtcttggaccttggctatggtctgtctgttcagttttcagtcaccattatgctgaataggataaggtccacacttatgcagctcttgggtgagcttaggagttcataaatgactttgtgggtttgctttcctgagctttcacctctccaccatctccctcaaactttctggttcctcaagactcctctttttagttgttcagccagaaagccaacactttagttaccacacattgccatatacttcttcaagtaccccacatcaaggatcaagtggtagtggggaaggggaactaagggagaaaaaggcaatgaggagttttcatacactctttgaacgacagctcctctcttttagagttttg

SEQ ID NO: 192219 - DNA, 276 bp, Homo sapiens
agtgtacctatatattacaggaaccacaagggactattatgtcagaaatggaatgagcaaatgggagagtggtaggaaatgaagtcaggcaagtcacaataggctaacacattacctggaggccatgggaaggattttggctatttctccagatgaaaaggaagccacggcaggattttgtacaaaggaaacatacattccaacttacaagaatatataagttcaaaaggctctatctatcatgttgtgggtagatgatagatgggccaaggtaaa

SEQ ID NO: 192220 - DNA, 310 bp, Homo sapiens
aaaaaggagagtggtattccagaagcaaaccccggaaaatgtttcaagaagagactgatcaacccatttcactggaatgctggagacaaaagcttgactggaaatacagaagtaacgatgaataaatgacacagtaaacttaactgttttctttacaagcaatagggaagcaaaacaaagcaaaatttaaaaaccccttaacagtctagcaccaacagtccagagcagggttcctcacccttgcactgctgacccagggtgtttagcagcattcctggcctccaggagaggcctgcagcaccctcccact

SEQ ID NO: 192221 - DNA, 191 bp, Homo sapiens
ctaagtcggcgcagagagagagagaaagagatctatttgtttgggagaaagtacaggaaaaaaacaagagtctttatctagtaatccagagaactcttggattttgtccaagagcgtcaaggtggtacctcttaagagtctgcaagaaacacagtcctgctgggcttgaggtcccccctaaagcagataca

SEQ ID NO: 192222 - DNA, 387 bp, Homo sapiens
cacacacgcacacataaaccacatacacacacattttgaaattggtagtcactcagtttctcaatcttcctttaaagactaatttattgggctagaatttatgggtgtagttgtcaaaaattcctgcatatacccactcaggaaatattttcccaaatcttctccatctcaactctgtgaggcattggaagaggtgcttttaggatagactgatgactcatatatgatgtctgccctcagggagcacacagtttagtgaggtaaatgtctcatgaatattccacaagatccaccttgataatgctctaaagttactatagagggctgaaggtgggaagatgctttcgtctggtggcaaaggatagtagtgtagggtgacatgggcct

SEQ ID NO: 192223 - DNA, 159 bp, Homo sapiens
tgcccggctccgtggtgcatcctccagcctgctgggtgtctgctattgggacctgcaggatccccaggaacctttagaactggtaaggtcagaactgatgggcctctgaaatcccaaatctaacgccagagtccacatactgttcaatagcaaacactt

SEQ ID NO: 192224 - DNA, 302 bp, Homo sapiens
tcacctgggtcccaagcgtaaggcattgctgtacatggcggctctgagcacaatgctggtgcaggccctaaacagaagctatcatgactattacacaattcagaattagaaaatgtagaattttccacgtatttatcagaatttttcaaaactgaaaaaatatcttaaaagccatctcgttagaattcacatccaaatcttaaattccttgggatacatcctgattaattattgccttcattcatcacattcagtcagcggattgggccccaagaagatgataaactgagcatgcgattcct

SEQ ID NO: 192225 - DNA, 401 bp, Homo sapiens
agtcacagtcaaacacccccacacaacatcctcaaaagtctgaaatcttgtaacagctgagctatagttaaagctgcaaggctcacagaatcatcaaggaagccagaatgagacaatgcagataggaagtcccagcagttaatctcaatccttctttcttcatttcggataagctcagatatacctgatgtgggatatagaaagctacactggagcaagctgggtcttctgctgaattcgtcatcaaataccaagggaaaacaaggggtggggtggattttattcttaaaaagcctcagaagttactgtattataaagggacatgactgaataggtaagaaacggattcttcattgtgaattttcctgatggcttctgcaaggctcatagagatgttgatc

SEQ ID NO: 192226 - DNA, 487 bp, Homo sapiens
gagttactgatagcaatggaagggtgtgtgtggtggtaaccatttgggtgagttgcaggcagcaaccacaagttgaagcaatcatgtaataccttctatttccaacattcacaaacacccccaagatcaaaatgtagacatggggcagtcaaaatgctttcttcctccagggaccatttaaatcagagccttatcccagggtttcctaaagaacactttttttttcccccttgaaaatctctagcccagacatctgtagttggatagttgctttttccctgtatttgtattttgatgataaaatggtaggcccaactataaatggtaggtgtcaaagatccattcatctgaccttagaaatgagtcatggagggttgtatggaaatagagaaattcttcaaatagcagtctttactaggatttattttctgtggaaggtgtacttgctgctctctgctgagaattactgctgtaaagtagcaacatg

SEQ ID NO: 192227 - DNA, 448 bp, Homo sapiens
ctaaaatgaaccctatggagttagattaaatccagatacactgatgtgaattcatcatattcagaatagatagacagatacagaaatatagatgccaagtgtgtgtgttcacacgcacacacaaacacatactccctagctctgtccaccacgaggaaatgaaaacagtcccaaaatagcaacacatatatccatgacgaaatcatggtttgttaaccacatttctcctttaaaaggttttgaaataccatgctcctttaagaagtgactaattcccggggtggggcagattaaagtaaaggatgagcctgggctatcatgttttgccagagaacaaggaagtgctaaaatgatgagaaaatctcaagggggatcctattggtcaaatttgagacaatctgaacatcaaaaaacagatgacaacattgtgaatatcttcattaacagt

SEQ ID NO: 192228 - DNA, 545 bp, Homo sapiens
ccctctctcattttggagcaaacatgcaatatagtattattatttccacttacactttggaaaactgaggcttacaaaaagataacttgcctaaagtcatataaccagtctgcctaacttgaaagttcttggctttttccccttttcccctaaacaaacaaggtagaaccctggggcatgtcaacacttaagacataatcagagaaaaagaagtcaacaaaggagactgaggagtacgaaggtaacaaagtggtgggaggagacagcaagtgaagatttgggaagaggggagatgacagaagatgaggatgagaagtagattagaatcaaattggccatctatgccacgctaaagaatctggacattgtcttgtaggccatgggcctttaaaaataagtcatgattgacagcacagaggacagttttggatagggaacttttaaaaaattattaatttttaaattgatacataattatatgcatagggtatatgtgatattttgatacatgcatatgtgaaaatcaaatagggatatttaggaca

SEQ ID NO: 192229 - DNA, 381 bp, Homo sapiens
gtaaataattgattgctctattcaattcttgcattgctttctctttccctaaaccatttccttctcatttcttccagccttcaactgttcctcactaattagtaaacagttaaatattttggcaaattggcatgtcttagaaaagcaacttgcagcatagggtgggtgaaattgtcagtgaacttcaagaaagctctgggcccactggccctagtgtccctgttgtacaatatctcttaagggagaaaactttttcttggaaaaaaaagttttaatatttcttttgtctgtctttggtaattagttggctttactctttttaacaagccagctttattagctgggtttctaaaactatcctcaaaactttgacgtgtttat

SEQ ID NO: 192230 - DNA, 345 bp, Homo sapiens
atcagccacagtagttggtgagaaaaaaggacagtatttacataatgacagttgtcaatgggctgtggaaaagtcaagatagattccagcagtgattttaagatggaaaatgagaaccatgcacacagtcttcaaggtgcaatcttccaacatagttctggaacacagctggctccttccatccatggggaatgaccacatttgtgtgctgaaataacatttagtactagagataaaactggaataagtgatctaaactttgaaatgttttgaatgacctttggctacaaagtcaaattataatgctttctatttcttaagacaactctttatggaagttctagt

SEQ ID NO: 192231 - DNA, 185 bp, Homo sapiens
aaagcaaaatgttcctaaaatagactctttaaaaataaattcatttctaatatcaaagttggaaattttgggggacatgaagaatataaaaaatggaaaacgtctaatctcatgaatctactatgttagtttatttttaaatgcaggaatcctttacatggcattatgttgaatgaaacatgttc

SEQ ID NO: 192232 - DNA, 341 bp, Homo sapiens
acacagactataccatttcatccccacaactttcctgagaggtggagatcatcattctgattgaaaagtatggaaaggtcaccaaggccacatggctggtgacactggaggatctgcccaacattcacacccataggggtgatcagtatagcatgccctccatatctgagggctccacacccatggattcaaccaactgcagatcaaaaatattcaggaaaaaaaataggatgcttgtgtattaaacatgtatggacttttctccttgtcattattccctaataatacatgataacaactatttacattgtattaggtgttataagtaatctacagatggt

SEQ ID NO: 192233 - DNA, 415 bp, Homo sapiens
tcaactttgcacatacagtgaaaatatgcttcaaaatcaagagtaaaagacattttcaaataaatgacagcttacagaattcatttagaacacattttcctcaagtagatgtatactacaagaaattttaaaggaggttcttcaggatgaagggaactactaccagacggaaactcagatcttcaggaaggagagaataccagaaataatacatgttaaaataaaaggtgtacattctttattcttcttataatttccttaaaagactatctttaaaaactgtatgcttaaaaccaaaaaataaaagacaacaaaagcacagagaatacagaagttgagtaagagaaattaagcagaaaggaagaagggtcaggtatagaatgtgaaatggtacaatactgactatacacagact

SEQ ID NO: 192234 - DNA, 329 bp, Homo sapiens
cagaaacaaacacctttaacaggtatataattgtgttgagtccctttttctttggtgaagggtttattgagtctctttaaaatgattcccctagagaagttgttaatgggttataaaatacggttagatagaaggaataagttgaatatgttcaagagacaaattgtagctaacaatagattatttaatagctagaagggaagaatttgtatgttcacaacacaaaggaaagataatgtttgaggtgatggatatcccagttatcctaacttgatcattccaccttttatacaggtatcagaatatcacatataccacaaaatttctac

SEQ ID NO: 192235 - DNA, 170 bp, Homo sapiens
agcttgttgctctgctcctgggatatgtaccttatacacatgattgaagatgctcaccacaatctccacattccagcctgggaaaaagggagggaggggatagagaagacaggtgccttccttttagggccacaattcttcttgctaagttctcattagccagaccttgg

SEQ ID NO: 192236 - DNA, 363 bp, Homo sapiens
ttgatgtccatttctctggtatgcctccttcactgagctccacttctcacctcctgccctgaatacaaacaggcccaaagctccactcaaagtcctctgatcttttccccacacatcctctctcagaatctacattaaagggctttgcttgcgtttgttgcccaatagctgactgccaaaccaacatctctgtgttaagtctctattttgggttctactttgcagaaagcctgcctgctagacaccaccaggtggacggcccatcactaccccaaatgcatggtgtttctctggtcgtgaatgcgggtcctcctctacatgtcaaacgtggaggtgtgcgagttgtgggcttggccgtggtcg

SEQ ID NO: 192237 - DNA, 124 bp, Homo sapiens
agacataagataaggcatactggagagaaaggtttgaaatgtaaagaatatgtcagatcattttgcatgctttcacacctatctcaacatgaaagaatttatactagagagaattcctacaaat

SEQ ID NO: 192238 - DNA, 272 bp, Homo sapiens
ttcagtacaaaaagactccaccctacccagcttctgccgcgacttttccttgctctgaaaactccagcccacagaacagagctcctctaactaaaatgcctttagtgctccgttttaagcattcactcttttcttattttaaacgtcccactctcacactcagccaaaaggacttattgtaggctttcccagaaaaatttagtagtgtactctctccaacggtggatctagaagctccggatttacaaacatcccaattgtctttcaagtcg

SEQ ID NO: 192239 - DNA, 390 bp, Homo sapiens
ctaggctcgacgacgggaagttattatgtaatttgtctagatataaaagaaatttagaagatggagttacaaatgctggaactcttctttaccctttttgttagcaagaaaaatctacagacagtaataagtagctacatcgttttgtgaaagtgatactattatgggatttttcaattggaaaagctctcctgtacttttatatcaaaatgccgttaagtgattatgtgaccattcccgcagaaatatatagttactatgaatgcaaaataagtcaggaggctaatttgttcatattcaaatttgtcctttgctttctaattctacaaaggcagtttacctttcagtgtcctcaagatgtaaggatttgttttcagcatgtagttctgc

SEQ ID NO: 192240 - DNA, 403 bp, Homo sapiens
taagtgtcgatttctcgctcatgttctaaatgttggacttgctttatcagaaagtagaattgtttttttcttttgataagatgagacttgataagttttggcctaaggattttatgttttcattaaacttgtaactcttcaaatgatgtaacaagtctgatgtatacaatcaaaaatcctgttaggattggagggtcatgttaaatggaaaaatactattcttggagataacttggaaagtatcatggtcaaactcgggaacatgaatattttcctttttttttttttttgagacaatcttgttttgtcacccaggctggagtgcagtggtgcagtcatagttcactgcagcctccaactccagtcctctggcattagcctctagagtagctaacactacagg

SEQ ID NO: 192241 - DNA, 616 bp, Homo sapiens
agagctgttctagagtatccccgttatccagtagaagacacgctgtggtgctctgtcttctgtctgttctgtgtctccctctgagggcagggacacttgtgtgttgtgttgcctgctgtatccccaccactaagcacacagtaggcagtctaaagtccttgctgctagctgattataagttcaagacaaaagagggaggagtctaggattgccacctggagctccaagtgcagatagggaacagccaggggctgcaggtgatacccaggcctggggctcaagcgaggtgtggggtggagggaccacatcgggctcatctacatacggggcggcagcagagaaaaaggctctcaggccgggcacagtggctcacacctgtaatcccagcactttgggaggccaaggtgggtggatcacctgaggtcaggagttcaagaccagcctgactaacatggcgaaaccccatctctactaaaaatacaaaaattagtcgggcatggtggcaggcgcctgtagttccagctactcaggaagctgaggcaggagaattgcttgaacctgggagacaggggttgcagtgagctgagatcttgccactgccctccagcctgggtga

SEQ ID NO: 192242 - DNA, 316 bp, Homo sapiens
ttcggccaaagagagaaggagagcaaaagagacagggtctctagctctgggaactcacaacccagccatgaacagagaaccccaggcaggtcaactggcagtggggattccaatgaagaatggcctcagccgacagagccgacagggctttctgactgaatgcatgtcggggaaggagaatctggtgatagtgctgaggtttctaacctgagtgcctgggagaatggtggtaccattactaagatccggaaaaagcagtcttggggaaatggcagggttgtgagttcccagagctagagaccctgtctcttttgct

SEQ ID NO: 192243 - DNA, 434 bp, Homo sapiens
gcataacctatgccccaaacctattttctaggatgaagtgaggcagtgtgtaatggatggtggatctctggattagaagtcggagctctatactagtagtatcactaactacagtgttggccatgggcaagccatcgctagtctcatgtgcttcagctgtaagatggaggaggttgattgctatggtctcacagaattgctctctttgaagagctaaaagaagaatgaagctcgtgtaaacagacaacccgagacagaaacctcgaagcctgagaggagtgggagaagaaagagagagcgggagagatgtaaacgcctggactaaaaacatgtattggcatatggcaggcaagcatatttaggcttttgaggataacttctgcaaaatttatctcaatctattctctcacgctcttgttatagagtttctatcc

SEQ ID NO: 192244 - DNA, 484 bp, Homo sapiens
cagaggaggttgtggttagcggggctcctcccagaacatggggcccagtcgttctcagttacgtctttcctatagttgggattttgatcacacagttttttagtaaagccaggccatcatctcccacattgggctggcgacatcctttctggccctgcagggtgcagtgtgaacctatagagcagcatgggagcggggctcggggaagttctggagctgcagtgagccagtgagctcgagccagctctgacaggctgatgtgagggaagccgctgggccgcaggtgcttgtttctaggatgtgtgggacctgagttgggctttgaacaaggcagccccagtccttggtgatcaaggaaatctgacctgcctttttcgtcgatgttcacattcaccacgaatttgcaagctgctttcctcaatttctttctgtcctgagtgtgaagagaaagtggagttttctgtgtggcgtgggagctgcaggt

SEQ ID NO: 192245 - DNA, 631 bp, Homo sapiens
tagtgcgagtcaattctccaataaactccccttcatatgtacatctaccctattagttctgtccctctagagaaccctcattaatacaatatggaatgataaacaccaaacatgaaatactgaagacgatatggaacgataaacaccaattacaggatactgattccctctgaaagaaagagaaggaaaaagaagtatgatagaaatgaggtccacagagactgcaaatgaatttgtaatatttatttcttaagctagactatagttacagtggtacttactatcttattcactgtatcttttcatatgtataaaatatttaatcatatacacaaaaatgatagtagagggcatcattttgtaaaattcaaacaaaattacctactgtaatgtttctaggtgtttttgtctagaccctataaggtaggcactgttatttaccccatttcacaggtgagaaaagtgagtcccttgcccaaaattacacacacaataggtggcagagccagtatccaaaccttggtagccttgtttcagagacccaagctttcaattactaaaccaagcaggttgttgggaaataacagaatatacaccaagaggagatcggataaatgcaatttgctcgttc

SEQ ID NO: 192246 - DNA, 340 bp, Homo sapiens
ttcagcatcacactcaggggtatccacggctgcattcagcatcatgctcaagggtatccagggctgcggggagctgcttcagttcatttacctccaagtcacctccctccctagcatgagccacttcttcgagggcaatcttggcttctctcagcacaaggcgccctccttttcctccacagagacttgtctctacctctgcctcttccagcacagtaaaaagagcacatgaactcttgagtagtaacaccctcaaataatatccctacacaaatatgttcacccagtccttgctactggtttatttcttgaatggctactttttttccctccttacttt

SEQ ID NO: 192247 - DNA, 226 bp, Homo sapiens
cttccatgattttttgacttagcacttatcactatgtactatgtattttacttaactgtcttatgttctacctacctcactagcaataagttctatgagggtagagattattgtctgttttattttaccctttatttataacacctaggtctgtgcctgacccgtaataggtactatatcaaatatttggtgaaggatgaacgcagaatacaaaagaaagcctcag

SEQ ID NO: 192248 - DNA, 250 bp, Homo sapiens
tcccaaggcagagggattggcaagtgatgtgaggggagcttggcacattcagggaatgatgagaaggctcatttggatgaatgagtgaggaaggaagcacatggaaggtagcacaaggccagaatacaggatacctcatgaaccagtacaaagaatttgactcttactgagcaagatgggaagccattggagggttttgagccaaaactgtgcagtagtaccgtttacattttgaaaggatcactgtggc

SEQ ID NO: 192249 - DNA, 265 bp, Homo sapiens
taacttcaacacaaaacaggcaaaggcaagcaccagaaatttctcatgtttctgggaccccaacaattttcattatattgctttcttctctgaacctactttaacttgtataataccagttagatttcattttgtgttattactaaaccctttaaaaataagattatgagccttacacatgggaggaaattactaagccaaatttctcatatgttgtacaatgtgtactctgtatatttagatgtctgagtatacaacttaagct

SEQ ID NO: 192250 - DNA, 414 bp, Homo sapiens
tgtctatgccttggccaaaggaaacagaaaacacataagatattcctatatcatacatgatgaggtacagggaagaccggtaaggataaactcgctcttgcttgtcatagttctataaaataatacaacaaaataacttgactaattgagcccataagaaaacaatttctaaaaatattttgtgtgtgtgctagaaatcgtcactagcaccagttagtgttgaagccaaagaacaatgattaattcacttataggatttgggtcagttattatttattattgttattatttatccttagaattgggcaaatattggagttatacaatcatattatttcaaggaaatctccccaaagaaaataataaccttcatcaatatgtaaatccattctacttggcctttgtgaaatctaa

SEQ ID NO: 192251 - DNA, 572 bp, Homo sapiens
agcctccttaccaagcctaattttaagtggggagaatgagcatcattttaaatctgtgtatctcttaaaattctggttatacaattcattttaacaacttaatgaacaggttttaaagttttggttacttggaaatgtaaattcatacaaccactatggagaacagtttggaggttcctcaaaaaactaaaaatagagctaccatatgatccagcaatcccactgctgggtatatacccaaaagaaaggaaaccactatgtcaaagaaatatctgcactcccatgtttgttgtagcactgttcacaaaagccaagatttggaagcaacccaagcgtacatcaacagatgaatggataaagaaaatgtacatatacacaatggagtactattcagtcataaaaaagaaagagatcctgcaacaacatgttgatccacacaacagcatggatgaactggagatcatattaagtgaaataagccaggcacagaaagacaaacatcccatgttctcactcatttgtgggatctaaaaatcaaaacaattgaactcatggacatagacggtagaaga

SEQ ID NO: 192252 - DNA, 469 bp, Homo sapiens
caataaacaaatggctgattgtaatgatgaaaaagatccaaatttctccagtaaagttgggggagaaatgcccagttacaagcagctgaatggaggtcagagagaaccataatcccagataaaaaataagcaggcaaaattttctgtagcacaatccctctctcatttcaagaatctgcccacacgctcctcacacctcctcctctcctgtcactaccaccatgatcttgtggttacacaatttcattcagagtcaaaattagaaattaactaaagaagctatggtatggtattttattctaagatgtcatctcttttcaaatgaatcatcaatttaataacagttttccaagtgttaaaaatgtggggtaaaaatgcattttagaatcaaagaaatgtactaatccctatgaagatggtaatccaattaaagtgtaatttctccatatttgaagacattttcagtgca

SEQ ID NO: 192253 - DNA, 105 bp, Homo sapiens
tgtattagaaatgcaacttatttttgtaaactgattttatagtgaaataaatagtagctaaattctcctatttttactaattctattatttctaattatttatta

SEQ ID NO: 192254 - DNA, 428 bp, Homo sapiens
aaacagctaacttgatacatctaaacacctcatctctataagcttccatgatactcttctctagctttcttaactcactaaattctcttaagctatctagagctcctcagctgtcactacccctttgacttactttatagccctctgtactccctaccgaaataccatacaatcccatgcctttaggtgccacctatatgctgatttatctatctatctatctatctttctttctatctatctatctatctatctatctctctatgtgtgtgtgtgatctatctatcagggtgtgtgtgatctatctataagtgtgtgtgtgtgtgtgtgtggattccttatagttttctgtgtacaagatcatgtaatttgtgaatagatgtagttttacttgttcctttccaaacttttctttttcttgcctaatt

SEQ ID NO: 192255 - DNA, 406 bp, Homo sapiens
atatgaccgagcaattccattcctgggtatattcccaagagaaatggaaacaggtgctcaaacaaaccttgtacacaaatgttcatagcagcattatttatttattttttaactttgcagcattatttataatagtcaaaaaatggggaaaaggcaaatttatatcacctgattaataaacaaaatgtggtacaactgaatattattaagctgtaaaaaggaatgaagtactgataaatcaatgagccttgaaaatattatgctgggcaacagaagccaggcaccaaaagtcatatattatatgatttgatttatatgaaatatccagagtaggcaaatccatagaggtagaaagcagactagtggttgccaggggctgggggaaggaagggatggagaatgacca

SEQ ID NO: 192256 - DNA, 424 bp, Homo sapiens
aggcaggggattctagggtatttgtgaacgacattaaaatgttgggatatcatttctaatttggaaagcgaggaaagtggagtctgatagatggagataaaaatggaggagtcagaacactggaggcacatggtaaagtttaagaacagttgctgtgagggcatttggcaaacaagttggaagagaagcagagtgtggatgtggagttgtgtgattccactgataatttcagaggtggcaatctgtttcctttcattggagaaggagctccttaagaacaaatgatttatatacagctctgttgagctcagctcagccagccctaactactgcctagaagcctggtctctaacattccaggtgtaccctaaccttctcaaacttctagctcgctcattctcgtccaaccaaatcttaatgccta

SEQ ID NO: 192257 - DNA, 794 bp, Homo sapiens
ttcactatgggcaagtttccactttccattcttctttcttttcccttagcctgtattcttaagaacttaaaacctcttcaactctcacctgacctaaaatctaagtgtctcattttcttctgcaatgccgcttgaccccaatacaaactcgaccgtagttccaaatagccggaaaatggcactttcaatttttccatcctacaagatctaaataattcttgtcataaaatgggcaaatggtctgaggtgcctgacatccaggcattcttttacacatcagtcccttcctagtctctgtgcccagtgcaactcattctgaatcttccttctttccctcccgcctgtcccctcagtcccaaccccaagcatcactgagtctttctaatcttccttttctacagacccatctgacctctcccctccttgccaggccaagctaggtcccaattcttcctcagcctcccaagtagctgggattacaggcacgtgccaccatgcccagctaattttttatttttagtagagatggtgttttaccatgttggccaggctggtccctttttttttcatttttaaaatgttgtcttttaaaatgcactagttttttattttgatgaggtccagtttatcttggttttggaatagtatcgaagaaatctttgcctaactcaaactcttgggggaatattttctcatgttttgctctaaaaaaatttattgttttatctcttaaatataagtctgtgatccattttgagttaattttgggtgtcaggtcagggttcatctttttg

SEQ ID NO: 192258 - DNA, 474 bp, Homo sapiens
gctcctttttttctttattttattttatttatttttttgagatagagtttcactctgtggccctggttggaatgcagtggcgtgatctcggcccactccaacttctgcctcccggttcaagtgattctcctgcctcagcctcccaagtagctgggattacaggcacgtgccaccatgcccagctaattttttatttttagtagagatggtgttttaccatgttggccaggctggtccctttttttttcatttttaaaatgttgtcttttaaaatgcactagttttttattttgatgaggtccagtttatcttggttttggaatagtatcgaagaaatctttgcctaactcaaactcttgggggaatattttctcatgttttgctctaaaaaaatttattgttttatctcttaaatataagtctgtgatccattttgagttaattttgggtgtcaggtcagggttcatctttttg

SEQ ID NO: 192259 - DNA, 474 bp, Homo sapiens
agccttcataaaaaccttaaattttggaaagcttctgagttggtgaatacatggaggtgctggaaggaaggcatgcccagagaggacaccccttctcccatttcttgccctgtgtacttcttcatctggctgttgatttgtgtcttttttaataccttttgtaataaactgttatatgtaagtaggcctgttgtggtggctcacacctgtaagcccagtactttgggaggccaagacaggaggataacttgagctcaggtgtttgagatcagcctgggccacgtggagagaccctgtctctacaaaaaattaaaaaagaaaaaactagccaggtgtggtggtccatgcttgtagtcctcactaccctggaggctgaggtgagaggatctcttggggccaggaggtcaaggctgcagtgagctgcgttagtgccactacgctccagcctgagtgacagagcaagaccttgtctca

SEQ ID NO: 192260 - DNA, 358 bp, Homo sapiens
aagataaatgatactctcactgtgcttcagcttcttactctataatagtagttttcacttaggtgagcctcaagcacctggagagctagtaaacatgcaggtacccggaccccacacgcagagctgctgattgagtggacttgtggtgggactggagaatctgcaattctaacaagcacccaagcagtactgctgctggtagaccagtgagcacacttttcgtagcattcatctataatatttagaaagccactttcaactctaattttctataattctgtgatttcatattctgacatctgaggcatctgtgtgagaccaaaggtgagcactgacgattgaacttgcccaaccattt

SEQ ID NO: 192261 - DNA, 473 bp, Homo sapiens
cgtggtttcaccatgttggccaggctgatctcgaactcctgacctcaagtgaccggcccaactcagcctcccaaagtgctgggattacaggcatgagctactgtgcccagctgagcatgtgttcttctatggaaaaacactagtgggagaattagagtcatcctttcattaactgtgtgacctgtctttgcctcagtgttcttatctataaaatatagatgattataatgatgcctgctttctgggaatggtctaaagatcaactgagttagtacatgacagcataaaagcatgatgcaaatgtcaggaggaattatttttgtgataaatttggtacccatcacattggtgatgagagaactgactctcatattcaggaactactggtttttgtgtttctttttctccttgttttcagaaattatgctgcctaattaaaatctccattaactatggatgaatgattagcctct

SEQ ID NO: 192262 - DNA, 220 bp, Homo sapiens
aataccatatgaatattctgagttaaaattccagaggtaacaaagaaagtgttacctttggaggactagggtcatagaagaattctgttctcttgacaggtttccttgtttccttccttagacgtcgctggtggttacagattcatcattctctaaagattcagcattttgtctcgctttcctgacttttggcattaataattgacacaggtttcctaac

SEQ ID NO: 192263 - DNA, 487 bp, Homo sapiens
agaaaaacaccctcaaattaactgaatgctgtatctttttaaagtttgaatatgaacattaggaaggatcaaagtaaaatgaacaaaaatttgtggttacagattgttatatcaatctagcacagagatattttaaaattcttcttacctctttgaaataatagtgcttaattcctaataaacttttgcaactaacaacttactatatagtctaactctttttcttagaattaagacaatacagagttatttcaaacaatataaaatttatggttttaaataaagttaggatgaaacaatttagtaggcattctttcaaatctataagcaaattgcatgtaattataaataaatatttaaaaataaaattattatttgaatttgtttaaaagaatacatttttaccactagtgtgcctgctaactcttctcttttgttattattttatgaaaatgtgaggcagggttcaccagaatgggagctggag

SEQ ID NO: 192264 - DNA, 369 bp, Homo sapiens
gagacagagtctcactctgtcgcccaggctggagtgcagtggctagatcttggctcactgcaagctctgccttccaggttcacgccattctcctgcctcagcctcccaagtagctggaactacaggcggccaccaccacacccagctaagtttttgtatttttagtagagacggggtttcactgtgttagccagaatggtcttgatctcctgacctcgtgatccacctgcctcggcctcccaaagtgctgggattacaggcgtgagccaccgtgcctggccctcatactattttttttgagacagagtacagcagcataaccacaactcactgtaaccttgaactcctggactgttacaatcctcccac

SEQ ID NO: 192265 - DNA, 441 bp, Homo sapiens
tgtccatgaggatgactgcgttgctgtttagaagattgtgttctgcatggggatgatggcattgctgccagtaaaggaccaacactactcagagggcaacttcctgggaagaaggctatgtggagttgatgggttggcagtggggatgcatgctagaaatgtatagggcctggttcaaaagctagttagagtagtgtccccttccccttggtttcagtttcagttacctgtggtcaacagcagcccaaaaatattaaaatgaaaaattccagaaataaacaattagtaagctttaacttgcatgccgttctgcggagcatgatgaaatctcacgccatccagctctgtctgcctgagacataaatcatccctttgtctggtgtttccactctgtctacactacctgcctgttgggttatcagactgaaataacatggtata

SEQ ID NO: 192266 - DNA, 697 bp, Homo sapiens
gtggtggctcatgcctataatcccaacaactttgggagtctgagggcaagaggatcacttggggccatgagttcaagaccagcctgggcaacatagcaagggcttgtcttaaaaaaaaaatagctaggcatggtggcatgcatctgtagtccctgctacttgggaggctgaggtggaaggctctcttgatccctagaattcaaggttacagtgagctgtgatgtgtgatggcacctctgcactccagagcaagaccctgtctcaaaaaacaaaacccaaaataacaacaacaacaaaaaatggaacacactggatctaattagaggctactgtctaaggtacggcatgttcatttctattatcctaactccaaactatttcaatcctgcagacacttgagcttctgatgtctgtactagtcaagaaaaccctgttttttcacaaaggaggaaacatggaatgtaagcaaccttctcaaggtcacgtagctaataacaggcaaaacgtaagcaagagccactgtctggagggttttcctctgcatttaaaagcttctgctaaagatatgccccaaagtattcaatccactagtcctttttccaagtgctcagacaggtcaggcaatatccgttccattttctttcttgaagatcttctcacctcctcccattctcttgtttctggtcagcattctctg

SEQ ID NO: 192267 - DNA, 305 bp, Homo sapiens
gtaatcagaaaatataacagaggcatgtgtacagggtattatgagaccactgagaagggggcacctaacacagcccgcatagagatgttaggttctttgaggatagatatttgatcattcgatttgaacagcaattctgtgtagagatctagagaaaggagttctcctcctcttacttaaacactgagtgactttccaattaaatcttttgtctaaccacctgtatttgaaacagaggattctagaactgagtagatcacttttatgtcacataggattggggatatgtcttattacagactatg

SEQ ID NO: 192268 - DNA, 327 bp, Homo sapiens
tcccatcttatcacccacaccctctactcccctttgccctgctttagcacttaccacctgccgtcaatttttgtttactatctatctgcctccactagaatgtaacatgagtgaggacagggactttgtctttgtttattgcacaatatctccagttcctgcaacagtgcttggcatgtagtagatacgcaaaagaatttgttgaatgaacaggtaaagtttcagggacttcatagtctaggacttcacactaccccactccactccaaaacagctacctcctgaaatgcagatgcaccaaaacaaccacagaaacactcatagata

SEQ ID NO: 192269 - DNA, 321 bp, Homo sapiens
acagccatgttcctcatcccccagagcgcaccacggtcactcagtacagcacgtgtgcgctgcttactgccctgtgcctgctgctgcctgtgctgcaggaaacagcccagagtcgaaggatggtcaccagccacccggaagacagtcctgctctggcacgcaaacacggagcatcgcaaccggccggcctcggctttccaagaactcagactgtcactcccgccttcacattccagaccccaacagcagctgagcccgcacttctgagcgcgtggctgggtagagctccagaaactgagacaatcacagacatggcaggtg

SEQ ID NO: 192270 - DNA, 686 bp, Homo sapiens
ccctatttactgatggaatgaacactaaaaacattttaggtggccaggtatggtggctcatgcctctactcccaataccgggaagctgaggcaggaggatcgctgcagcccagcagttcaagaccagcctgagaaacacagtgaaaccccatgtctacaaaactttttaaacaattagccaggcatggcaatacatgcctgtagtcacagctactagggaggctgaggtgggaggctgacttgagccccagagataagaggctgcagaagctatgctcactgggcagcagaacctgggcaacagagcaagaccccacctcagttttaaaaaaagaaaaaacaaacatgtgaggccacagttctagactacttccccaaggactctggctcaggggttgaagcaccgattttaagactgaactcctatattctctttcccagcatgccagttaaaaacttcaatcaaggccaggtgcagttactcatgcctgtaatcccagcattttgggaagccgaggcggcagatcacctgcggtcaggcgttcgagaccagcctggccaatgtagtgaaaccccatctctactataaatacaaaaattagccggacgtgttggcacgcacctgtaataccagctacttgggaagctgaggcaggagaactgcttgaacccaggaggcggaggtt

SEQ ID NO: 192271 - DNA, 592 bp, Homo sapiens
ccctatttactgatggaatgaacactaaaaacattttaggtggccaggtatggtggctcatgcctctactcccaataccgggaagctgaggcaggaggatcgctgcagcccagcagttcaagaccagcctgagaaacacagtgaaaccccatgtctacaaaactttttaaacaattagccaggcatggcaatacatgcctgtagtcacagctactagggaggctgaggtgggaggctgacttgagccccagagataagaggctgcagaagctatgctcactgggcagcagaacctgggcaacagagcaagaccccacctcagttttaaaaaaagaaaaaacaaacatgtgaggccacagttctagaaatcaaggccaggtgcagttactcatgcctgtaatcccagcattttgggaagccgaggcggcagatcacctgcggtcaggcgttcgagaccagcctggccaatgtagtgaaaccccatctctactataaatacaaaaattagccggacgtgttggcacgcacctgtaataccagctacttgggaagctgaggcaggagaactgcttgaacccaggaggcggaggtt

SEQ ID NO: 192272 - DNA, 192 bp, Homo sapiens
cctggaggagtcaaaaccttgatctgtgtagcccatctctcctcaggcagcctcctggggaggggatatgactgtgggatggaagaatcagccccatggtacttcatgtggactccttccacctctcttcatccttctggtatctgcagtggttggaaagctgactgcgtttctaagacacacatgcaactg

SEQ ID NO: 192273 - DNA, 480 bp, Homo sapiens
ccaaactcatgccacaagtaaggggtagagctgaaagtttaacctaaactctgaccctagggagggcccatgctttaaaaccctatgctttactgcccctgcagcctttttctgaattatgtcagctgacaggtagaggaaccataaactattagaaatgttcagaatgagagattagatttttattgtggacagtctgaaattagtaagcatggtcacttgattcacatatcactctgtttttttacccaccaacttacagctatactcctttgagagaattgtttgccatttggcacaagttaatttcattggttaacagagcaagtgaccaaggacaaatattttattctgttgacttaaacttggttctctagtatctttgtcactttataagctatagaataatttctaggccaggcatggtgcttcatgcctgtaatcccagcactttgataggccgaggcagaaggattgctt

SEQ ID NO: 192274 - DNA, 450 bp, Homo sapiens
cagcctgggggacgactccatctcaaaaaaataaataaatattaactaggtcaaggagggcagataggtttcagctctttggcttcttggaacacaggtttgaggaggatgctgaagccacatcagggcttagaaaagtctgtgattgattgattgtcaatatctacagagggcttggaaacaggaggtagcagcactgaaatatttgctctccttgaactttaccatcagcctaaagcagtccattgtctggaacttaaaagaaactcaccactttccacagttcatttagtttgtacattcaaagtgtgtatatgactctagcacattggttatactggatgataccaatttataacaaatgaaattataacattgaaataataagcatggccctcaaaattctttcctctgtcttgcttttctgttttcctttttaaaaaatatttc

SEQ ID NO: 192275 - DNA, 584 bp, Homo sapiens
tggtcccagccttgtcccacattggcgtgcgttttgccccctcagctctcagctgcccccaaagtcgatgtcaggtctgcttaacaggaagcctgaggtctttctgccatgattatctttcccagtcttctcatacttagatactgaattttagttctagttcctgtttcttttacagtcaaactttccacatatggtacctggtcttttggtactgcatggatctgcctcatggtgctaggtacactcctcatgtgagggttgtttccttttttttgttgttgttgtttttttttttttaaacagtctcactctgtcacccaggctggaatgcagtggtaccatatcggctcactgcaacctccacctcctggtttcaagtgattctcatgccttagcctcctgagtagctgagaagacaggcacacgccaccacacctggctaatttttgtattttgcttcaccatattgcccaggctggtcttgaactccttacctcatgtgacccacctgcctcagccttccaaagtgctgggattacaggtgtgagctaccgcacctggcctcatgtgaaggtttttaa

SEQ ID NO: 192276 - DNA, 577 bp, Homo sapiens
tggcaaatccatgtaaatttcccatcatttctctctgcagcatttttaaaaagacatatagctgaaattttatcaatcctaaaaatattttgtaattatctgcccagatttgcatttgggtagattgtgctgtagaagatatatcttgctttaagatagctgccactgattattttagtctattttaatcaacttattgccttgtaatctttcctttttcattctctaaatttctgaaattccatctttcgtgttccccaggaaagactagtaagatgtgtttttattaacaagacttactatcctcatttcaccatgacataagttgggctttctgttccaatttatcctacttgaatggtggacacttccacctgagtatttgtcattttcacctcaaccccagcacattaaaacaatcccttcttagctctttaaaagaagcttctgtctccagccttttcctagtcagtatcacatcttttgagcccggtatggggattacagtttcagatttcacctcaagtcttcctcttctggttcctgaagctctgccaacctctactttgaaacactg

SEQ ID NO: 192277 - DNA, 469 bp, Homo sapiens
gttcttattcttacacttcaccgtgtactaaagaacggctcatgaatcaactgcatcagtatacctggagtgcttattaaaatgcagattcctgggtcctagctcggacctacagattcctctaggtgagagacccaggaatctatcttttctaaacattctctccaggtgatttttcttttttttttagacaagagtctcacactgtcacctaggctggagtgcagtggcaggatctcggctcaccacaacctccacctcccaggttcaagcgattctcctgcctcagcctcccaagtagctgggattacaggcacttgccaccacacccggggaagctgaggctgcagcaagctgtgattgtgccactgcagtccagcctggatgacagagaccctgtctcaaaaaaaatagtagtaataatcattcctcagacaaaactcttgtgaaatgactcaaaatgaaggat

SEQ ID NO: 192278 - DNA, 209 bp, Homo sapiens
aatccgcttttacatttgctgtgacaaacctgcataaaactagattttatagatataacttctttggaagagataaaaatttaaaagtttgacattgttttcagttattcttttcttcattgttttgattggcccctgttagattgatgtattgtcaatctacttttgatggcatgaatataaaatgacaacataaaaagcacttctag

SEQ ID NO: 192279 - DNA, 391 bp, Homo sapiens
tctgggcgccacccctgatgcacttaatactcacatgtagatgcttctaccagggatacctacagacctgctctccatccacaaaggcagtccaggaaacccagaggaattcacagctcagagaaccaagggtttcaagccatggacaagttacgcaaatgccaactgggatagcaagatggatttgggggtcatggaggtccgggctcaaatttcaacttctgacactcacttattttgtgactctacactagtcacctacccttcaggggcctcagtttcctcatctgtaaaacagagatggtaatatgccttcacaggacagctgaatgatgctgtggctggcggtgtcaccaggtctttgctgggtgaagggtgggtgctccctgct

SEQ ID NO: 192280 - DNA, 363 bp, Homo sapiens
agcagtgctgaaaacctgggaggggtatacctacagataagaacagaacggaatttataaagaatacaaagtaggctggggtcggggaaataacaaaatgcaatacacttgaggaaccagacacccaaaacaagaagaaagtgggatctccaaaaaagatgagttttcttagcaagaaggattaagagaagcatatcctgagcggtcagccagagagcaaaaccatagtaaaacactgtgtagctaaagcctctagtacagctctatgtatgtaggagatgtgacacttggacagtgtgattatgaaaaaaggagactgcctcctgaggaacagtaagcacctgtaccaaaaggtcaagctac

SEQ ID NO: 192281 - DNA, 432 bp, Homo sapiens
cttcttcatatgtttggtagaatttggctatgaatgcaaccagtgggcttttctttattgggaggctttttattgctgattcaatctcattacctgttactgggctgtccaggttttccatttcttcctgattcagtcttggtagcttgcatgtttccatacaagcagaatttatccattttcactaggttttcagatttcttggcatacagttgtttgtaatagcctctaatgatcctttgtatttctgtggcatcagttgtaatgtcctctttttcatttctgattttatttctttaggttttttctctttttttcttggttagtctagctgatggtttctcaattttgtttatcttttcaaagccaactttttatttagctgatttcttgtattgctttttagtctcaattttaaaatttttgccctaa

SEQ ID NO: 192282 - DNA, 654 bp, Homo sapiens
aaaaaaaaaaaaaaaatccaaaacaaacaaaataactcaaaggggcaggaggaaacttttagaggtgatggatatgtgttttaccttgattgtagtgatggtttcatggttatgtgtacatgtacagacccatcagcttgtatacactaaataggtgcagtttttaatataacaattacatcccaataaagctgttgaaataaatgaacaaatagaagtgacatcacattttctagaagtagtacctcttaccaaggaggagctgattgacaggtggttctgaaacagaattcttgattttatcgaatcacaggcatggccatgcgtcccgtagccccctctggtactgcccctcccacgcttctccatcatctactgagatactttatgattgtggctcctggagcacctccattgaaaccacctggctgcatgttccataatatccaagtctcagggttgggaatagcatcttaacaagctcctatgctgacttctgaagcacatcaacatttgagatttattggcctctaaggtaagatccaaaccaaataacatgtgatgtacaagatccttcatgactaggtttttccaccttactaaaaccatctgccactgtctcctgcctgccagtgatctgtgctatgatactga

SEQ ID NO: 192283 - DNA, 278 bp, Homo sapiens
agagtcagactcggttatggtgctcaccacgtatctttgaatggatgtggaatcaacaaatgagagaaaaattcaccttctctacagggagctgacctgttgacatgaaaatgtcctgaaggcctagatgaccctgcttgtgtcatttgagaggagacgaccaaacaaagcctggtgacctatttgtgataggtgacatgggagaggagatggggtctagattgagaggtagattcaggaaagggacagacattaggaggtcataacaccacacaatt

SEQ ID NO: 192284 - DNA, 382 bp, Homo sapiens
aggtgccaaaaaattaggaagattatttaagtgacagatttggaattcaaaataagggctgtgtagctctaaagccattatttttcgccacaccacgctgtttctactttaaacatatatgtaattatttgtgttttctgaactaggctgctctgttttttcagtagttactagttcttcttaagctctattatcttcatggatttaacaaaattaattgaaagttaactgcttcttctaccgttttgttttggattgcttttttatttcgcatagagtatttacaaatgtagaatattctttcaaatggcactaaaaattgagaaatctgaacttgacttaatccaacaatctggtttgtttttttttttttttttttttt

SEQ ID NO: 192285 - DNA, 400 bp, Homo sapiens
gaggggtctccagaggcaaggcaccgctgaggggctggggagtagccaggaggaatccttcaactggtgggctaccctgagggaaccaatagactaccctttccccaactccattccattactctgccctgtctaggcagctgagaaggtttagggaaagctgaggaattggaaacactggatatctgaacctctgagaagtgttgcaaggtgcgggggttggatgggagattgcctctgggttgttggctcctttgccctttctcttctctgtgcccaggggcagtagagatcagctggacctggagggagaaggaagacatcccaaccccagcatagttgcttctaactggaactcttggctgcttgggaaataggggcttgggaagcagtggaagag

SEQ ID NO: 192286 - DNA, 502 bp, Homo sapiens
agagcccctcccatcccaacccatctcactacccagaggtgattacttaagagtacttctttgagtctaatgtaagtatctgttgtagtacttaacaaaaagttgccttatttatataattgtttgtgttaaggactgatctccattcgctggtcatgaattatttccgttctcagcactagaagtttacatttccttgcacccccacccatacacactcctgccacttagcagactcgaacacttgggcggttctggggtaaacaacagcacaagacactccaaaacatatctagactgggttatgatgggatctaggacaagggaacccttctttccttatgtatccaggaccagggcactctttcttaatctctgctgtatttctgaagtcattttagttataacaacccacataagaagccgattgccctagaaaggaatctagaactggggactggtagaattttttttgaatacaaatcaagataaggtctttatt

SEQ ID NO: 192287 - DNA, 213 bp, Homo sapiens
agttgcgacctgtgccatggccgggaacagacagcagccctggcctgggggctccttagtcaggcgcacctcaggcctgccaggagtggatctgcatttgaacagggtcccccagtgagatcctccccagctctctagatccccaacctgtcagcaaagtgacctgaggggcttttcttttcttatcttttttttttgagacgggttctacct

SEQ ID NO: 192288 - DNA, 534 bp, Homo sapiens
ccacatctaaagcaggggctgctaataaagagagctcagaaaaagacccattggtttgacctgtggcctagaaagtgacagaggttgaattcattttttttttgtgtgtgtgtgtccttccttccttccttccttcctgttttcttttgtaaaatattttttcatagatcctttttgggaaagtagtagtctttgtattttgaggatacaatggaaaactttagagatgagagcggccagttgcaggggctcatgcccatatcccagcactttgggagcctgatgtggaaggatgacttgaggccaggatttgagactggcctgggcagcatagcgagatcctgtctctacaaaaaaatttcttaaaaattagctgggcatgttggcacgtgcctgtgagcccagctacccgggaggctggagcgggaggatctctggagcccaggagttagaggctgcagtgagccgtgattgcaccactgcactccagcccgtgtgacagagtaagagtctgatacaaaagaataatacaaa

SEQ ID NO: 192289 - DNA, 115 bp, Homo sapiens
gacaaataatattccactctatggatatacaatatttttgtttatcctgtcaattgaaggacatttggttttatccacccactggccgttatgaataatactgcagtaaacattt

SEQ ID NO: 192290 - DNA, 456 bp, Homo sapiens
aatgcttggatgaaatgaattgaaggtatatgcagaaaatttccagatatctttttggcttatatttccctctgagtattggagtcatacctgattatctacttcacttgggtttcaaaccagactttgggaaatgtgaaaaaaaacaaaaaaatggaaagagcaaaacagaaatcatgctgttccattggactgaatcacctactatctttatcaaaaaacttgtattaataacccaagttttctacagtaagacatcttggtttggtttaatagaagaatcacggaaaaaggaaaatgttttattttagatgggagggcatttatgcttatcctataaaactaagatttgtatggtgctttggagtttgttttgttttatattttctaatgcattcttataatatccttctggagtaaggatcacactccttttatggttaagacgaatgaggc

SEQ ID NO: 192291 - DNA, 272 bp, Homo sapiens
ggcctctgacactaataaccaaatcttcagacccttggtgtctcattctgttgcttagttgggatctctgtatcctccaggcagtcatcttgagtggaacctttcttgaaatgaataaaaatttcttccccaggattgacactgatccaacaataaattcatgaatctgtcctgtgcagctgggtcgatctcataaagcatttattggtcaaagttcagccttaaacagttgtttcttgaattttcaagaggcagataccagtgcccatgat

SEQ ID NO: 192292 - DNA, 227 bp, Homo sapiens
agacgaggttccaccatgttggccaagatggtctcgatctcctgaccttgtgacccacctgcctcagcctcccaaagtgctgggattacaggtgtgagccactgtgcctggcttattatataactcttatgcatactttaaaaaggaaaacataagtgaaataaaagtggctaaaattctttccttctcagagtgttatactcttctcatctcttctcttctcttct

SEQ ID NO: 192293 - DNA, 185 bp, Homo sapiens
ctttctctcttcctctctgtgtctctgtctctctccccttcctttctttgcaatttccttcttttctcaagctcatgatgaaaattgacccttcagttttattttcagatgaaagctcaagcaacaagccagcgcttgcctccattagtggctctgggtagtccttgcaggagaaatcaccatca

SEQ ID NO: 192294 - DNA, 499 bp, Homo sapiens
gcgtattcagtgaattggcccatattttatctccctacaaaatagctatttaaatatccctcaagtatgcactttctgaatcattaaggcttcagggtgcatcaattacactaatttgggaaagtgatcaaattcatgcagggctgttatttttaaagaaaagacattttagtgtattgatgggatattggtgtccagagtatatagatttccagttatctcctgtcatggcaagagtccatcggtttcctttaagagacagagaacacattatgcctggtattaacaaagatcaatttcagtaaaggaagacattcaacacaagggaattgaactgagctgggaataaatgatgatgtaatgtttgaagcaataagggataagtcatgctgggactccaagttcttgtataaatgatgattaaatggaatttttgtccctgctttttgctaggggtgatttttctttactgtaaagtataatgtatctatttcagcct

SEQ ID NO: 192295 - DNA, 657 bp, Homo sapiens
cctgtaatcccagcactttgggaggctgaggcaggagaattgcttgaacccaagaggcgtggttgcagtgagacgagatcgcaccactgcactccagtgtgggtgacagcgagactccgtctccaaaaaaaaatagcctaccatgtgcccagaaagccgagagccagaaatatttggaaaatgaattaatgattactctttattcttttctttgactttctgatttttgtttaactcctagcttttgctagttaattgaattttaccatcattcctcccttacttaatttgagataatatgagtttatttaaatgatactcatagtagttcacattgtttccatgggttagaagttttggcacaagtagaataaggttgctaggattttcctacttaaaatatgaggcatgaaactggtacaaaaagataagcagttaaaagaataattgagtttaaattatttcaaggtgtcatttgtcatagtagaaatagacaatgagctttggagtcaggcaggcctggagtcaaatactacctctgtcgtttgagcgacttgtgatcttagacaaattatgttgcctctctgagccgtaattttaccatttataaatacaagaaagtaggaatatatctattcaaatgtcaagtaaaacatg

SEQ ID NO: 192296 - DNA, 465 bp, Homo sapiens
tccactgtgtcactcaaggctaccatcatctaatgcttgcactactgtagcttccatgagtgtctctgcttctcagtctttacctgacttccactcatccctccagtttccatttaaacacatctactgaaaacactttctggagagaacacacacatatgcgtgaagacacaccgcacacatacatactcaggcttctgataacatcctacatagcacctgtgctgcaaaagactcagctttcaaggttgcaattaatatcagccttctctgaaaggctataagactatttttctgatttctgtgtccttagtgcttagctctgagttagacatgtagtctacactttctaataaaatagttacaattcacttagtgaatgaagtaacaaaacctacttgtgagagagacccaaagtctaaacagcagaagtttccatttctttcttttttaaaaaatttatct

SEQ ID NO: 192297 - DNA, 860 bp, Homo sapiens
acaaagccactggtgtctgaagcccttgcagttgtgcacagaagaccagtgatatgtctggagggtccttgaggggaggatgaccgaaccccacagaggtctcagatggggagcagcccagcctgcccgatcatcagtcatccaaggctgaggcccgggcctcttccatgctggctgctcgaccaggcaatcactcattcagcaagcactgattgaatgacaagtgctggcccctgcaaggcactggagagtcagcactgaacaaaatgattggaaagcttccctcattgggaaggggatgagtgaggcaagaacacacgttaggtcttgggaaaactgagtcaggcagtctggctggaggagagcgtgatgattcgtggagaaaggagtgggactcaacttcgaaacctgaacagaagactaaggactctggactctccctaagcagtggggtgccatcaaagtatctgaacacagtgacatagaagttttcataagaagaatctcctggtgaagagaggaagagcctgtggtccaaaaggcccaccagaggcatatggtaaataaagccaaattgggtaggagagagaacaatggggaagtgagagaaacaagagccatggagaaaggaagcaccatcaaaacgggctggggagtggggaacaaggaagatggagggaggactcggagatgagtccaaggtttcaaggctgggagtctggtttcagcagagacagaaatggggaagtctgcacaggaagcctgctttgtggatgcagagttgggctctggatattgctcaagttgaaatagggcatcaagtgaaaataacccgcatgtacttggaggccgaagcaggt

SEQ ID NO: 192298 - DNA, 458 bp, Homo sapiens
gagatcaggaaagctagtggtgtgattcagtctgactacaaaggcctgcgaactggtgggcatgggagtgaggggcacactggcattaagtcctggagtctgaaggcctgagaaccaggagctctgatgtctaagggtaggagaagattgatgtctcagcttaagaagagagagagaattcgcccattgtccgcctttttgttctattcaggtccttgacagattggatgatgtctgcccacgttggcgagggcggatcttctttactctgtctgctaatccaaatgctggtctcttgcagaaatattttaccaggtatctgggcatccctcagcccactcaagttgacataaaattaaccatcacaacagtacttgatattaaaacctatggaaacaacccaaaccaggctcaagaaaattcaaagctttaaatgctttttccttttagccccacat

SEQ ID NO: 192299 - DNA, 639 bp, Homo sapiens
tctcaaagtgctgggattacaggcgtgagccactgcgcccagctgatatgcagaagagtttaaaaagatttccatatttttatttaaagcctttacaaaaggcaaataaaaagcttaggcaactaattgattaaaaaaaattaaatctgccttgtactctttgctgacagctatgagtgacaggattaggcacgtacaggaccttagaacctggggaaacttttccccccaaaggtgaaatttaagggctgatgggacagctggaaaaggtccctttgtgaccaaaaagtgaccacttgaacttttgattcagtatcactgcaatgggtgggtgatatggctttgttgtgtccccaactaaatctcatcttgaattgtagctcccataattcccatgtgttgtgggagggacctagtgggagagaattaaatcatggtggcggtttcccccatactgttctcatggtagtgagtaagtctcacgagatttgatggtttttataaggggaaatcccttttgcttggttttcattctctcgtctgctgccatgtaagacgtgccttttgcctttcaccataactgtgaggcctcccccaccacgtggaactgtgagaccatcaaacctctttttctttata

SEQ ID NO: 192300 - DNA, 763 bp, Homo sapiens
ttaatgtttcataatgaacattttcccaaagcaaactgcttgttgcaaaacaaccgtatctttaagccagcattgtgggagagttctagattcctgccagagttaaacccaaggtagtcatatgtgtaattcaagtgctcataaaacagctggaaggaaaaaaaatttggatataaaataaattataggtggggcacagtggctctcacttgtaatcccagcacttcggaagcccaaggtgggagaattgctgagcccaggagttccagagcagcctgggcaacatagcaagaccttgtctctacaaaaaaattaaaaaattagccgggtgtagtgttgtgtacctgtaatcccagctactcaggaggcggaggcacaagaatcacttgagcctgggaggcggaggttgcagtgagccaaggtcatgccactgcactctagcctgggtgacagagtaagactctgtctcaaaaaaaaaaaaaaaaaaaagtctgtacggatacagggagcacactgcttccttttaaaggcaagaccgctatgttgaacattccacttctgctaaaccctaattatccagaagttataagactgcgaagcaatctagcttggtggccatgtgctctgtgctatataagaagctgaggtcagtactggggacaaccaatgctctctgccatattctgagcttagtaaacttgagagtgttgaattaatttagattaatgtagctgattggtaaattctgatctttgtggtaggg

SEQ ID NO: 192301 - DNA, 368 bp, Homo sapiens
ttagatttcttaccaatttatagaagcacttactatgttcaggttatatgttacaagtatgtcttgtggcatatcttttaactattgttcttgtgttttattatacttagatattgaatatttgtgtaatcaaatataaagtgtcaaaaaatttcagagaatgaccctaatattaacaaattagtggtgatagggcttattacagaaatacttctttatatcagtggtgaatcttgacaagatatcatgctgtagcgtgtccagacctttgggttggcatatgtttgtgattctttaataacacattttaaaccttgtgcatatgtgaatttttttttttttttttttttgagacggattctagctct

SEQ ID NO: 192302 - DNA, 266 bp, Homo sapiens
taatcaaggaagtatgcaggcaggctaaagagcctcttaactctcaaaatagggaagacttcattacaagactttatatcatatttcattccaaaaccaagtgttttttctcttccttctcactttatttacaaccactatagagttcagggtttccttggtttccctcttggtccttaacatgcaactaggagtcctccccgcaaaaagttttctacttgtcttagacagcaactctcgtggttttagcctggtagcaaaggcct

SEQ ID NO: 192303 - DNA, 510 bp, Homo sapiens
agtgctggaggtaactactttagacccttttgctgccctttgcgtctttccccatgtgaggacatagaattttccctttttgctcatttcccgcttccaccatgtgaggatgcagcacgaagaacctcaccagacaccaaaggccggtgctttgattttggacttcccagcctccacaactaaaggaaatacatttctgttctttataaactacctagtctcaagtattttgttagagcagcacaaatatgttaagacaatgtttatttaaaatttaataatggggttcattaggccaaaatctaatttgaaatgtagggagaaattataatttttccctttgacctataaataaaatataataaaagtttagttcattttcctttagatttgcctgcataggctttggggatttaaatgtaacagcttgccatttaatctgcaacagtttgactctagatttcagccctacaaatatagtgaggacactgtggttgttgacagaaagga

SEQ ID NO: 192304 - DNA, 515 bp, Homo sapiens
cagagagttcccatatgctctgatttccccagttgtgaccgtcttctcttagtatggcatatttgtcacagttaacaaaccaataatgatgtgttatgattaaccacgcctgcacttggttcagatttccgcagttttcactcacatccttttcttctcccagaatcccatctgggagcccccgtggcattcagtcctcgtgcctcctctgggctgtgacagtttgttagactctgcttggttttggtgacgttgaccgatttgttttttgttttgttttgtgtttttgagaagcagtctcacactccggcctgggcaacaagagcgaaactctatttcaaaaagacaaataaacaaaaaacaaagaaactatctaaattaaatccttagcaatcagaacagctgcttcagtagattttgccaacctccaatcatgttggactgaggttatctgttcctctttctgaaactattaagatggataattacccagcacacttgctcttataaaggca

SEQ ID NO: 192305 - DNA, 615 bp, Homo sapiens
gaccaccctggctaacacggtgaaaccccgtctctacgaaaaatacaaaaaaattagctgggcatggtggcaggcgcctgtagtcccagctactcgggaggctgaggcaagagcatggcgtgaacctgggaggtggagcttgcagtgagccaagactgcgccactgcactccagcctgggagacagcgagactccctctcaaaaaaaaaaaaaaaaagcagggatacatgtattactatgcaattagtattttccttagtttgcccatccagtcccataggatcttatgcccttggagaaggggtgagggctgtcttaaaactcagtgactaggccgggtgtggtggctcacacctataatcccagcactttgggaggctgaggcgggcagatcacgaggtcaggcattcaaaaccagcttggccaacatggcgaaatcccatctctactaaaaatacaaaaaaaattaactgggcatggtggtgtgtgcctataatcccagctactcaggaggctgaggcgggagaatcacttgaacctgggaggtggaggttgcagcaagctgagatcgcaccactgcactccagcccgggcaacagagcaagactctgtctc

SEQ ID NO: 192306 - DNA, 457 bp, Homo sapiens
ttccaatgctgaggactgaccctgggaaacagtcaacggttactgatctttcttcttcctgattaccaataactgatccatcacatgccctgtcaattctaccttcaataaagatcacaaaatccatccatctctgtccatctctatcacctcaatccaatccaacattatcttttgcttggactatgcagcaatctcccaatgagtttcccacttattgcttctcttcaattccacagattgatactattaagtattttggatcatgtcatcactttgcataaactcttcaaaagcttactttaaaaatcccaacttggctggatatggaggctcatgcctgtaatcccagcacttttggagcccaaagagggagaattgttaagcgcaggagtttgaaaccagcctgggcatcatagtgagacctcatctctactaaacattaaaaaaattagcc

SEQ ID NO: 192307 - DNA, 732 bp, Homo sapiens
gaaagatcaaacattcccagaaaagcattagaaattggggagtctttgaataaaatgcattaacaatgaatagaacaaataattgaggaaaaaagattccaccatgagaaatggataaacaaaaaagaaaaagaaaaccaatcacagcttcctaatccttatctcaattttctaaaagatacaacttccccaactcaaaacactgatttttttaaggacacactaatgaacagacagctaactgctcatgacttagagatgaaccaatgactactcttgaggtctaaatttcaggacctagccataaatattcagtatttccacactggatggataaaagctacttaaaaaataaccaattggcctgtgtgtaggctaacaaacactgtatcacaaactttaataacacatacaggtatacttccattctgtgcaatgacctgcatgttctctaaattccttcctcccttcccccctcttttttttttttttgtacatcattttgtcttctcattctctgcttttattattgaggtttggatctccaacttgctgtttctaaactttgatgatcttatataagtttcatgagtcatgaattgacagctggtcattaattaactctagctacatattaatgacaaaatatgtaatacagcctcatagagaccatcagtgtggcaggttggaaagcaggtagctttttgtgtattaaatggtgttgttgagctg

SEQ ID NO: 192308 - DNA, 370 bp, Homo sapiens
tttacagtgtggaaagaaacaagcctgtttctgaggtagtaggggcagccagagggatttgagctttgcccttaatattgtatactgcaactgatttagagaagcctgtgtcccttgtaagatttaagagtaattttttttttttagacagagtctcactctgtcgcccaggctggagattttccaaacttttagactccgctttcctttttaagtcccaatttttaagtcattcctttgctcccacatctatctgatcataggctgttagaagcagccacagcacatcttggatgtttggttgcttaatgattacttccactagataccctaagtcatcactcttaagttccaacttccacacttcata

SEQ ID NO: 192309 - DNA, 339 bp, Homo sapiens
acgtagggaagaggaagaagatgagttgtgggtgaagtgtaaggtggacaggagaaaagaatcttagtgtccatgctcagaaatcagctcttcagctgctgaaacagaggaccccggttccttggtttctgttttgggaaagccaggccatgccaaacagagggaattaatgatgcaggcacacaccggaaaggtagggaccaggaatgaggcacagcagcgagttctgagatgtttagtctggtgtctggcttgttaactccactgtggtttctgagccaggcctcctcgctgagacagaaggtactttaacatatgagccaggcatctttattaatt

SEQ ID NO: 192310 - DNA, 503 bp, Homo sapiens
gcaatatattttgtcaaaatttgagtgacattaaattcttacctctttatcaggcaggctaaagaggaattctctatcaaagcgaccaggccttcgtaaagcaggatctatagaatctagcctgttcgtagcaccaatgaccacaatttcccctctgctgtccaatccatccataagagctagcagggtggaaacaatagaactaaattttaaaaataagagagaagagattaatactatgaacacagtctatatcattcagtaatatttcttcttttgtaagatttaacgcattacatgtgaataaattttctcagggcacctcactatttccaatggattaaaaaaatctataaaataacatcccaaatggcccacagaaattgaaatcaatggaaaacagacggttgttagaccccccacaaatgaatcctagaagacattttataaagcataatttcacaaaggaacttaagagttctcaaacaatatataacatcaaa

SEQ ID NO: 192311 - DNA, 279 bp, Homo sapiens
tagtttagtgttaccttttctagaatttcatataaatgaaagcatacagtatgtgatctttttcaggttttccctccttagcagaatgttttggagattcatcagtgttattgtgggtatcctttttattgttgaatggatttcattgtatgaatatactacagttttttattcatttatctattgatagacatttgggttgtgttctaggttttggttattatgaataaagccgtgatgaacacttgtacagaagtctttttgtggttatgtgtttcc

SEQ ID NO: 192312 - DNA, 617 bp, Homo sapiens
tcattcctcttctgactcccctgagcttgatcttaagagaaaaggccctcttcctccttaggccaacagtacgtgggcaagtttgatttacccagcatgcccaaaccaggctctcaaaccttgtgacttctgctgccctgcaacattcctcatggcaatccacaacagagtatggcctctttagcccacaaaccaggtagtcagtctatggggaccatcctaggatctgccattgcagaacaggcagccctttatggtagataaaacaagcatttaaattaagaatgatttgtttggcttatccaagatcctgagaagaaagggttgatttcagagccaacatgtgcctccctactgccttcttccaataacattgcttccccctcaaccaaggaagaaaatttagattccaagagatgctaaacaacccatttcttagccatccacctcattacacagccaacactaacagcagagcacatacctcctaacctagttgggagctggctagatgacagaagagataaggcctgacagcacaactataaccgcatctaaacacagaggaaaaaaataacttgaaaactgtcaagtttctgtggaagtcacagccaatt

SEQ ID NO: 192313 - DNA, 557 bp, Homo sapiens
gattttgtttatccgttcaacagttggtggacatttgggttttccaatttttttttttactattatgaacatttgtgtacaagtttttgtgtggacaaatgttttcattttcctgattacacacctaagagtggaattggtgagtcataagataactgtgtttagcttcttgaggaagtgccagattattttccctagtggctgcaccattttacattcccaccagcagtggatgaggctgccagtttctccacatttttgtgcatgtgaagtggctgtctcatcgtggtgtttgccttttcttaaggactcaaaagtttgcagatacaggcattcacttgccattttcttaaggtagagttgaaagtactgctgccagttcatcatctgaaatgagggctgttttctttcctgtttaattggattgcaactatttgcctttcctaaagatgaaatagtgtgcttcctacattattctgacaacattcctttaattgttaatttcagatgaatttctgaaaactgcttttatcagaacagatttacttaaatgaagg

SEQ ID NO: 192314 - DNA, 144 bp, Homo sapiens
tctctagattcttcatgaaggatacacaagcttcaatagctgattcaatcaagtggaaccactgtacttagagcaagacagaagcagtctgctgtctcctgtatacactggcccttcagatatttgaagacgtctgacctctcc

SEQ ID NO: 192315 - DNA, 494 bp, Homo sapiens
ggttgcagcgagcccagattgcgccattgcactccagcctaggcaacaagagtgtaactttgtctcagaaaaaaaagaaaaacaaacagagctatgcgtgctggctccaggcagcctgtccaggggcctgctgagcctgttcccacccctcccattggtcaggttcataccaaggaaaagaaaattaagttaaaccccctggtggtaagcagatgtgggcttccacacacagtccaggaggaggtagaggtgagctggtgaatcctggagaaggagcgcatgagatgtacccacatggtcgtccttgcagcccacacttgggctcctggtggctgttggaggctaaggctgcagctctgcagggagaataggcagggagcgggaggcgcgtggagcaggaggctcacggaagctggaagccgccttcctcctctgccaccccttcagtgctggggcagggctggtggccccatcaggaggaattgtgctgctgt

SEQ ID NO: 192316 - DNA, 297 bp, Homo sapiens
gtcagggctccggtggagatgggggagaaggcagaggccccaccactttcagggcttttcagggccagcagctcagcatccctggatatgaggagccttagaggctctcactcactttggcccggccatgaacttctcaacggctgccagttgagggtgtgcatgtcagccctgttctgggcagagcccggtgttcacactcagtctcccttgctctaaggggcttccacagccctgggcatacccaggaaggcagcccagatttccgtgggcatccccaccccacagagtcccagg

SEQ ID NO: 192317 - DNA, 311 bp, Homo sapiens
cctcagcccattttcagagccccatgccatactggcttagtttctatcgaaagtagaaggcagagggaacatcttggtaccaacccatggctccagttagttgctcctcatggagacgttccatcagttccccagctttcaactccatttccatgataccctgtgcttctgagacaagaaccccagtatttacacaggatgcatcctctcctcttgtcagtgatacttggtaagctgctggactgactcatttccacctcttcatctgtttctcgtgagaatttcttgatgtgtctcatctactttttctc

SEQ ID NO: 192318 - DNA, 236 bp, Homo sapiens
ccaatcaatcattcaggaagctccctccagttttcagaaggagaaaaagattttatactaacgtgctatagagaaagcctagcatttaaagaggtcattcaaggaactcttccagttcccagaggggaggaaaaagtggaaagggggcaaaatgccatagtaagaactagtttggaatttaaaaaattctgattatgttatgaattattctcattttagattgactcaaaggcatt

SEQ ID NO: 192319 - DNA, 1066 bp, Homo sapiens
tcctgctcttttcccctcaaaacatctggaacaatcacttacagtggaacaatgactgtgtttcactacattttatcactgtttatctatttgccttccccattagatcataagctacttaagggcaagaattccaggcaagtgcacggttcacgcctgcaatcccagcactttggcaggccaaggcgggctgatcacttgagcccaggaattttagaccaccctgggcaatatggagaaacctcatctctacaaaaaatagaaaaattagccggacatggtggcgcatgtctgtagtcccagctactcaggagactaaggtgaaaagatcatctgagcctgggaagttgtggctgcagtgagttgtgatcatgcctctgtactctagcctgggcaacagagtgagactctgtctcaaaaaaaaaaagagaatttcatccatttctgtatttgtatccatttctgtatccccagtgcttcatacagtaggatttaatatatgcagggtgatgagggaggttaagtgacttgctcaatgccacactgaaaatttagcacaaagccaggtctggagcagaggtggcttgaccctcattcaaggcttttcaaatggtgccacagactctcctcagcagggccccacactgtcttcccattacagtgatgacactgtaggaaactatgtgccctatctggcttgatcaccttgtaacctatggtgggaacctgtgggtgctagacggctggggctgaagtctggcctatggaatagaattctcaccagggtgtcaattaagaccttgtcaattagcacagtgcctcaacccctacactcttcatacaagccaccatgctggtttgagattcctcttgaaatcacagaaacctatttctccaacacccatttcacaacagtcattctaatcatcttacctagggttaagtaaaccagtccaagggcctaattgggcctttcacctgttttgcaaataaagtttttctggaaaacatccatgctcatttgtttatatattctctgtggctgcagatttgagtggagacccta

SEQ ID NO: 192320 - DNA, 151 bp, Homo sapiens
tgtttttttttaaagatgattcacgttgctccaggcgaaagcatgatcctgatgacacgtggggaaaagcaggctggagcctcagaagagctggccctgcacactcaggtacttacagcagtaaatccaggatttgaacaccagggagtaa

SEQ ID NO: 192321 - DNA, 472 bp, Homo sapiens
tcagtatgggcattcgagcgatgttttcttttttttttttgagatgagtctcactccgtcagccagtctggagcgcagtggtgcgatctcagctcactgcaacctccgcctcccgggttgaagcaattatctgcctcagcctcccgagtcgagtgatgttttctatgggttctcatgttggaagaagatatattcttagacttagaatatgaaaggtcctcttttggggatttgttgagatttggagctagtctctagtgccatataaataatcacaaaaagccctctgaaaatccagagcttttgctgccttagagacaatttaataaaagaagaggctgggccttctgaccttagtatttgccatttgaaatcctaagtatatgttttgcatcttttgattttgaaatctttctgttaacccaaaaattttatggcagggaatatttgtaacattaaacaaccctttaga

SEQ ID NO: 192322 - DNA, 341 bp, Homo sapiens
gtgagctcctactcggaatttatttcatggttatccctaaaatgggtttccctcacatttggagccacagatgcttcttaactagaacataaactccagtccatggtttctggggctaagtctaacaacaataggccaaaatgagaatatattttgtttcctccttcctgtccagtgaatactgatatattcttgggcaaggacagccatcagggagccacagtgaagctgtcattcaggctatgagcttgctccttttttctgtagcctctcatgacccatgaggacccaagagggaaatgacaggatgaaaaattcggaaggaatcatctggtccaacc

SEQ ID NO: 192323 - DNA, 1944 bp, Homo sapiens
gtcaattcatactggggagcaaccttacaaatgtgatgaatgtgaaaaggttttcagtcgtaaatcaagccttgagacacataagataggtcatactggagagaaaccatacaaatgtaaggtttgtgacaaggcttttgcgtgtcattcctatctggcaaaacatactagaattcatagtggagagaaaccttacaagtgtaatgagtgcagcaagaccttcagtcacaggtcataccttgtatgccatcatagagttcatagtggtgagaaaccttacaagtgtaatgagtgcagcaagaccttcagtcgcaggtcatcccttcattgccatcgtagacttcatagtggtgagaaaccttacaagtgtaatgagtgtggcaataccttccgtcactgctcatcccttatataccatcgtagacttcatactggagagaaatcttacaaatgtacaatttgtgacaaggctttcgtgcgtaattcactcctgtcaagacataccagaattcacactgcagagaaaccttacaagtgtaatgaatgtgggaaggcttttaatcaacaatcacacctttcacgtcatcatagaattcatactggagagaaaccttagaaatgtgaagcatgtgacaaagtttccatttggaaatcacaccttaaagacataggagaatttatactggagagaaagcttacaaatgtaaggtttctgacaagacttgggagtgattcacacctggaacaacatactggacttcacactggagagaaaccttacaagtgtaatgagtgtggcaaagcctttggcaagcagtcaacacttattcaccatcaggcaattcatggtgtagggaaacttgactaatgtaatgattgtcacaaagtcttcagtaatgctacaacgattacaaatcattggagaatccataatgaagagagatcttacaagtgtaataaatgtggcaaatttttcagagatcgttcacatattgcaggtcatcggtgaactcatactggagagaaaccttacaaatgtcatgactgtgccaaggtcttcagtcaagcttcatcctatgcaaaacataggagaatttatacaggagagaaacctcacaagtgtgatgattgtggcaaagcctttgcttcacgttcacacgtcattagacatcagagaatctatactggacagaaatcttacaaatgtcatcagtgtggcaaggtcttcagtccaagatcactccatgcagaacatcagaaaattcatttttgagataaccgttcccaatgaaatgagtatagcaaaccatcaagcattaattgacattggagtcaattcagcattgacttgagtttgtgttgacttaacattgagttcaagcctttattgacattcaagtgtttatgttaagaggatggggccaggtgtggtggctccgacctgtaatcccagcacgtcgggaggccaaggcacataggtcacttgaggtcaggagtttgaaaccagcatggccaacagatgtgagccacttttctcagcctgttttttgtttcttattttctattatttttttgagccagtactttttaaagagatagtacttttttcagttagtactttttgaaagggatatatcatagtaatttttaaaagggatatgaggccaggcacggaggctcatgcctataatcccagcactttgggaggccgaggcaggcagatcacggggtcaggagatcgagactttcctggctaacagggtgaatccctgtctctactaaaaatacaaaaaattagctgggcatggtggctggcgcctgtagtcccagctactccagatgctgaggcaggagaatggcatgaacctgtgaggcggagcttgcagggagtcgagatcgcaccactgggctccagcctgggcgacagagtgagagtctatctca

SEQ ID NO: 192324 - DNA, 492 bp, Homo sapiens
gcagcctaactccaggcagggcccgggctcagaagggggtctacagggctgaagaggcagctggccagagattccacaggaagcatcttgttgacacatcttcatcactttggaatttgagcaacaacatttaccccttctgaaactcacccagaggaagcggattttctgacgcatatgaagagtgagaactgtctacatctaagtcttctttgagaacaataccagctgagcggctatttacattccagcttcttttgagaatctctgaagatgattaagtcattgtcagctggtaagggttggtctcaccacttctcatgttggatcattgaggcaagaaaccttcaaagaatcctttttgggtatcttttagtgaggaaaaaagtggggacaaagatacgtaaggcagtacttgccagaagtcgcggggtgggaagaggaagtgtgcagagttctagagcctgtcttcacctgggggatgtgcactga

SEQ ID NO: 192325 - DNA, 360 bp, Homo sapiens
agagaaagaaataaaggggatccaaattgttatagaggaagtcaaactgtcactatttgctgatgatattattgtttacttagaaaatcctagagtcctccagaaagctcctagaactgataaaacaattcagcaaaatttctggatacaaaattaatgcatgcgaatcagtagctcttctatacaccaacagcgaccaagctgagaatcaaatcaagaactcaaccccttttacaacagctgcaaaaaataaaataaaataaaatacttaggaatatacctaaccaaggaggtgaaagacctctacaaggaaaactacaaaacactgctgaaggaaatcatagacgacacaaatgaatg

SEQ ID NO: 192326 - DNA, 247 bp, Homo sapiens
ggcatactttagttcaactggatttgaaatttaaagatcagcattgacttgaggggtttagttcaagtggattagaaacttaaaggttagcgttgacgtaagaggttcaggcccccctgtgacttgagctggtgtgcgaacccaggttacagctctcttaagcatcattctctcctcctgccccactgatcaattctcttggacattcctgaattcacttgagtcactcaaactcctgtacagcgcc

SEQ ID NO: 192327 - DNA, 217 bp, Homo sapiens
tgttgggattgcaggcatgagtcaccgtgtccagtgttgtctaagaaattcttgcttatgctgaggctgtcaagatattctcctgtattgtctttttaaagttttctatgtttgcttttcacactttagtctttaatctacttaaagttgattttgtattgggtgttgctaaggctccaattccatttttttcacctacaaatgtctaatttttcca

SEQ ID NO: 192328 - DNA, 532 bp, Homo sapiens
cccagactgcttgttggccctctgggggaccaagacaaactagggaacagtgagccgtgcctcccggtgcctggtagggagtggcgagaatgaggagccaggtctcaggagaggctgaggagagttggacagggatggagcctggctttcctgcccagttcacagaggggagggcacagctgctggcttggagggctcccaggaaggccaggagcagaaagtctgagaagcagattgggggcagcagagggagtctggcccttggtgccgggggtgccctggtggacagaggtgggggcagcatggagccggcatttatggaggccctagtatgtaccaggccatttagacacgaggtcttatcatgtctctagaaaagccctgcgtagtccactttatgattatgattatgattatgattatgattattattattttgagacggagtctcgctctgtctcccaggctggaaagcagtgatgcgatctcggctcactgcaacctccacttcccgggttcaagcgattgtccc

SEQ ID NO: 192329 - DNA, 374 bp, Homo sapiens
ttactggggcttactatgtgccaggcaaactaatgaaccatggaaccccaaacaacaacctcatgaggtcagtatcataattatcctcattttactggtggggaaactgaggcaaagagaagttacttgcccaaggtcacctatgatcgttctgtggtccatgtgtgagtaatgaagaggggtgattatttcttaaagatattacttaatctggccttttaaactagcctcagagttattcttctataaaaaccaaaataggctgggaagcagtggctcaagcctgtaatcccagcactttgagaggccgaggcaggcagatcacctgaggtcaggagtttgagaccagcctggctaacatggcgaaaccccgt

SEQ ID NO: 192330 - DNA, 410 bp, Homo sapiens
aggtgactctagagcgaccccggatggtggtgtatgagactttctggaatctgtgggtagaaatcagtttatctctctttggtattcatttcaaagatctttaaggtgttagcaatccctgctttgctaagacagattcagctcatttagttcactttcaatccctaattaatttgtttaactctctagtctacttttaactattgtcctattctcgttgtttgtgtgtgtttatacattttgagtgagaggtttgggggccgaagagacaaatgcatgtacttttttacgatgttaaacaatgaatttgtcttcacattattcaactttatttctcaccattgaattacatgttcgtctactttttacatattgatcaacaaatatttattgcataacaccacacaatt

SEQ ID NO: 192331 - DNA, 413 bp, Homo sapiens
ttccaccagagcgtatgtcattgtcaaaaatgttcacctctcctcccttcttaggacttccctcttcctttgtttctaggacaataatgtctggattctcctacctgcccaattgctccttgtctatcttcttttagccccttagtgaaggtgtttccaagtctctgtctttggttttcttttctcttaaaaatccctataacaatcccttcccctatccacactatatccagaacactcaagaattcattttgtcatgaaatctgtaactatatttccaaaaatcttctggacatcttgacctcagtgttctgctatcactttcagtttaacttatccaaaactgaatttaccttcttctactatcaccactccttttcttgatcttaatagtttagtaaccttacggctgg

SEQ ID NO: 192332 - DNA, 350 bp, Homo sapiens
agacagcatggggaaagtagtagcactctccatttgagttgttggactgattttgagtttctttctttcacagtgaaagttgtttgaattgttaatgagaggaaattttagaaaatgcttcacctttaatatattaggttatatctcttctctgtaacggcatcttttcaattctcttcatcactttttttgtttacctagtatgtgatcaaaattaaagttgtctgctgtggctgccttttcaatgaggtacacagtatcacattgccacatgtaatttccactcaggtgacactgttctcactgctgagagaaatggcaggattagcagaaagggtggtattagatat

SEQ ID NO: 192333 - DNA, 430 bp, Homo sapiens
cgtgatccgcctgcctcggcctcccaaagtgctgggattacaggcgtgagccaccacgcccggcctaggggaattttaatagctctaattaggagctgctttcttgatatcaagtaccattgctaatgattctgtattaactttgtgtctcagtctgataactggccttctgtcttgcttgtatgatgaaattctcaactatacctcaaatccagtcactgatttcctgtattggcactttgccttggccttagaaacctgcccagaatctcttaatcctccttgattttctacacttttctggctctccacctcccccacgcccatgcctacacacatgccagatttaactcctgcttgagtctcagtgtattttatcatgtaagggagacttcatcagaagtctagttaacgtctaacatgttgtctg

SEQ ID NO: 192334 - DNA, 218 bp, Homo sapiens
cctcctaactccagccagtgctcctcctccatgccacactgcacctcctagccctggcagtggataggggagcggttgctgactcttcagccaagttcattgtcaccattccatttctagggccctctctttggctaccctagtgacttctacctctgcttatcaatgggagctgtctaaagagggaagggcagcaccagatccttggaggttattgg

SEQ ID NO: 192335 - DNA, 340 bp, Homo sapiens
gcttctttgctgagggataacagagacctagtgattgtagcaactactaataaagaaactaagagctcaaatacctctgggatgaaggtctggctcacacctagtaggctgcctaggcctgctgaagtattggcaaagaatgatgaaaatctagtttcaatctcttccatgattgagtcttttgtagaggtgtggctggccaccatcttgaagattccgtgatgatggagcacacaaactgatctgagtgatgcaagaagtagactaaattcagcaactcttgcgcccactgcacaacctctctgcctttcaccacagcagcccagttacagcaccctgc

SEQ ID NO: 192336 - DNA, 232 bp, Homo sapiens
ccacaaataaaaaaaaaatgtaaatcttatctaccatcccataatgcagatatattttggtgtatatgcttctaacttgttgtatacatatggcctaatcttaatgtacataattattgaatgtgttctttatgtgtaacagtatgcaataatcattttctatgccatttaatgcacttctacattaaatacatttcataaacaatacttcacctaatggcagtagcacata

SEQ ID NO: 192337 - DNA, 223 bp, Homo sapiens
cttagacttccagcctccagaactgtgagaaaataaattctgttggttaagttacccagtctgcagtattttgttatggaagccctagatgactaatacaagaaggaaagtatattgcaattactcatatatttgctttccacgttcttttttctttcttttttttttttttttcgaaaagtgattattgcccttttcgctcaggctgaaacgcattgttgca

SEQ ID NO: 192338 - DNA, 743 bp, Homo sapiens
tggaagagaaaaataaagaaataaaaaccttttctgagaagagtctgtaggtttcaccagactatcaaagagtctatggcataaaacaggttgagaacctgcattagaaaaaggagaatagctatgaggtaaaggcaccggacaaagtcttcataggcagagaagcaggattcacatgttgagggaagctaggacccagaatgatggagagatagagaaagctggtgagggaatgatgatgatggtaacacgtcatcactgatgatatgaatgaggttgatggtaacagtaacacagcagttattatttaccgagtgggtcacaaagtttcagacgctgactaagccccttgcaaacatgatcacattcacttttgacaataactgtacaaaggtgtgaatgctatttctcttttacagcctaggaaacacagccccagatatgtccagggtctactctcgggtctcctagctagcaagtcgtagagctagaattcaggccatgggctgcctgattccccagcttgtgcccttactcactcgtccattctgccaagcgcagggaaggtcttgttctcatttaaccaatgaaaaaaactaaggctcagaacgagtaaagtgaagccaagcccaggatctcaatatgcttaggaaaagcaggtgagatttctcccttgcttcactgctactgatttccttccttatccctgatggtacctccagggcctgggaggctcaaggaac

SEQ ID NO: 192339 - DNA, 343 bp, Homo sapiens
attttcagtacatgaagaaaccaaatattttgctgctatcctttggaaacttcttactatgattggttctgggtggcattggaatcagtttgaaatgatgccattaatgaccacatgtttggatttcttgactatgggtaaatgtgattagaacagaaatcccttaataatagggattctttatctttgtgtccctagtgcctcatagtatctggccctaattaggagctttagaagtgcttattgactgattgcttttttatctgaatcggccctttctatcccatcattatgataacatccatcttggtagtagtaaaactgttgcaaactgaaatgagct

SEQ ID NO: 192340 - DNA, 259 bp, Homo sapiens
atttggatctctgcagcgtagtatagggctgcccttccaaagtgtgttgagaagggccttaaaagatgatatacaaaaaaagggggattccatagccaaataaatttgggaagtgctggattaatgttactggtgttctttactgaaggatatctcagaaaacttactgtgccagcatgctttatgaatcctcaagacaaggtttacagcatttcccaagtgtttggctatgttatcttgtttgtgaggcactgtccag

SEQ ID NO: 192341 - DNA, 492 bp, Homo sapiens
ccgaaagcgggaagcaacccaagtgtccatcgagggataaatggagaaagaaaatgtggtgtttacaaaaaatggaatattattcagcctgaaaagggaagaaactcctgtcccatgttacaatatggatggaccctgaggaggttatgctcagtggataagccagtgacagaaggacaaatactgttcaattccacctatgtaaggtccctaaagaatcaaattcattagaggcagaaagtagaatgctggttactagggatggaggtggggagcaatggggagttattgttcaatgggaacagagacgcagttggaaagatgaaaagagttttggagatggatggtggtgatggttgaaaaatgagaatgtacttaatgccattgaactgtacacttaaaaatggttaagatggtatattttgtgttttatgtatttaaaataatgatttttaaaaagcataggatttcgttataggatttctgtgctat

SEQ ID NO: 192342 - DNA, 384 bp, Homo sapiens
aatgtaagatggagccctggcacaaggggattctgctgtagttcacagttggggctgaggaagtccatgcattgagctctgttttaactctgcattaatgattcatccttgggctatatccactccagactaggcacgtttgtggcatgcatgctgttcctccctccacacaaggcatcaatgacaaccaactaatcacagcaccatatcctgttaaaaccaaacacaacctcagaatcttcctcagcaaggtgttctgcagagacacaccaatccattcaatgaactcggcattgaaacctacctaccattccctggtttatcaatttagatcattaaagaaaacaaaacaaattactctctaaaacaactggcattttgggg

SEQ ID NO: 192343 - DNA, 320 bp, Homo sapiens
tggattaatccacccacgagggcaaagtcctcattactcaatcaccactaaaaggccccaactttcaatactgccaaattaaggactaaattttaacgtgagtttttgagaggacaaatgttcagactgtaagacccacgtagcacaaagtatgggaggaaataaatagaagtatacttttgtgagtttctttcttcttttttttttttaagacagggtcttgctctgtcactcaggctggagtgcagtggtgagagcacagctcactgcagccttcacctcctgggcttaagcaattctcccacctccacaccctcagt

SEQ ID NO: 192344 - DNA, 170 bp, Homo sapiens
caagagctcacatagctagtttaataagatttctgctgaaagagcacaggggacaggcaggagaaaacattgtcaccatggatcaggtcttttggggtatgggtggtggtgatttcctgagttgttccacacactatcataattcctttccttcagcacctgcaaagaac

SEQ ID NO: 192345 - DNA, 856 bp, Homo sapiens
gaattcggtttgctagtattctgttgaggatttttgcatctatgttcattggcttgaagtgttcttttgttgttgtgtctctgcgagattttggtatcaggctgatgctgtctttgtagaattagttagggagaagccccttctccttgatttttaagcagagtttcagtaggattggtaccagttctttgtatgtctggtagaatttgactgtgaatctatctggttcatggcgcttaatgattcaatttcctaacttgttattggtctgttccaagtgttcactctcttcttggttcaatctttggaggttgtatgtttccagggatttgacaatttcctgtagattttctagtttgtgtgcacagaattgtccacagtattctatgaggatctctgtgggatcagctgttatgtcatctttataaactcgaattgtactaatttggatcttctctgattttattctttgttaatctagctagtgttctgtcaatcttattgtttttttgaagaacgacctcttggtttcattgatcttttgtatggatttttgcatctcaatctcattaagttctctaatttttgttatttattttcctctgctagctttagggttgttctttttttttccttcctagttcctttaggtgaaaagttagattgttaattcgaaacctttctaacttcttaatgaaagccttttagggctataaacttttctcttaacactgctttggctgcatcctagagattttggtaaattgtgtccctattttcattaatttctaattttttttatttctgacaatttctatgttcacccaggagttattcaggagcaaattgtttaatt

SEQ ID NO: 192346 - DNA, 533 bp, Homo sapiens
atctaaggcaaatctaagaaaagtctgggctattagtatttcatgctcttatttccatttgtgtacacaaatagctttgtgcatagatgcacttaatatatgttaatagaaagcaaggccatattttcactcaaactagttaagttattctagtctatcattcagtcttactgctttttaatttttttcaaagtgtagattttgctcatcagtaatgtgaagcactgttcaccacctccctcgaaaaaaagagcttccatattaagaagtaacttccttttttcattttccttccatctgtactttacaacactaacaaaagacaaaaataatgaacaagcttccatttcctgcaagatggtggattgtcctaccataaaaataattaaatgtgtgactaaaataaacatttcaaaatacgttgaactggcaagaaaattaggaaactttagaagcaaaaatctgagaaagctaagtcataggaatgtgaaccaacactgaagcaagatttgctctgatgacatttgcctaac

SEQ ID NO: 192347 - DNA, 248 bp, Homo sapiens
tccatatcttaatgctctttctactacaaagaaaagttatctatttttacatgttttagaaatgtagatgaactcatacataatatttttggtcttttaattgatcacatactacttaggtcagaaatggtttataacagttccctttgtaatcttttaaacttttccataaatatattgatgatactttaatacaaaagctcaaagaaaaactcacttgattattttcccattggggtagtcacaga

SEQ ID NO: 192348 - DNA, 519 bp, Homo sapiens
tagatagctactaatggtttagtagaaacttggctctaaatttattatgcattctatggtacctaactgccttttactcacagcaaaaaaataacaaaagttcatagagcacctattgtgtattaggttggtgcaaaactttcagtggcaaaaattgcaattattttgcaccaacctatcaggtattgtgctaagtacttaaaagtacaagtataaagagactatttttgggagtggaggggcagacaggcctgggtgacagatgagaccctgtctcaaaacatataaataaatgaaataaaacttttttgtagagatggatctcactatgttgcccaggacagtcttgaactcctggcctcaagcagccctcccaccttgacctcccaaagcactggaattacaagcatgagccatggcttctggctaaagaggactttaaggctagatctcaactggtgtttttgttatgttacaagaaaaaaggtagctccaagtcagcttaaacaatatcagaaa

SEQ ID NO: 192349 - DNA, 384 bp, Homo sapiens
attacaggcgtgagccaccacacccagaccaaaggctacacgctcttaagctccttgctcatctcacagcaacctgacgatgtggtatcaagacttagagaagggaagtgagtctggatttggatccaggtttctctgactctgaagcccgtatcttaagcacgtgtactgggctgcgaagctgttatgggacagcagacgcaataggtggattttgttccggctgtggagcaccatgagaaggaggacgaggaggattgggacgcccagttccggagtgctggcctcagagcatgcaatttatatgttgagaagagacttaagaaagcaagccaaggagcagagccgcagtggccaccgagttggggggtggttgagtgctca

SEQ ID NO: 192350 - DNA, 479 bp, Homo sapiens
tcgagctcggctccatttggttggacgatattctctgaaagaggatgatagtctgtcttttaaaggtggtttagactctaaaaatagtcatgatctgccacaaaataggtcaggttctcctggggccacccgagagatgtcctggaactcagaagctgcatggcctcaggaaggttttctgggacagacctggtcccagggagagtgaggagaagcgtgtgagatgtccctgaagtgctcctgggagaaatgacagctggcttggttcatcagcatttcataaagagtaacactcacacacgctgcaagactggggccaaagaacgacctcgccaccacccaatcccttgttaaactccaacctgttgaggagaaaatcaaggactaaacacggtgctttgtgctgatgtggtcattttcatttcaaaccaatcccggttaaaacaacaaaagcaacaaacgacatcccaaatagcacc

SEQ ID NO: 192351 - DNA, 323 bp, Homo sapiens
gaggtgacaaaaaatggctcatatgttgtccaaaacccttgataatatctttaatttttttttttggtcacctcgaggtgacaaaaaaatctactatagagaggcctgcctgcccaaagaagctaatgtaaattctgacttcatttctagagatctaacatccagagcaagataaggcaatagtcctattctgctgtacatgcttagattccctgtgtagttttatattcagtgctagcattttaagaagaaaataacaacctagatcatgtccaaagaagaacaacaaagaaggtaaaaagtttgacaccatggagtataaa

SEQ ID NO: 192352 - DNA, 447 bp, Homo sapiens
tcaagcgattctttgcctcagcctcttgggtagctgcgattacaggtgcccgccaccatgccctgctaatttttgtatttttagtacagacaggatttagccatcttggccagctgctcctaaactcctgacctcatgatccacccacttcggcctccaaagtgctgggattacaggcgtgagctaccatgcctggccagaacccaatattttctacaatattttatacatttctttctacatggattatataaattgggctttccagcagaaaaaggaaaagaaaaagcatatgtctcaatgagagcacacaattatgagaatggcaaccatgtaaagaaaaattgcaaggacttagtgctgatgaggatttacagcaactaaaactagaaatgttaaatgatacagtaaaacaatttaacggtttattgtaatgttatatataca

SEQ ID NO: 192353 - DNA, 261 bp, Homo sapiens
attaccaaatgaacgaacaggaggaaatagcttaaggtcttcgaagagagagggcagtagattacctgatgtccaaataggatttaatagcatacgatcatggaagagagagggctgtagatgacatgatgtccaaataggaggtaatatcataaggtgctggaagagagagggcattacattacctgatgtccaagtaggaggtaatagcataaggtcctggaagagagagggttgtagattacatgatgttcgaaatag

SEQ ID NO: 192354 - DNA, 119 bp, Homo sapiens
tctgccccaaccctacaggagacattgaagtaagctggtccagcagccagcagatgcaggccaggctccaggatgaatattggacagacagagaggacaatggtgactgtctctagcag

SEQ ID NO: 192355 - DNA, 516 bp, Homo sapiens
gacttaagtcttggactaggagatggtggcagaggcccagcaacagggtatctaccaggggagaggcatcagctgtttgggcagggatttgcattttttcttccctttctttaccataacttgaaaaggtaaaattggaaggcaaggtaagtcagtgaacacctgagtgactttttataaaatatggctcaccaacaaggggcgcatggctctctcacctgaggcgtgaagcacagatctgtagcaataagccccatatacaaaaggtgaccaatgatacgctcttccttttcatttcccattgagtaggttacctggggcaactggggcaacaggtgacactacagcaaacagacattgggtgatctaggtactaatcctgcctctgcattcacaggctatgagatgtggggctggcttaacctctctgaatgccagtttcctcatctgtaagataagccccatgacacctgtgtcttgacagcctcctgaatcagctgcaaagtgtgatggatg

SEQ ID NO: 192356 - DNA, 550 bp, Homo sapiens
cgtccgagagagtcaacgacctgagactttctatccatgagaggaagacaatcatcagtgcttacttgttgattgtcttcctctctatccatgagaggaagacaatcaacaagtaagcactgatgatgagcactgtggagaaaaataggcagggaaggggaggaaaggcttctctaataacgtggcacttgagcggagaccggaaggaagtgagaatacagatcttatgggtatctggggaaaaaacgtccagacagagggaaggtcaggtgcaaaggccctggggcaggagtgtgctgctgtataggaggcacagggacgaggccagagtggctggagagagagcacctgggaatgaagggtctcggatggtgctgggtcttgtcaagtgccctggctcttactccaggaaagtttgtgcagagcctgccttatgctttaaaaagaccaacctggacactgtatgcagaaaaagttaaggcatctgttgcaatgggttactgttgcagaatccaagggagagaggacagtggcttggacaagggtgggg

SEQ ID NO: 192357 - DNA, 397 bp, Homo sapiens
aaagctggcaacggtagctaactttgattgaatgtacatcagtgccaggcactggtacatgcaccttccacctattgattcctttaactcccgcaccatagatatgaaggcacagacagtggagcacacagctagcaacgagcccactctgaacccaggggggttggtttcccgagcctatgtgtccctgatgactaccctttcattgccgccctggaaaacaaacagaactcactcactgtgtactgcaacaccaacacataacaaagctggaggtttggttctgctgagagcgtcaggaaaagccactgagggtggccagatttgagctggaccttgatgaatgcataggagtctccctagcagataaaggggaggagttgcatagcaaaggtgg

SEQ ID NO: 192358 - DNA, 713 bp, Homo sapiens
agcagggccccgccatcgtagaatgcaggtcggcctccacatgcgggcacagaatgtttccctttggcattccatgccctgtatggctcagggcccaggcaggcagttcagcagagggaatttagcaagagaactagttacagagatgacatgtcttacagctgcaggaagccactatcacccagaggactggggatgaaaggggacgagggtccccagcagcgtggcagccacctgtgggctgtcccagagaaacccactgaccaccaagggcaagcagctagtgctggggaggctgcgaagccaagagagggagagggagatggagacagagaggagggacaggagccagctctcccctccgcccatcctccaggctcccaccagcacttcccagtcagaagcctgttgacaagagatcccggtcagtgtcattttccaaggccagccctgtccactccaccagagaaacagcagaggcacagtgggagtggggaatgggtctgagagcgggcgggcaagggcaggctcggccccttggcggtaggcccgtcagagtcttccttctgccttcttgtaggacagtttctaaccagagttctggtaagcactggtgacatttcacattggcttaagcaataaggaaaagcagtcatctcacgtagcaacgtggcttggggaagggagtctccagtttcatgtattcggagcct

SEQ ID NO: 192359 - DNA, 448 bp, Homo sapiens
atcagccagaggcagcagcctccactgagcatgtgaactggccccaacacacgtcctccaggtgccactggtggctacctggagaggtgcagtttatggacgtgtgttcctgatactaagatttggcattggccaggcatggtgactcacaccagagatcccagcactttagcaggccaagacgggaggattgcttgaacccaggagtttgagaacagcctgggtaacatagcaagaccttgtctttgcaaaaaaataaaattagctgggtgtggtggcacacatctgtggtctcagctactgaggaggctgaggtgggaggatcacctgagcccaagaggtcatggctgcagtgagctatgatcatgcacttgcactccagcctggtggcagagtgggatcctatctcagaaaaacaacacagagttggctttgtaacgttaagagc

SEQ ID NO: 192360 - DNA, 201 bp, Homo sapiens
cagccagggagggaatctaggagaatgtagagggtgtggtgtcctccaagccaaccaagtaaagtctttcaggaaggaaggagtcttcaactgtgttacatgtggctgatgggtgaggtaaaatgagggctaagcattaactcgtgggtttaacaacataggctggtctgatgtaaaaagagagctgtgccaatcagattt

SEQ ID NO: 192361 - DNA, 235 bp, Homo sapiens
ttatacagtacgtaaaatttatcatatgtatcaatagcatcattagcaagccaaattctttcaaatggttatttgcattctcagctactgtgatgaaatatggagtattttattttattttattttgagatggagtctcactctgttgctcaggctagagtgccatggtacaatctcggctcactgcaacctccgactcccaggttcaagcaattctccttgcatcagcctcctg

SEQ ID NO: 192362 - DNA, 264 bp, Homo sapiens
tgggggagtcttccatgattaccctaagaatagggtaagcattcttcctccctgcttccatagaaagtaggaaactattgcacttacacattgtaatgtggctatagtatgatcaaaataattaaatctaaacaatactgtgtggattcaaatttttctcagctactcacaagctgctatccattttaccaagcctcctgcatgtattactatgtctaatcctcatatcaactcatatataaactagattttatgattatggct

SEQ ID NO: 192363 - DNA, 359 bp, Homo sapiens
cttcttttgcggccatggaagctggagaaaacagatcttccatccagatagccagggctctctctctatctataaaaggcctctgttttctctcttttggcataaagaaactcaattcctttgtttttaactgctcccatttctctgttctgtactgacttgattcctccttcctgaatgatctttgagtcttctgtgtactttttaggttgtaaaacaaagaaatcagtgaagacacacacaaatggaaaaacatgtcatgctcatggataggaagaattaatgtcattaaaatggctatactgcccaaagtaatttacagatgcaagttatccctattaaattaccagcggcattcc

SEQ ID NO: 192364 - DNA, 165 bp, Homo sapiens
ggagaaggagggagagagagagagagagggggagagagggagagggagaaggagggagagagagagagaccgtgaaaagtacagtcaggggatgctggcaagatagttcacctggggtggtcctgatggagaggagagaagtgtaaggcactgcctagtcaggga

SEQ ID NO: 192365 - DNA, 616 bp, Homo sapiens
cagggctaacttccagatgacgaaccaaggggatactgagccgaagaaggttttgtggaaagggagggaaataattaccttgacaggaagaactctcacagagattttcttcatagtggtgtggaaacacaggtagatgcaggtgagtcataccgaaccataatagttcaaggggcatgaatcaagcctttcatttagataccataaatgactaaatgtggttatgagtgtgccctgcaaattgaaggtgttttgccaatgtgggtgacagcgatgcctgccaagtcacattcatgaggacaataggtgttttacccattataacatgtgtaactgtgatgaaaacatgaaagacactgctaaccctgagctcccacagggaaatcatcctagcttactttccctatgactggttaggccaagttgatcgacccagtttcctttctgcattttctggaaggatgtttttttttttcccgggaactagtctaaaaagttaatttgtaaaggatcggtctatagtactggaaggctgacggcctgggtctaagggagactttataaaaagaagtcatatgttacctttggtaaatcctagccatcagtggcggggcat

SEQ ID NO: 192366 - DNA, 342 bp, Homo sapiens
tggtctcgagtagcggagaaacattttttgcaccaccgcgaccagccttagagcgcggcggcggcggccacggcaacatcagcccagccatcagccgagcagacgcccagcacccgggagcgcggcgagcttcggctcagcccggagttcacctccgagtgccccgggggctgagctcaccccttctgctctctcacacacgaacactctctttcactcacacacacacacgtattcacactctctcgcacacacataggaccctgggcgcaagcacccttctggcagcggtcgtccgctggtgcaatagtagctaggttcggttcctgcctccggcggccg

SEQ ID NO: 192367 - DNA, 313 bp, Homo sapiens
tggtctcgagtagcggagaaacattttttgcaccaccgcgaccagccttagagcgcggcggcggcggccacggcaacatcagcccagccatcagccgagcagacgcccagcacccgggagcgcggcgagcttcggctcagcccggagttcacctccgagtgccccgggggctgagctcaccccttctgctctctcacacacgaacactctctttcactcacacacacacacgtattcacactctctcgcacacacaacccacgcgcccacaacccacgcgaaacccacgcgcccacaacccacgcgcccacaa

SEQ ID NO: 192368 - DNA, 630 bp, Homo sapiens
tattgtccaaggtttctccccatgtgatagtctgaaatacagcctcatgggaaaggaaagacctgactgtcccccagcccgacacccgtaaagggtctgtgctgaggaggattagtaaaagaggaaggaaggcctctttgcagttgagataagaggaaggcgtctgtctcctgctcatccctgggcaatggaatgtctcggtgtaaagcccgattgtatattccatctactgagataggagaaaaccgccttaggactggaggtgggacatgctggcagcaatactgctctttaaggcattgagatgtttatgtatatgcacatcaaaagcacagcacttttttctttaccttgtttatgatgcagagacatttgttcacgtgtttacctgctgatcttctctccactattatcctattgtcctgccacatccccctctccggaaacgcccgataatgatcaataaatactaagggaactcagaggccagtgccggcatgggtcctccggcatgggtcctccgtatgcgttcagcatacggtcccctgggcccatttttctttctctgtactttgtctctgtgtctctttcttttccaagtctctccttccacctaacgagaaacgccca

SEQ ID NO: 192369 - DNA, 408 bp, Homo sapiens
taacataatctcaagtaaatcccatgttataatgaaacatcacccctaaacactccaatatatgtctttaaatgtcagaaaatgtttgtatatatcagtgagttttgattttcgtactccaaacttacttttggttcttttttttaaaaaacctcttcagtgcatttgactgcaactattttttccttaaagctctcttgcctgtctctattttctaattattttccctccttcctcctggccactcttttttggtctcattcgtatgttcttctcccctgatccctgctcctggacacacattttaattatgtgataaacctgagtttcctccttcaacatccatcttacagcagggcttagtataagaactatttgcagagcaataagaacttaaaaattgacaaa

SEQ ID NO: 192370 - DNA, 443 bp, Homo sapiens
gataagcacctcactggtcatgattttatgtgtgtatgtatatatgtatgtatgtatgtatgtatgtatgtatgtatgtacacatgtatttattctctgcatcatatgatagtcatggttctttatctggagttacctaaaccttcattcctgaagagcctgggctattacttgtcctgcctagattggtttgttgtaacttccaattgaccttaatcacagggtatggtagtactaagaggcaccctaggggatcttctgtattccagaagatcttccttgcctccactatggagtagtagtccaatttcccattggtagtctggatcagtcaccgcagccaacaccgtaactccctgcttagcctgttgactcagaggcatgaggaaccccaaggggccaagtggcatccttatcttctgcttgagtggaatcattgttgt

SEQ ID NO: 192371 - DNA, 292 bp, Homo sapiens
taaaagcgggaggcaaatggattactgactgtggtctcctgctttccttcagagaacacacaatcaaaaaagtactagatctggactatcatagagaaagatgagactttgtaagcatataaggagaatatggagaataaataaatgtagctaatagttgtaggttaatgtctctgtctcagtaccatcatagagaaagacaagacttggtaagcaaaaattcctatgaagagaatatggagaataaagtagctaatagtggaggttaatgtctctgtctcagttggactta

SEQ ID NO: 192372 - DNA, 738 bp, Homo sapiens
ttcctcaagtgattttaggcagaatgtgtcactgcccttcctgtgtaaaataactcttaaaaatcatacagctcttcatgttacgtgttgacatagtttacagcaatcctacttgattagcttttttatatggaaaacataatcatactgtgtgtagccaattttaagattgtgttattcaagagtcttatattgccatgtaaataccatctcaaaatgtgccctgttgtgagataaagaaaaacttaagagatttattctattaagctatagctttttatctagaaaaatggcaaatgagtagaatttccatatgcaaatttctattaaataaagatttaaagcatgtttcctggaacattttacttatagacaggaaatgtcttgtgaaggtattgtgagcacactgctttctgatcagtaaaatttgggaattaaaatattttccttttaagattatggtgagaattaaaatatatatttgcaaaagaattggcaaatgcagatattcaataaatgttagctcccctcccagacaagcttatataaatgtgtgtgctccgtaaatgaaattcaaagtttaaagtgtatttttagaaaacagtctacttagtgagccatctggggcttatatggcatctttctagtaacagttggctctcctttccaccactatcagtcagtggggtcacagaataataaacttgtctgtcagccatgaaacacaagctctcattc

SEQ ID NO: 192373 - DNA, 508 bp, Homo sapiens
gatggacaacaggagagagaagatgagaaagctagagactgttctagaagtccacatctactgaataagtgatccagaaatagtaaacaaggaaaacagtaaccatgtaattaccaggcagtaatatgaggaaatgttcaggattaaaggatgtgactctccagattaaaagggttcatcaaatgcatagcataatggttggagtaaaacacacatacacacacacacacgcacgcacacacacacccctccaaggcacatcattgtgaaatatcaaaatgttatttaaaatcaaagaaaggccaggcgtggtggaatcctgtctgtactaaaaataaaaaaaaattagctgggcgtggtggcgggcgcctgtagtcccagccactagggaggctgaggcaggagaatggcatgaaatcgagaccatcctggctaacacggtgaaacctcgtatctactaaaaatacaaaaaattagccaggcatggtggcgggcgcctgagtcccag

SEQ ID NO: 192374 - DNA, 286 bp, Homo sapiens
ctgggggtttatgtcctcaaacaatggagagaaagtagaaatcttcaggcaggaaagtgacaaaaacatgaggattcaagtaacaggaagagcctagtaacattataatcatctcaaaggcattattcagtgttatactatttacatgttgctcagtcaatttggtcctgataccaatacaaaagaaatttaagtatatattacaatctattccactctatgatatcagtagtctcagggctcagtcattagccctcttctttactccctagctgacctaaccagt

SEQ ID NO: 192375 - DNA, 346 bp, Homo sapiens
aacatgaagcgtgatgcaagcgtatgggaatatttgggcattaggatggactctgagggattgcctggcacggtgaggaagctgtgtaagctagtgtccagatggctctccaggtgtttgattctctgctaagtcagcatcttgcctggggtgaccaactcccaactgccctccttcacagtccctgagcaggatgtggacacagtccatccttgggcctggtgtttggaatggaagcatggcacgaacccacctacagaaaggtaatcaggtccctaatttcatagctgcctcctttgctttttcctaggtggtatgtttttccactaatatgattctggcctca

SEQ ID NO: 192376 - DNA, 436 bp, Homo sapiens
tagcatgtccaatggtcaactcaatagctcatagttcatacatccaagtctgatctccagatttcacttcccaaaccttctctactcagttttcctgattccagttgatggcaactccatccttccagttgctcgggacaaaaccttggagtcgtcattgaccctgtctttctctcacacctcacagccaatccctcgggcaatcctgttggttctactttcaaaatgcattcagaatcccaccattttcccccagcccctctactcccacgctggcctgagccaccgcatctctcatctaatcatggaaacagcctcctgactgttccctttctcctactctgggctcactgcagctgtttatagcatggccaccagagggatcctttggaaacacaagatcccatcacttctctgctggcatcttactcagaaa

SEQ ID NO: 192377 - DNA, 583 bp, Homo sapiens
ctgccaggttatgttatctactacttgattttaagtgctatctgtgggatttacatgtaaactgtaaattgatgttttctttttcttacctatacaacagaaaataaagggtttcagaatttttatatcactggatattctggcaatgaaatattaaatggctttaggagaaatgtgttttttacaggggaaaacaggacacattataaacctctccatcactctaatcaggcttctgacaagaaaataatagggctgcgcaggaacacgtctgttcccatcccaagcacggggctctaggtaaagacatagcacagacggttagttagcggaaagtggagaggtgccttttggagagatgtttgtttgaatatttgtatttgctttgcaaggctaagcagcaccctttggttaattttgagggtgttttggcatctgtcacctgaagtgtgtgactcacccagattctgactcaatagatggaaaaagactaacctgctcacaagatattcatttcatgggtgaggagttctgtgaattaccattttactctactctctaatgctctgaacatatttcacaa

SEQ ID NO: 192378 - DNA, 277 bp, Homo sapiens
ttcagctagaatatatcttggttgagaatgtatctgatgatcatacacagaggcctggacaggcctcaccccaggccacccatgacactgtaatagagtgatcttttctacttaaaacaaaatctgggcggatcatgaggtcaggagattgagaccacggtgaaaccccatctctactaaaaatacaaaaaaaaattagccgggcgtggtggcgggcgcctgtagtcccagctactgggaaggctgaggcaggagaatggtgtgaacccgagaggcg

SEQ ID NO: 192379 - DNA, 426 bp, Homo sapiens
aacacaatccccgtatggggtgtaattacatcttagctttctgcagaagaatagtttatggcttaaatgctattaattgtaagccgttttgttccatgggaagttgttcattgataactacccaattagggttattttgcaattagtctattcacagtaaatttattgcaaatgggggagtctgtggtgtagcaaattaaagcgtcgctgaggctgggtgtgcaatggcttttaaatgccaatcttattaaccagctcacaggtcctgggagggtgcgctatcctggccagtgcactaaaggcctcaggacaaactccggcaaactcacactgcaaagccatccggagataacctcagcatgaccaggagaagtgcaggaacccctggcctaagatgctgaggttctgatttttttgaacaactgt

SEQ ID NO: 192380 - DNA, 521 bp, Homo sapiens
gtgttggacgacggtaagtcactgcaaaccagaactgctagagaagttcatagatctgagcctgccacagattatttctacattaacacatgcagctcgcatgttgcctgtggtttctatgcagacatctacactcaaatttttaaatgctgtgtattatgttttttaaattgctgcagcacaaatgaccacaaattcagtggcttcaacagcatccgtttatgagctcatagttctgtaggctggaggtctgagcagggcacggctggcttttctgcttagggcagcacaaggctgcaatcaaaatgttgactggtgggttctcatctggtgcttgggatctgcattcccgttgtttccttacggctgcaggactgaggtcctgtgtccctgctggctgtcagccagggactgcgttcagctcctgggggcaacatgtagtccttgccacatgacctcttccattgtgaaagccggcaatgattggccaggcacggtggctcacgcctgtaatcccagca

SEQ ID NO: 192381 - DNA, 367 bp, Homo sapiens
tatgtgtttatctgtgtgttctgtgactatgtgtgtatatatgcatatagacttgaggaagaggtaaaaccaaagatgtgggggtatgatatttaaatctaaagagagaagcaggtgctatatggtagaaaactaaatgctgagaggtttggacatcattttataggatttaggcaaagatgtgctgtgatgatatttttaagtattacttcagcagtggcaaggaagaaggaatagcagggacaaatctagaggaagagagtcaagttaggagttacagtaacccaggtgagagatgaagagaatctaaagtcacataatggggtatcctaataatactatcgctgttctatagctactctcataa

SEQ ID NO: 192382 - DNA, 341 bp, Homo sapiens
agaagacaaatccgggtctgcaaaggaaagaggtttccaatgtgtttgaagcctgtggtgtgaattggctgagaagcaggagaagggggaagaaatcagagaaaaatgtacactctttcaattgaagaagagaaatgggagctagaaaggaaacaagccagggatgaggggttgttgtgtttctggtttctttggcccagagaagattcatgtaaattcagctatgtccccatttggccctgcagtcaactgccttcttggcagaaaggaaaaaaaaaatcatgagactaattgaatgatgcccagagacagccagaaacgaacccccttgaacagctgca

SEQ ID NO: 192383 - DNA, 246 bp, Homo sapiens
aagaaagaaagagagaaatcagcggtaaggtaagcaggacccagaggagctgatattcacagttcttacatggacaactctttcaggaattatccataaagtactttattttacaacctgcttttcttgtaaaactaaaggtgcacttttttacataaaagttttatacagtgttaaaaccagaactgtgtgtaaaatactgcatgtaaatgtttctaaatagtcttgttccattggttcatcggt

SEQ ID NO: 192384 - DNA, 383 bp, Homo sapiens
tagctgggactacaggcgtgcgctaccacacccggataattttttgtattttcagtagagatggggtttcaccatgttggccaggctggtctcgagcttgtgacctcatgatccgcccgcctcggcctcccaaagtgctgggattacaggcgtgaaccaccgcgtccggccagctcttttcttttagttatgttgctatgattatttcagatgtgcttcctgggtctgtcctttggaatgtgtgatagggacactccccaaagaagggaacagggtgggtaggcactccaagtgtctatagaaaatatcacacttctacagttttttaaactttagagaacactctcatacattattttatgcagacgtctcaaggaaggact

SEQ ID NO: 192385 - DNA, 560 bp, Homo sapiens
tcagggaaattatacaggctgggactagaagcagatatgaatcagaggaggagtccatggaaaaggagtagaggaagaagactcttgttcttgttaatagcgtcctgggcagctttgcgtccttaaagtgaggaagggacttaatgtggatttctgtagcccaagagaagctactcaaggtggggccagtttcaggctgatacccagaattctggggttcatatggcccaggaggaaggccctttggcccagtccagaggtccacttcctccaggtagcctcaccaggactcccttcatccagtgttgttctctctttggcgtcttcaccttccaaacacacacatttcagaatcttctactttaactgtgcacgatgcgtacatatatgtgtatatgaaaactttcccgtgcatgaggttggagactataagcttggagttggtctccccatgagatggagagggaatttcagagggtgctgtcttcttttggtctgacctgttctgtagcacagtgggccctggacaggtgttggtgacccaggagattgccctgcct

SEQ ID NO: 192386 - DNA, 216 bp, Homo sapiens
tttttctttaattacttgaacatggaatcactttattttgtgagctaaacaacaataattccaataacttttcttatgaataactttgtttttttcctctaaataaagcccccaaagatggcctctgaattaatcagttatgggccttatgtatgtgaaggatccaaaattattgaaaagtaattgctagctaggtgcagtggtttatgcttgtaa

SEQ ID NO: 192387 - DNA, 1070 bp, Homo sapiens
tatgcaggtcaagtattaatttctagttcctcaacttccgtaagtactctttccctaaaattgatctggatgttatatttgcaatactctagttcttcttacccatctcccttttaaagatcacccttctctcactgtacaaaagaaaggttcccaaacacatatctagcagccttcctcatctatatcagttgttcaggccaataaccttggagcaaccttcactgttcttgtttactcacacctcatatctaaaccatcaggaattcctactgctattatcttcaaaatacatccagaatccaatcacttctcatcactgctatacccagatccactaggacttcatcagctgactaatctggtattagtacaaggacagatccttacacacttaccatctattctcaacacagcaatcagagtgatccatacagataatgtccctcaaaactctaaaatgactccctgtttttctcagataaaaaaggaaaagcccttacaatgacctgaaaggacctacagagagatactactacctagtaaccctttgacttcgtttcctactcctctccccaactcactcactctgctgtagacacattggcttttttgttgttgttttgtttttactattcttgaatatgttctctactagcgtaaggccttagcattgactattcctcagatggaatgctctttctcccagatagtctcatggcaaactatttcatcttggttcaagtctttgctcaatcattatcttctgaataatgccaacctggaccactctagttaaactgacaccccaaaacccttaccttctccacactgctggcattctcaaatctacttatactagtttatcccttcccccgcctcccataacacttaacaccatctaacacaccatgcaatatatttatttactgtggttgtagtttgtgcatccctcctctaatactaagtttcacaggcaaagatttctatgtaccttgctaactgaatacctcaagggtcaagaagagagctgcccagaatcttagcattgcgcaaatgctccagtgtgt

SEQ ID NO: 192388 - DNA, 487 bp, Homo sapiens
gcagcctgttccctggaggcctggtcagtggggcctcatctatggtgccaggcaatggggtcatgatcagtggaacctggtcagtgaggccctggtcagtaagaacctggtcagtgaggccctggtcagtaaggtcctggtcagtggggtcctggacactgttggcctagcagcaagggcctggttagtggggcctggtcatggggttctaatcagtgagagtgtggtcagggaggacctgatttcctccatcctgtccagcaggatgggctggacagtgggacagcctgtgtgcacattttgtggcaagtaggagtgacacaccatccctgggaggcaccatggttcctgccaaacccaaccccagaactctgtccctgaggtggttttaccaaaacccaaaacccagaattgtgcttgtggctcaggggtcagcacctgctagtaccaggacactactgggaggctgggacctgaccgaagccca

SEQ ID NO: 192389 - DNA, 225 bp, Homo sapiens
gttggaatgcctgtgcctctctgttgactgccttttccctcctgggttctacttctctggtctctcacgccaggcatcccctaagtctttctttcccatcagaactttcctcctttcacactgaggtgcaaatggttgataacagttgagagtgacagttcctgagagctttctctgtactaccgttttaagataattgtttataatagaaaatgtcaatcatgt

SEQ ID NO: 192390 - DNA, 563 bp, Homo sapiens
ggaggtggctattggggacaacaacagaaggagtcttatggcaggtgccagattcttcaaggctggggcttagctgaaagagccttccctgggcaaaccattcctgaggccccctctgtggccaaccctgccctccaagggcccctggtccagcaggtgggacagacacagaaaaacacaaccagactatcagctgctaccataagccacggccacaagacatgtctgtgacagcacacagcacactaatcctgaggccaaaactatgaccagctccatccggctgctgagcaaagggaggctcagagaggtgaagccacttgtctggtcactcaggaaggaccgcagaagcagaatgacagaagggaaggggggcaggcaagggagccaggcacggcttcccagaggaggactcttcactcagacacagaaggtcacaatcagagactctctgaatgccaggtttggaaggggatgttctgctcacccttcacgcaccctgctagctccccagtcctgttctcattcacccctcctcccagctgtcccctcagccatcagcc

SEQ ID NO: 192391 - DNA, 615 bp, Homo sapiens
gtactggtatgcaaatatagaatgacctgatggttcctgaacgtgttatttagctggtccaataaccttcattcacgccttcctccctgtcaccatgagatcgaaatttctctatactctggcatcccaacaatttggtattactcgtctgtcccctcaaagggaacatgccacctgtcaggtccagggtgtatctttcttcacagtattctaacccctgtaacataaaatacacgcaaatattaatctgattctaggcaaaaagtcactctaaaattaaatattctccaaatttaaagattgttcacacaatacaaagaaaacaatttagactgaagagaaccaatcatggaaaaaggctctaaaattttacatactttaaaacaaataaaaagtgagatttagtctctcaaaaataattaccaacaagtcttctaaagttatttaacacagaagccctcatgcactactggttggtatgtaaactggaataaccatcaaaattatatatgcatatatctcagaccagcaatactatacctgtgttctcacagaaattcttgctctagaatagttcttagacttttagcttattgatacctttaagaatctgac

SEQ ID NO: 192392 - DNA, 278 bp, Homo sapiens
tttattgtttagttatcatagcatctggagagcaagaaatatctagtatctcatatagaactgaataaattccgttaattactattccgattttctgaactgccaggagtatgaaatctagaaaataacacctgtcataaattttaaatccagccttcacatgacatatttcaagtactttaactaaccttcattcacgccttcctccctgtcaccatgagatcgaaatttctctatactctccagattgctatgtataactaaaaaattttttaaaa

SEQ ID NO: 192393 - DNA, 245 bp, Homo sapiens
ccactatcctagactagaaacaacaaggtgaagttttacagaggaaagactccactaccttgagaaaaggaaagaaaaaaagagacgtgagtgaaactcaaaaaattaaacacatttaagagacaaaccaacagaaaagaatagtaatgacaaacttccttcctctacgaattcaccaatagcatgaagtactaaagaaaataagttatgaaattagaccaatgtgggtttaaattctggctcta

SEQ ID NO: 192394 - DNA, 494 bp, Homo sapiens
tacatggcaactggcttgccccagagtgagtgatcagatgacagagtgaccaagaaagaagccacagtgtcttttataacctaatcttgtatgttacatatgattacttctgtcatattctattggtcacacagacaaaccctggtaccatatgggagaggggatttacaagtgcatgaatatcagtacatggacagcattggggatggatcatcctggaggctggttaccacactggcttgtagaaaatttcctcagaataaccatttcttcaagaaataccaacaaatatgtggcccctaaaatactagagttcccaaccctatctgggttggagcctgaacgaggacagtccaaagagcaggggcttcaaaaactgctgagagtctgaagattttatttcaattctgcatgagcatgcttttttcttcaaagccccacttcctctaggcctggcctcattatttcattcagccaattaactcaacttgtaa

SEQ ID NO: 192395 - DNA, 626 bp, Homo sapiens
agttggaatacccagatgtgcttagctgagggaccagtgctgcctgccttcatccaaagttgtctgtgggaaaggggacaacaatggtgccgaggtgtccgtctagtctgtccagcaggacttgtggcatcagaaaatctggcctttgttatacttggagcatcaaagtagacacagccactgaaccaggcaggactgaaagcagcagaaagagggcaaagtcacggtagcagctggctggttcgccccaatgctgctgaaacaggatgaactcgaccccatggctgagtacacactgtgaatccaacagcatctctgcatctccactgctcagcgcacagcttggccaggaggaagcgagactcgggacaagttgttgagtttaactgaagtttcattctgaagccttctgtgtgggcagggccactctcccctcccttggggcacagtacagatgcttgtcggaaagccatttgtcctagcaaaccttggaccccacactccttccgtcgttttccctgggcaccttgagccaaggggctgccaggactcagagcgcaggcctggggtcttcctgggaaagcagggagagggaggcagggcggggaaaagcatgctcaccaagc

SEQ ID NO: 192396 - DNA, 455 bp, Homo sapiens
catattaaaggtgaatgcagcaagctccacacaggctgcctggaagggacgcgggacaagggtaggttttccctgtgatggacaggagacaggcggccctcccacagccctgcctggcaaagcagatgtgtccccaaaaggcactgggggcagctggagtgctgtgcggaggcgggctcacccgggccctgggtttgctctgattgcagcggtttcccgccagctccttggagagctggcagatgacccagccccacagcaggagctgtgaatggcagaacgagatacaacaatttgatatccacttgccagatgagccgggtgtcgtcagtcgcctggctctgcgccaacctctttttgcacaaacacttatgaattcagccaggaggaaaagcactctgattatgaattgagcagaaggaaacaaagttctgcgaataaacaccaatgagaca

SEQ ID NO: 192397 - DNA, 114 bp, Homo sapiens
ttcccccggaagcatccttggagctccaggttggactaagtgctcctttgctgtacttttaaagtgctctgccaacattctattctctcattcttcctattaccttgaaatgac

SEQ ID NO: 192398 - DNA, 667 bp, Homo sapiens
agtacgtacacacacacacacacacacacacacacacacacacacccctacacacctgacccagctactggcaatgggtgcaactgagtttacctgatgtaaaatgcaggatcgctttccctcccgaaagtttatatgtaggattatcacctccaattaagggtcagtgttagtctatttaaacttttgccttcgtgtccctactacatagaatcatgactgcaactctagggaggaatatcagtcgaatataaaaatccaagcagacttcctagggctcagcaaagaacattacttgcaatttttctctttcccaatttctccttttccagaattctttgttagaattttggagaaggtatcatggattctgtaataattacagaagaagaaaagatataaggtgaagtaaggacaacagtgcaataaaaaaagatggataaaagtggcaggatttgaggataaaataatggctggagagatcaggttattaaaacaaacaagtgaaatggacagaaaaaaggaagaagaccctttggctgaggggaaggaaaaggttaacacgacatgaaaatcaagatttaataaaaattaatccttgaaaacaccatcactgatttaaaatcaatttgaaatagtgaaatagcaaagcagaacaaaataaatc

SEQ ID NO: 192399 - DNA, 216 bp, Homo sapiens
caaggggctgaagcattctgagcctcactttcctgctctgcaaaataggattcatggtcactaacatgaggctgaagtaggaattggcaaggcctgagaggctcaaaaaatgaagatgaacatgaacttaaatgggaaaataacagcacaaagtcattcatcaaagcagtgatgggaatcatagcagacacagtgaatcccttcaaacacctcatg

SEQ ID NO: 192400 - DNA, 318 bp, Homo sapiens
tgaaacggagtcttattctgttacccaggtcgcgagtgcagtggtgtgtgcctgtggtcccagctactcaggaagctgcagtgggaggacctcagcagtggccctgatgacaccactgcattccagtctgggcaacaaagcaagaccttgtctcaaaaaataaaataaaataatgtagaggggaaaggaaagtgggggaggtatagctaaatcaaaactggccatatgtgtggtggctcacgaaccattctttagcacagcatactggagaagccatgggcaaatacttagtaatctcttactttagaaggagggaag

SEQ ID NO: 192401 - DNA, 281 bp, Homo sapiens
tcacacttgcaatcctagcattttaggaggctaaggtgggaggattgcttgaacccaggagttcaagacctgcttgggcaacacagggagactctgtctcccccaaaaatagctagatatggtggcatgtgtctgtggtcgagctactcaagagactgaagtgagaaggatcccttgaacatgagagaccaaggctgcagtgagccttcatcacaacattgcactgtggcctgagtgagagagcaagactttgtcaaaagagagagagagaagaaaaaaat

SEQ ID NO: 192402 - DNA, 158 bp, Homo sapiens
attgagttttttcactgtgaggtgggacaggcctaaatttctccccttaggcctgccattcactgagggtgtgcagtcatcatgctaagttctctttcttgctccattttcatcttcactcaccccttactttctgcaaagcgttgatggtgttgggt

SEQ ID NO: 192403 - DNA, 385 bp, Homo sapiens
agaaaaattcatatattgaattttggctcttaaaagaacagaaagggctggtcttaactacagcaagtttatcttgcaaagatgcccaattttatggagccctgaaagtcgctgaggaatgctactcctaggctgtgaaagaagtggaagcccaggatttaaacaggtgcaacttgtttgtagcaatttttcttgctagtctcatgattattggggctccttttcttccttcaacagttttgttctttaagaggccttcccaaaacagtctcaaatttctcagatatatagtgaaaggtgaggcacatctgggaaaataagcagaggacagctttcagcagcattcattctgtgatgacattcttccccttattcaggtaattta

SEQ ID NO: 192404 - DNA, 149 bp, Homo sapiens
catagagaagaagggagacgtcttctggttgggatatcagccacaaatgtgttggatcctgagatatgaaaaggatttcgagtaggggaggctgaacgggtggaaatgagaagaaacagggcactccgggcagctagaatcaggttagc

SEQ ID NO: 192405 - DNA, 736 bp, Homo sapiens
tctggggtctggaggttggtggccatctgcgtgggggctccaagcccatattttccttccacatttccctagtagaggttttccaagaggatctgcctctgcatcaggcttctgcctggaaacagtgggagttgggggtggggggcaaatccttcaccaatggttaaacaccatctttttgatgctgaccttgtgagttctcatgagatctgcttgtataatagggcatggcacctctttcctctctctgtctttctcctactcctgccacgtgaatcatctcattgccccttgacattctggtatgattgggaggcttcctgagtcctcccagattcagaagccagtatgtttccttacagcctgcagaatcatgaggttctttatgatcatagagaaaattagtactgggaagtggatgtatgagatgtcttcaaggccttttccctattgtcttgggagtcggtactcggcttcttttcattcaagtatctgagggcttcttgaattttctccctgaaaatggacttgtcttcctttaccacattgccaggctgtgacaaagatagctgataatgtagaagcaggttcagaagggggtggcagacagagatcaggagagtttggagggcttcgaagacaggaaaatgaagaaaagtttggatctttgtaaagaattgttaactacttgtgatcagaaggctgacaggaaaatggccagtgaaaaccagacttg

SEQ ID NO: 192406 - DNA, 389 bp, Homo sapiens
gcctagtccacaggccatgatgctgcttcaatcatctacacttccatagcacctaggtgaatgtttatgctctatatgtaagatggatttaaaaatctgtgtaattggtatgactcatagatgccaaccctacttactgcttctaacccactcatccacaatgaagccacaactaaatggatatgacagtctcaggcttataaacaagaccatctaaggagcatacagattcaacaaaaattatcttgtagtaacatctttttcattacatgtaattctcaagggagcagatactggcccaaataagaaaacactgaaaatactaacttctgtgtgccctggaacatttatatcgattaagtgaaaggtagaggaagcaatgggaggca

SEQ ID NO: 192407 - DNA, 244 bp, Homo sapiens
gtttaccatgttgtatacttttttaaaaaaggtaaattaaaacataatttcaaaataaagtaatgaagctgatagaaaagaaaatattttcactgatttgtaaatgggttcataaacaactacattaatgaaaatacagtggatcctagaggtaaggactgtactcgagagcaacacgaaaggaaaaggggaccatgaccatcaaaaaaaaatttttggctgggtacggtggctcacacctgtt

SEQ ID NO: 192408 - DNA, 587 bp, Homo sapiens
tttgagcagaaattcgaaggaagttaggcatcaagctgttttaagtgcagaagccctgacgcaaaagtgtgcttgctgtattccatgaacaggagtgttcagaggtaagatggtgaccttctagactattagggatactttgtttttgacctttgttctgaatgagatgagatcactgagcagaggagtggtgatatatggtatgacttcccttctaggatctttctggccgctgtgctgagaatgggttgtaggagggtaaggattgaagcaggaaaagcagttggaggctgttacggtagagcaggagagagatgaggtgatttacctgcatcttggtgatagttgggaagtttgctaagttgcatacaggctggttggtgtatagtcagtcacccttcagccctctttgacttaatcctttattccagttccctgaaactgctctgccaaggtcatccataatggtgggttgccaaaccagtggatattcagaccacatcttactgcatctcttaccagagttatccacgtaatttatcctctttcttggatcccagcctgttggcttctgtaatctcataatc

SEQ ID NO: 192409 - DNA, 323 bp, Homo sapiens
ggacagagcctttacagttagtgatatataggactctactaaatgacagaagcagcaaaaatactgcaaaaagacatgcgtttttactctagagaatagttcctaaaagttcaagtgtcaatttaaagctaaggtagatagaaggtgagacattgttaattgtagctatatacttaagccctgttcaggcttttatctgctggtgacacattttgcttgttgtgctttgttctagtctatgataataaactataatatttctaaatcctaagcttccttattcctggctgggaaaacaaagctgcttctgtttcctgtgttca

SEQ ID NO: 192410 - DNA, 499 bp, Homo sapiens
ggctgatctttgtcctgtgggtattgggagccccgaagggtttcaggcagggactgggtattggggtggaggtgacagaatcagatctgcgtttttgagccatcactctgggtgttgactagaaggtagattggagttgcttccaccagctgccatagctgaggttaaaaaccggtggctggcaagacccaaaggaatacttatagtataaatccattcataccacgtttataagcaggcacagctcatctgtagcacttagagaccataggacagtgactatgtcaagaggtgggagagcattgccactgagaaggacggggcggcaggggatggccctctggggcaaagcaatgtcccctcctgacctggaaagtggctacatggatactcactctattcaccaagttggatgtttatgttttatacacaggaagaatgttctgtttcaccttagcatagcaacatttccagtactttccacccaacaaagactcta

SEQ ID NO: 192411 - DNA, 305 bp, Homo sapiens
gcagcacctcttagacatgggcgtgggggagctctgtctgcctgaggctgaattttctgcctgccctgccatagaggtacaggcaggattatattaatttaaaggaaataaacacaaatgcccaagtctatgcacagatttatgccataaaacaaaggaattagccttcattgaatgtctaatagccaatatttattgattcctccttatgtgccaggcactggctagctcatttaaccatcatagtggtcctgtgaggtagatgctcttgtctccataacatgatagacacattgaggtgaagt

SEQ ID NO: 192412 - DNA, 526 bp, Homo sapiens
gaacctacttccattactatggcattatcattgatgagggtagagccctcatagcctaatcacctcttttaatggcctcaactcttaatactaccacactggcaattaaatttcaatatgcgttgtggaggagacatttagaccacagtaaagaatgagcaaacacttgataggggctagcatgatgtgagagggatgtaaggagtctgatctcaatggaataaagtgttaattactgggaatggtggcagataaatttgtattagtagggtagagctagattatgaaaggtgtattggtgtcaggttgaatttaatctgctaagcaataaagaagccagtagaggttgatagggagcaagatgcgcgcatcttgctcccatcagggttggggtgagtgtgtcagatatttattgagctggaactcagcagaagttggacaacaatcaggtcgactacgtggtttatccactgatctagtgtcaatgcatgagagagtaactattagcactacacctgatggtaac

SEQ ID NO: 192413 - DNA, 637 bp, Homo sapiens
agactgggaagaaccagaacatggcactggcatctggcagggccgtcatgctatgtcatcccatggtgtaaggtagaagagcaagagagggtgagagaacaagaacagagagggcagaacttgctttttatcaggaacctacttccattactatggcattatcattgatgagggtagagccctcatagcctaatcacctcttttaatggcctcaactcttaatactaccacactggcaattaaatttcaatatgcgttgtggaggagacatttagaccacagtaaagaatgagcaaacacttgataggggctagcatgatgtgagagggatgtaaggagtctgatctcaatggaataaagtgttaattactgggaatggtggcagataaatttgtattagtagggtagagctagattatgaaaggtgtattggtgtcaggttgaatttaatctgctaagcaataaagaagccagtagaggttgatagggagcaggagaaaacatgagagtgtttttcagaaagattactcgttcaatagtgtgcagcatattttggggatgacacttgaggtttgtttgaaaaattagagaccaagccactgaggtaaggagctattctgagagacgttaggatgga

SEQ ID NO: 192414 - DNA, 165 bp, Homo sapiens
ctgtttatcccagtggcataccctgtatgaaatttcttaagagattatattaatgctacatttatggttttcaaaaatatttaaaagttgaaatctggctgagcatggtggtgcatgcctgtaatgccaacactttgagaggccaaggcaggaggatcccttgag

SEQ ID NO: 192415 - DNA, 254 bp, Homo sapiens
gtgagcacttattgctagtactattttgtatttgagcacataatgcacttgtgtagcttagattattaccaatttcatgtctctgtcctttttttttctctgaaactataagccttcttcatccattcacataatacttattaaggccttttgccaaaaacagaatcatgatgaagacaaataaaagtctctgccttcctagagagtatcaccgagcagggaaggaggcatgaggactgtgggggaaaagtata

SEQ ID NO: 192416 - DNA, 307 bp, Homo sapiens
ggttaggaaagagaatattcttgttcttagaaaatacacactgaagtatgaaggaaaacggcaccatgatgtgtgcaacctgctctcaaatggcttaggaataatacctgtgcatgtcagtacatagtgtgtgattgtgtgtatgtgtgacagagacagagagagaaagcagctatggccaaataacaattggtgaatctggttaaggaggaatcaagagttccaggtactattctagaaacttttctaagtttgaaattatttcaaactacaaccttttcaaaatctataaaagaaagttaagagt

SEQ ID NO: 192417 - DNA, 207 bp, Homo sapiens
tacacacccaccagaatgtctaaaataaaagatgaaaaatagtaagtgttgagggcacagaactgaaattctcatatgctgctgtaagagtacaaaatgatacaatcacacaggaaagctaaatgcatataagcataccctctgtcccaacaattccactccttaattatacactcaacagaaataaatacatatgttcacaacaat

SEQ ID NO: 192418 - DNA, 578 bp, Homo sapiens
gccaaaggattccttgggaacttgtaaaaggtagagtggggtgggtgacaatgaacatgtacttgtgggtttgttttctgggaatagtggaacctaaacttctacatctgaaaggaaaatagattaacctttttaaagtttattactgaatttttaggcctcgtgttttggacatgtgagtacaagccagtggtacagtgccagtcatttactgcgggcacctgagattgctactgatctacatcacatcagcaagccaatagttggcattagactatgtaaaaaaacaaaatccaggccgggtgcggtggctcacgcctgtagtcctagcactttgggaagctgaggtgggcagattgcttgagcccaggacttcaagaccagcctgcgcaacatggcaaaacctggtctctataaaaaatacaaaaattagctgagcatggtagcgtgtgccttggtcccagctgcttgagaggctgaggtgggagcttgagcctgggaggttgaggctgcagtaagctgtgatcatgccactgcactcttgtctggttgacagaaccagaccctttctccaaaaa

SEQ ID NO: 192419 - DNA, 737 bp, Homo sapiens
aaagccaccagtgccgcaggtcccccatggatggaatccctggggcaaaaggtccttttggcaagagtgaggaagtcaagggtgaacatccactaaccagaaaaagggaccgtcccctgcccacccccacaaccatggtgggtgcctggctaatgcctggtgctccctggagggactgctggcaggagggcaggaaaagacactccctagaatcagggagggccagtgcccaaagggggccccatcagcacctaacccatcagctcctaatgacctcagatccaacagtccacctttaaaataaatattttctaatgccaccccgatattgccaggaaataaaattcacagatactagaaactttcagtatacccacccccaatataattccttctaactgttaaggtgcagacaaactagaagaaggacattgtttacaacacaaccgtctgcatctccatgtgaaatgctcatacctacacagatggagtgaccgtgaatgtgaagaccactagtgccgaataagctggcgaccccctcccaccagccctgctgcttaacagtgaagtggagaaaagctcttggaaaagttccagattaaaagccagcactggagagtgctgcccttaggacactgtagaacaaccctccactgacagcaatcagaacactacacaacagaaacaataacgaatcccccccatcacacacacacagcgaccgacctgagggttct

SEQ ID NO: 192420 - DNA, 266 bp, Homo sapiens
tgtgctccgaccaccttgggtacagatcctcaggagctccagaggctgtcacaggcacatcctcaatcttggcaaaataatctaaattaaccgagacctgtctcagatatttggggttcacaggctcaagcacagcagcaaggaaccccccacccaaccatcccctgcaggtggcgagtgtgcgtcctggaggagggagggcagcttggtcctgggcactcaggagtgtggccgactgggagacggggaagctgagccttctggcc

SEQ ID NO: 192421 - DNA, 362 bp, Homo sapiens
tacttagcatctactccatgactgaattaagagatagatggggaatagattaagaagccactacagaattgcaaaaaataaaataaaataaagtgagttaaaatgtcagggtaatataggaaaatacattgggaaatgaaaaaacactccatgtgactgtttcacggaaatgaatgaccctcttcctcttctgtttctttcttaggtaaagactagggcagaattctatacccaaggttcagacctattgaggctatttatgaatagactttggtggtgtttgctgatcaaaaactctttgaaatgtataaaaaaacttgtatacacgtgtatttgcattttttctaggaataggatctgtc

SEQ ID NO: 192422 - DNA, 443 bp, Homo sapiens
gcctgggtgacagagcaagactccatctcggaaaataaataaataataaataaatattggatcggtgaatattggatgttagaaacaaaaccaggacttggtttggccaggacaaatcagaaccttaaatgtttcatcttaaatgactcctttctttccttttctcctaagtgacctaccctaacttctatataggtagaatttggtctcctattttgccacctaggggcttgcttaaagtgagatttgattaataggaatgttctactgaaaacgcgagagcaaaagccttcaaccctctatggggcccaaccttcctgaaagataagtttgtctatactgggaaccctacgaccaacaggttgccattcttcttggcctaccagattaaattctgttcaatttgttttctatttattgagttcctgcaatgtgctgaggct

SEQ ID NO: 192423 - DNA, 614 bp, Homo sapiens
aagatacaaataggggcaagggcagaacttaacttgggacctgtttagatagtgcagttgctgaaggcctctttgagtaagagatgttttaccaagtctgagggatggaaaaaagccaagagaatttcaagcacaaggcaccatggtaaaaagagctgaaggtgttcaagggactgaaaatacattgtgtgactcaggggaattggcaggagatgagatcagcaagggaggccaggggctgggtcaggccatggtgcagaacaggaaacctggaatgatttaggcaggagagtgataagacttgatttatgttttaaaaagattactttagctgctgtgggcagaatacactagagggaggtggagtggcggcagtagaaatgagaagatcaaacatgtcagttaataagtgagtactgtaatttcaactcttaagttgaacttactaagttaactaatcatttacaagttggaatatatgattgtgtatgtgttgatgtgtgtaaaagactggaaagaaacataaagatttgccaatgattgtgatgatggtgctgtggttatatgggagaatgtcctttatttttcaaagagattcagttaaggtctcatga

SEQ ID NO: 192424 - DNA, 613 bp, Homo sapiens
  misc_feature (556)..(556): n is a, c, g, or t
  misc_feature (563)..(563): n is a, c, g, or t
taagaaaaagaaaggggtggattattctcgtgaccagaggctgctcatcattcaggcctcaactacagtagcctctcttggagaggccttcactgacagcccatctaaaagttgctcactaacacagcgccctatctgatcttccaagcagtcatcatgatctgaaatgacctcgtctagtcctgttgccagaaggctcaggaggtctctggatactggtgacaccccagccccagccagtttccaggttcttgacaccttggagagaaagaattcaagaatgagttgaatgaagcaaagggcaagaaggtttttttttgttgtttgttgtttttgttttttttgagacaggatctcagtctgtcacccaggctggagtacagaggcgcaatcatggctcactgcagtcttgatctcccgggctcgggtgattcccgccacctcagcttcctgagcagctgggactagtaccacaccggctaagtttttggggttttttttgtttttgtaagaagcctggggcaacacaaatggaagaccccgtctttactaaaanatacaanaaattagccgggcatggcgaacgtggcacatgtaaatcccagctactcgg

SEQ ID NO: 192425 - DNA, 182 bp, Homo sapiens
aggcacgggagtggaaataaaatgtagcagaaaaaacctcaagggagagtgcacctctgcctatttgtattaagtagtgcatgtgtggatggtgacacacggtactcctgggatagtttgtgctgcttcattccctctccttgccacacaggatcctaatcgagtgtccactcccgtaccag

SEQ ID NO: 192426 - DNA, 396 bp, Homo sapiens
tgtgcttttggaaggcacatatgggaattatatataaaataatagcacgacctacattaatcagtggtagagaagggcaaaatcaaagttgcacctgcagcagcaaacatacagacataaaattatttctagcaattctcagtcttagtttcataattgttcttaccgactttagttcctattagttagctggtaatagtttgttgtagaatatgttaactgggtagactgaccatggtactaaatgaataacttaaatttgatctttatgacttacatgctttgctatatgcactttattttgaaacaaaaacttctgcttttttatgctagaaaggaaaaggtaagttttgttacactaaaatgaaaaacttccagtgtcaaggaaaaatacaa

SEQ ID NO: 192427 - DNA, 365 bp, Homo sapiens
agggcactcacaggatcctgctgtgcagatgcaggatccgcagtggggacaggatggataggactgtagagcttgtttgatgcagagattctaggcaggaatgtgaaagcctcaggtgttaagtttcactgtttttactaacactggatattaacaatttaaaacacctttgacatattttcatttgtatttcatgtcttgatggttaagagttgagctgttgagcctagttctattgttgactggctttctgctgaaaagctaacaggttaaatggtttgttaaatccagaaccttcgaggtaggcccacattatcacattaaactcacaagtgtggatcacaagtgaaggagtattgcacaga

SEQ ID NO: 192428 - DNA, 223 bp, Homo sapiens
cctggactcctatagaatctggtctaaggagctgatgaacaataaattaaaaatactttaagatgtcattttcatctattaaaatggaaaaaaatacaaatgtttcacagctcacagtattaacagtatgttcccatattgccataatctgcaaagattggaaaactccatgtccctcattagggacttgggtatatctctatagagcagtaatatgcagcca

SEQ ID NO: 192429 - DNA, 491 bp, Homo sapiens
cttgtaacacttccccagcaggagcaaacaataaaacactgagaagtacaaaggtaatacttccctcacaagtcaagatagcaaggaaggcatctggtacagagaagaactacctttacaatgatagggcagtttacgccaagacagtgatggacctaagcatgacctatcagattttgctttaaagaagaggataggttctcctttctccttaaatctatgttaatcactgaataacaaaagataataatatattaaaagctggtgaatgcggttgtccacaaaactttttaataagtaggtgaaggccaatttgtgtctagccacaaatgtacaaaacaagtgaatgcttactggcaactgttaattttttagaaataaaaggctaaaaaataaaaacaaaggaaaaaggggtaaagtcacaatgctatgtaagtaattaccttcaaacaaatccataaaactctggccaagcacttgtgtatgggtaa

SEQ ID NO: 192430 - DNA, 172 bp, Homo sapiens
tcacccccaccattaccgctgccaaaagtataagtagaaagaaaataagcaaaggcctgaagtggtgcacccaagcataaggtttcagtctctcgttctgaactggatgggctggtttggaagcaaagagtggctacttctctgcacaaaatacaccctaatggtagggatt

SEQ ID NO: 192431 - DNA, 326 bp, Homo sapiens
catcgagctcggtaccagtctgtctaccataagcagtaatttctaggaaatacaatgcagacctccatcttaaagctcccttgtgttggagtgtacaggctctggaaatgaagacggaaatggggaatcaactgttttctacatgccccccaactcaaagatcctgacaactttacaagcagaactcaccagttttctccacatcttcctatttcttttcttgcccagtagttcgatcctgggctcacccaggagggaagaatctgaactcagcaaatctactttattcactagggaacttttagacaatcctccaacccaaataa

SEQ ID NO: 192432 - DNA, 392 bp, Homo sapiens
atgtttgggtggggagaaacataaatttggcctatgtgcatgtccaggcatagtaccatcccttaaacttaattatgatatagattcttttgctcacatgttttttgttgaccttctccttatcatcaccctgctctcctactacattccttttttgctaaaataatgaaaataataatcaataaaaactgagggaactcagaggccgatgccggtgcaggtccttggtgtgctgagtgccggtcccctgggcccactgttgtttctctatactttgtctctgtgtcttatttcttttctcagtctctcatcccacccgactagaaatacccacaagtgtggaggggcaggccaccccttcaggggagcagaggcgggagaatgtcagacca

SEQ ID NO: 192433 - DNA, 333 bp, Homo sapiens
gaaagtgtttataagatttcaaggtgatgggctggacacagttgctcatgcctaataatctgcacgcctgtaatcccagctattcgggagcctgaggcaggagaatcacttgaacccaggaggcagaggttgcagtgggccgagatagtgccattgcactctagcctgggcgacaaaggtgaaactccatctcaaataaaaaaaaagatttcaaggtgatgggtttcatgtggaccaattttatccttccctgatgataatttgacatatgagtcagatattttcctaattttcgtaattcgagtgggtagtcacggactgggtagtcacaga

SEQ ID NO: 192434 - DNA, 315 bp, Homo sapiens
tggactgccttcactccattctcaacatagtaaccagagtgatcctttcactcatggtgtatcatgacactccttcctttgaagttctccggtagttcttcaattcacacagaataaagggcaaagaccttacagtggcctttccttcttcctcttttatttcctggacctcatttcctaatgctctctcccttaattcccttcgcttcctcttaggaacctttgagtttattaatccctcttcttcaagacgcttcctcagatatcttctgggcctgcttcctcactttctttggttttttacctaaatattgc

SEQ ID NO: 192435 - DNA, 317 bp, Homo sapiens
tacacacttttcctacacaaattcctaatacttacatagagctcactgtgtaccaggcaataatctagggattttacatatattacctcatttaacccttaccaccattctacaaggtaggtgctattgtacctattttactggtatggaaaccaaggcacagaaaggttaggaaacttcatggattcatagtccatgctctttaaccactaaggctctaaatctaaccgccatctctgaatttttatcaactgctgtctttccccaataaacaaggcttctgtatctggttttccatgattcatctgattttccgt

SEQ ID NO: 192436 - DNA, 551 bp, Homo sapiens
cctggcggcagggacctgaattggtttgtagttatgcttgtgcgcgtcctcataaccccagtctcgccctagcgctgtcccctttcctctccctccagcttttcctggactttttcacctgagggtcctgcagtaatggcaggtggcctgcccagaaccatgcccttacctgcttcttctccccattttgtttaaaggcagtgacagctaccagttactcaggcttgaggctttatccctgaattctgcctcgccctcgccttcctcatggggttcttacgggtctgagcctctggatgctctctcagatttctgctgtggatgaagggactcagctgctcgctgcaggtcacctgacctccctcatgccgtcacccatccactctgacgggtgggtcatatgcagaagcttctcagcacctggccaagttgtagctgatggtctgtccgaaaatgctggttcactctccactggccaactgtctgtctgcactgcactgccagttgcctcttgcctgggccattgcgctaacatctccactactgttcca

SEQ ID NO: 192437 - DNA, 496 bp, Homo sapiens
acttcttcatcttatgccctggagaaacacagaccaaagcaaaatttgactcaggttgtaactcaatgataaacttctgtctagagtagaataagctttattttgtataagacaaaaatagaacctgaggtacaaagagagctctcagatctgtaggtaaaattgttgggttcatgcataactcacagggcactacatactacccttttcttttgcatagaagaatgaacctcagagaggccaggtgtggtgacttacacctgtaatcccagcactttgggataccaaggctggtagatcaggttggagacgaccctggccaatatggggaatccccgtctctgctaaaaatgcaaaaatcagtcaggagtggtggcacatgcctataatcccagccactcaggagactgggcaggagaatcgcttgaaccctgatgttgccgttagctgagattgagccaattctcttcagcctgagcaataaagcaagacctat

SEQ ID NO: 192438 - DNA, 337 bp, Homo sapiens
tattgagagcttaatgtgtcctcaccaagatcatgttggttgagtgttgttattatactcattttacagaacaaaatagatcatcgtggatggatatgaaaaggtctccaagacacatcatttcatgggaggatgggggaagcaagttgcaaatctacagatgcagtctgacatgaatgacgtgaaaacccagcaacacataaaacaatgtcgatattttctgtgggcacatagatatgtctataaagtcttctcaagttaaaaacacaaaaggtatttaaaagaaaaaaaatcacaagattaccaggcttaccaacattacatttgttctttcatg

SEQ ID NO: 192439 - DNA, 384 bp, Homo sapiens
tctctggctagctatttgggaaaaagtaacatgaatgcctctctcataggttataccattgactcaatcaacaaatatttgctgatcacctattttaagcattgagaaaaacttagaataaaaaaatctttgccctcctaagacaattcgttaagcagtacagtttcatatgggtattttcctatatgtatgttaagcctccatttaaaagttaaaataaaaagcctgacttcatggatcttacattctagtggtgagatatagacactaaacaaaaaagtaaaatatacagtgtacgtgcagtgctatggagaaaacaaaaagcaggcagtactgagatgtgggttgtgattttaaattaagtggtcagggaaagtcttactg

SEQ ID NO: 192440 - DNA, 444 bp, Homo sapiens
tcctgaatgcagcctgctgaggcacaagaattgcttaaacctgggaggcagaggttgttatgagctgagattgcaccaccgcactccagcctggtcaacagagtgagaccctgtctcaacacagaacaaaacatactgagaccccgtctctacaaaaaaatacaaatattactcaggcacagtggggcaaacctgaggtcccaactgcttgagaggctgaggcaggagaatcagttgaacccaggaggttgaggctacagtgagccaagaccgcatcactgcactccaacctgggtgacagagcgagaccctgtctcaaaaaaagaaaggaagaaaaagatctttcctgctttcttgctaaggcaacacagagcccatccctaatcctttttccatgccaggactataatagagagaaggtgtcaccgaaaactagtgcctttt

SEQ ID NO: 192441 - DNA, 403 bp, Homo sapiens
cagcaaaagtgatactttaatgtctttaataaggagaaggtaacaaggaaactcacatttactatgtaaaaactaatagactacatactttacattaattttaattctgacaaaagcctctgaagtaggcattattccattttacagatgaggaaactgagctttatcatgcttaaaagtatgtattgctgtcttggggaaaaaggcaggatatgactactaaataatgaggttaactgcctaggaggctcatacactataaattcaccttgaaaattatttatgggcctcaaatttatgttcctgggaaagaggagcaaaagattaaatcatttttattagttcagtgacaattctaaaaatgaaacccagaaatgtactcactcctaaccactccaataat

SEQ ID NO: 192442 - DNA, 218 bp, Homo sapiens
tcacagaggaagtgtaacagtgatttattcattcaataatttttaaattatggataaaaccatatatctaggatttaatagggaaggggaatgagtgtgagtatggataaaatgagaatggccatttgataattatagagtgatgacgatagatctagacaaatagatctacctaagaaaagcttttgttgaaagagctaagcgttggtagctttgta

SEQ ID NO: 192443 - DNA, 438 bp, Homo sapiens
catgagatttgggcagggacacaaatccaaaccatgtcagtattccatatttcattctttactgaagtcaaagttgaaaacagaatacaaggtggaagctcccaagaatgaaaggacagactggtgatttctcagagcatgttagaatccttcatttaaactcaaatattctagcatccaaaaatgaatttggatgtgtagcatcattaattcactatgaagtaatagtgcatatatcatcacccaacattaaaagatatgtaggttctgcttactggcgttgtctttaagataaatcaccttttctgccttcaagaagctctatagagtaattaagcaaaaagataattgtaattaagtgccacggtagatgaaccaagagaggtataatggtaatgagaggaaggaatacctaagactgcctagatcacttagagg

SEQ ID NO: 192444 - DNA, 192 bp, Homo sapiens
ttcagagagaggagaccggagggagaaagtccttgtaaggatggctctgatttgcagtactcctgggccagccccaccacccagagacagacaagttatcctgtaactgtgtcccaaacacaggggcaccgtgacttgttttgtgggattaaatgaaagtaggctatttcctcatgcagtggactgcatttt

SEQ ID NO: 192445 - DNA, 378 bp, Homo sapiens
tcgtcttttgataggactgttcccctgtttttcattgacaggactgtctttctcacttaaggagcctggacacaggttccttctacacttctctatgtaagttgtgtgtattgccttttcctttccttaagcacctccaacacctgctttgctccaggctcccagggaaggagtcagagtcaggagtctaataggcacctaagtgtatccactttgcctgctctctggctgtcaggtgactgtccaaatcggtagctcttgtgtgcccaggttctattaacacttccttcctctatctgacaatgctttgtgcctccctgtgccaagaattgccttcattgacattgtcactacctatcaaaagacgatagaccatag

SEQ ID NO: 192446 - DNA, 541 bp, Homo sapiens
agttgctcccacttttcctcacgctatggaaatcccagcccatcagtgggactatgtaccaggggcaccttttgattaaaaggctggggcaaaatgaatctggcctgaagtccttggaagaaggaggaggaggccaggtaacaagtaattgaaacaattcctacagcagcttggtcagagattttaatggttatcaaattatgtccctaccttttaatttcttgtaatctgttccaaaaaggcaagaaataagatcagaaatacggagcaatatttatgcacaaagatgtcccctgcagtgttgtttataatagccccaatgggaacaacctaaatagccaatcgttagagaatgacttaagcaaattatggtaaaatattacatggccataaaaattctacttacaaagcaaaataagattcttgatgttggggaaaatacctatgacaaaatgttaaggaaaaaaaaactttttaaaagcagactggaattctctgtatgcattatgagatcatgtgtaaaaaagaaaaatcacaggga

SEQ ID NO: 192447 - DNA, 624 bp, Homo sapiens
ggctgatgctgggtagcaaaccctgtgaggcaggcggttccactcttgtttagcaggtcctgctttcttaagaaccttgagcagctgaaccgggattggaacccctttctaccacagctgctttgcatagtagctggtactgggaaagccctcgccccaggtgggtgactgcacgcaggcctcagggagcatggcttctatttcccatcattattaagaattggggccatagtggtgagtattagagagccctgtcccctcctctttgctttctgtcccctctcccgatggttcttcctgcccccacccccgggccagccccacagcagatgccctgggactgggaggaaacatgtgctccccctcctctctgggcccatgcaccatggccattatagccccagcctcagaagttggtcctggctgagaccagaaacctgttgtgtgtttagtcacctgcaccccagacgaacgtgctgagtaacatgttctggggactgcataaaccacctgtagtagcggccggccagcattagcaaaggccggagaagcccgagtgcccagtggcagggtgagtgacgggcgtgcttgagttggtgccgtcgccacaggtgttgataaata

SEQ ID NO: 192448 - DNA, 443 bp, Homo sapiens
aaccttcaacaaccagtccaggaaggcaacctactatgtccagtaaccagtccaagaaatcagattactatatttagcaaccagtccaggaagccaagcaataacccttgtagcaatctaccccaaatggccaggacgtgattaataacttacagcttctgtaagttttgtcagggcttccaactcaaggccagctagagagagccaaatatctacccacccctaaataattacataggatgccctgcttttagttagcccacctgcagcttctccatgccaacagccttgaattggcatacctgaagctttcccttttttccactctaaagctttctcactcctctgcctgccgttgagtctctgacaaatgcaagtgatgatggctgactcccttgctattgtaagctccaaataaatttggctttgcttgttctcattta

SEQ ID NO: 192449 - DNA, 491 bp, Homo sapiens
agaaagaaaagtctgatcccctctcccccaccacttctttagatgcctgaaaacttaagcctggcacccctgacaagccaaattgatctggaaagcctcttcagagaggccagttgcattaaaagaacaaataaaggactctccttgcaaaggagacaaggaagacaaaggggaactcaggggtggggcccttccccatctcggcagcccctgtaggtgaagacagggaggcagggcagtccctgcgtgagctgctcatgccacattatctgctttgtggtagaactcaaaccacagccttgaataaaaagccatagcagggaccaaaatgaggaagagaggttttcagcaccaacaagatggagaggctgacaggcaggcacagctccccgggtcagtgaattaacaccagcccgctcctccaggcagagacccggctacgagttatgcagccttcagggtccccaagcaactgggtcttcgggtcgttt

SEQ ID NO: 192450 - DNA, 417 bp, Homo sapiens
gggattacaggcatgagccaccatgcccagccatgtgggtgtcttgtagactctgtgtttttagattctttgattccacaagcactaagctgtctaagttattatagctttataataagtcttatctcattgtggaacccttcctacttgtctcttcttcaagagtaccttggctgttcttgaccttttgcagatcaatatatgttttagaattacttgtcaacttctaaaataattcttccagatgttgtttgggattacattgaaggtctacatctattcgtggagaactggattattatagatctctgaatatttttgtacaaggctttgtatgggtgtagactttcatatctcttgggaatggttggactaggactggaatggctgaatcatatggtaggtgtatgtttaact

SEQ ID NO: 192451 - DNA, 524 bp, Homo sapiens
atcaattcatacattatttacttcccaaaaaagtgtgaatggttatgtacacttttgctataaaattaagagtcctaaaaggtagtgtttattgcagatggcagtgaggggtggaacacaggtctggcatcagacacctttaccctgattatgacagtactttcttctgaaggggagctgggtatccatctgttaggtggatttttaagtaggtggggtatgtgtgttattatctgatgtatataggctttgaggcaggagaggagagttaaagcactgacaggcaaaaactgtggtaaattaccattctcatttaaaggcagcttcctacttaatcaatgtacacttaggggttggggcaagtcacatgtttggaaaaggcatcaaaagggttaggacgaggacaactgcagcaataaatgctgccaattaaaacatatggtgtgactgggaaagggtatacaaagacttttagaagcttctggggtgatagcagtattttatttcttgatggaggtggtgat

SEQ ID NO: 192452 - DNA, 431 bp, Homo sapiens
tttccctcctcatcccattgacattcttaagatggaaggaaaaaggcctattttttagcttgattaaaacttaatagctgaagtaaccaaaacattcataaaatgaggagattgaaactgcttacagatataatttttctctggagcatcctaaatatttattccttggtaatttttttttaaagtatgtatattagtactactagccattagtaaattttagttatagctttcctccctttcacttaaatttcctggaacatgaattggaaaatttttaaaatttagaatctgtcttgaattttttgaggtgacagctaggtagacattaaaagtagatagaatttttaaatcttgaaaatagaaattatattaaaaatgttctttgtcacctgtatctggaagtttgaaaggtcgttgttacacattca

SEQ ID NO: 192453 - DNA, 343 bp, Homo sapiens
tgatagatctagaggatcccgagatgcttccctaccagggatcagggagaggagggactccgtcctcagcttcagtcactggagcagtggatggtccaggagctccttggaagccactctgggcccaggaagactgtgccccaccccagggtctatgggactcccagggacccaggccgcaagtgctctttcctggcagtttagcccgggtctgcccagacaaggatttcaggcccaggcctgagtatccatttctcagtctcactggcctgacacctctggccaccctcccaggcccccttgttctgggccatctcccccgaccctcccaggcctcgtcacc

SEQ ID NO: 192454 - DNA, 456 bp, Homo sapiens
ctcggacccacattactgagtcccctgagcccaagatcacctgagcccaggaggtcaaggctgtagtgagctgtgatcgtgccactgcactccagcctgggtgacagaatgagacctgtctcaaaaaaataaataaataaaaataaacaaggccttactctgtattggctatttccaagaaagtagagaatcccagccaagaatgtctagggcatcataaatatttcctcaagaaactatcaacattttagaaccgggaaacatgacagtgttgattacagcaatgcttctcttttaactcaagtgttgcttggtatacattgtaatttacttcagaattcctatattatattcagcagatagagggtagcctagaagagtatactgattaggggctggtgatactttaaataagtctcttcttgtttttctgaaatcataaatggcaatattcat

SEQ ID NO: 192455 - DNA, 593 bp, Homo sapiens
caactggaaacaccctaaataccccccaccaggggcctgctgcataaagcacggggcatccacactacgcaagccccacagcagctaataagaagtagggagatgtacccgctgaggtgagaagctctctgaggtctaatactaaatggaaaaaaagcaagttgcagaatgatagatccaatatggtatcattcattttttaatcaaaaatcaatataacattgtttctgtggatacacataacactatatttcactgaacgtaagacaccgtggatggtaaaatgcaccattattttacagaccactgaaaaagaaaaacaaaacccactgtcaattaaaccatgacaagccactagttgaaagatgcacctcaatttcagaaatgttaaaatgtgtcttagaatctatgaaatacagtattacgtaaaggtgtaggagaaggtctggaatcaagaaagccaaaatggtaataacagtagttaacaagggggtggggacagcctgaagcctatctttgaaatttttacaaacagaatacatttatggccagacgcagtagctcatgcctctaatcccaacactttgggaggc

SEQ ID NO: 192456 - DNA, 239 bp, Homo sapiens
gatcgctggaagccaccagaagtgggaagacaaaaggaaggatttttccctggagctttcagagggagcatggccccacggacaccttgatcttggactttaagcatccagaactgagatggaatacatgtctgcgttttgagtcatccagttttggtactttgttatggcagctccagggaacttaatacagattgtgaaccagataaaataagtccatcactcagaggctgcaaaca

SEQ ID NO: 192457 - DNA, 566 bp, Homo sapiens
gagtaacagatgcatgaatcaatggaacagaatagaggacccagaaacagatccacaaacaaatggtgctctagcaattggacatccacagaccaaacaaataaaattaacaaatcgaccccaaagcctcaacctaaacctcagacctgatatgaaaatgaattcaaaatggatcgtagacttaaatgtaaaatgtgaagctattaaaacttttagaagaaaacaagagaaaatcttcaccaccaaaaacataatctagaagataatatatataagttgaactttaaaatttgctctgcaaaaagtgctgttagagaattaagaaaaaactacagcctgagaaaaaatatttgcaaaccgtctatccaacataggactcatatctagagaatataaacaactcttaaagcttagcagctaaaaaacagtttaattagaaaatggtggcctggcatggtggctcacacctgtaatcccatcacttcgggaggctaaggtggatgaaccacttgaggccaggggttcaagaccagcctacccaacatggtgaaaccctatctctacta

SEQ ID NO: 192458 - DNA, 267 bp, Homo sapiens
tcagtatcacgggaacttgttagaaatgcaaattctccagcaactagacctactgaggcagaaactctagggctggggcccagcaacctgggtttcagtaagcccttcaggtgactctgatgcacatccaagggtaagaaatgtttgcacacagcaccaggagagaagaacagcaatgttcccaacagcacttctttagagaaaccacaaactggaaactctgatgtccttcaacagtggaaaggataattattttatatcagaata

SEQ ID NO: 192459 - DNA, 123 bp, Homo sapiens
ctgctggaagcatctgttgcagagatgtagagaaagaaaagtaatatgtcatcttaactggctaaaagagaatggtatgttagtctattccttggcacagattgttatacaatcccaaatatt

SEQ ID NO: 192460 - DNA, 337 bp, Homo sapiens
agaagttttcttctcctcttgcaatgtctgtctccttcaagctcctttgctttcctgtgtattttggacactgtctttcctggtgcaggcttccctcaatgccatttgttgctagctgtctaattctatttaagaatgaggcactgaacacctgactgagacctctgtgggaagcagtgcctcgctgtggaatgactgggcatcactgcattgtggtcaggtactcccatgcaactgtaccttcacatccctcctgcaggtggttcaaggtacccgaagaaggctattccaaggtcttagctgtgggtgaaggcctggccacgttctgagatggtgg

SEQ ID NO: 192461 - DNA, 500 bp, Homo sapiens
tcagggctgtatatgacaaatttttttttacagtctttctgggtgtgaaatcaggaaaaaaacaaatggacgaaaggacagttttcttagaaggtgctaattaatttgacgataccagttttccgggaagaaatgtcccgatgatctgtgcagcatcttgactgggctttctgaggagttggagttctttttcagcagtcgcacaggtacattccttctgttgatacacaatgcttgtacaaactcacagcttaactttgtaataacacaggagtccctgacccccagtgttgtctaccaaatgttgtgtttacgtccgtttgtgactggggagaagggccttaggtgttacttgatactcagaagtctcctctccgaaagattaagaaccaccacagtgaaccagtatgttcagttttcaaactcaagcagagacagttaggagcaataaaatcagtaggttacagactttaaaaatgaaatacactcacagcttacac

SEQ ID NO: 192462 - DNA, 413 bp, Homo sapiens
tgacctcagttgatccgcccaccttggcctcccaaagtgctgaatttataggcatgagccaccatgcccggcctgacatcgggagtcttggtagagaactctggtgttcactgtgtggctctcccagcaaaaaacaggtgtgttcgtttcttctcgtgatctgtcatttgaacgtgggcaccgttgactgaactcagcagcacattgccaggtagaatttgtgaaggacgtacgttcattttggggtaggcgtggggaatatcaaattcatggaagcaatatgatcagaaccctgaaagctgttcttttaagtcgaaagatgtggtagatgttaagtaaagcaaattggatcgctgaaggaagtggatgaaatgtgttaataaggacaggtgaggagaaagctgtcactcatg

SEQ ID NO: 192463 - DNA, 243 bp, Homo sapiens
tcctgacaactgtggagctaagaagttggagacacatggctagggaaattgccatctagcaaccgaagccaaccttcaaaaattctaacacagactaagaatcaaagactacatgtacattacgatgctaaagagggactaagaatccactgccatgctgcataccatcagtgctccactggctttcaggtcccctatactctcagggctgctgatcattacccatgcgttctaaccacataa

SEQ ID NO: 192464 - DNA, 326 bp, Homo sapiens
cgggtttatggaaaggccaagaagtggtaaaatcatagattttcatacaaaatgaatgggcaattcaacttaagaggtttggtttgcttcattcctcatgcctgtgcttttaaaaagttagtaatgacaatagaaaactctgatctaaatctcctttagaccctgactctataactgcattctatgctcattttcataagataaaaccagtgtctgaaattcagtttcaagagaaataactccatctctccaacccctgtaagttaaaaaaaaaaaaaaaaaaaaaaaaaacagcaaaaaaaaaactcccttctggatttactttc

SEQ ID NO: 192465 - DNA, 285 bp, Homo sapiens
aaaatccagttgatttcccaactccaggaagtctcttttgcattttccaacttgcaatttaacccaggaacctactgtgtgtactgtctgttccactgattgaacagctttttaccaaaatgtgtctattatgggtgtcattttaactcaattgtaagattcattcagacagcactagatatgtgatgtgtgtatgtgtatgcgtgtgtatgttacacagctactagtcaacagtacttaaatacgtaacataatttccatttactgctgatagcctcgaatagc

SEQ ID NO: 192466 - DNA, 222 bp, Homo sapiens
ctgtgtctttatttccctgaaggccatcgagattatcttacacttaagcctattaagtggaacaaaagagcagattggaggaatagagagagagaggatggtcccatcggcgtaaaaaccagacatcaacgcacacagacagaggaagaggtcggagagaggacagtatcccaagtgtatggggattacttctgaagaccaggattacagatgcggaatata

SEQ ID NO: 192467 - DNA, 926 bp, Homo sapiens
acagctttaaaattcttctggatgacatgagtctagtgtactatttctcctctcaagacaactatttaaagtagatttcaacattctcttgaaggagatggcagttactgaaatatttaaagtagtggattagatttctgttctagaaaactaatttaggcagcaagaaatcattttaaagttccagaaagagaatactataaacttccaggttttcttttccccactaactaactgcaacactctactttttttccctcctctctggagaatttctggtcaaatctttaaggttcagcgtaagctcaacttaaggcttttcagcaccatctgcctcttagatacctctttttgcacacctactataatttatttataggtctccctcactagacaagtattacctgttcttatttgtttttgtagccctagcatgaagcagtgacggcccataaaaaggctgctacgtgaatgaatcaatctgaaaaactggctcatcttttagtgctatagttaaaatggcccaataaggagaattcccaataaagagattccctagcaggtgaatttggtgaattcatcaatatgaatgtaaatatcatggaaatctgaagccattatgcaaaacaaacgtttttatggttggttagagtgagttaggaggaccccaacgtaagtgcaatattatgttttggacaatttgtcttgctcaaaaatattttgtatttttgaatataatactatattcaatgttaatgtaacttgacaatgttaagaactcttttgcaattttcccaaatgcattgctttatctcagaccttctgccactcagaatgtcctatagcctactcacctctaccgcacacaacacaccttccccatcgactttaacttgtccttcaaaactcaacctcggccaggtgtg

SEQ ID NO: 192468 - DNA, 207 bp, Homo sapiens
gcagaaggaccagactctaagaacaaggaggtccctgaaccatcttcctaatttggttctgaatcaaggggcatcccctaacaaaccttccaaggaaagataaggtatccacccttggtttgactggtgcctgagtggagctgctgtgggaaggttccctcgccaagcccatccccatctccccagcacgctggggagggccggaat

SEQ ID NO: 192469 - DNA, 837 bp, Homo sapiens
gagcaggcagagaaaatgcgtcgtctatgaaccagggagtgcatccccaccacacactgaatctgccatgatcttgaacctccagccttcagaactgtgagtgataaatgtctctagtttataaattacccaactgaaggtattttattttagcagctccctactcagagaggctgtggcaggagaatcgcttgaacatgggaggcggaggttgcagtgacctgagatcacaccactgcactccggcctgggcgacacagcaagactccgtctcaaaacaacaacaacaacggttggatcaagaatgaaaggtgcacgaaggcagtgatgaatggaagccccttccaccctgggctctggaactgcacaggccaccttctaaggttgctctcctgtcatcctcccaagtctacacggatataaagaaacacactagaggtctctgatgcgatgggggcatctccagaaatccgaagattcaggttctcaacctctgatctgggtgggggtggggagctgcaattccagaaagcaaaggaagccttggctgtgattcagaccatttcttggtatcaagcgtgtaggggaagaaggatgtggacaagggaaagagaaggaatgaatgcggtcaggacgctggctggagaatgtctgggatggtgacgtgcagagaggagcaggctggctgcgtctctcactgtgcctgggacaggcggtgacagaggaaagggattccacatgagagtcagagacacccaatgaagaaaaaaaagcagcttacagggtgaaaaggacacagacacagacacgcagaagaatgtggccaagggatcgcca

SEQ ID NO: 192470 - DNA, 235 bp, Homo sapiens
tgcaatcccactcctgatcagcacgggagttttaacctgttttaatgggagtttctgacttgagccggttcacccctcattagacaatctggtggtcccctgcacccaggaagtaaactgtattgtagacacctgaatgacatagcaaaccacagcccacaactcctgggctcaagggatcctcccaccttagcctcctgagtagctggaactacaggcacatgccaccataccc

SEQ ID NO: 192471 - DNA, 443 bp, Homo sapiens
acacaacacacacagaggctattcagtatctaaatggggactcatttttgatatgggagtacccacatagggtctaggaattcataccacctcttcctttgcattcctggagacctttgctgctctgtctgctggaggttacacaagttcatcatcacagagtccaggatgtcccacccttggtttttcttcctactcttttcccacttgtcccaagcaatcctgcttatcttgcctattagaactattccccaccaatgcattagggctaaatggaaaaggaagggctggcagcctcccagagactgaaataacctcaagaatggacatttaattctgataatgcctcagaattcatatatgtgccaataagataaaaagaatcaaaaatgatttacacccacttatctccatttgctcacctctcaatcactcctcaacct

SEQ ID NO: 192472 - DNA, 611 bp, Homo sapiens
cttttgctaagttagctgaagacttcagaacagatcctggcctggcagggctatgccatctggctccatgctgagccccaggcccttgacaatttccctcatcctggggctccctgcccttcctcccacgcacccgtggcctccagggaagctcccaagtcccttcccaaaccccctgtacctgcagctcacactccttgtgccctctcctgcagccccattgcagggatcaagggctggccagcagccaggggcagcatgggccagacctctcaggacctgcaggcccctctggtcttctgccattatttgagatctatgcaggccacgtctgttactggtggcactgaccaagctattcacgaggaaggggacgtccttcacgttcagagggaggcctagccaggggcctcctcgccaggccttatcttgctaagctgtagccatatcctggggacctgccaggggcaccgcacatccctgctccgggctgtaacctcctgctgtttgcagagctcacaaggatggttaccacggccaccaggtgcaagaggcgttcttcatattcagaaggattcgagggaactgaccgtcctccctccaccccactg

SEQ ID NO: 192473 - DNA, 201 bp, Homo sapiens
aggaaaggcccatatgggccactctagtccacttagcacctttgtacaatcagaaaattacacctctgcttcaagattttacttcctttagttagagaaatgttgtaatatactgattagattagctcaagacatggtagccttctctgccactgtcattacaaaaatgcacccatgatacctatgatataaatggaaccc

SEQ ID NO: 192474 - DNA, 359 bp, Homo sapiens
ttgtctcagtgaaagacactaccagacaaatctagtcaggtttttgagccagaaaccttgacttcttcctttctcctcctccctttcaattcatcagctctacttagttcctcatcttgaacatctttccagtttgtcacgttctgttcattcccagtcaccaactgcattcaggacactgtcaatgttttcctacattgcttcactagtccactaactggcatctgtccagctctttcctcacaatgcaaccagaagcatcttcctaataagagagatcaaacctgaccacctgaatcaaatatttaatggcttccaattgccttcaagataaacaccctaaatgaacctgccaaccc

SEQ ID NO: 192475 - DNA, 435 bp, Homo sapiens
gttaagtattcagaaagagaataaaaatgattttcctaaagaccaatgcaagattattttcattaattagacctgggggatacattagccaacaagaaataacgcacataatcccaatctgagtcaactacactcagcaactgagccttatcctaggtcctggagtcaggaactgctcccctgaatctcacatcctgatatccaactgcctcctgggcacctccacctagatgtatccatcataagcacctcagacaagtccaaacttgtcttcctttaaaactctgttcctctctctggcccccctgttcagtgaaaggcatcaaccacccaagccaaaaacctggcactctttccatggctccttcctcctctttgactatacccacatacaacctgtcataaatcctgtcttttctaccccctcaaaagtag

SEQ ID NO: 192476 - DNA, 193 bp, Homo sapiens
catttcgaggcagaggaattggaggtggttgagggctatgcctgtatcacaagtgatatatccaaatgaaagcaaatctcagcctggattcaggcatacatagaaatgtgagttagcaggcatgcacaaaaccatcactcagcatgtccaataggcccaatgaagtcctgtcctctttcctgatgggagggta

SEQ ID NO: 192477 - DNA, 582 bp, Homo sapiens
gaatggctgagatgaatgcgtgttggaaggaaattagagagagaacaagaaagaacattcaagtaatggagctgatgctatgggtttagtgtctgtctgccagtttccggttgagtgaagccaaaactaaacccatagccacctggttatttactttccctgtttacatatctcctctattcactagaggctgttttaaaactgttctacgctctttaaactttctattattatgtttaaactttctcagtctgagttgagagagagaatgagcaaacgtttattgagttcttacgaaatgttaagagccagtctaagcacttttaataaatttacttattcaattatcacagtaattgtatgaattgattactctggtggtttgttgttgttgtttgtttgtttgttttttgagataggaacatttgataggaagaaacattcaaactatacctgggagtaaaaacacccctgactgagttccactgtttacacactcttcatccctttaattagtgtctacactacaatccataactaagcattttcatgtttataacgtcaacctaagcctgagtctca

SEQ ID NO: 192478 - DNA, 635 bp, Homo sapiens
cagtttcacagtctgtggtcaaagaaaacattggccaattattccagaatagatgtgcatagctaaagcttattcaaccctttgtaatatcattttattggaaagatgaatctcttcaacagcagaagaaaattagattgcaactagtattcatttctacatcagagccccaggctggagctatattaagccactaaatggtctgcagaaaattgaaggagcatgcactttgatctcaaaggactgcctacgtcacatatgacaggcatttataagagaagagatgtcctcctgggacctaatgctgaacagcagaaacaagatgtgagatcctgaggatgcagagacatttaaaaaacaacacagcccccaagataacattaccaataatgatacttgaaatgactgacaagtaagtttagaagtcttaatagaaattccagcgtttgtgggattttctgcggattgtaagaaaatcccatcctacataggcacagggatgtctgctcttgagtaggaagagtaatagaggttgagaacacatacctaccctctccttaaaatcctcctggctcctcccagtttatcagttccatctttgttttctcagactgcactatccactgacaaagaac

SEQ ID NO: 192479 - DNA, 793 bp, Homo sapiens
ggattacaggcgtgagccatcgcgcctgcccttactttcccattcttaacgcctcccgtttcagacctgtccccttttccccgcatttctgactgtcacggcacatcacaaccagcagacagggcttcccctatttcacaggagaaatagaagccatcagatgggacctccttcaaagtcctgccaccaaacctcagcatgtacctggacccacatgtatcctcttttcctttgggattgaattagagaggtgccgctcgaaacccgctcctgggtgggagtcttggctctatcagttatgcctctattctgtatgtttaacctcgccctcgtaggggcataaaacagcatttaaacaggatcaagctttccattttaaaactccatacactcccttaatttcatctcctcctccacctactgccccatgtctctccctcttcgtggctaaacgtctcaaaaaagtggatacactttctgtcaactcctaaacactcctcacgctcatttggcctctgctcctcccttcctcctcccacttcattggaactacttctgccaaagaggatccctgagtcatcctgactggtaaccccaatggactctactcaatatgcaacatccttcacttcttagcagagtttgaaacagcctgactctcctcttctggcaacattcttttccttggtttggggacgctgtactgttctggttttgcccctccctccgagcaccccctcctgtgttcagccctttatgtcggcattccttgtgtttgtcctggcccattttc

SEQ ID NO: 192480 - DNA, 579 bp, Homo sapiens
ggattacaggcgtgagccatcgcgcctgcccttactttcccattcttaacgcctcccgtttcagacctgtccccttttccccgcatttctgactgtcacggcacatcacaaccagcagacagggcttcccctatttcacaggagaaatagaagccatcagatgggacctccttcaaagtcctgccaccaaacctcagcatgtacctggacccacatgtatcctcttttcctttgggattgaattagagaggtgccgctcgaaacccgctcctgggtgggagtcttggctctatcagttatgcctctattctgtatgtttaacctcgccctcgtaggggcataaaacagcatttaaacaggatcaagctttccattttaaaactccatacactcccttaatttcatctcctcctccacctactgccccatgtctctccctcttcgtggctaaacgtctcaaaaaagtggatacatgtgggtccaggtacatgctgaggttcggtggcaggagtgcgaaggaggtcccagctggatggcttctaattcctcctgtgaaataggggaagccctgtgtgcggg

SEQ ID NO: 192481 - DNA, 578 bp, Homo sapiens
tgcgaacgtggcgctggagagtggcgctgcgagtggcgcggagcatgtgtgcgggcgcacccttcacgcggccctgtcacccgccgcgccctgcccgccgaggccctggcaggtggggggtgggcgctgttcggacgctgcgcgcgggaccacctctgctctcggtgcgtaaattcacagagaaacatgaatggatggcaacagaaaatgatattggaacactgggagtcagcagttttgcacaggaaacgttgggagatattgtttactgtagtctgcctgaagttgggacaaaagaacaaacaagatgagtttggtgctttggaaagtgtgaaagctgctagtgaactctattctcctttatcaggagaagtaacttaaattaatgaagctcttggagaaaatccaggacttgtaaacaaatcttgttatgaagatggttggctgatcaagatgacactaagtaacccttcagaactagatgaacttatgagtgaagaagtatatgagagatagagaaaatctattgaggagtgaaaatggaacccctaaataaactagtgtgaaataacccagca

SEQ ID NO: 192482 - DNA, 401 bp, Homo sapiens
gagattaatttggaaatgcctcgtcaccaatttcaacataagttgtaatcattttaaagacaatttgtagaatatctgtatattcagttatttgaaatatgcagatttcagctatctatccaatatattagatttgctgaagcttttatgacatatttctataccacaaaggttagtattttaaaatttacaaacaatgaacagaaacataatagaggaaatatattccattcattcatggccaaaaatttagaaaggaagcataagagagacagagagagaaagagggagagagacagaacaaaagagagaaatggagagaaagagaaaggaggaagagacagaaatagagaaaaagggagaaaattaaaaataaagcattagaagaaagtaagaaagga

SEQ ID NO: 192483 - DNA, 254 bp, Homo sapiens
gccactcccccaacacacacacacacacacacacacacacacacacacaaaatcagaggactgcagatatgggccggggggtgggtaaagcaaattgaactaaactccaaaaagtgatgcactgaactttaactttcaatagctatgtctgagttaacatgacagattagaattccaaggagccccaaatgcagagcaagactgtacccatctgccaactctttcctacaagtccccaccaagagcatcattag

SEQ ID NO: 192484 - DNA, 388 bp, Homo sapiens
tcaatcctgggttccaggtctgagtctagtagacctcttaattcaacattcattctacagatgtggggcctggaaaacagcagctattcagataaactttcattcaatacactgctcctatctgagtatcttacaaacactcttagataacaaaagttcttggcagtttcctggaaatgggggtctttaagacagttaagtttcagcacagcaaaccacacaaatgtgagctccacaaatgtatacagctgaggggtgcgctggatctatttttgacacaggcagtgatgtgcacaagggaagaagtcagtccagggcgcacatctccactgttcctttgctacgggctttcttggcttctcttctcctgggcccttccaagcaccgc

SEQ ID NO: 192485 - DNA, 323 bp, Homo sapiens
ccaagcaactgcaagtctttagaatttttgccagtattgatgcaggatgctggaataaacacacactttttttttccggtgtaaaacgttgatggtaggccatgtaaggcaaaatgttcccctctacatgtgtttacatttactctaataaaaatctgaatccttatttcagtttgttccttggctcttcttagatgaaggttcaatgatagcagagaagatgaaatgagcatattagggaatgttgtattgcacatctcagattcttctcaaataaatgcataaccttgtggtaaaactgaaactcgccatcctcatttctg

SEQ ID NO: 192486 - DNA, 253 bp, Homo sapiens
gttgtatgtttaacttttggaaaactccacactgtttttctctggtatctgtaacatttgacgttcccgttagcaatgtaccaagattccaatttgtctgcatctttgccaacacttcctttgtttctttctttttttctttttttctttttttttttttttttaacaagaaacatcctaatgagtgggaagtggcatttctttgtggttttgttttgtattttcctaatgactggtgatattcaacatcttt

SEQ ID NO: 192487 - DNA, 329 bp, Homo sapiens
cattagtgacatcttgccggggtttgctgctgccaccctgcctccccatgcacattcccaagctgcactaggtgaggaggctgcttctcagttcagagctgccccaagtggacatctctagcttccttcagacaactctaccatgttgttccaaaaaggttgttatactaaatggatagtattagaggacagaagaagtactaaccctgaggttagacagaaaaattgtgatgagatgaaaaagccctcgaatgagctgatgaaatagcaaaaaacaagataaccatctgccttaaatgaagactgccaccaacctacgacagctggcc

SEQ ID NO: 192488 - DNA, 512 bp, Homo sapiens
tatggcaggctgaataattggccctcaaagacatccccatcctcaaccccagaaccagtgcttgttactttatgtgataagaggaactctgcaggtatgattaagttaaagatctcaagatgggaggattatcctggatggacccaacataaccacaggggtgctcaaaagaggaaggcaggagggtcagattgagaggagatgtgaggacagagcaaagagtgatgaggtacaagtcaaaggatgcaggcagcctctagtggttgaaaaaggcaaggaacagatcctctctagaacctccagaaggaacacagctctgcctgcagccttattttagccccataagaccatttcagatttctgacctccagaacacaagttaataaacttgtaatacagttgtgttgtttggttgggtgtggtggctcacgcctgtaatcccagcactttgggaggccaaggcaggtggatcatttgaggtcaggagttcgagaccatcctgggaaacatga

SEQ ID NO: 192489 - DNA, 374 bp, Homo sapiens
cagggagctgcatcataatcttaggatcaacaacagcttagggtccacggtgaccttctgaacctcgtctgtctgattcatgccttgctagtcagtcgccatcttggatgtgtgcttcacccagctttccttcattggctggcttccaacttattcctggtcagtgtcccgcattgccagtcttcttggattccaggcctatattttgaggcataagccccttttcccaatgttggtgttctgccaatggatagaacttaatccttatttatgccccctagttactcatggagacactgaggatgtttatctgcctttcagacctcctgggccctgaagggaaaaaactctgggttcttctgaagcttttagtg

SEQ ID NO: 192490 - DNA, 509 bp, Homo sapiens
tcgtctattgataggttgggtgggttaggggagagtttctcggcaggcggcgcccgcgcttcttctgcttcttgcctatcaaaagacgagtaacgccttcaatggcttcctaccgctcttaggatagaaaccaaaatcccataaatggtctaggaggccctacatggtctggcctcaacttacatctctagcctcatcttgttccacacacttcctcactctacacgtaaactacagtgaccttctttcattttctagaacattccacactcccttccaccacaggacttttgtggtgctctttccgtcttctggaatattctttttttccccattgtgatggagagaataatagtcgcccaaagatgtccatgccgtaattcctggagcctctgaatatgttaccttacatggcaaaagggactttgcagatgtgattaaagttcttgagatggggtgattattctggattagctagtgggcccaatataatcacaagcgtctttatg

SEQ ID NO: 192491 - DNA, 581 bp, Homo sapiens
ctgttccattgacagaaaaatctcaggcagcacttaaagcagtgacagcaatgaggcaagagcttaatgatagctatcattatcagcatgattatttccatagtcccagatcagtcttaagaggcggcaaacaatcaggtgatatagtttcagggctagataaaggctgtcccctaccctcaaataatacttctactacggttgctggtgctcgaattttcacccccagaaaagaattcctttggctttaggctcagtttgtgaaaatgcaaagtcaagattgatggaattttaaacttatttacatcaagatcacccaaatttgttagatatcttcaaggcaagtttgctaaggaaaggaaagggaggatgtgagggcataaaaacaatcttagggcaaaaatggataaatgaggagccagttttccagtgagacagacccaattatgcaaacaagggagtgggctccagggtcaatattaattcgcaaattagtggccagtaccaatttagcaccatcgctcatctccttctcaaaatcatctatgatatagcggtgatgctgctttatttacagggca

SEQ ID NO: 192492 - DNA, 677 bp, Homo sapiens
tccaaggtgtgtgttagtcctctttcctcagacaccctataaatttatgaagggaagagaaactaattttaaatgattttgcacagtaccaaagcatgtcacaggcaggaaatgagtatttgattgcttgatttagttctatgtccagtgtgtacttgtccagaattacctgatgaaccctaacttgacgagaagaaaggcacattggatatgcacagagcagatccagattctggtacccctgggggtgtgaatgaacagaggtgttcttgccggcctccataatagtgtctctctttggccagcacctcatttttgtaaccaaaaccagtatacaaacaccagcattttacacaaactaaaaaatagctcccaaccatctattcatggcattattaaccaacagtaaattccacttggagattatttcctctaattagatggactgagaagtgatcccaagtcccccagaaagagactacaggcaactgcaacctcccctgtgattagatacaccatcaaggaaatgattcaatcccaagccactgagagctgcctgctctcattaagaaagagcttcaggccgggcgcagtggctcacgctgtaatcccagcactttgggaggccgaggcaggtggatcacaaagtcaggagttcaagaccagcctgaccaaga

SEQ ID NO: 192493 - DNA, 230 bp, Homo sapiens
cttaccgggggccatagatctctcttcatttcagtccctgatacataagacagaacagtcctccaaacacctggccacaggccgagcttttcacgaggtacacgccacgcatatgtatagcctctccagctttccatgaggtacacgccacgcatacagcctctccagctttctacgaggtacatgccatgcatacagcctctccagctttctaccaggtacacacaatg

SEQ ID NO: 192494 - DNA, 489 bp, Homo sapiens
tgacagattgctggtggggagaaggttcctatccaaaaagatgaaaccaaaggaaacgggtagatataaacagcaatctgaagtcagcaagaatcaagcatggaaacaggtgtttgcaagtatccacacagtccccatttcaaaaaagtttgtgaaaagcagactactattaatctcacctaattcaggttaagttagaattctcagctgttggctccacagcctatactcgattaaatcatactgcttcctactaatactagctgccactaattgagcaactattatgcggccaaatcttgacacattttcttttttttttcaggcagggtctcactgtgtcacccaggctgaagtacagtggtgtaatcatagcccactgcaaccttgaactcctgggctcaagtgatcctcttgcctcagtcacccaagtagctacaactatagacctgtgccaccatgcccagcttatttttaaaaaaattttgg

SEQ ID NO: 192495 - DNA, 344 bp, Homo sapiens
catattttatacttgcttttataatttatatttcatttcagttcttaaaaaagcactacacatttaaacaaaattcatccccctaaaaaatccatagagagaatttttaaatgttaggatagaatataaattgaactgtagacttcaaggttttaagacatcatttctatagaactgcatatgattccttaacaatttctagaccctgcactgtccaatacaatagtctagccacatgtggcaactgaaatttaaattggctaaaatgaccaaatgtagaagttcaattcctgagttacaccagccatacttcaactgttcaacagtcctatgtggctagtggc

SEQ ID NO: 192496 - DNA, 431 bp, Homo sapiens
gggcccaggagtggcatgcaaaagaacagaaagttactgtgtttatggccgttagaaccaaaagtgcttctgagagaatgaaatctagcatcctagctttctagaagaagaaattaaagcccagggaggagaggggatttgcctaaggtcctacatagcccatatgtgaaatgtcctcagccttcccaagcagggggactccatggggatggatgggtcatctcccttttgatttgacatagtccttaatcagccatctttctttggtccaattaggtttggtcatggtagtaggattgacttgcttgaaatacaatggctgctttaggagttggtaacttaatatttcctgatctgaactatatatctgtaataaagatgtatcaatgatcttctatcggctatttaaaatttacatatatatatatgat

SEQ ID NO: 192497 - DNA, 776 bp, Homo sapiens
gcaatgtgttctgtcaccatgaagatgaaaagttctcccctcatttttaaacttcagattctatatggaaatacagcaatttaaaaaaaaggtgccaaaaaagaagagtttatgaatacaaaaccattttagaaaaattcgtgaacccaataaatcaaaataaatgattgtcaaacctatttaaagtactgattctagaagtctgaggcatgcatttggagccaatgtttataaatcctggtccctgtttgaaaatggccattgacactcattgttatttaatatgggagccaaagaaacactgtgataactcttctattaacaacctcatgaacgtcttctgaagttgatttccatactgtattgccaatgggtgtcttcaaacatccctatcccatcataaggaagcaggctgtttttagagggttcagttaatagttccaatacagaaggtggagagtgcatctggcagacagaatgtgccataaatcctcactaatggctagaacagcaggtcctccaaatggaggcggaataaggatggaactgccaaggacccatggggccattcagcaagacgcaaaggggaaaagcaagcactgcagctccctaatgagagatggcagcagaggaaaaggccttcctaatgaaaacctgtgccaaggagtaagcatgcctggtagcggccaaattcccatttttgtgcaagaaacaagaataaaccagctgcatcaggaatgtacaaatctaatctgaccagcagaagacaagaggag

SEQ ID NO: 192498 - DNA, 674 bp, Homo sapiens
gtcatttcttcccagattgatctgtagattaaacacaatttcaaaatcccagcaagctcttttgtagttactaacaagctgattctaaaatatataggtaaagacgaactacaatagctagaatgattttaagaaggaacaaaattttaaaaaaatactactactacccgatttcaagacctactacaaagctatagtaatccagaaagtgtgatattgacaaaaggatgggcacatagatcagtggacaaaacggctcagaaaatttacacctatacgtatatattcagctgggtttttggcagaggtagtaaggcaattcaacagagaaaggatggtggttacaacgaatggtgttgaaacaattctacatccatacacaaaacaaaaacaacccaaagtctgaaaataactcaaactttattaaaaaattaactaaaattggattatagacccaaatttaaaacaggaaactgaaatttagaggagaaaatccaacacaaaaagcaggatccataaagaaaaaactgatgtattggaggttgaacttaagttttgctctgtgaaaggcactgttcagagagtataggacaacctacagattagaagaaggtatttgcaagtcacatatccaataaagagtttgtatccagaatattttaagaattcttaaa

SEQ ID NO: 192499 - DNA, 710 bp, Homo sapiens
ggacaatgtgtatatggggttttccccctcaaacttgagaaagaatagaaagttactaagaaaagccacctataacaccatgatagataactattattaacattttgtcaggtatacccctggtctttatgtgtgtattcttaatatcctaaactattaagagtccattctaaacactctcagcctggctctttcttaagaacttaccgaaatgtaatctgcctcaccatcttatttcatataagatgataatagaagtcatctgttaccattgcttcaacttttctactcttctgcttcatttaaatgtgtaaatttgtaaattacagtatcttactctctgactcaaaacctcccagtagcttttcaatataccaaataaaattgaaacctcttactgtggcttatatacctcagaccagcaaagtccactagaaatacaacgttagtcacaaatgggagctacattaagtaatttaaaattttctggtagccacattatgaaaaaaagagaaactggtgaaaatacgttttatgtaacccaaaaactattatttcaacatgtaatcagtataagaaattgttgatgggatagttgtctttttttagactgtctttataatttggtgtgtattttccacttaaagtacatctcaattcagactagctacatttctttttttgtattttttttgagacagagtcttgct

SEQ ID NO: 192500 - DNA, 533 bp, Homo sapiens
aaggaggcatggaagccagagtcaaactaggtgagagatgcttattttaaaatatacaggtagaatgtcttgtttttctttttaaaacattttttcaatattttacatattcaaaagaggtacataatgtatcttctgttctcattcttggccagaaataaaaataagaaattttacacatcacatcataaactctttaagcaaatacaaattgaagtgtgagcaactctgcaggcagaggtgttaacttcagtaaacttcttgctctttctctctgacaaattctgtttagctcacaaagaaatcaatgctttttcacatcactgattttatgaagtttgggaatgtattatcatatagattgacagttgccccactggttccacaccacggcatggacacttacaaagccatcattaatttctcacacttgtacccagtgatggcttcctccataataaacactgtgtccttcagaaccaaatcaataaccttttaggtatgcctttcttgaagaggaagtaacaggaatc

SEQ ID NO: 192501 - DNA, 1127 bp, Homo sapiens
ggaatatcagtttctatcatggggtgataaacagaaactcatcctcaggggctactgagatatatgtcaggtacccctttacaacatgacctcacactggtgtgcttttttcagttatgtctgtttttcacagtttctctatcttcccttataatcagctgtcacttttgccgccgtcttgtgtgcctgcctcctgcaataggtccctaatttgctgcttctaatctgctgtggactgagaaaccagattgccaagcttgctagaattgtgtctaaaataagagtaagtagactgaaagagagctaaggggcttttctgtcagtaaagtgcatggactttgtgatacctgcttgactgcttagcattgttttgtttgcctcttagttctttactaaaaacttgctaaaacaaatacttggttgaatatgtgattgccatatatttgaagttctaattcagtttttatataatgatgtttctaggacttccattaatgaattcaactataagagaaatttgactatcatttttgaataaataattgtgtatatttcagaaaaatgttaaacgtattgttatcattaattgttcttagtacagtacacagatttaaaacttatggcactataaatgtaacttcaactctgttcatcaagacttatgttctagaaatattgttatgagactaaagatggctaatttagtaagaactgggtaacttgaatatttggggaatgagtcattctagatatcccagtttcctgcagagcttgaacctctttcagccctaaaattttttggaataatctctgaaggaaatcttcataaaattgatatgcattactgtcttaaataatatatgaatgtattttaatttgtttggtatcaaaatgatcagcattaacatcacttattataatctgatagactaatcagacattgagagctgtttgtccctgtactaaatggctccattctgctgtactcgttttagttttcatgtctttaacagtcgttctgattcttccatttctattactgcttgcttaagtgtgcctgtagcagtagcccttctccaccttcataatgtgccttctgatctgctttcattttggagaccagacaa

SEQ ID NO: 192502 - DNA, 358 bp, Homo sapiens
taataatctatccttgagtcaaccatttcctccttcccttactccctatatccaagccttcaacaaaccttgtagctcatatctccaaaatatgtcttaagtctctccaatttatctatctctatgactagttccttaacccaagtcattatcacctcttatctatagtggtagcctcctaacagatctcccttgtctctctttaattatctacacagtagcaaaagtaatattttaaaaaattaaaaccaatcatgtcattctctagctagaacactttgcagcactgtccagtagaattttctcaataattggaatattctgaatctgcactatcaaatatagtagccaccagcca

SEQ ID NO: 192503 - DNA, 650 bp, Homo sapiens
tgcttaggagcctgtctgcctcccgctgccatcaacatgctgtccgtggtgcccagctgtctatgctgaggggcacccacaggcctgtacaaagtcacgcttagtcctctggtctccctcctgcgttcattggtgaccaaagtctagagggggctgaagcaccagtcggggaggggagtgctggctactctgcatatgtgcacacctggctgggtcatgacagcacccgcgcttggctacaactttgcactgaagtgggtgccgggagcggggagaggccagggagtgcgagtaggcacttccaagcctgcagggaccgggggtgcttcctggacccccgagagtgcagggatgcctgggtccagagccgtggctgggtggccgcagctgcacctgggagcatggggctcctgcccagccgacttggtagggggcagggctcccgcccattcctggcctgtgttagctccatggagtgcagcagccctggccacacctcccccattgcagctggtgtccccacagtggctgctccagatgggccaccacgtcctcactaattctaacatgtacatagaaatgcaaaagttctataatggagaaagtaattagaacaaagttgatggaagcgtcgcgcatggggatcctct

SEQ ID NO: 192504 - DNA, 422 bp, Homo sapiens
ctcaatgtctcaaaaaaagatgagagaaaacattgtaaaaactaggactttgctttcagatgaactttaaattatttttctacctaaaagaaatggaaactggaaatgggagttaaggtgtgatttgtgtgaaagacatggcagattccaaccagggagggcctccttgaagaaaaggtcctggtcctgcatcaaaatatgctaaatgaatgtatatgttttatttttattatttatttatttgtttgtttttgagacagagtcttgctctgtcacccagactggagtgcagtggcgcgatcttggctcactgcaacctccgcttcccgggttcaaggtattcttctgcttcagcctctggagtagctgggattacaggtgtgtgccatcacgcccggctaatttttgtatttttagtagag

SEQ ID NO: 192505 - DNA, 153 bp, Homo sapiens
tattatggtcatttagctgggagtgggagagaggtaagggaatagtgaagagggctaccaagaattcaggaagtttaagagacagggagcctcctgtataagttagaggagaacaggaaaggcagggctttgaggagtccttaggccatagac

SEQ ID NO: 192506 - DNA, 656 bp, Homo sapiens
caggtcttttcccctcaaaatctggccataaactggccccaaaactggccataaacaaaatctctgcagcactgtgacatgttcatgatggccataatgcccacgctggaaggttgtgggtttaccagaatgagagcaaggaacacctggcccacccagggcgggaaaaccgcttaaaggcattcttaagccgcaaacaacagcatgagtaatctgtgccttaaggacatgctcctgctgcagttaactagcccaacctatttctttaattcggcccatcccttcatttcccataagggatacttttagttaatttaatatctatagaaacaatgctaaggactggcttgctgttaataaatacgtgggtaaatctctgttcggggctctcggctctgaaggctatgagacccctaatttcccacttcaacttcacacctctatatttctgtgtgtgtgtgtgtctttaattcctctagcgctgctgggttagggtctccccgaccgaggtggtctcggcaggccagcattttggttccagccttcagcttctttcaactcccctggaacaatctcatcacagcccctctgggctattagcaccgctggacagcagctcccccttagaagtctgagtctcctcgctgtgagggatc

SEQ ID NO: 192507 - DNA, 579 bp, Homo sapiens
aaaaattggttctttgacaatattaataaaattaataaaaccacagtaatagacatcaagaagaaaaggagagaaaacataaatcatcaatatcagaaataaaagatgagttatcacaacaaatctaaagacagcaaaagaataataagagaatagcaggaacaatttatgccaatacattctataacttatttaaaatagacaaaaagttcaaaaaataacttaccaaaactgactttaatatagatgtgcattatgctaagtgacataagccagacacaaatgaacaatactatatgattccactgatatgaagtatttagaagaggcaaatgcatagaaaaagaaagtagaacagagactgccaaggcctggggtaagggaagaagggtgttactgcttaatgggcacagagtttctacctgggaccatggaaaagttttagaaatagatggtgacaacagttgcatgacattgtgaatatagttaatgtcattacattgtatacttaaaaatggttaaaatgccagaagttgaggcacaagaattgcttgaatttgggaggcagaggctgcagtg

SEQ ID NO: 192508 - DNA, 406 bp, Homo sapiens
tttgaaaatggaaatgacaacatccatttaacagggtttagatatattgaaatgctatacataaagagctcagcacagtgcttggaacatagaagatgctcaaagatgttaactttaaaagaggaggaaaggtaggggagggtggtaattttcatgctcagaattaaaaaaaagtcctaggaaatttatttattaaatgcacaccatgcattcttttgagaaagacagagagagagaaagagactgagagaggggagcttgggtgaaagtgtcctttagcatttgcattgctcttagctggatgaacttgcctgcagccaccacttacaatgcaaattgagtttagagtccttcacactaactacacagcaaaaacctttcagctttaaatagaacactgcaatgt

SEQ ID NO: 192509 - DNA, 512 bp, Homo sapiens
caataacagaggctgcctgtaaggtagaggaagacaaaggtggactgggtgagagcaatgaggaattcatgctaagtcctagttgagggaagggtgagtttggtcggttcctacatcttgagggtttcctaggagaccctgaaaacaacagaagggaactcaggcatgaccatctgaaatagtactttggcaagacatgaccttaatgagcctctctggaacgaggaactctaaggttttatgtactgagatgaaagtaaactccttggtctactttctgtcattccctagaagtcttacgtttttttttttgtttttttttttttgtcttttttttccccaaagaaagaacagctgtctaaatattggagctagccacaatggatgctgtgataaaaactgagttctaacaattgtgtatacaatcaggggaaagccacattttaacagaaaattttcctcactttgtgagtatcatggattgatttcaacaagcaattgtccctaaaacc

SEQ ID NO: 192510 - DNA, 280 bp, Homo sapiens
ttcctcctaagatcttaaacatttcacttatgtttatttctgccactactccacacaataaacatcaatgcattattatccattattctagagcagcaacgttaacctgagtatgccaataaagacaaaggggtcagggaatttccattctctaattaaggaaaacaagaagcccagaagagggtcaacatcatcaggaagccgaggaaatgtttaggttaataatggaaaagcaaaggaagaggttagtgaagtttgaaaaaaatcgggccaacaactg

SEQ ID NO: 192511 - DNA, 241 bp, Homo sapiens
tatcctttaactacttttggttttgctttcaaacaaggataagcaacatgtaagttaatcataaaacaactagtgctcataaccataaaaacaatagtgtttaagtgggagttttagggaatatattgagaaaaattttaaacaaattatattaagagctctacaaattaaggagaatatttacaaataaaatatagaaatttaataggtcaaaagactaattgaaaataggcaaagaaga

SEQ ID NO: 192512 - DNA, 650 bp, Homo sapiens
ggtcattccttgatagctgggttgcatacctatcacgaaccattattttctatgggacatattcctctctttatgtgactcaaaagagagtatccaaactagctaggtatccaaacaagctaaaatagcatttctcaatgtgaatgacaaagaatactattttcaaaagatgaatgttttctttttctttcataattgagatttcatcagttgtgttgaggatcagtacacagacatttcaacttgtacataattctgaacatatgtactgcaaaatctaaaaagccacgtatcattattattctctaaagttattccagtgactttccagcttacaactgaggcaaaattaccttaaaaggctatcaagtaccagtaccttcaaatgttgataagctgtcacatacgtcccaccaattcacaatttaatagcatatacactatatactttaatctttcacagcacattaacaaagttattagaaaaacaggactaccatgaccaaagatgttacagagtgcacacaattctgataggtagagccaggctcaaggagtggtttgcccaaggaaacaattccactaaaaaacaacatgaagagtagaagtaatttaaggccaggtgtggtggctcactcctgtaatcccaa

SEQ ID NO: 192513 - DNA, 325 bp, Homo sapiens
cttcgacggaggcatcaaatactgggcagtatctttccctcttaaccctttcacacgtgttaaagtgtcaaaatgatgaatggtataaattcaaaaggaaaattcttttctactgaaaaggacatccagctcgcacaaacggtggttcagctgaaggcaaggcgtttctggttctcctctgcactcgggcggatcgttaacttcgacggaccattcaagagttaactgtattttcatgtgaaatatacagcaaactgcctctaagtatcataacaaaggcagactaccttggagtaaaatctgggcactttagagctgaaagcgt

SEQ ID NO: 192514 - DNA, 365 bp, Homo sapiens
tgttgctctgaggatcccaaacgacccgaagacaagaagagaaggggtaacatctttttagctgaaggacttatggcccttgattagggccgaagggcttaagatctttttttttttctgcaaagtatctgaaaatgattaaaattattttgacagctgcaagtaattgggaagtaggtgaaaacaggaagttcaggcacagaataacctcactagttccagattccaccaataattcagtgttcatagtaatttcaacatgagtagctgatgtttattattatattacatattcattttcaagcaatagagaataaaactataactatccttttcaagtaagacccattagaatagtagacatt

SEQ ID NO: 192515 - DNA, 440 bp, Homo sapiens
tggagagtgtgttctagctgttgaaacctaggaatcttgttttgtaatagatgctactcctttggtgtataggagactggcaaatgctgaggttttgaggcaggcacatacttggcatattctaggaatgtcatggaaaccagtatggctggagcagagagctggggacagtggtgagagatgaggtctaaactctagcatgagtataataaatgagaggcccatggtgtcaggttcagaaagaagcctgttgttaccttctcctttgcctccctaaattactagtagtaagtataatgtagcatgccatagttcagcctctgtaggttaccaagcagtctggagtctaccacgtgtcaatttaaacttaaattgggaaatgtcttctcgtcagggtagttggattcattttgacactgtactctccttgaaaattttag

SEQ ID NO: 192516 - DNA, 137 bp, Homo sapiens
ccaatatttattattttaatggcatctgtttgactaccacttactaagagatgtgtcctgacgtctcccactctgatagtggatttttccatttcttttcataattcagtgtttgctttatatggaggttattggca

SEQ ID NO: 192517 - DNA, 493 bp, Homo sapiens
agccgagatttccccttcagatgttctcattctattcagcgtagagcagaacctagatctcagcctgttttacaagagtttaggaatctcctctgataggtgcaccctggcatgcatggattttaagcactttggccattattcacctctcatctttccagaaccgtgtaccaaaaggcagcaggataatgattttgctgctactgtcccgtattggaggccagaggcgtgggccctatttatttgttaatttagttttattttttttttcaaaaattgaaatgcagtttccttttcttcatagatataaaaataatacttttgaagtgcaaataaaagaagaatgtagaaagtgagcatttttctccctcactcccctagtcccaccccacacgcctcacaagatcaccagtagtagtcatttggtgcagatcttcatagtctttattctatgtatatgttctccttttctaaaataaaaatggaatcatcc

SEQ ID NO: 192518 - DNA, 634 bp, Homo sapiens
cgctctcgaggatccccttcgacggtgttctggccacggcgagacagcagtgatctcacggtctgtcacatctcatagtcttttacctcccgtatggattcctctctggaggggttctgccccgtgcctttggcatgcagtgtcccttctacacccccttcctccagcaccatctttctgttaagatccgctgacccctctggacctagctcctgcattgactcatccgctttctctaaaggatttccattaagacttctaccacactgccccttcatgcttagtttccaagcggttgaaaagatcaatatatttttctgaggcaaaataagaaattctgagcacgatttcatttatcttccagcttctcactgtttttttcagcctcactgctgtgggcgtccttaaatgtgctttgttccaactgggaaacctgcctcttttcaccactgaagtatggttgagacaaagcactgcctagatatgttcactctattttgtttttaaatatgatttacacagttgttgcattcctgtgtcactaacgagtttttaagcttttgtaatgctttagtgttggctcacacaatcattaggtttgaagaaggaaggaaagggaagaaataaaatgtat

SEQ ID NO: 192519 - DNA, 165 bp, Homo sapiens
atgccaatgaagccaatctgagtcaagggtcatccccagaaaacaattataatctctctgtttggccacacaatacacccgtaacccagtcccaaccaacttgtgtctgtcgcaagagggattaagccacagtgattatggcccagtaaaaacccatcctcagtg

SEQ ID NO: 192520 - DNA, 179 bp, Homo sapiens
tttaagcaaattgagacccagaaggttacccgaaaaatggaggacttagagctgaagattcaaaaggttatttccagattttaaaatatgtaagcccagaagaaaaaagttatttaaggcattataaatacattttgaaatatttagtgacatccctggccgatttgcaaaattagcca

SEQ ID NO: 192521 - DNA, 135 bp, Homo sapiens
tttagccatgtatattacatttcaataaagttttaattttaaaagtatgtcttttctaattggtccagcatgaagctgctttgcagcagaatggaaacctgctaggctttcatttatacttaggccaccacaata

SEQ ID NO: 192522 - DNA, 605 bp, Homo sapiens
tcacctcccagcctatgtgttgtgtaagttctattctgaacagcaaccaggaaaaatgaagctccttttatcccaccaagcctccactcctggggtaaaacactaccctgggcacagcaggctgagaacactggaaccctgaatgccccacctcaaactccctgtcgagagattccaaacctggggcaagctgagaaccaggggttacctactctctcccctgctcaaagagccagaggtgttattctgggagaagagggatgctgttccatgccatccaaattctgccctcctccccatttcagtggcataaaagttaaagttctccctggtggctgaggctgactatgaagaagaaactgcagctggagagaggagtgaggaggaaggtggtggtgatgactttgtttatttggaatgaaatgtagaaaattcctttcctaagggtgttgacaacagagatcctgatggagtgaaaatgagagggtgctggtagttctctgacactagcagcaacaaatgacagcgcaaaacagccggaagttcaacagagaaaaccagagaaagagacagccaagaagaaccttcctggagtcatagtcaat

SEQ ID NO: 192523 - DNA, 282 bp, Homo sapiens
gcccttattctgagatactggatgtgaagtaccaatcttaaattttcttaaggtataggtagactaggtcttctggtattcatgtttttaaattgacaatatcctattccatgactgcatcaacttagaagaatgttattttcttttttgtggataagttgttctgcactacattgcttctttccccttttcttcagagtacttaaatatttacacaggctgacaatataataaaacttccacccccatcatctggttaaaattgtgtattttaaacaatga

SEQ ID NO: 192524 - DNA, 466 bp, Homo sapiens
accgttatagaaggatgttcaggagaaggtggaaaacaatcatctgaagactcagagtaaagagaccacggcgcctggcgcactgtaatcccagcactttgggaggccgaggtgggaggatcactggaggtcaggggttcgagaccagtctggccaccatggtgaaaccccatcgctacaaaagtacaaaaattagctaggcatgatggtgggtgtctgtaatcccagctactcgagaggctgagacagaagaaacacttgaacccaggaggcggaggttgcagtgagctgagatcatgccattgcacttcagcctgggcgagaaagtgagactccatctcaaaaaaaaagaaaagtgtgaatgttggcctttccatacaaacagtgccaggctgaggttgcctgacccttgtcaggtcttgggaacaggtgtccctctgctatagaggtaaatatgatatgtcag

SEQ ID NO: 192525 - DNA, 444 bp, Homo sapiens
gcctctgaatctcaggggatggagtctcatctcccctcgggcagcgactcttgctccctctgactccagatccgttcctccccttgcaagtgacccttggagttcagtggtgtttgaaaggtataggaggaaacctgtacggttgtgctaaagacaaatccatgctgaccttcagtaaaacattgaggtgtttgtatgtttactgttttgcttttattttttaaaggatactgctttcaattgaagggaaaaaaagttgaatagctaagttagtgcttttagtttaaattgcagacatagctgcagagcaggcatgttccagtacaccctcgggaagggcaccctgcggattcttttggtgttgcacaaccttgtcaaaattagataagtttgttaacctttatacatttgtttacctgcaggcttactcttctcttacttata

SEQ ID NO: 192526 - DNA, 451 bp, Homo sapiens
gaggatgagcacagtgcagggaggtgagcatgtggcgactggcctcccttctcgttgattcacttgctcattcactcattcattccacagacatgaacacctgccctgtgctggaagctgccaggtactgggcattcagtgatgaacacttgaacatgggcccagtgcccacagagcttgccatctaatgctagagttccttggagatgctaaatgtgagtgggtatcttggccatgctgctggagagagacccttaataatgctgactttagcctagtaggtcttaggtaggtcagacatcctgggggtgactctgtttcatctcagcttaggattccttcaagactgaagtgggctttatataggctttttttaatggactgatggctgatgtgggcccattttgcatgtcttcctgtgggagcagtcagctccgccgctgctgagtca

SEQ ID NO: 192527 - DNA, 583 bp, Homo sapiens
ttagactcgattaaatgcagtagctgagattctcctgatagtgtttccacgttggtcagttttcccactagcggaaggcctgggggcttccataagctgagaccgaagggccattgaaagctgagtggcccaggggacttggactaaaggactggttctgtccttacctagctgctggggcttcaggctaaatgttgagcccaggggtcaagtgttgaagatgctggaaaaataccttattttgtaaagagtcagatcatgagtatttttagcattgcagaccatagaggccctatccagcaacagctctacctgctgtcagtgcagaaaagcagacagtgaagagtgcctgtggctgcgtttgctctgcagcctgtcactttctggccctgggttagcagctctctccttagtttactcagctattaaatggggaggtcaagagctgctcacccatctcacagtactgtgttttggttttggttttggttttggttttttggtttacgtttttgtttttttgttttttttttacggagtttcactcttgttgcccaggctggagtgcagtggcacgatctca

SEQ ID NO: 192528 - DNA, 204 bp, Homo sapiens
tctttcaaatgttatgtatgtttcaattttttcataacaaaaagttggagaaaacagggccgggcgcggtggctcatgcctgtaatcccagcactttgggaggccgaatgttgggattacaggcgtgagccactacgcccagcctatatttggttttctacaatgaacatgtatgacttttgtgggacagtcatttatcctaac

SEQ ID NO: 192529 - DNA, 578 bp, Homo sapiens
tatattgttaagattcatccctaaattattatgatagttcatttattttgcatgctatatgataccagctgcactaacatgctacagtttacttaatcttctgtagtttgttctttgggttttcaatttgagttactgtgaattgtgttgctgtaaacattttttgtacatgtgcaagtttctcctggtgtatacctagaagtagaatgagtatttcatctaatatgtaaatgtgcaacttttgaaggaaatatccaaacgttttctgaagtagctgttcaaatttgcatttccactagcaatgtgtaggagttgttacaaagccacatattataacacgtggcattgctaggcttttaaatttttgtcagctaattggttccaaaatgctacttcatttttgtcttggcttatgtctccctgatcactaatcatgttgaaatgcccttcatgtgcttagtggccatatgtatttcctctgtgaaattcttgtttatgttatttttcaatggggttaattatgctttttttaaaaaaaatttattgatacataatagatttagggattttggggatac

SEQ ID NO: 192530 - DNA, 600 bp, Homo sapiens
gtcttctacaattggggccaagaaagtgtaatgcaaactaaaaactcaagcatcttctggagaagtagaaaaacagaaaccacaaggtaaataacatgaaaaaactaagacttcctccttacaaaatgccaactgacttacgtttaaaagaagttcaaaagttgcattaattttaaaaatcagaggattaaataatctggtctttaaaatcatacacctttgatgtaagtttgaatcaggaaaataaaaggaagcaataaaaatctagcatatgttgcttctttaagggtctactgtctttaggatatgcatagaagttgcttatgattaatatcacatctagccatgacacagctatattacaaaatataatttccaactgggagcacacacaaggaaactaacttcaactgcaatacgtaaaatgataaagcgtttatatagtctttacagaggcaaagctgttgcaaatgctagaaaatgtgtcatattaacaaacagctttcaatgtatctagtgcatgaaatcaaagagaaggatcaaaattatttccaaacatgccctttctaataaatttatattcttacacaaggattagaa

SEQ ID NO: 192531 - DNA, 358 bp, Homo sapiens
aaccatcacctgtcggcgcgagcactttgaaagtatttcgggaaagtatgtcaggaaatgcacctatttcatggattaggagaccaaggctcagagtgtaaagtgatctgccagggtcacacaagtagtaggcaacagcattgatacagaaccaagtgtggctgatgtcagaggctgggttctatgccacctccccaccccaaacccagagagaactcaggttctccagaggaggaagtggtttgctgcaggctcagcatcactgtgggtgtcgcagttcatacccatttaatcaccaaccaccatcaagtagttattaagtgaccgcagagagaacagcacagtgcttggtggcaag

SEQ ID NO: 192532 - DNA, 476 bp, Homo sapiens
ctggtaggcagagaccatctagttcaactttgtattcctgcttagtagtgtgtctgagtcataccaaccagttcaataagtgttgaattgaattaaatcacctcaaaatcacagttggtggaaagagaaaatggccacataaatgtctgtgggttttagtgaggtggaggtgagctttctttgggcattgtcacaaagaactttaaaagggaaggagaggggtgtggcatctacttgttaaaaataaaaataactgttttacgagaaaatgctgtgggtggagtaggaagaaataaggggaaaggtggaaactgatggaggtgtgccaagtcatgtttggatgacacatcttcctcacaacacaagataatctgaagtgctaagtggattatccacttttatttttttatttatttttgagacaaagtctcactcttgcactccagcctgggcaacaagagtgaaactccatctca

SEQ ID NO: 192533 - DNA, 478 bp, Homo sapiens
ctgagagtaggaagggttagatgtgagctttgaagctggagcagggaagagtgaaactgaagaccttccatcacaacaacttccaggccactggactttaaagcccatgcagttagaattttgataacataattttaggccgggtgtggtggctcatgcctgtaatcctggcactttgggaggccaaggtaggcggatcacccgaggtcaggagttcgagaccagcctgaccaacatggtgaaaccctgcctctactaaaaatacaaaattagccaggtgtggtggcgcatgcccgtaatcccagccacctgggaggctgtggcaggagaaccgctcgaacccgggaggcagaggttgcagtgagccaagatcacaccattgcactccagccttggcaacaagagcgaaactccatctcaaacaaacataaaataataattttggccaggcgtggtggctcatgcctgtaatcccaga

SEQ ID NO: 192534 - DNA, 450 bp, Homo sapiens
tctggtcttagactacaggtatgtaccaccgtgcccagctaattttttgtagagacagcatctcgctatggctggtcttgaactcctgggctcaagtgatgctcctgcctcagcctctcaaagtgttgagattacaagcatgagccaccatgcccagccaagagatggttttaacagtacagcctcaggttgaggacagcattcagaaggtccgatggtttaatacaagaaggaggctggggttaacaatttactctttgttgcagatttttttcagatagctttcagtctcaaaactcactttctacccaaagctatgacagagatagcatgtttagcttccctacctggtcaaggatgccttctttgttctagaaccaaagtaggggctttatgaatggttgtgcatccacttccagtagtaatggctatacattatggagcacttaa

SEQ ID NO: 192535 - DNA, 400 bp, Homo sapiens
aggggacaaaggtgggaacaggaagactagttgtgaaagtattgcagagatacaggccagtagggatggatgttggctggacccagggtggtcacactagagacgctggaaatggtcagaccctaaatatattttgaaagtagagccaatgggatttgttgatagatgggacgaggggtacgaaaggaggaggagccaggggactgctactgcttcacccgagctgcctttaaagagatggccacacagggagtcagggagagctggggcaggggcaatattggggggagatcaccagcttggtttgggacttacctggttggagaggcctattggatatccatgtgcccagccttctacctggcctctgacagtgcttttccacttcctgtttcttctc

SEQ ID NO: 192536 - DNA, 445 bp, Homo sapiens
atccaaactggaagcagatatttgagctgtgaacacattttttcttagaagagtcaattaggagctgggttgaagcttcagtctatgcacttagagtcaggttttaggaccaagagcaagcactgtgggcacctgttgtaagaaaacatctgacagcacgaggtgctaaattgcttcaaaatcctccatagctcgtggggatgctacctttttagtaggagtttgaagcccagaatgcactttatattataaccaacacagttgaaaaataggttccatgttctataagaatggattcattaaactgcatgttctggaaaaaggatgtattagagactttgaatttgaggatcctgtgttatatacatctctgagccatcttatcaggaagaaaagcagctccttaaggtgcctgcctcttcctctaatactatgtacatatttc

SEQ ID NO: 192537 - DNA, 548 bp, Homo sapiens
gcacaaaaatgttgcaacagcaaaataaatagaaacacactagatgtctacctgaaagggacatttaaataagtaatggtatattaaaagtataataaattggccgggcacagtggctcttgcctgtaatcccagcactttgggaggccaaggcgagagaattgcttgaggctagaagttcaagacaagccctgaaaacatagtgagacccccatctctacagaaaatttaaaaattggctgtgtgtgatggcaactgcctgtagtcccagctactcaggaggctgaagtgggaggatcacttgagcttgggaagtggaggctacagtgagctgtggttgtgccactctgcactccagccaggatgacagcaagaccctgtctcaaaaaaaagagaaagaaatagaagcagggatatacttgaaggggtatgtgtgtgttcatgtcggtacattggatgcttggtgctgctcggtaattttgaatgcctcacatgcattatgccattaattctcatacacctgacagatgcagggttcgtccctaagg

SEQ ID NO: 192538 - DNA, 150 bp, Homo sapiens
gagtttatatttttatatttttgaggcttccctaccgtagctctctcctttgaattttccctttgattttctagccactttgtagccttgaataaaacagctttctgcttgagctctatctgccctatgctgctgcaaactgggagtgtc

SEQ ID NO: 192539 - DNA, 627 bp, Homo sapiens
ggtccataagaacgtaacacacagcaacacacaaaaacacacacccatacatcacaacacacatcatatatacacaccacacacaaacaccacacaccacaaaacaccacacacacacatacacacacacacacacacacacacacatatatatatatatgtatttattttagagataggctgtagcccaggctggagagcagtggctcgattgtagctcactgcaccctcaaactcctgggctcctgtctcaccctgtggagtagctaggactagaggcactcaccaccatgcccagctgatttttaaatttttttttttttttttatggagttgtggttgctacaggctggtgaaagttgctccaggctggtcaaacttctggcctcaaatgatcctcctgcttccacctcccagagtattgggattacatacgtgaaccccgtgcatggccttcatgttagttttatacgtatttatttcctccactaaagttaaatgctcctgtggtattttatcctttattgtgctcacatatgaagagctacagttaagtattaagattgaacatttttaagcattttaatgagctttatggtagaatgtgaactgtgtgagtttagacct

SEQ ID NO: 192540 - DNA, 515 bp, Homo sapiens
aggctgaggtcatttggtctaactttccacctaagagtccctgtttacacgcttccaggaatgaggagctcactagcttatacggcagtctatttgttttgcaatagctctggtctctaaatatttctctttcatattgagctaaaaaatctattcccaatcacttctactctctaccctctaacgtgcgttgcttccacatacagatgctgggtaatagagagcacatgcccccgagtcttctttcgtccagaccatcattctgtagctcgctgttccaatagaacagtttccagaccctcaccctcttagtccatgaagggaccaccacactttctcaggacccagatccggatttccagagaataaatcgtgaaactcccagaggctgcctcagtgaggatgtgcaatagatattaggtattttttatcagtgaagacaaaattgactcagaagtaaatggtgaatttttaaaggtcttttcaattcatgattttcatgtgaggcagttaat

SEQ ID NO: 192541 - DNA, 319 bp, Homo sapiens
cctgcctcagcctcccaaagtgctgggattataggcatgatccaccgtgtccagtctgcacatccttttctttatccacttcatgttttctagttaagagcaaccagctaatttcattatatcattactttgaccagaatgttctaaggtatcaaacagatgatctttaaaatgaaggaaattctgtcattcgtgacaacgtgggtggaaccagaggacattatgctaagtaaaatgcgccaagcacagaaggataacactgtatgatctcgcttgtgtgtaatctaaataactgtctcatagaaatgtagttaccgaa

SEQ ID NO: 192542 - DNA, 419 bp, Homo sapiens
atcttcttacaaatatgctgtaatatctctaacttttttaaaatggagaagcctttctcatgtttgttttcctcctgctatacctcctttgctgtgttctcttttacagaactcagaagagctgtctctcactgtctccttcatctagacaaacgcatttcccttcattccgacactcggtaacccacttattctggttttgtctcaaatctaaaaatacgccactgaaacggcttcttcctaaattaccaatgactccatgttgacaaatccaatggtcaactccttgttgacacaaatggccagctcttctgtttgaacgccttcttctcttagcctctgggagagcagtctcttacgggtctactcttactcacagctactccttctccatctcctttgctagttcctccccatct

SEQ ID NO: 192543 - DNA, 544 bp, Homo sapiens
catgatgaatttctggagatcttagacagaagtgttcccaacttcattaagttgccagatttgctgaatagatatttgtgtgtaaaggactcaaaaatactaggaatatatagcagtaggatacactacttggcctaagaaacatgcagtctgttttgtaaagcagaacacaggcacatgaattggcacaggaatggcatttgccatccttttagacagatatggtagcagtataccatatgaatatcaaaagagcacagaataaataaaggaccatggttttgaataaaaggacgttgattttcaagacctgtacagttgactccgagagatttaaagctagggtcagtctttggatggaggatatgcaggcattgcaggtgtgttaataggcaatttaaatatgctgcttatcagtcagtaaaaaaaagttcagaatttagaatatcacagtatttcaaagcagccattcaggcatattatctttgccatcagtttctctgttaaaaaaaatagttttgtcattctgtagtttttaaaagac

SEQ ID NO: 192544 - DNA, 617 bp, Homo sapiens
tacacgatccaatcacgttgtgagttaggcatagttatccccattttacagatgaggaaactaaggctttgagtttaggttggtttggcttcagactctatgacatgcttcctttctgtgcctgatggcttccccatatgaatgtggccatctgggtgtactgcagaggttgtggagaatataagtgcttctggtaactttaaaataaatagtgaagctgtttgcactgcccatccctaaccttctcttctttggaagtcctttcctgcttcccctctacccccaatacaaatattcaacctggagacatgaaattaataatatttccattctagacctgacatcatggaaagagacttcatcctttcactggtttgtatattggcttcagccgctgccaggctcatagactaggaactaagaagtggagggcacagcccctgtgctccaggatccagctggaaacacagagcagtgaaggaagtacaaacccttgcacagaccattcccggacaggaaaggcaggattccttatggatgacctgctggaggtgaccccatctacttgaagactgtgaggaacgatcttggtggagggtggcttcctgatgtagcta

SEQ ID NO: 192545 - DNA, 203 bp, Homo sapiens
cgagcggaccggatgagatagcacggggaaaattatttggcaatagaagggatgtacatgctataacatggattcacttattattatattaactgaaaacagccaattacaaaagattacatagtatatctcatttaccgatgtccagaatagggaaatgtatagggacagaaagtagattagtgtttgcctaggatttggga

SEQ ID NO: 192546 - DNA, 552 bp, Homo sapiens
aatcaataatgtgaaggaagagaataaaaacaaaatctcttagtatgtaggtaaaagagacaggttttaaataagaaagaaaacatatttgaagaacgtatccaaaaatctaacttccatccattgggaggagaaaacagagaaaatggtgaaaagggagaaaaacaaaagaactaatgggggaggaggggaatggtcaatggaagaaacagcattcagactaaaatagcctactgagtagataatacaataatagtaaagctgaactgtttcagagcaagacactgagctaaatggtttacatgcagtatgtattttcatctttgtagcaaccctgtgagttcccaactcataatttctcccacggtacagatgagaaaactgtttagagagactaaaatcacttgcccaagtatagacagctactaattaatggagccatatgcttgatgaaattttagtacacctaagatattctaagaactttctttcttttccagaaagaaaagagcctcatctttaagaaataagaaatacatagaaataaaactc

SEQ ID NO: 192547 - DNA, 504 bp, Homo sapiens
taggtgattacgtgtgtaggtgtgtgcagggaggtctctgtgcctaccataccactaatggttcatttctgggtttttcttatccttaggagacaggtctcttctcctccctgccccagaatcaaatcatccaaattctgtagagaaatgagtgttcacctgatttagactgtgctgagccggcagagaggcagaggggaccaagagaggtccagggttggaaggagaaggagggatttccttcctaccctccgaagtgctagggtcaaggaatagaggggaggatcagaggaggagctgctgctatagagggatagccagaggctgaaaagtctattttcttctttcgtggggctgggttaggtgaggagggtcactaggccaaacctcctaccgagggcagggatcttagccctttcggctccacctgtgtgcgagcttgcagaaagaccggactggcggacccaggctcagcgctgccaaaaattccactcctggtttttg

SEQ ID NO: 192548 - DNA, 246 bp, Homo sapiens
gcacaaacagtcgaggaagaattcttctggtgtatacctaagagtggaacttctgggtgcccaagaatgggcaggctcagcctgaggcggtgtgccaactgctctctgaggactgcaccagtggccactggaacttagggctccctgccattcctgcagcctcaacaatgactggtacggccaggctccccagtgcttgcctggcctgataagggtaggcgtctccagcctaccttcaaggccgtt

SEQ ID NO: 192549 - DNA, 707 bp, Homo sapiens
ccctcaatttcttgcatttcacgtcccgtaaatgtatagattttccttcctcctcctcccaccacatccagtggtgctgttagtgttctgtgccaggacaggggcaggatctcctgccttgaaccgagctctgcagccttcctgccagctgcagtccacatcaggcctacagttggttttcttcccagcttccgctcacactaggatggaatattaccctcttataatggcttgtttatctagcagctctccctcggctccaggtcagaggctttcctccaggcaccactccgcgcctgcctgttcatttgcggtgcccactgttttgtctgcctgcctcaccttgtctgtcggaggtcactgtccctccagggaatgcggtaaccagctgcattttatctagtaaggtggcctctgctcacatgctcttgtgacagattacagcctggcttcccaccagggactcctctgagtgagacaccaaaggctgttgtcagtgtggctgttggtgggagagtcctcagtgtccaaagatacccttagcattttcatgtgtctgtaggaacgctttcatgtgacttctgtgtctcctgatggatctggaaagatttctctcctctcagagacttctaggttgtcttactgacattggaggcaaatggcttatgataaacactggaggatttttgtcgttgttgttgttccac

SEQ ID NO: 192550 - DNA, 337 bp, Homo sapiens
aaactactaatgatacagtaagtctatataaatacatgtgatatatacatatagcacacagcacaaaactttgtgtttataagaaatagaaattgaatgagaaaaatcagaatataatcataaaaatacacactgtaaatgcattttcacttaatgcttttggatgttgaattcctactgagttgaaatggaaatatcatccataggaagaaaaaaatgaggaaaggtaagcaatattatcacagtattatttatcatacacattaggactaaaaatagtcaggaaagaaagagcattatgtcattctctcccagtctttaaccttgtaaaaggttg

SEQ ID NO: 192551 - DNA, 459 bp, Homo sapiens
aaggaagcaatcatgagaatgaggggtactatctggtgtagtgatctggtgagttttagttctttgatacttttttgagaggcctgaagttcctttcctgaggaaggaactcacataaaacagatgtaaatttcaagctttaagcccagaaggatcaatttctatagttatcaaaaataatggtctgtggggcaattgggctggtttcagtctcccctttctacttatcaatccctcaatcatgaggaatctggtctgagtatttctggctgtttcattctgaggatgggtgtcctaggcagtggccacccaggaatcaaaggttaatctaatatagagttttcttctgacactcaatctttctctctccagttccccacttccaccaaagacaatcacagcaggaccactctacctgcaaaataagcttcagttccatatacttggcctgataaccca

SEQ ID NO: 192552 - DNA, 442 bp, Homo sapiens
cctgtcattattgtctttcctatgtccagccctcatactgaggctgtccatcactttggagattttgagaattttaggagttgcgtgccagaaaaccagaacaaacaccaaatacctatatttaacaatatcacaaacagcatacctggtctgtactcacaagatgccaggggcattcccctccaatcgtaacaaacagaaatgtgtctagacattgccaaatgtctcctgagggggcgatggagctggggcaaaactgtccttggcattgagaagcagcaggttgttacaaggattcaatgagcaagttattgtgcaggtagcacttagaacatggttggcacatagtaaatgccatgtaaaggtctacaattattattttcattattgttctctagccctgccttaccttgtggaaaataaatattttgataatatgagg

SEQ ID NO: 192553 - DNA, 258 bp, Homo sapiens
tgcgccctgtggatatcttaagcctttaagggtgagcaaaaaacaataggttcacaaaggaaaatgagaatgggctatgagaaaggtaagaggaaaaccaaggaaagagaacgttttgagacagtagtagtggtcagcaatgtcaaattgctgcagaaattttctaagagtgaaattgggtttagcagctgcaagagcagttcatttaattggtgtagcagaagcccattagattgcagtgtgatgagaaattattgg

SEQ ID NO: 192554 - DNA, 307 bp, Homo sapiens
tccacagcagagcctcacacgtgacaagcgccctgagttagcgaggtgttggtatcattaccggatctgcgtgcagtggattaaaggatgctgtgcacagcgtgtccgcagcagagacttacacgtgacaagcgccctgagttagcgaggtgtcggtatcgttactgcattgcatcctacctcgtgtgtttacctggctgatcctgaaggctgtaggcatctgagtttgcagtccctgttctcaaccgaataggatattgcatttcctctcgtgagctgccgtgggccacagagggtttgcccccca

SEQ ID NO: 192555 - DNA, 554 bp, Homo sapiens
  misc_feature (539)..(539): n is a, c, g, or t
  misc_feature (545)..(545): n is a, c, g, or t
  misc_feature (547)..(547): n is a, c, g, or t
accgactgcatctgtgctctaaacaagtgactattactccataactgatctcaacttttttttttttaaaaaagcagatacaagatattaggcatagttaagaatacaggtgatttctgggacttatcctctgcctttccctctgaactgccttttagccattctttcagtcatccattcacacaccacttcaatgcctcatatttcctgacagtcttattctaaaatgaggggactgtgggatgaacagacctagctctggcctataaggaataatcaatctccctcatcaacatagcttttcccaaagtacgttacatgctataacaccctgtaaggaatcattgcacctcagcactaaaggttctgaggcggcctacaacagagaaacctgtttaatttggattagtcaggcatttctcaaacttctgactacagaactcccctcctcccaagttttaaagttacaccattaactgtccacagcacacggtaagaaaggctagagactgggcatggtagctcacgcctgtaatccncagcancntttggaa

SEQ ID NO: 192556 - DNA, 495 bp, Homo sapiens
tcagggacacagtgtagctcagagcagaactgagacttaaccagcatctgtgcaaagtgcaagcaaccaaacagggtagcttcaaggagctcagtgggagagagggggctgggttctaatctcatgacagccacagacttgacaagtgacctccagccaagcatttctctgccgaggcttcagttctttcatctgtgcagcggacagttcagactagatcagtagttttcaaactatttccaggaaactctctaggggccacagacatagctgggggccgccatgggaacagtggagggacatagttgaaaggagatgagcaggccagctctgctgccccaccctgagtcaaccagagaagctgaactgtgcataaggtacccattactaaaggtttccattgcaaacacagatttgaagtctactgttctaaatggcctctacttcctgctgtcatacgtttttatcaaataaattcattcattcaaccgttca

SEQ ID NO: 192557 - DNA, 314 bp, Homo sapiens
tcgggaagtgtctagcacaatgaaagtccttgtaaacgtctgagtgaacctcttgacctttttaaagggttttgttttgttatttttaatgctagttcttatgtactctctctctctctctctcacacacacacacacacacacacacacacacagttaccctaattctcctttgttaatttcttcactttttctttggagtcaagatggaatggagaattatatggctgaagatatagagaaatttgaggtggagagaccagaatttgcaggcacactccaagttggacattcttctatttggaatgcaggaa

SEQ ID NO: 192558 - DNA, 361 bp, Homo sapiens
gttctagcccgaggacaaaggaatgttgctgatttctagttatttcactgtggtgaaggtcttcagctctaggaaagacagaggaagggattctgggaggttgtagcagtggaaaaagttcttttcttcctctgatcgccctctcagctctttccttctgactgaaaatcatcttcagcacctctcttttaccaccactgccaccacccacccactgcgagtcctattggctataggttgtatgcaggcagtagtagagctatcaaaggatattaagaaagggagtgattattaataaatcatgtaatgtttctgattttagctcttaaaaacagttcttaaattgctgtccacaccccct

SEQ ID NO: 192559 - DNA, 279 bp, Homo sapiens
agtagctaggagcacagggcaagccagcatgcccagctaattttttttaaacttttttttttttggtggggagggggatagagacgggtctcactatgttgcccaggctgtctcaaactcctgttctccaccaatcgtaccttggcctcccaaagtgttaggactacaggtatgagctaccttgcccggcctatttacatttttttgctgccttctttccttccagatccacttgttcatcacatattgttgattttcctttttctagcttcaattttt

SEQ ID NO: 192560 - DNA, 194 bp, Homo sapiens
ctgctttgacttgatctgcacatactacaaacagggaatttatttgtttcctctttagttttgagaactttatcggtggataaagtacttaggctttggataaactgccctctctgtttcctttcagcagatagtgaagagcgaatgatgctcattggtgaacatgatcaagagttggctttcttttttcatct

SEQ ID NO: 192561 - DNA, 479 bp, Homo sapiens
gttctgaaccaattccaaggaactttatggcacaaagaaaaaaaaggggaacttacaaaaagtgaccacactgaagcgtcctggtcacccatccctggttttgaccaccagcctttaaagtggcaagcgggtgataacccatttcttatttccccctcagcatttcctcactgttattcatacatgtggtcatttgtactcatctcacaattgttaaaacctctttcctcccttccaggttttactgaactgttactgcgaagtctgagagatgaggtcatttaagattatttcttatttgtaaattagatcgttcatatttgtacctaatctgatcttttgggtaatattcctagttatgtagactggtctctcagaagagccggatattaaatgcagtactttaaactttacacccaggagaccggatgggtgaggctggttcactcggccaaagtaccattttatctctgcttttt

SEQ ID NO: 192562 - DNA, 546 bp, Homo sapiens
gggccgctctagaggaccccgatggccttcaatttccctaaaagggaggaagatcaactgcaaaataatacaaagtcggactccaactcacagaggttagttgaaactcatttttcctatcactgatctattacttttattaagtttgatcaatctgaacagtcacttggctattaggaagtcatctgaataactgaaaaacgggtggggtttttttgtttttgttttttaatagagacgaggtctggctatgtagcccagctggtctggaactcctgggctcaagccatcctcccactttggcctcccaaagtgctgggattgcaggagtgagccaccacgcccagcctgagaaactgttctactgtcaaatttcatgtcaacttgaaaaaactagattcctgatgacttacatcatctcataatcaatgctcaacgtagatcacacttacaactcagtgtacattaagaacgaggtgtttaccaggctcacagtcagttaacatgttgatgctattcattaacataattccttaagttcagctg

SEQ ID NO: 192563 - DNA, 117 bp, Homo sapiens
ttgatcttggacttcccagctcctagaactctgagaaatgaatttctgtcatttaagctacttagtttatggtattctattatagaagcctgaactgactaagacaaacaaggatca

SEQ ID NO: 192564 - DNA, 342 bp, Homo sapiens
tgcgtaagtaatacaggttgagcaacccaaatctgaaaatttgaaatctgaaatctgaaaggttccaatgagcatttcctttgagtactatgtcagtactcaaaaagttctgaattttggagcaaattgattacagatttttgaattaggaatgttcaactggtaagtgtaagtataatgcaaatattccaaaatcctaaaaaatctggaatccaaaaaacttctgatctcaggcatttttgataagggatattcaactggtattactatacaaacacaccaaccaaaaaagaaagaaaaattctaacagccacaagctattgactgcctatcctgtgccag

SEQ ID NO: 192565 - DNA, 289 bp, Homo sapiens
taatgctagatgacgagttggtgggtgcagcgcaccagcatggcacatgtatacatatgtaactaacctgcacaatgtgcacatgtaccctaaaacttaaagtataattaaaaaaaaaagaaaaagaaaaagaaaattagggcctttaaatacattcaacatctctgatgaaaaaaatgattaataaatatccaacctctcatcataatgaggctgtggaattgttgaaaactgcaatttcatataacttctggacctagtcaaactttttacaaaagtgaccacaaca

SEQ ID NO: 192566 - DNA, 237 bp, Homo sapiens
ttttccactttcagggcataaatggcaggaagatagaagcataaccattcatagatatagttcttttattaataccatcataagcttaatcatcctgtttttgtctgttttagatatttcataaactttagatacttgttaccatgaagcaacattaatggtccaaatacatgcttaggaatacttacaagtgtttgaaaatactggttctgcaaggtttcaaaaaatattccaaat

SEQ ID NO: 192567 - DNA, 406 bp, Homo sapiens
ggagagcacgctttatccaggtggggagaagaggggcttctaaaaaggttcccatggcataacagttgatctgaaggggaaggggatgagttgggagagcttcccaggcagaaacatttgttcattcattcattcaaaaaatgggtgttttattatcatgtatttttatcaattcatccttccaataactctgttaagatgagaaaactgagatccaggttaaaagagccagagccagaagcagatttcaagcttagtgatttctgctttcacagacacaggctttccactttcctcccgctaacgttctgccaatcggaatttaacgtggaattggccattaacttcctgttagagttgggattttagaaacacctgtgtgtgcacacatggcttaattctgcct

SEQ ID NO: 192568 - DNA, 170 bp, Homo sapiens
ctttctagaacctgtttttcacaaggtttgagtctgaactgttaacattctactgatttctgggtgaagggactgactgcaccatcctagcctgtcagagcacttgccccaatacttccactttaagagttttccaccttgtccagaactacagtccactaatcccctca

SEQ ID NO: 192569 - DNA, 417 bp, Homo sapiens
aaatatggtaaataggggttgtttaatgaggtttgttatgcagatttaagtttaagagtaaggtgccttccccactgataacaggtgttaagagtccttctcttcctggtacagggagcgggagataccttttacaaatgtaaatttcctttataaaagaagaactgtccttgcctctgctggttctcaatggcctttagctcaaaataatccttatgccaaaaaggcacattttgcagggaaatattttggtgcctctcaacagccagggcctggtcaactctctggagctgttcctcactcttgcaagcctttctgacccattgggcacctaagtcattgtcctgctttctcctgtggttcattctcagagcagtgctgtgttgagaaaacacagtccaacaatcatccagaggg

SEQ ID NO: 192570 - DNA, 460 bp, Homo sapiens
tcactatcatacttgtttccaaaaggtacaacatataaaattatgttaaataactttttcaatgattttgaatattaagcatagaagaaaatggtcatgaaaagaaatctcaagtaaaaagttacacacaaactaacccaattaacatcttaaaaaaatgttttgcccatactggaaagatttaattggtatctaactggtatgcacatcaatgttcattgtttacagtatctgaagactagaggcaaaaaaaaatgggaataaaatgtgagtgaaggccgggcatggggcctcacgactgtaatcccagcactttgggaggccaaggtgggtggatcacttgaagtcaggagtttaagaccagcctgaccaacatggtgaaaccccatctctactaaaaatacaaaaatcagctgggagtggtggtgtgtgcctgtagtcccagctactcggggggcta

SEQ ID NO: 192571 - DNA, 338 bp, Homo sapiens
ggactatttgttgaaaagattatttctacattgacttgcctttgtactttagtcaaaaatcaatcatatttgtgtgggtttatttctagactctgctctggtcatgtctgccttttttctcataccaccctcccttgattacttcacttttatagtaattattgcagtcaaacagcgtgaggcccccaactttgctgttcctcctaaattgtttctgcctttttagtttgtctttctacgtaaattttagctttttaatatctacaagaaatcctgtgaggatttttattgtgattgcattgaatctatagatcaaattgaggaaaactggcatttta

SEQ ID NO: 192572 - DNA, 365 bp, Homo sapiens
gcaatatggtgaaatctcgcctctactaaaaatacaaaaattagccagacgtagtggtgtgcacctgtaatcccagctactcgcaggataatcagttgatcccaggaggcagaggtttcagtgagccaagatttcaccactacactctagtctgggcaacagagtgagactccatctctttctctttctttctttctctctctctctgtcatatatatacacacacacatatatatagatatagatatatgtacatatatctatttctgtgtgtgtgtgtataaaacccttttgacaagcaggaactcttttgcttttagcatcaaacacaggcagacacatatcaatttccatatcctattaac

SEQ ID NO: 192573 - DNA, 193 bp, Homo sapiens
gttgagaagtagaatagaaactatcctatatgaaatatttttaagttagcacagtaatgttcttgcctttgactagtttaacatatagtattttttctttttgatcatttagataatggaatatgaggtcttctagggaattgatctaaaataactctttattttaacaggttacttttgatccagaagtatt

SEQ ID NO: 192574 - DNA, 353 bp, Homo sapiens
aagagctctgatgttagtgtatgtgaatgttattctacattaaaagaatggctgaacacaacacaatgaatagcatctaataataaaagaagtgcatcttcagataaatgttcttaaaatacagctgtagttatgacattttcctgctcacagataactgttcaaagcaaaaggaaactcccaggcactgaggaaagggtccttctccatctcactgtacacacatctcttccacctcccaccatgtgtcctgggagccaaccacccctccacttgaacacgtactgcatttttctaggctcatgctggtcctttctcctccttccccactccaacatccgcctgttgaaatt

SEQ ID NO: 192575 - DNA, 234 bp, Homo sapiens
gataaacgaaaaatagaacaaatgtcaaatttattcacattctcttaatttgaagctaatgcttagattatgtgaccaacctctaaagaaaatatatctttcaattgcatttcacacaagcaaaaggcaacctttgtggaaccggatcccaatgacgcctagtaagtaactggacttaactggttcttctggtcaaaaggcccaaagtcgatcggcagtatgccagactcccag

SEQ ID NO: 192576 - DNA, 611 bp, Homo sapiens
tttccaaaaaaggtaggtaggagggagggcctggaggaagtaacacaagtttcctttctaccacagccaataagaaacagcattggtgatcactgcttcatctctcaaccaaaggaatcttgttcagggcacttttaggtaatatatagatgttgtcagttcatctattgtaatacaccagaaaaagaaaaccataatatggatgtcttgaattttgccatatgcctctttaagcagtttttacttgggtccattcctccttccctatattttcttaggcttattgggaggggaggtcagggggaggagcaatcactcaagagatccttgtctccttcctctgtaattcctattttaaagctccattcaataattacagtaattctgccacgtggatttttcaactgacttatgaagcatctatccagaaagaaagcagcagggcagaagattatgatcaggaacagtctgaacacactcgagacccataatagcaaataggtaagtggcttacaggtcactcctgcaaggcagacataaccaaccacaaccagtcctttggggtccacgtggggtcccagaatccttccaaaggcaacacacccaccagt

SEQ ID NO: 192577 - DNA, 597 bp, Homo sapiens
caattgagctatctctgaaaactcaatataaattcccatagtgtgctttgtactaatttttgcaaaatttttcaggtaattggaattatcaatcttccactaaaatagcaatttttaagtggcttattttaaatagttgctaaatttgctaaaatcatgtatctaaaacactatgcataatatatgacaaaaataaatgctgggaaaaaaataaaaggatttgtggtaaacaaggctgaccaacctttagtcttaagaaaatatctggctgggcacagtggctcacgcccgtaatccctgcactttgggaggccgaggcgggtggatcatgaggtcaggagatcaagaccatcctggctaacacggtgaaaccccatctctactaaaaaaatttcccagagcggggggacctggggctgttggggccttttcttctgcatttctgcagccatgcccctcaatgtaggggctctgcaggcctggcttccccggggtcgtgagcagattctggatttctctagagcctcactttgattttctgcctgcaaaggaatgggcctgcagacctccaagctcctctgtcttctctggctttga

SEQ ID NO: 192578 - DNA, 157 bp, Homo sapiens
ctgggattttctttggagattcacagaaaatcacattttgatgtgttgatgattttctgagtaaaggagttagtctgaatactgctgggatacttgtatggttggttcctagggccaaaattgaagagccataaatttccatcttttaaatatttta

SEQ ID NO: 192579 - DNA, 414 bp, Homo sapiens
ttaatcctcgtctctcaccagagtaggtgaagaccccgttatttgctgccatggtaccgtgatcctcttccaaatgcttataaatgtggaacagtgtaattaataacaaattacttgttatatgttgcctctctccagtctgttccttcataaagcccaagtagtatgaaaatgcgaatctgatctatcactctttgcttaaaacctttctttggcttcccattgctttaggataaagagcaaggcctctgctgtgtccctgaggtcccaagagatccttccacaacccacctcacccttccctccgttccatgatgactccgctcattccctcagacatgccaggcttttcctgcttcagggcctttgcacatctgttccatccatgtggatgggtctgtctcctctctacat

SEQ ID NO: 192580 - DNA, 475 bp, Homo sapiens
agaaaggacatgattccttccctcaagcagctgacaggctaatgggagagaaaaatgaatagataattacagtgcagtttgtcaagggacagaaataggcaaggtggacacagaagttctgagcacataaaggaggcatgactgacccacactggaatgatgaaggaaagcttcccaggaccacatgacaaatgtgaaaggcagccctctaaggaaagagaagggaggaaaggttaacaaggcagaggaaatgcaatgcttgaagaaggtttgtgcatttagaaaattccaggtggttgagcacgagtgaagcatgaagtcggcgataggagtgcagtgagaagtgaggtaggagaaagaggtgggagtgactttatggatggctttgtgtgtgtctacagggattgcacagtatcctgcagaatagggattctgcatggtgtttgcagagaggttggggaagggagctgtgcct

SEQ ID NO: 192581 - DNA, 430 bp, Homo sapiens
acacaccctcacactcaccctccctacacaggcatcggggcagttctttatatggatgactaacaactaagaaaaaatgaagattagtatgaatggcaggagcaacaggcagtcagaagagatttttctatttaatcttttatgtgtaacactttacagcatgaagacgtattctatcaatatttgtatcataattgacaaattctcaagtgacatagggatttgttcttgattcaccactaaagaaaatttttaaagttaattttttttaattacagaagaattctctttttatcttcacaattgtttcatgatctatttatacattggatgatatttatttaatccagttttgtattagaaatggatagtgatgccaaaagccaccgtgctggctttaaaaataataaaaatagtttttgtattattt

SEQ ID NO: 192582 - DNA, 419 bp, Homo sapiens
cacagatgtatggtaagttctcacttaatgttcaaaataggttcttgaaaactgcatctttaaatgaaacaatgctgctatatgccatttaaacaacagacctagcagcacccttgtgacacaatggccaggctagtctggaactcctggcctcaagtgatctccccaccttggcatcccaatgtgctggcattacaggtgtgagtcactatgcctagcctggctaatgtgtgttttttaaaatttgtttttagagatggggtctccccatgttgcctgtgctgggcttgaactcttgggctcaagtgatctacttcagcctcccaaagtgctgggattacaggcttgagccatcacacctagtcataaggacagaatttttgagatagagcaaagccatatttagaagtgtctataaa

SEQ ID NO: 192583 - DNA, 415 bp, Homo sapiens
agaatgggatgttaccatttggttggacgacaggacaggaggaagcaaacacttagaataggcagttttggaagggagaagtaagtgaagtaatataattactagctaacattctcaccaatcacatgcctattatttccttaaatatcatcaccaaccccaaaaagtaggactccagatgagaaagttaaacccatgggacttaaataactatcctggacacatggttactatacctggaaataaactgaggtctgtgaatccactaccttcatgtgaaccccagtaacgatggaactgacatcagatgacactaagtgacacctggaagcgccatcttcaaatttgaaaagcaatgctctagacaagtaaaacatcaacaacaaatcttcgtccaaccaatgtttatgttttc

SEQ ID NO: 192584 - DNA, 526 bp, Homo sapiens
cggccgcagctacgagaacctgctggggcgcgaggtgcgggagccgcgaggcgtgtcccccgaaggccggcgcccgcccgtcgtcgtgaacctgtccacctctcccagacgctacgccgcactgtccctgtccgagacgtcgctgacggagaagggccgcgcgggcgagggcctgggccgcaactggtacgtgacgcccgagatcaccatcactgacaatgacctgcgcgccaccgagcgcccgagcgccagggcctgggagttgcccgggggccgcacgcggccacctccccacgcggcccccgacggccccacctctggccgccagcggagcctagagcagctggacgagctcatcacggacctggtcatcgactcgcgacccaccgccggccaggcctcagagcccgcggccgactgcctgggcccccaactgcgccgactgctggactcgcggcccgcgggctccggggcccccgcgctggcgccgccacgctcgccccccgcctcggccggcagcgccgag

SEQ ID NO: 192585 - DNA, 152 bp, Homo sapiens
ctccattctttagaggtcagaggaaacgagaaggaaatggcaaaggaggctgcagggtggtcctgggagaatgtggggtcttggcatgtaagtgaagaaaatgtttcaagaaggattaaataatcagctgtcacttctgctgatgtgtctgg

SEQ ID NO: 192586 - DNA, 168 bp, Homo sapiens
acctagcaagtcctcttccattctttgaggtttcccacttgtggctttctggcaaaggcatgttcagctccttttttctgggcttccaagaacctctgaaatcctttgcaattccacctcgctttgctctagcagattcctgccatgggagacataaatgtgtgtcat

SEQ ID NO: 192587 - DNA, 451 bp, Homo sapiens
ttaagtgaaaaagtgctagtggataagtagaaataatgtgcaccacttctaggcctggcccctacaaacctcgggcaggctcctccacacgccttctcctctcccgactgctggcagattcagggcaatttgggagccatatgctgaagaggagcatccaccagcctgagtctctaacaaccacctgctgatggcccccaactcacaccagatgcgacatgaggcagcaatcaactttaactgtcttaagtggctattttggaatttatctgtaaccacagttagcattaactataactaatacagagtgcacctgagcagcttttatttcatgtaatttgcattaactttttaatttcatacatgcaaatttaaaacaaataataagctggtactgggactagggaaaaccttctaaactcacttcctaagacttctttaacactttggg

SEQ ID NO: 192588 - DNA, 694 bp, Homo sapiens
aggaatgaatatagagatgtacaaataaagcaaatacagcaaaatattaatttagaatctaggtggttggtacatgggtgtttactatgtaagtcttaatttttctgattaaaatttttgtaataaaatactgatgcaaatgtggttgagaatggtcatcatgtctacaaagagacactaatgtttaccaatatgcatgctctctgcttgatgcagtcccctggcatgtcagtgggtctctgtgactgagtctggccagtggaacataagtagaaataatgtgcaccacttctaggcctggcccctacaaacctcgggcaggctcctccacacgccttctcctctcccgactgctggcagattcagggcaatttgggagccatatgctgaagaggagcatccaccagcctgagtctctaacaaccacctgctgatggcccccaactcacaccagatgcgacatgaggcagcaatcaactttaactgtcttaagtggctattttggaatttatctgtaaccacagttagcattaactataactaatacagagtgcacctgagcagcttttatttcatgtaatttgcattaactttttaatttcatacatgcaaatttaaaacaaataataagctggtactgggactagggaaaaccttctaaactcacttcctaagacttctttaacactttggg

SEQ ID NO: 192589 - DNA, 297 bp, Homo sapiens
ggtagagagaaagagaagagccagagagtttccatagatccacacctgggacttgaatgcgtgtgagatgtgatcgtgataatcaagactttgtgttttcttaaacatactataatatgtgcatctaaagaacagggtccttcaaagcagttaccttgggagactttggccttgttctgacaatgttgccactactaaaatttataattacggactcttccttcaggactgccttcaaccatatgggaagaggtctcctaactgtagccaaggatgccatttctcagcctaaccact

SEQ ID NO: 192590 - DNA, 733 bp, Homo sapiens
aaggcttatacatttatatatatttattaaaatttaaattatgtcctctaacttagaattgtgaacatgtggatatgtactgagctaattctttggaataaacatttatgagctacaagtatataattttttaacaaaatcagtccaatcttcaaattgacaagtgcatttaaaattttgactttcaggctgaaaatggtgaatgtgaatgttagagtttattaacttgtcgatgaccattagttaaagaccaccaggaacacatgcgtcatttagtaaagttgggtctgttaattgttcaaacaagggaaaacataaaccatggggcctctcaatcagaaggtgttagaacttacaggatataggcttctgttgagcaatttctagagagggtttaaggaagtagggctttactctggaatgtatagcgtcaggaaatggtagtaattctatgattggatgtgttaacttttatctaaaaggaaagaaaaatggatcgaggctaaaactatagctgataaagaaggagcagtcactcatatcagccagaatggagggttgtttggttattcttgtggtttgggcaatgcctttgtttttgtcagcattcaaacatgattatggagtggtcttgtttttaatcttgatccatcagagtcacagggtgactttgtctgatgttggtgttctgttaacaagagaacaccacagcctagctgtgagtgccaggcca

SEQ ID NO: 192591 - DNA, 174 bp, Homo sapiens
atagattctagaacagtgatggaaaggctctcaaacagtgacttatgtctctgtgtaacttacacatttaagtttctgtttctttatagatagaaaaacattattttggccaattaactatcttttttcaagattattatttgtaatataaaataagctataattttgagttca

SEQ ID NO: 192592 - DNA, 435 bp, Homo sapiens
gtgctggctgtgaacgttaaccttgcatctttctgtctatcacccaacaatttgtatctcaactgttcttaggtaatccagattcctccaaaacagaggaacacacatattggcagttctgaaggacaccttctgtaatttagttgtctgtcttgcattcagaagttttgctgagtcacttttcaaagacgttatcaaaggctgggtgcaggtggctcatgcctgtaattccagcactttgggaggcagaggtgggaggataacttgagcccaggagctcaagaccacaggtgatccacccgccttggcctcccaaagtgctaggattacagcaatgagccaccacgccaggccaaggggagcttcttaataacaactagagaaaccctaactcacttggggtatcagctgacatgtaaggatatgtaagcccct

SEQ ID NO: 192593 - DNA, 431 bp, Homo sapiens
ctgcagcctgcccgtttatggctgaagtgagccacctggccaggaggacactagctactttttcattgatgggctttgaagatggtgacagtgacagattcaggtgatggcgtctttctgctggctgctctaaaaagaaggccacttggccccatctccagaataggaaccatgagacagtgacaaatgcccatacaggaagtgagctgcccagcactcaccatctgagccatttaccccatgtttcccaggtagcccctcttcatttcctgcctattcccctggcttgctttatttatttatttatttatagagacagagtcttgttctgttgcccaggctacagtgcggtggcgcaatcatagctcactgcaaccgcagctgcaactccctgggctcaagcgatcctcctgccttagccgcccaagtag

SEQ ID NO: 192594 - DNA, 467 bp, Homo sapiens
ccttgaaaaccttgttggcaaatagctacactagaaaaatgagaaggccaagggagaataagtacttaaggatatccttgccgtggctgctttgtccctctgaagcctgctctgcctgtgtaagctatagcattcttgcggcagtcaggaaggttcagtggatccaggtcactgattaaaagcagcataaaataccagtgctagggcaaagtgcaggctaggtgagtggaaagtcccttgggttccacagggtacagagtaataggcctgtccatatttttcttactgctaaaactttgaggctttgagtgggtttatctgcagctaaaggaacctctgagagggcgcatctatcagagacaattgcaactaaatccgagcttcctttctcatggcatcctcgccaagcctgattagtgtttccaaaagatgaactaaactcaccgtgctggagcctcatggacaaa

SEQ ID NO: 192595 - DNA, 146 bp, Homo sapiens
gagaccacttgagttgtgactctcctgcttatggtgaaattaagaactaaaactaaaacaacaggaaccctttcataacggaaatactgaagtataaaatgaaaccacctcctaaacaactctttttcctttgaaaacaaagctaa

SEQ ID NO: 192596 - DNA, 400 bp, Homo sapiens
ggccacttgtgcaggggccttgggggaactgggagcacagtgcagggtgttcctgctgcatgcaggggaagggagggcaagggaatggagggctgtggccggcgggccttggaggccacactacagagacaggacttagcccagaggccactgaggagctttcagtaacagggaagcagtgtcgagtactgcaggccacgtggctgcatttgagggtggctggtgggaatagggtgcggcagcccatctggcctcggaggcatgagaactgagaacagctgtacggccatacctttatgcatggatggccatagcctcccaaaggtgggacagcctgagtgttcatcaacagacaaatggagaaacagcctgtccataaggcgcggtgccattccaccat

SEQ ID NO: 192597 - DNA, 713 bp, Homo sapiens
agggtttgaaactttaaaattggggtggcttcctcacctttgtctacttaatttggatcttgaaggaagtggtgaagaggggagaagtgagaaaagagaaaaggaggaagaaaaaggagaaaggataaagatcattctagaccttttatgctccccccaaccctggggctggggaaggaagacaaattaaaattacctcaaggaagtctgtttctacaccactctcttcttgccctttaacaccttaaaaccaagatcgccccgaattttcaacatatactgcattccctccctagccaagagggctgttctcctaaaaaacaaaaacaaaactcaagcaaaaaaccctaccaggagagaatcttgagttagtgaccttaagaccttaaggggaaatgggttgagagcctgaatttgcaagtgaaccaatgaaaatcctaatataaagtttttataaccttattcgatgtggttaactaaaatagactccagcctcctcgccacattctagaataggcccacacctttgcttaaatgtctgtgaatttccaaaggcttctagtctcagcgttgccctggctccaagtccctgcttggtggactcagtctcacagtgcttcacctttggcatctgttctctgctttcacctccaggaaagcccaggtatggagttctgccctgctgtggtttcctcaaaattggtcgtttaagg

SEQ ID NO: 192598 - DNA, 484 bp, Homo sapiens
caatgaatatttcttttaaaatatttttatgtacattgtatttccttaggataaattcctagaacttgagtcattgaatcaaaaagaatccagactttcaaggtctttgataaattggctaaattgttcttcagaaaaagtgtgccaattttctgttctacctgcagggtgtgagacagttcttagggggggagaagtcaaaacaattgtattgtctatattttgacaaattcattattaagagaaagctagagaagcaaatcacaagctctgaattcacacatcacaattctaaatgtttgttgttctaatcctcaatttcaagttcttgttaatgcatccaccatttgaatatttactttttcaaaatataggaatgtgttaatttaccaaagatcacaatcggttctttgctttttgcttattttttgagacagagtcccactccagcctgggcaaaagaacaaaactccgtctcaaaaaa

SEQ ID NO: 192599 - DNA, 603 bp, Homo sapiens
tagaggaaatactgttaagaaaatcatggccgggcgcggtggctcacgcctgtaatctcagcactttgggaggcggaggcgggcagatcacaaggtcaggagatcgagaccatcctggctaacacagtgaaactccgtctctactaaaaatacaaaaaattagccgggcgtggtggcgggtgcctgtagtcccagctactcaggaggctgaggcaggagaatgacgtgaacccttgaggcagagcttgcagtgagtggagatcgtgccactgcactccagcctgggcgacagagcgagactccgtctcaaaaaaaaataaaaaatcataagagaaaatacatttactataccttaagtggatgtagatcatcataaagatcttcatcgtcattgtcttcacaccgacgaagaagaggaggggttggtcttgctgtctcgggtggcagagacagaagaggtgcaaggggaggcaggaaagatttattgacaaaaatcgtgtataagtggacctgtgtggttcaaacttgttgttattcatggatcagctgtagatgctaaaggcaaaataaatcaggttaacggggagtgggaggttgtaattg

SEQ ID NO: 192600 - DNA, 280 bp, Homo sapiens
ttgaactagatcgatgtttcctaatcttctaccattcatatgccttcaagatagctaccacatctgagaaccatatgacacatttaattaacaagcatttaaaaataattttagctttatccttgtagctatggaactacaagtttgatgagatcattcttttttctatatacattaaaatgttacctattaaaattaaaaaccttaatccatgtaccatctatgaccatctcacgattatagcacacctttatacatatcatagactttatgattacac

SEQ ID NO: 192601 - DNA, 200 bp, Homo sapiens
tgacagtgcatgacaggagaaaaggctttaaggccaacctgagctgggtataattggcaagtctcaacttctttgagccacaatgctgtcatctgtaaaaagggaataatgacacttactctgcagaattggcccgaaccagacagctttgactattgactacgttgttagtgttaatatagaaggccccactgctgtgt

SEQ ID NO: 192602 - DNA, 843 bp, Homo sapiens
gtggggctttgccagcaggcagtggaggtggcacgcctcccgaggaggggtgggtttggggctgatggaagaaaaagcacatgtcctgagtagttgctcccagctgggaaaggggtaactgaagccccaggaaatgcacggaatcctgggggcatgtgggcgcctcagacttgagccagcaacacccttgacaccccttctctgtgcagagagggatgagtgccgagctcacccgtgcagaaatggagggtcctgcaggaacctcccaggggcctatgtctgccggtgccctgcaggcttcgttggagtccactgtgagacagaggtggacgcctgcgactccagcccctgccagcatggaggccggtgtgagagcggcggcggggcctacctgtgcgtctgcccagagagcttcttcggctaccactgcgagacagtgagtgacccctgcttctccagcccctgtgggggccgtggctattgcctggccagcaacggctcccacagctgcacctgcaaagtgggctacacgggcgaggactgcgccaaagagctcttcccaccgacggccctcaagatggagagagtggaggagagtggggtctctatctcctggaacccgcccaatggtccagccgccaggcagatgcttgatggctacgcggtcacctacgtctcctccgacggctcctaccgccgcacagactttgtggacaggacccgctcctcgcaccagctccaggccctggcggccggcagggcctacaacatctccgtcttctcagtgaagcgaaacagtaacaacaagaatgacatcagcaggcctgccgtgctgctggcccg

SEQ ID NO: 192603 - DNA, 603 bp, Homo sapiens
  misc_feature (14)..(14): n is a, c, g, or t
gtaacttggtttgncaactgataaaaataaagaattggggccaggcccggtggctcacgcctataatcccagcgttttgggaggctgaggcgggtgggtcacgaggtcaggagatcgagcccatcctggctaacatggtttctactaaaaatacaaaaaattagccaggcatggtggcacgctacacagctactcaggaggctggggcaggagaatcgcttgaacccgcgagggggaagttgcagtgagccaaaatcgcaccactgcactccagcccgggcgacagagagacagactccatccaaaacaaaacaaaacaaaaagcagctttcagaaaagacagtatgtgaaaacacaatctcggtatcacagataggctgggcacagtggctcaggcctataatcccagcacactgggaggccgaggcaggcggatcacttgaaccggggaggcagaggttgcggtgagccacgattgcaccatctcactccagcctgagaactatcttcaggttacagaagtttgtaaaagggaacttcttcccctctcctgctgtcaggccgaatgtcagctatcactgggatttctcttttttgtcttgt

SEQ ID NO: 192604 - DNA, 296 bp, Homo sapiens
acctggtacagagttggagtatgtgcgcagggtcaggacagcatctcacatgtgagggccgctcagcacaaagtatcacagcccaaaggtgtgaaaacagtatccattatagggatcgtgttgggggtcaaaagtaggatgttggggtccaagcagggtgagaaagaggtccctatggtaaagcaagcagggaggctcagcacagagtactagagttgaaacatggtgagaaaggtgtccttgtggagaagctgtgtgtgtcatgtcagagcctgagaggaaggaaaaagctgtga

SEQ ID NO: 192605 - DNA, 129 bp, Homo sapiens
ttatttgcaaagctttgtgctaatcactggggatacaaaagctattaagagtggcagggtctttgcccctctgcaactgagtctagtgggaatacaaacaggtaagtagtgcctaaaatacagtgtgat

SEQ ID NO: 192606 - DNA, 581 bp, Homo sapiens
tcttttaagaagacacataaggcatgattgattgtttctagttcaagagaaaagcacaaaaaagtttgagtggacataactacacttaaaaatagagatttttaaaacacactttaaaaaattcgaagtatactatacatatgacatttactatttgtactatttgaaattgtacaattcaatagtaaaaaatccatttatattctttttttccacccttcatctctctctccctactacccttcctggcttcttgtaaccacaattctactctctctctttgtgagatctactcttttagctgccacatatgagtgagatcatgtctttctgtgcttggattatttcatttagcataatgtcctccagttccatccctgttgctgcaaatgacaagatttcattcttttctatggccgaatactatttcattgtgtatgtgtatatacaccacattttctttatccattcatgtattaaatggaattgacgtaggatgattccatatttggactgttgtgaatagtgctgcaataaacatgggagtgcagatataccttcagtgtattgattttctttct

SEQ ID NO: 192607 - DNA, 209 bp, Homo sapiens
tgaaactcatataagaaccagtttgtctaaataggccaatatctattgaagaaattgaatcaataataaacaactttccaaagcagaaagcatcaagcccagatgagtttactggtgaattttgccaaatatttaaggaagaaattatatgaaatttctatcatctccttcagaagacagaagcagagggaatacttccaagctcattc

SEQ ID NO: 192608 - DNA, 299 bp, Homo sapiens
tggtaaagagatataggaaaagactagaaaagtaaactattttaaggagtttgtcattgaagtgaaaaaaaaatgagggagaagagcagttcagtggagtatcaggatttgggattgtgttagatttaagacagagaggaaaggccaggcagacagggagaggttgaacgttcaaaagagaatggaagtcatggtagggatatcttatggagcacatttctagagaaaaaatgaaaatagagtacaagtggagctgttcacaatgaaaaggaaaagggttcttattctaagatgggatg

SEQ ID NO: 192609 - DNA, 103 bp, Homo sapiens
tcctcacacaatgccctatgtgcctgccctcaagtgctggttcaattcttggtggtcacgtccttcagtcagaagaaaagatctagaaatctaaaaatgaaat

SEQ ID NO: 192610 - DNA, 807 bp, Homo sapiens
aagaccaaagggaaaaggcattccacttgttaaatgtttattatttgagcttagcagccaactataataagggagagaggaagctgtctgcaagctgcatgcagatttagctactcaaattccatgaatgtaaaatagaacattgaggctaaacccttaaaatttactaggcagtagcttgagggaggaggtagttggtaataaaagcttgtagccaccaatatttgagtcagtgatttgaaagcagcccaagtcaacaaagaactaaaattcccaacacatgaaaattattgcttccccttattctaggaatcacagtagaccaggggaaagagacaaatatcttctctcctttatctcctttgaatttgatctgagtataatagcttttagttttccacgaagccaaaatatcatctaataaactgctggtgggtgggatgactacaagcaaaacgtttcttcgcttatcttgtgcttcactggatgtctttttgccgagcctcagtgactaatcacactgtgctttattcttcactttcccactgaatgcgtccatcattccttttactataataatgatgcggtgtctcaggtttattatctataggaatgtgctttaagatgagtacaggaggccgggcgcggtggctgaagcctgtaatcccagcactttgggaggccgaggtgggaggatcacctgaagtcgggagttcaagaccagcctgaccaacatggagaaaccccgtctctactaaaaatacaaaattagctgggcatggtggcacatgcctgtattcccggcta

SEQ ID NO: 192611 - DNA, 475 bp, Homo sapiens
taaccatcccctaaatttattatggaaatcttgaaacatacacagaagaaaatatgataatagattctttttttcacatcatccagctgcattaactctcaatgttttggcaatctctcgttttcttcctctgtacagtagcacacttttttattttggctggaggatttaaaagcaaatcctcatcctcatgtctttcgtgtctaagtaattctagctgcatctctgactgataaggacttttattttcagtataaatatccaataaagtcagcaattccttaataatcacctaatacctggtccattttgatggaaggaagcattcttgataatactacttaagagttttaggaactagtcaaatattgttcataataaatttagggtcaattaactggtatggttaccccactcttagtagataataaaaaggtaacttcttggttttgaattgtagtgtaggggttttttt

SEQ ID NO: 192612 - DNA, 461 bp, Homo sapiens
ggagatgaaaggaaactctactctttggtgtataaactttgtatcctcgaattttgtaccaagggtacatattacctactccaaaagaattcaaataaaatttaattttaatggagtaaatccaaacctttgatattaactgctgtatttcctgatgatgaatttgcagattatatataaacaactatgagaaattctaaaatgttctactgttcagaagagaatctactgcaaaatgagatgggatataggcacagttttctatttgtcttcttacatctgaatacaccattccattcttctgacaggaagtaaaaccattcatccattcaatcaacaaatattgagaatttactaaggactacgacctggggatacagcagtgaacaagatagccaaagtccctggcctcagagaacttactgtcagatgtaaataatttgtaaaatgggcataaaata

SEQ ID NO: 192613 - DNA, 518 bp, Homo sapiens
caggtgctgacaacacagcttcaggtccaccacaggcagaggagctataggtgaaacctctgggtaaagcctttagtaacttctcttgtccattaaaagggggttgaagaataaacaatgaaagggcttatgttgtctctggaaccacaaggagaaataaaaatcccaggcctatgttctatgtggatgtggggtcaaaatttactgtgtggtatgggaatcacatgctgaaaaattaaaagctgggacagaaccattgaaacctatagaatctcagcaaaagcaaatgcaatacatttttatgatccagggtaatggaaccccacagaaaaagaaaggatctgctgaagatgggctcagaaataagcaacaataaaaatcaagtccttgcatataaatgatacgccatgaaggagagtcaccagttgccataaggagaattagtacccccaagaaatactgctgagaagaactgctactctttttttgagagtgaaatgaggaaattttcagggaaa

SEQ ID NO: 192614 - DNA, 129 bp, Homo sapiens
agactcccaaggacagagatggtgatggacaaagcatcatccggagaagccaccagtagccaaagggtgctctgagccagaagccagaattctacctggggatgacttggtcccgtgactgaacgaggg

SEQ ID NO: 192615 - DNA, 463 bp, Homo sapiens
gggggggggtcggggaggaaaacaggctggttaatagctgcaaaattgcagctaggtaagaggaataagttctaatgctctatagcaggagtccctaatccccagaccatagactggtattggtctgtggcctgttaggaactaggcagcacagcaggtgagcagtgggcaagtgagtgaagcttcatcttatttacagccaccccacattgctcacattactgcctgagctgtgcctcctgtcagatcaatggcagcaataaattctcataggagcgtcaactctattatgaactgtgcatgcgaggggatctaggttgcgtggtccttatgagagtctaatgcctgatgatttgtcactgtctcccagcaccctcagacagggccaactagttgcaggaaaacaagctcagggctcccactgattctacatcatagtgagttgtataattatttcattata

SEQ ID NO: 192616 - DNA, 680 bp, Homo sapiens
gaagaacccaaaagttgatccaaggtagactttcagataatgtgacagaagcaagccagtctcaaaacaagttgagattctgagaccatttccatgccatggtgaactgtgctaactggtttatgaaagcacaggagcagaggaacagggaacagggcagatgccacacaatttctaaaaggtcacttgaatgccaaagacattttagatttgattgcttatggtctcacaatttcaaaaccattttaaggcctccttggtacttcagcgatgtggggtgagcatcaaggccatgattaagtttggttcaaaccctcccttctacccgactctgttcccttgtctcttctgaccccctcctgccgtatggatggctccccttcagccaaaggggatcctcctttttgatacttgatctgtggagctttaggtttttaaatgttgcaaatgatttgaaaggcattgctatggttcgttcaagtcctgtgcttattaactttttacccctatggttagtttctcaggaacatgtggagtgtaacaaacaagaaaagtgacgcctttatcatgtttagataaacaatctactgttgtcctaacactctgcttttccaaatggattgttttatttgtgaagacaaaaagttactcccatttttcagctgagggaactggggttc

SEQ ID NO: 192617 - DNA, 469 bp, Homo sapiens
cttggtcaaaccttctctggtatcccagctgggatactggggtgctctcattacagcccaatgaggggggaagtccaggtcttcacttggcctgtgctagcatgcatagggacaagtcataggtttttcatgatgtttacctagagtagagcagttaccatctaagagttttctgcctttctaggctgccccttccttggtccttggttaaagagagcaggctttggtagagctttttgtcagcacatgttactgtttccgggttgctggctccttcagctcaaaacctgagatataagaggcaaaaagaaaacccagggccgggcacagtggctcacatctgtaatcctagcacttcgggaggccaaggtgggtggatcacttgaagtcaggagtttgagaccaatctggccaacatggcaaaaccttctctctactaaaaaactaaaaaaaaatactgggcatggtg

SEQ ID NO: 192618 - DNA, 674 bp, Homo sapiens
tttaagtgttaatatctcctcagttttgatgctctagggaagggattgacaaactggctcactggccaaatcctttttgctgattattttggtaaataaagttttattgggacacaactatacccgttttttgtaagccatttatctgtggctgcattcacactacagtggcagggttgagtagttgtgacagagccatatgaccctcaaaacccaaaatatttatgatctggccctttatagaagtttgctgacccctgcttgggggtaaaatcagggaatctgttttgacaatcattagaaataaatgaatgcacacatgccctgaaatgagggctgagggagttaataagaacaaggaatagggagcctcaaaaccccaaccgcaccctagaggaaggaggagctcaaatcaataacccaacctgtcaccttaagaaactagggaaagatgagcaaagtgaacccaagcaagcagaagaaggaatcaataaaggtcagagcagaaatgaattagggaccagaaaaacaatagagaaaatcaccaaaaccaataattagttctttgtaaacacacctttatctaagctgatcaagaaaaaagaaagagaagacattatttaaattaggaatgaaaggggagacattaccaccaaacttacacaaataaaaag

SEQ ID NO: 192619 - DNA, 728 bp, Homo sapiens
cactgcaacctctgcctcctggttcaagcgattctcctgcctcagcctcctgagtagctggaattacaggcatgcgccaccatgcccggctaattttgcatttttagtagagacagggtttcaccatgttggtcaggctggtcttgaactcccgacctcaggtcgtctgcccgcctcggcctcccaaagtgctggtattacaggcgtgagccaccatacctggctcatttctctatttttgtgcatacctttgcaattaattttggttatgatttcctatggtagattggaagttgctctcatatttgccctctgttagagtaagctgtggggttgttgatcactgtgtggttacacccaggctgtggcagagattcaggtcacattagccagcctgctgccatttgagttgagtcaagatactgattctagagttgggcttaattaagtctttaaaattttttgttttgtttgggattttctattctccttaactgcattggtaccagatccaacgttgaccttatattttgaaattttggtcagtttgtttatatggtgattttgcttatacagtgttagggttttttgatttttggtaattgttttttgtcaaaatagtaagaatacataaagaatcagacagtactacaaggcttataattagaaaaaaaacactactttatttctgcttgtttgtttttaaccacttttgcaattttttttcc

SEQ ID NO: 192620 - DNA, 313 bp, Homo sapiens
tgtgacagtttcccccacaagtaacaggaagaattaactttgttttatgttagggctttatccaaagatgtcaatacaatactcatcctatcagagaaatgtgttacaaaaatgcaagttatcaccctctctacttttctctgtgtcacttaaacacacctaaagttcctggcactcaaaccagatgtacacaggcttcttttcctcagaaagcttttttggggtattgcagtgtctttccagctttagcttcctttgatgaggtcagttgtctcttcctggctatcacagaggctgtcatgctgacatgata

SEQ ID NO: 192621 - DNA, 204 bp, Homo sapiens
ttttggcaatgagactaagataatagtaatattgtagtaattatgggaactggttatacattcaagctgaaagctgaaggcagtgcaagagtttggggatttgtatttaagacttaaccatcgctaggatttttacttagaatgtaaacgttttcatggctggaaaaacagaccagtactatttgaaatgaaataccagagcct

SEQ ID NO: 192622 - DNA, 430 bp, Homo sapiens
ccgaaaactgtttggtttgaaaaatctagaacattgtagaagagagatatatttatataattagcatcaccaattaagaatgaattgactttagcaaaaatcaatgtaattatctagataattcaggctaattaaagaccttcccaaatccttagatcttcattagctgcatgcttctggtaaaagcagatttttggggtgtcacattagctttatattttgcatcagtcttgctctattctgctgccgtagacctggcttcaaatgatagtgcccacttgataaacagatgttgttcaggagaaaataaaataggaaatataaaatattctgtgtcgaattgaaagcatgagggtcctcatgttcttagaatcttcttagaaatacagtataaaatctttatatacagatacacattgacaacaataga

SEQ ID NO: 192623 - DNA, 369 bp, Homo sapiens
  misc_feature (52)..(52): n is a, c, g, or t
agagcggaccagcaggctgggcccagattaagatgtcatgtccacaaaaatnaaaaaattagccaggtgtggtggcacatgcctgtagtcccagctacctgggaggctgagcaggagtatcgatggggcccaggaggttgaatttatattgagctgagattgccccactgcactccagcctgggtgacagagcgagactgtctcaaaaaaaaaagaaaaaaagaaaaagaaatggagaacctggctgtgtttgggggcaacaaaggggacactgaggagccaactcctccctgaatagcggtgtgtttcttcctcctggatgccagctgcagcaggaatggtttgaatagatctaaatacttctctatg

SEQ ID NO: 192624 - DNA, 605 bp, Homo sapiens
tgcgggtgatctagaggatcccaagatggcaaaacgtcccgcgcgcctaaagcttagtttttaagcatcggaaacatcagtccagttttgctgggaagactacgtaaacatctgagaaagtatgaagccatgaatgatgaggctattctattttagaatggagcagtcatggctgggcttaatacaatgtgattttcttgacaagttactctgcccagaccatcatgcttgatctctggttaattacttacaagctgcccacatgcctaaggagcaaagagtcatctgattgccaggctcttaattaaagtgatccaaacagcacacttcataaggaagctcccgactccactttcagcagtactggaagtttccagtattggctgtttcttgtcagtgtgacactggcttcttgttctctgaactttctgtattgacatgaaggaaccatcccagatttttaaaaaatgaccctgatcaattagttacatgtagaagtcagctacctactcactcagtatgactaagatgacctcaaaaggggtgtctcagcttgaagcaaaataggctaaagagcacttacttctaccccatagttgtcccat

SEQ ID NO: 192625 - DNA, 141 bp, Homo sapiens
tgcccctacccagtcttcacctgaggtttacccaagcagggagaagggattaacagagaaaggtaaaaataatttcacttcaaatttgatgagactaaagaaatttctgagtccactgattcaatttctctttcataaacc

SEQ ID NO: 192626 - DNA, 142 bp, Homo sapiens
tcaaataagcaaactcttctctttgtctcatgcagaaaacttttgctctttcctgtaaccctcttttctcaacaactttaagatttctggggtctcacattctgccccaagtacatctaaaactttgtatttccccaaataa

SEQ ID NO: 192627 - DNA, 372 bp, Homo sapiens
ctgaggctgagatggatgcactgacagaagtaggctttagaagctgggcagtaacaaacattgctgagcaaaagaagtaatgttctaacccaatgcaaagaagccaagaaccatgataaaacattataggagctgttaaccagaataacccgtttaaaaaggaacataaacaatgtgatggagctgaaaaacacaatgtgaaattcacaatgcaaccacaaatatcaatagctgaagagactaagcagaggaaagaatctcagagcttgaagactatcttgctgaaataagacaggcagacaaggtgagagaaaaaagaatgaaaaggaatgaacaaaacctctgagaactatgggattacataaaaatacc

SEQ ID NO: 192628 - DNA, 159 bp, Homo sapiens
tgtgggtctcatattctgaatcagagacattggtacatctcagaaggaagtagaaaaattcttaaattggactgtgaagtcagcctaattaagaaatgtagatatattggctgggtgcagtggcttatgcttgtaatcccagcactatgagaggctgag

SEQ ID NO: 192629 - DNA, 314 bp, Homo sapiens
gtctaattgggatcccctgcaacagaggggtcagaaaaggctggaagagaaaggagggctattctgaatgaggaaggcaggatcctattacagaggcaatttgcccataagtgaaatttcacgtctaacaaatatacttccctattccaaattcactcgattaaaactcaactacatcatctaactgtactcagtgaagtagagtaactcttgggatataattttgagtgttctcattataattgctaaatcataaaatgagtcaattcacactgggtctgtagagcattaatatctaataatgaagttctacc

SEQ ID NO: 192630 - DNA, 185 bp, Homo sapiens
tgagattgtgggtggtttctagatttgtgccatagttagtaagtcttcaccattttaaagctgtggaaagattttcttgtggtttcttctagggcttttatttgttacattttaattttttcatatacttggtatttaaccaggcataaggtatgagttatagattcaactgtgattttttttct

SEQ ID NO: 192631 - DNA, 440 bp, Homo sapiens
aggcacggctctgcctgctgtcgcagcacctctttataatatttaaacaaggctgctcacatttctttgatgtgctcatcagaaataggtcatttctcctcattaattcagttgaggcttttttgctggactggagggaagtgaatggagtgttggtatgggagaatcctggatctcaaaatgtctaagagccacctgtagtggtgaaaagggaaagcagtgtcgttcattcattgccttccttttgagcctgcccttccaccaggtaacaagtgattcctgggcagggactcattgcactttagtcctgcatacgttcctcttgccagaagtagagggaaatgaagccagaaagaaatgggtctgctcacaccagacctctagcatcaggcagcatcaagcaccctgctggtccgtgagagcacagggaatggctgagt

SEQ ID NO: 192632 - DNA, 681 bp, Homo sapiens
cccttataactaatgttatagaatgaatgttcagagtcacaccagtgttaggcaggttaaagcctatactcatctatttcaagcagcacaaactaggatgttgctaattcaaaaactgtgaagttttaaaaatctactttaggataggaggattttggaaattaagtcaggggcggggaaaaggaaaaccaagaggcaagaatctcaaaattctgctgattagattggactttttaaagaacaccaaatctaaagcagtatcaaaatagcgttgaaaataccagaaatgttaactgcccatttagaacaatcattcttttagcaatatcaactctgcaagcaatgcagagttaatgcaaaagaccaaaacttacagatcaaagtaggggatagtgtttttcagtcaaaatatttttcttcttatattgaaatataatgtgaaatcagttttttcaagacatgtctttctaaaattctccattaaatatacctttaacacatctgtactggaacactgttaaacttactatgcaaaggacaacttgcatttaaatgaacacttcaagtaaattctgtctatgagagaaacaataaatgatcctaggagaaaatcagacttcccatttagggttactcatgctgacagtatatgttaacaaacaatggcaatgtatattattt

SEQ ID NO: 192633 - DNA, 577 bp, Homo sapiens
ccgttctcctgtttggcttttccctggatgtgactggggcttctgggaagctgaggtaaaaaaaagtgagcccttagagaggcttctttccaaccaagagtaggccaagagattgacacttgtcagtcagaccagttgtctgaacccagtcctggtccctgccttcagcactacccaaatggagagtggatgaggccaccatctatttcacagggatacgaaagcccatttcctgacattaaccccacccagccagtgaaactactggtgagaggaaaggagagtccagaggacagggctttccagactcttactactttcccccacttcttgttctctcaccagtgtctcattggaaaccctaaagacctgtcacagagacgggctcggctgaggagataaggaccccaagtccccagcaactatttttcacttgatccctccacccagaagataaggttttgtcctaattcagtcccattcttatgagagagcccagccatcccccaatcttcagtctcagctgcattccaggctttcctctccctagctgcctagaggccaaaagggaggagaa

SEQ ID NO: 192634 - DNA, 236 bp, Homo sapiens
caagcaccaccagcacctgcaaaaagtatacctgtgaaaaaggaaacaaaagccccagcagctgaaaaattagagcccaaagctgaacaagctccaacagtaaaaagaacagaaacagaaaaaaagccaccacctattaaggatagcaaatctttaacagctgagcctcaaaaggctgtccttcccacaaaactggagaaatcgcccaaaccagaatcaacctgtcctctctgcaa

SEQ ID NO: 192635 - DNA, 543 bp, Homo sapiens
gtccgggatattgtcctgaattactattttcatttaaaatgttctactttctgttctcctttctctttctcgactccagttatcagtcaggtgttgtgtcttcttgatcgagtctttttgtcctattttactccgctctccatctcttagtctttcctaccggcatccttttcttgacttatgaaacatcttcatctctgatttccaagaatattaatactcactttttagaaacattgttttctgtatctagctttccttgttgtttcctctttcctcccttccttacttttcttgtctctttctcactccctctcttcccttcccttttctttgtcttttggtattttctctcatattgacatttccttcttaaaagtccttggctaatagttcatattaaagacttaggcactgaaagagctacttggaactgtctgccagcttgttaacctgcagtttccttgttgggtgatctgacacaggtgaccttctcactaggggatttcactggtatgttgattttcaccatgttctcctatt

SEQ ID NO: 192636 - DNA, 563 bp, Homo sapiens
gtgggtgcatgaacaatcaggtaagggaatcagggaagagaggatgccaagaagcaggatctgcagctccctgtgctgtttcatcccacacatcagctgctcccgacaatgcccatcctctctcgctgctgtatctcccagtttgtgttaggtgtgccttcttggtacttctgatgtgaaattccctgtttacttgtatgcctccccaatcagactggaaattcctcaaagaagggccttattcacccttgtgtccccagcatatggcataattcccagcacatagcaggtgcttaagaaatgtttaagaatgaataagggatgatttattcacatacaagctggatgggttccacttcctgcctctttattttcttatattatatgaatgtttataaagcattaggtgtgggctggggtttaaatggaaagctaaagcatggtcctcactatcacagcttccaggctcttgagggagacttgctatccacaatgaactgccacacagagcagaccacgtgtgcaaagtgtcattttgtggggagagcacagaggatggagag

SEQ ID NO: 192637 - DNA, 145 bp, Homo sapiens
aaataaatgtttatatttcaacaaaatgaagggaaatacttgtagagcttaggcaatgcttggtatactttgtgttttccccacagacaaaaaacctcgtaaatggcctatgttggttcttcggaattggtggcaagaggacaga

SEQ ID NO: 192638 - DNA, 776 bp, Homo sapiens
gatgaaatgatgaaatgatgagatgagataaaatgagatgaaatggtgagatgagatgaaatatgatgagatgaaatgacataatgaatgaaatgatgaaatggaataatgaaatggaaatgatgagataaaatgagatgaaatgagatgtaatgatggaatgagatgagatgaaatgagatgaaatgatagatgagataaaatgatatgaaatgatgagatgaatgatgagatgatgagatgaatgatgaaatgaaatgatgagatgagatgatgaaatgaaatggtgagatgaaatgatgagatgaaatgaaatagtgaaatgaaattgaaataaaatcgaaatgagagatgaaatgactgagatgatgaaataaaatgatgaaatgatgagatgtgatgagatgaaatgatgagatgagatgagatgacaaaaaaaaaaaaaaaaaacaaaaaaaaacccttgtgggcgcggcccggggccccctaggaaaaacggtttctcgaagacgacacagcagagtggggcgcgcgcggggcccaaagagggaaacaggacacaggggcacacaagagaggtccccagaggggaaaccgcggggcacaagagaatcagcgatggggaaatcagacacaagtaaaaaagagcccgccgcgggggaaacacaagagggcgtttgagaaacaaagcacaaatgcgggacaaagaggcgagataccggggactacaaacaagcggagagccacagggagacccacagataaaagtaacgccg

SEQ ID NO: 192639 - DNA, 612 bp, Homo sapiens
gatgaaatgatgaaatgatgagatgagataaaatgagatgaaatggtgagatgagatgaaatatgatgagatgaaatgacataatgaatgaaatgatgaaatggaataatgaaatggaaatgatgagctgagatgcaatgagttgaaatgagatgaaatgatgaaatgatgagatgaaatgatgagatgagatgtgatgaaatgatgacatgaaatgatgacataaaatgagatgaaatgagatgtaatgatggaatgagatgagatgaaatgagatgaaatgatagatgagataaaatgatatgaaatgatgagatgaatgatgagatgatgagatgaatgatgaaatgaaatgatgagatgagatgatgaaatgaaatggtgagatgaaatgatgagatgaaatgaaatagtgaaatgaaattgaaataaaatcgaaatgagagatgaaatgactgagatgatgaaataaaatgatgaaatgatgagatgtgatgagatgaaatgatgagatgagatgagatgacatgaaataatgaaatgaaattgaaatgagataagatacgagatgagatgaaatgatgagatgaaatgatgaaatgatgagataag

SEQ ID NO: 192640 - DNA, 288 bp, Homo sapiens
aacctaagtgtccattaacatttgaatggattagaaaacatgatatatacacataatgaatggaatactatttagccattaaaagaaggaaatttggtcatttatggaagcatccatgagactggagaacatctgttaagtgaaataagccagatacagaaagacaaacatgacatgttcacacatatgtggaagctaataaagttgattccgtagaagtaggaagcagaataatggttcctagagatgtgataggggagaagggagagggagatagccaaaggttgg

SEQ ID NO: 192641 - DNA, 321 bp, Homo sapiens
ctccgtggactgcagtgtttaaaagacagtcatcacccaaagtgctttttataacaagaaaggactctgaacgttgtcaggtgagtagcactgcctgtgtccccatggccagggcgtgtgcagagcctgggtggacgcaggcaggttagctatcccagccctatgcatcactcctgcatcacacctagcgccccgtgtgtgacccgggatcccaccgttctccagggtcgagggagaacacttcaagagaggcgactaaatctccaccaagcacattatatcaaatacgcctcaggaaaaccctttatggaaacctactat

SEQ ID NO: 192642 - DNA, 293 bp, Homo sapiens
ggttctgatcttgggcgaggagaacatagtgagcctttgccatagggcaccgttgagcctccaggcaattcctcgattgaagcaccgtgactagattcagctgcccaggctcctttctccctaggaccctcatctctatttcctggattccagccttggatgccatccaaaggctgagactcgcctttccccaacttccctatccagccatgaggctgccaggagaccttgccctctgctgaaacctccagcctccttcagaacctgacttcactctggggaacagtccccat

SEQ ID NO: 192643 - DNA, 315 bp, Homo sapiens
gtatatgagaatcagaattcagataatttgtcttaaaaattcatattcaatgtaaaaattttatatttagaaaatgaaactgtacccattgtttatataacttaaactgccaaaataaagcaccacaaaaactttttatcacgttggtttttgtatcaggctgggctttgcagcagatggaggagctagggcaagcttgtccaacctgtgggcccgagggtcacatgcagcccaggatggttttgaatgctgcccaacacaaattcatacactttcttaaagtatcatgagtttttttttttttttaagctcatc

SEQ ID NO: 192644 - DNA, 322 bp, Homo sapiens
ttttacctggtttatggacagtccaaacagtgttctcactctctttccttggcaaatgttagaactgatggctttatttttttctccctcccttcatcttcagggattttttttttctcttctacattactcagcctttttgtctgtgaacatcctgtggaagatttcatttatcttaggttctttggccaggctgctcatcatcttttttttccacataaaacatatttacctaatgagagaacttaagatggataaccagagcctctgtactctctcacaagcctagaaatttgacactttctcaattctgacagttcat

SEQ ID NO: 192645 - DNA, 147 bp, Homo sapiens
tcttccagcctcatttgtttgctatgcattctgtaagaatcctctgggttcttaccttagtttgtaatcatgcacagacagccctggccttacttggttctaatatgcacagattccagtttccagagttaagtaacaccagttccc

SEQ ID NO: 192646 - DNA, 491 bp, Homo sapiens
cctacattgggcaggaggtttgacaaaattatctctaggatcactttcaacactagaaacctagatttctggaaagacagaagagccttttttcttttcttaatttgtcattaatgtctcagcaaagaagagcatttattttaatatgatcatcggacttgaaaggcttctacagagagctatgggtacatgtgatatgaagaataagctgagatccatatgcacttgaaaaaccaagaaaattaagagggttcttttttttttctttttttttgagatggagtttcactcttgttgcccaggctggagtgcaatggcatgatctcggctcactgcaacctccaccttccaaattcaagtgattatcctgcctcagcctccccagtagctgggattacaggtgcccgccaccaagcctggctaattttgtatttttagtagagacagggtttctccatgttggtcaggctgggttcgaactcctgacctca

SEQ ID NO: 192647 - DNA, 298 bp, Homo sapiens
gtcctaggaagatgcagaccttatagaaaattttagatttaaatgcagaagaatctaataagctattttaagaatgtaagtaaagatagcttccttcaaggcttgggaatgctgtaatgcagaaatatgcatcaatgcaaaatgatgacagtgccctttctccacatcagattatcagagattcctaacatttggatgggagaatgtcctgagtcctctgagaatatgttggaagctactgaccttttccctgacagtgtttataataacaaataaacattccgcagatcacgagaac

SEQ ID NO: 192648 - DNA, 154 bp, Homo sapiens
ccataggcctaaattttagttgtgaccaatttttcattagtgtttctatatttttcatctccttttacccccacagagttttactagaatgataagtactgcttctaagaatacttgaggtgcccaagaggacttacgtaactgttttacatgc

SEQ ID NO: 192649 - DNA, 592 bp, Homo sapiens
tcagcaaattctagtttacagaaaattctgtggtttctttttgactatttgctgaaatgccaacattattattttaaaaaatatgcctgataggtgatggcactagtgttacctggatagtttttgaatgaatggagtatgtaaggaaagtttcacatcttttcatatcaactctaatttatcttcatgctctgctctcttactttggatttttctagcgatttccagtgtgcatgctcaagagttattttaaagtagacgcaagtgtttctcatgccacagacattttgttaaaaacctaacttgaaatatacaagtgagttcaccaaactcataaaaatgtccttaaaatgataaaatggagaactttggggtcccaacaaagaggaattaaggcctggatcatgattacctctgttttccatgtgactttgaaagcagcagggctggagccaagttggccctgctccctcctagggacagcagggttgatgtccacctccatttccatttgcttctgtccagccggcaggccttggcggcccctcctggctctggagctttacatactttcttattctatccgcatcta

SEQ ID NO: 192650 - DNA, 331 bp, Homo sapiens
gctgggatacagacacgtgctcccatgtgtggctaattttttaaatttttggtagagatggggtctccctttgttgcccaggcttatcttgaactgctgtgctcacgtgatcttcctgcctcagccatgcgccaccatgcccagctgcaaattttgtgttatcaatgatcatgtgtactcagtacccttaatttacctgatgaggaatggtgatggcatgcaccaacgttttgggagagtggcgctcacatctccactatctccagaagtccttactccctgtgacttcttccaagccacttgagataaacaccacatggcagcctctcca

SEQ ID NO: 192651 - DNA, 361 bp, Homo sapiens
ctagctatacagtgtcctagtatggtgattaaaaagagtggaataaaaagactattagtgatttgtccaggagatagtaagagaaggctaaagggaaatataacttccttggtttattcatttagtaagtatttattagacatttatgatgttcactgaagtctacaaatgtttcagaagggtctcgtctgaacaaaatctttaaaatgaaaggaggactagccaattggagggaggaaagataccataagagtattttgcaaaggaaattaattacatgcgtaatggtacagagttaagacaagcatgcttaattattgaagaataagagaagcgtagcgtggttggaaaaggagtatga

SEQ ID NO: 192652 - DNA, 135 bp, Homo sapiens
taatctgtggttggttagatccaaagatgcagaacccttggatacagagggccaacttgtctcaattttagaaaaagagaagccaccgtctatggttataagcaactttaaaaactttagcctgtaattccagca

SEQ ID NO: 192653 - DNA, 256 bp, Homo sapiens
tcaagattgtgccactgcactctagcctgggcgacagagcgagactccgtctcatagcaaaacagaacaaaacaaaacaaaaaacaaatgcatatcttgattcttgaagttcaatttaagggaagctgttctacatatatatttctgcatgtgaaagttatttatgccactacattagtgtagtgtgggaagtaaaatttttcaaaataaaaagttattcatgctaagggtattcgttttaacattatgatagtga

SEQ ID NO: 192654 - DNA, 355 bp, Homo sapiens
caattagaagaaaatactgttgaaatagaggctttaaaatgtttacctgcttccctttggctttcaaggatcttgaatcacctgggtccctctttgcttacccaactttattatctaattcttttcaataagagaacttttgtttcagtaagaacccgaatgtcatggctaaataactgaggctcatgcatgcctttgtctgtgctctgttgatgttaatgaccttgccaagattaccttctcctccctctttacatacctaaatcccaaccacttttaaaaagccaagccatcttactttactaaagtctaataaaattatcccaatcctttccaaacagtagaggatatacca

SEQ ID NO: 192655 - DNA, 395 bp, Homo sapiens
ccttccttcttgtagtccagaaaaagatgaggtattagatgaaaatcttttgcctgcaactagagctgctagaaagaagagattccatagtaaatatggaaataatattattaaattatttttaattacattagttaaattttaattaagcataattttgttcatggatatgtattctgctacaatgttacagacatccactgaactcattttttattgtgtcatttacatttatttcttgatttccttgaatcttgattattctatcaattattgagatgtatattaaattatcccactatgtggatttacctatttcttcttatagtactgtccattttccttatactgtctatgttattagatgtatacaaataaaaagttagattttcctt

SEQ ID NO: 192656 - DNA, 348 bp, Homo sapiens
atccgtgatcatctctccccaggcctgctgttcctcgaggaaggaagttgtaatgggcagagttctaggacagcccccaagagaaccactcccttatatctgctccctgtatcatctcttcttgagtgtgtgcagagcttgtgatttggccaaggggaaggaattttgcaaatgtgattatggtcacacttgctttgttaagcacatttgctcagctgactttgagttcatccaaagcaggatgatcttaggtgggccagacctaatcaggtgagtcttttaaaggtgaagtttcagagattcaacccttagcctccaaggagacaaaaatggccatgctgtgaactg

SEQ ID NO: 192657 - DNA, 589 bp, Homo sapiens
tgctgggattacaggcgtgagccactgcacccggcctggcctcaaatacttctactgatccttcttgctgatagaatccatgcacaacagcttttacgccaaccatgttctagaattgatggcttgggatcttgtccacttgttttcagtaggctcagtagtgacattgttgaatctgcccacattgcctgcaggtctgtgtctcagagctgagtcggggttgaagagcaccagttctggctctgagtttttacttaggaatgccagctgtttgctgccacactaacagccaactccgaaaatggcagcctccctatgtgaaggaccacttttagggatcctcagataatctgctgttcacaggaggacgtctttagggtggtgaattgtttggggatagtactgaatcggggggacatcactgcggcctcatcccccaagatgaaggacaggctcttgcactgcagagtgtgaatactcctgtttgcataccatgtgctcggggtcagagctctgcagcctgactgcccctttgctcttgtgtatttcctagatcaaactctaagccccgctgccacttttggtaaga

SEQ ID NO: 192658 - DNA, 667 bp, Homo sapiens
gtatgagtaggaattatccaggtgaagagttgggaacggcgttccagacaaagggaacagcatgtgcaaaggtccagagacaagagaaccacagtgctttctggagactgattgtcctgaaatactattttacttcacagacttccatatctcttcaggaccttgagcactgccctgtctttttgcagctcccaggagaccttatctgtcattttcctggtcatctttgctgaagctcctgctgtttgttccatattaattgtacacaaaggatctcatgatcctcttagggccatcatgggccaagggctcagattttgtccatggaaggctctgctatgggaggaaggtgacctttgttttagttctaactctatcattagctccctgtgtgtccttggagaagtcactgccctctctgggcctccttgagaggaggagaatagacagataggacctggctcactgtcactcttccctcagttacttttgttgtaattcttgggggttgcaacatgcactgttagctcgcacatgcctgatgtgtagcatgtgtgcaaaaagcatttgctgtgtgaatgagcaacgtccacatgcgtgctccttctgtccgttttttgtcctgctcttctctagtgatcttgtcctcattccgtacatgactccc

SEQ ID NO: 192659 - DNA, 482 bp, Homo sapiens
tgattgcattgtatttaacaaattctctaagctacactttctagctagttgtcatgacagtgtcagctattcacaatgtagagactaagtgtcttggatgatttgagaagagctactaattataaactgacattttgatataaatgatttttgaggtcagttcgataatgctatcaataagtatggttttaaaataggttgattgttccaagagacttacagtgatcaaaacaactgattcagatggagaactactgagaattctcttataactgaagtctgacctgttcttaaaatctactcattggtctagggggtcgaactgattaggaagtcattttggcatttgacaaaaatactttagtacataccctaacatatataagtacaaagcaaactttcttagtactttgcattactcacccgctgaatccatgttaacattttaactctcctgggtcaaatgcatagattcttactgt

SEQ ID NO: 192660 - DNA, 257 bp, Homo sapiens
cctaagaagcacctttcctctcctcacccagggctttttacactgaatttcctggagaaattgcttcatcacagtccaaattactcttagactcatctttagctggtgttgtggaggttatgtaagtaatatacgtggccaagctttggaaatgagaatgtgctctacgcatttgaatgtttggcagagccaaccttcccagaactcatgcccccgcactgaaagacaccgggctttcttaattttcatctgaacca

SEQ ID NO: 192661 - DNA, 262 bp, Homo sapiens
agggtttcccactaaatagaagttgtttgtatttttgctttttaattttttttattttgagataattgtggatttacatgccattgtgagaaataatacaaaaaggataacatatgtccacgcaaaaacctgtacatgagtgttcatagtagcattatttgtaatagccaaaaagtacaaacaactgaaatgtccatcagatgatgaatgggtcaataaaatgtggtgtattcatacaatggagtatttggcaataaaaaaa

SEQ ID NO: 192662 - DNA, 595 bp, Homo sapiens
gaatcaaatcactacacagaaactctgattgaaatctctcattcctgaaatcaccttttctgctgaaacaatattacgtgaaaacagaattctattccacatgctgtcccagcagccacgtgccaatattgctctccctccgtcagtatcgtcttctccctcagctcttctcactgatgccccaaggctggaaactgatgaaaacaaaatcttgtttctcagggcttgagggataaccttgctgagtccttcagcacaggggttcaccagtgcattggaaggggccgtcagaacatcctccacaggctggtcaaatcacacagaaggttctggacatccaggggagggcttacaggatgctggaaaccagagaaaatgccacagggctcctgcttctctcttgtttacttgaaattaacctccaggccactagccagctccttctgcggcctattagtgatagccctgagactgtcttcctcctgagggagttgggccaccaagaatgtgtgggaaactgcgaagacctgaacacttaagactcaagagtgatcctgttgggttggagttgtcagagcccagatgcctgagagag

SEQ ID NO: 192663 - DNA, 548 bp, Homo sapiens
ctataccaaaactagatcctgttgttgattgcacacatttctcacatgaggcattcttacttctcttgctctgcattacctgcacacatagaaatcccagcccagaacactgcacagtttgccttttcttctgttcaggcagcgagtgctgcttgaggaaatcacagctaggcagacaagtatgacagacatactctccgtaacctcagcttatcttttgtcagcagcttttgctagtttgtcactgcatggcccaaacctttatcactgtcctcaatgatcatggccatctgttgttcctctcattgttagcaaatagccttgctttcttttttgactcacatttctattgaactgcctgctaattgtcaacatcccacctatcctgacttccaggaggtaggagagaatgaagcatccttcttcctttagaagcctgatgccttcatcagagatttgaccccatccttccccccttctctctcctctagttccaactcccttgtctattaattgcttcctctgtttttagtctccactctgacccc

SEQ ID NO: 192664 - DNA, 643 bp, Homo sapiens
ctatagggtagaatcagtctctctgaagaaagataagggatgtggatcaagccaggcgcagtggctcacgcctgcagcaatcccaacactttgggaggacgaggcaggcggattacctgaggtcaggagtttgagaccagcttggccaacatggtgaaaccccatctctactaaaaacacacaaatcaggccgggcgcagtggctcacgcctataatcccagcactttgggaggccgaagcaggtggatcatttgaggtcaggctggtcttggactcttgacctcaggtgatccgcccacctctgcctcccaaagtgctaggattacaggcatgagccaccacgcccggcctaagatggtaaattttatgtgtaggttttttaccacaattaaaaacaaatgcattctttttttaagaaagaaaaaatactgtgcatcatttggtcattactctatctagaaatgacatcctcctttttataatttgtaacttgatactaatacaatgtaaatattttgttggtaggggaaacttgtggaatttattaacatgaatattaagcacaaaaatcagtttattatttagtatcatgaatagtgcaaggtgaaaacattaatcttgttagcaacatgtaataattta

SEQ ID NO: 192665 - DNA, 524 bp, Homo sapiens
tcactgcaacctccgcctcttgggttcaagtgattctcctgcctcagcttcccaagtagctgggaccactaccaggcgtgcaccaccatacccggctattttttgtatttttagtagagatggggtttcaccatgttggccaggctggtcttggactcttgacctcaggtgatccgcccacctctgcctcccaaagtgctaggattacaggcatgagccaccacgcccggcctaagatggtaaattttatgtgtaggttttttaccacaattaaaaacaaatgcattctttttttaagaaagaaaaaatactgtgcatcatttggtcattactctatctagaaatgacatcctcctttttataatttgtaacttgatactaatacaatgtaaatattttgttggtaggggaaacttgtggaatttattaacatgaatattaagcacaaaaatcagtttattatttagtatcatgaatagtgcaaggtgaaaacattaatcttgttagcaacatgtaataattta

SEQ ID NO: 192666 - DNA, 274 bp, Homo sapiens
accaagtccaaggctctcccatgctgcctcccatggatgtgcctgtgttcctgcatgtgtgtgtgtgtgtgcatgcacgtgtttcatcagctggagccagcaggcaaagtggacacacgccggggctggggattttacacgttccttcctgggcaccatggtgcctggtaaggcacattccacactagtccatatcacagtcagccatactgcaaacagcaccgggcctggccccaggcaaaggctgcaagaatggttcgaaggccattttctt

SEQ ID NO: 192667 - DNA, 541 bp, Homo sapiens
tgtatgtaaaaggtttatacttcgtaaagataatttgtaataacaaaggcaagatcttattttttttcagtacctcttaagaatctcagttttagaactgaatccaatggagaaaccatcttcgcatcaacaactatctcttcagattggataaagaaaatgtggtacatatacaccatggaacactatgccgccataaaaaagaatgagactatgtctttagcaagaacatggatggagctggaggccattatcctttccttagcaagttaatgcaggaagagaaaatcaaataccacttattctcacttataagtggcagctaaacagtgagaatgcatggacacgaagaagggaacagcaggcactggggcctccttgagggtgaaggtttggaggaggaaaatgagtggaaaaaatcattactgggtaccgggcttaatgcctgggcgatgaaataatctatacaacaaacccctgtgacacgagtttacctatgtaacaaacctgcacacacacccctgaacctaaaataaaagtt

SEQ ID NO: 192668 - DNA, 632 bp, Homo sapiens
tatgatgagagggaggcccatgggcattctcataattacaattttaagaatacatgcaagagaatttaggtttgcagtgacatttttagttctgctttatatagagtcactataggtccttattaaattaagaaccagagaagggtcatgcctgatacggaagtcttttctgtagttcacaacgagtctaatacacaggttcaagtatttctccttattactactgcacagttacacatcattctgtgggttttatttctttttcttttaatatctgtgatcaggaaaagaaagaaacacttcagaaatgaaagattagtttcctaaatcataaagatgagctttgtaatcattttcctttaagcaaggaattaagggataataaaagccctaattaaggaccttgttagcttaactagattttcatatgcaaaacacagttatgaagtgctgctacagaatgaatggagatgcctcctgtccacaacaaacccaaagggaagcattcttgccagggcttttcttttgcttcttctgtctttctgtccatgaggggtcattctgtttctgcatgagcaccaattctcttcaccctggccatgattccttcttctcattttggttgtccagtc

SEQ ID NO: 192669 - DNA, 236 bp, Homo sapiens
ctccttatagattagtgtccttaattttgagagatgtctacatgtaattcagtgtttgtcttcatcttttctctaagagtttttggtccaccttaagtgttatggggctcaggaaaccaggtgggaaagactaggaggtggggctcacttactttgttagaatagttgcagaaggccaggtgcggtggcttaaacctgtaatcccagcactttgggaggccgaggtagccagatca

SEQ ID NO: 192670 - DNA, 341 bp, Homo sapiens
tgtattttttcccacaataaaaaaattactcaagaagaaacagaaaacctaaatggtcccataattattacagaagttggattcattgtttaaaatctatagggggacaggcaggaagctacaaaaacaaggaaggccaggccagatgcggtggctcatgcctgtaatcccagcactttgtgaggccgaggcaggcagatcacctgaggtcaggagttcaagaccagactggccaacatggcgaaacaccgtctctactaaaaatacaaaacttagctggacgtggtggtgcatgcctgcagtcccagctactcgggaggctgaggcaggagaatcgcttg

SEQ ID NO: 192671 - DNA, 343 bp, Homo sapiens
tgcagccacagccattcatgtacgcattctttgctcttgagctgcgagggaagggttgagtaagcctaaaatatttactatctggctctttgcagaaaagtttgctgactcctgaatgtaaaagagcatcaatttggattcctcaaatttggaatctgggattacttaagctcgctatatgccattcttatggaataagaagctcaaaataattgcttgctctgaatgtgaaaaggaaattatataaaaaatgaaaatatctttgttttgtctttaattctgtatctaatagttgcttattatttaatccatccttaataattaaaagatttttatgtttatg

SEQ ID NO: 192672 - DNA, 536 bp, Homo sapiens
cctttcgaaaggttctctgtttgcttttgcgttttgcctctggaaccattcgacatccgtggctgatgcgcgcacccgagaggaggccgaagcgtgttccccgcctagggtctgggagaggctgggcctggattggggtcccctcccttctggcctcctgatgggtgaacgccagagcagcctcggttcctgtacagcggagggcatgccgcggccagagacagcccgggcggcttccacactgtgtgcgacacttttggtgctacggtgtgattgttatattaaacatcacattaaaaaaataaccaaagcagtccctggtttgtcccccaggattctcctcccagccaactcggcccggcccctatacctacagtggtcagacaccgagattgcctttacgcccaattttcaccgcctaattttattgtctcgattcaagccagccgagtcccggggtcctggctctgtcttgggttctggctcgccgggccctgacccaggtcgcaggtttcgggggcctcctgggcggccgc

SEQ ID NO: 192673 - DNA, 146 bp, Homo sapiens
cctgctcctcctctacagggacatttcatccagctccttctctacagggacattccacccagctcctcctctacagggacattccacccagctcctcctctacagacacattgcactggctatacactgtttgtggaggtagcact

SEQ ID NO: 192674 - DNA, 333 bp, Homo sapiens
gtaaaaaaggacgaaggctcagcttggttcatagacttgtctgcagaaatgattctgccctccgtgggttattttccctccattccactggcctgtaacagctatcttcctagccaaaagccatgtatgtctgctaatgctcccgctccttcctcctcctctctttctcctcctatattgaataattgtttctatggtagtttaattagccaactatgaatgtattcaggcatctcatggaggaagaatcactttgtttactttttggaaactgaatgggccgcattttgtttctattttgggatatttatgggtattttctgtttctagatt

SEQ ID NO: 192675 - DNA, 349 bp, Homo sapiens
tctactaaaaatacaaacattagcccggcgtcgtggcgggcgcctgtaatcccagctatcccggaggctgaagcaggagaatcgcttgaacccgggaggcggaggctgcagtgactcgagatcgcgccactacactctagcctgggcgacagagcgagactccaagaaaagaaaaaagctccaactgctaacccaagaggagtggctgaaacgccatcgcataaaattctcggtcacctgacttctgtcacaacgctccttcaaatacaccccagcatttctctttccttgggttcctaaatctggtttttgttaacaccactgaggacaaagccactcgcgatgttta

SEQ ID NO: 192676 - DNA, 131 bp, Homo sapiens
ccaaagatactgatagtgcttcttccctactcccaaaatcaaggcaaatgacacacatgaaaaaccttgagtaaattttctgccaaagattttcagctgcagaccaccaacccagcttccccttggccgaa

SEQ ID NO: 192677 - DNA, 871 bp, Homo sapiens
gctcacccctacaatcccaggactttaggaggcttaggtggaatgactgcttgagcccaggagttcaagaccaacctggccaacacagccagatgcagaaaggaaggaaggaaggaaggaaggaaggaaggaaggaaggaaggaaggaacgaaggaacgaaggaacgaaggaacgaaggaagggctatacaaatgtaggagaattaagctatatgtgtgggggagtgtgctctgccattaattagacattaccttagaaaacctactctacctctctaacatgcctcagagggttggtgtgatgattaaatgggaacatgtaaagtagcacactcatttgccaatcgagaccttcacagaatctcaggaataaaagtgaccttcgagtgcatgtaatccaactcattccacccaaggagattctgaagttcaattcccagtgttcatacaagcctctaggtgtcacttccaagaatcatctttggagagtccttaaaactgcttctctattaattagaactgccttcaaaagcagcaaaagacaactgtccctgacccaataagagatctgaaaacagacagaagacaacaaagcaaagacaaattcttctttttggagttctcctacaatataaacagctctacttcctatgatgcttctcataacatctacattcagatccctctccgtatcatggatgttctcctccagcttcctctcaaagagttgctcttagaattaaaataaactaccaaatggaacagaattcttatcttctttggttccaaatacttttttcttttcttttctttttttccctttctttttttttttttttttttgtgaaatggagtctcactcaggctggag

SEQ ID NO: 192678 - DNA, 290 bp, Homo sapiens
ggaagtagtagcttgagtggtatcaggtgccagaaagaagaccaagggaaaaacctctgatgaccatggggatagtgtaaattgagtagcaagaggaaggaggactgcagaagttcaagaatgatgagaactgaggaaacgaagataaacacagagataaacacagacaacttcactgcagcgaaagagaagatggtgttacacaggtaagcaggatcaagaaatggcttttttgttgttgctgttgtttgtttttttttttttttttggatccggagtctcgctctgta

SEQ ID NO: 192679 - DNA, 249 bp, Homo sapiens
attgctttacttctaaacatttcgaaaagattagctgtatgtgtagctctgggttcagcttcacctcttagagatttctcaaccactaggacctagacaggttttcccttatgactgaaagtctcgtagaaaagtgacaactcgggctcccctaacacacatctcagtggtagggagctgtcttcctgggaaaacataatccagggctatcaaacaaaaggaaaatattgtcttactgatcagtgtgtt

SEQ ID NO: 192680 - DNA, 348 bp, Homo sapiens
ttcattcttcattctacaaacaggcgtgctcacttgccttcttcccccaaactaacttgtgaacaatctctttaaaatactttctattttctcatctgagtataagtcttccaatccttcgacactgtaactcatacatcatctccatcatgatgccttccatcatcttctctctctttacgtctacagcatttcaagaccgtattttttatgttattatgtttttattttttggcatggtacatattggactgtatgccttgtttttggaattttttcctccttagttcttgttataaagacgagaagcagagactaagttttattcatatatatttttctatatag

SEQ ID NO: 192681 - DNA, 501 bp, Homo sapiens
tttgctatcaaactgactatagttgctgaatacctcacatttaagtattaatagaaaaggagtcaggaaatagagcagacaaaattctcctggttcttctcagtccttggacaagagaaaacactttaatgcctattccttaaaacatggcgctgcttaatattaaaaatttgggacttctgattctgggaggacggagtatcacactttcccctattcctctaattaagtacaactaaaatgcctgatattatatgtaaagtaaacataagaagacaccgagaggtggagagaagagaccaacaggctaaaacctagagacctcaggacttcaggaatgaggcagtggcaagttcctgggttttctttttcttttctttttctttttttgagacatggtctcggctctgtcgcccaggctggagtgcagtggcatggtctcagctcactgaaacctctgcctcctggattcaaataattctcgtgcctcagcctcctgag

SEQ ID NO: 192682 - DNA, 245 bp, Homo sapiens
aaatttgaaaagaacagaaaagttttttcagagaaagcaatatctacagaaaaacttaaagggtaagtaggaacaaataaacagaagaggataggatagaggtatgggagactggagaagaggcaggggaattcaaacttgagagaaacacatgggcttaggtctgtgtgagcacacttccaaggaagaaggccttaagatgaatctaaaagcaaaagcagaagccaaataatatagtgtgatat

SEQ ID NO: 192683 - DNA, 956 bp, Homo sapiens
acctcaagtagcagatcagcctcaagtaggagatcagcctcaagtaggggaatgtaaagccaccagccaggcacaggccgaaggccacaactttcccttgctccttggagaccccagggcaggaggccaggtgatggggcttttagtgtcatcctctcaacccagaatggctcattctctctctgcttgcaccggcacccagaaggcaagctgcggtcactgttttcctttattcctccgccctctcgcttcctttcttatttttaaagaaaatagtcccctcctaataggagaccagctgcggcggtctctggccgcccagcgtgctcagcaaagcatgcgggtccttggaaccccttttccgggaaggcggctgccaccaggcaaattctcaaactgcctagctgcgagtgaggggcctgtagtggggcctccgaatgcaatagccgaggaggaggggaagggatcccgctttacaaactctcagacacatgttactactcaaactaagcagcagacgcggtggccgctgcagtcttttcggcaactaggccgcttagccccagctgtgctcggtttctggggtccctgtcctgctctgtcactccccacgcctgggctaaggaccaccaaggaggtccggaaggggatttcgaacttccaagtggcccaggagaagtgaacgcttctccttctttttcaagcctcccgcccagccctgccggctcggcctgggcgctgtggaccggtaacagcagttcgggaggctgaggcgggtggatcacttgaggtcaggagtttgagacccacctgacctacatggtgaacctcacctctacctaaaaatacaaaaattagccgggcgttgtggcggacgcctgtagtcccagctactcgggaggctgaggtgggaggctcgcttgagccccggacttctggtgctgtagtgcgctact

SEQ ID NO: 192684 - DNA, 985 bp, Homo sapiens
acctcaagtagcagatcagcctcaagtaggagatcagcctcaagtaggggaatgtaaagccaccagccaggcacaggccgaaggccacaactttcccttgctccttggagaccccagggcaggaggccaggtgatggggcttttagtgtcatcctctcaacccagaatggctcattctctctctgcttgcaccggcacccagaaggcaagctgcggtcactgttttcctttattcctccgccctctcgcttcctttcttatttttaaagaaaatagtcccctcctaataggagaccagctgcggcggtctctggccgcccagcgtgctcagcaaagcatgcgggtccttggaaccccttttccgggaaggcggctgccaccaggcaaattctcaaactgcctagctgcgagtgaggggcctgtagtggggcctccgaatgcaatagccgaggaggaggggaagggatcccgctttacaaactctcagacacatgttactactcaaactaagcagcagacgcggtggccgctgcagtcttttcggcaactaggccgcttagccccagctgtgctcggtttctggggtccctgtcctgctctgtcactccccacgcctgggctaaggaccaccaaggaggtccggaaggggatttcgaacttccaagtggcccaggagaagtgaacgcttctccttctttttcaagcctcccgcccagccctgccggctcggcctgggcgctgtggaccggtaacagcagttccaccaggatgcaggccggactaagctcctggggaaaacccgttgcaataattgtttttcacacacaacttccaacccttcccccatttccgcctccaattcggagacttgcaaagcccaagaaagggaaaagcaactctatctttgatcttctcatccaaagttaaaataataacgacaatgatgatgtagggagaaagaaccaaatagagaggctaaccccac

SEQ ID NO: 192685 - DNA, 196 bp, Homo sapiens
ctttcctaaatctaacaatccaaccttgccagagttcctcctccactcacatgggtgacatccctaaccccattaaatgtgatatgtttccacattggtgtcaattattctgcccaaccaaaatgaccttctcctagttccatgcttgtctaaatctcacctctttcggtggtggctcacgcctgttatcccagca

SEQ ID NO: 192686 - DNA, 234 bp, Homo sapiens
gcccttctcacacctccccctcattcttatcgtctcttccttccctcacccctctgtggtcaactcccatatccttctccctttacagccttgccaaacccagccttgggtcactcccactgtccacctgcttagcccttacgcccaggctgcccatgggcagaactgcacacccaccctggggctgctgcacagcgtgggccccactcagggcttgtggctgttcctctctct

SEQ ID NO: 192687 - DNA, 638 bp, Homo sapiens
  misc_feature (597)..(597): n is a, c, g, or t
gtctcaaaaagaaaaaagaaagaaagaaaacgaaataccccataaaacattcaaactatattggaaatatataaaataccggagaagcccttgttttgatataagtaggtctgagtcattgaccagtcttttggaaacgtcagttcaagtgggcaatcgttaaaaacagacacgtgtaggtcctggtcactttgttttgacttcaaacaaaattcacactcaggcactagtttttctttgggtatcttgactcaaatccctctttgactttcttgcataaatcacacccacaatcctataattcatcacctattattttcaatttatttaaacttaaagacagttgtgaagcaatctgatgtagaacagttctagatttttaggattttccctgaatagtttatctttcacatctaattcaacatgtcagcaaatctttttgtgtattacttccaaagcatttaacgtcatttgcaaggaaacaattctttatgcactcacatttcatcagtttatgtaatatttaatttaattatatgacctcatgatctgcccaccttggccttccgtgctggaattacaggcatgagtcaccgnacctggactcctttttttgtttttctttgatttcctttttt

SEQ ID NO: 192688 - DNA, 723 bp, Homo sapiens
gtctcaaaaagaaaaaagaaagaaagaaaacgaaataccccataaaacattcaaactatattggaaatatataaaataccggagaagcccttgttttgatataagtaggtctgagtcattgaccagtcttttggaaacgtcagttcaagtgggcaatcgttaaaaacagacacgtgtaggtcctggtcactttgttttgacttcaaacaaaattcacactcaggcactagtttttctttgggtatcttgactcaaatccctctttgactttcttgcataaatcacacccacaatcctataattcatcacctattattttcaatttatttaaacttaaagacagttgtgaagcaatctgatgtagaacagttctagatttttaggattttccctgaatagtttatctttcacatctaattcaacatgtcagcaaatctttttgtgtattacttccaaagcatttaacgtcatttgcaaggaaacaattctttatgcactcacatttcatcagtttatgtaatatttaatttaattatatgattacaatgacagtacacctggcataaacaggctagggacacacccaatcaactcttggtaaaccgacaactcaacccagagcagaggtagctgagttcttgcttttctagaccaggggtcagcaaactatggccctgtgggcctgtttttatacatcctgtgggttaaaaatgccttttaggg

SEQ ID NO: 192689 - DNA, 570 bp, Homo sapiens
  misc_feature (518)..(518): n is a, c, g, or t
  misc_feature (535)..(535): n is a, c, g, or t
aacatgaggacacatgggccatgcccagagtttggtgaagactagcaatttggtactgagcaaagtttctcatctacaaaagaagtgcactggctctttgtagctttaaagttttttgaccttatgaattagcccttttctgcttcccttttgctatttgtgccaaaccttttggaggaagaagagtgaatgtgtctcatcatattctctcctagcagctggggtgtgaacatatggcaggtggcagccacacagccgcttctttactcagtgccaagtagctgggtgagcaaacatggcagctgaggttctcagcatttttcttccccctcccaaagatttcatttgataagatttacaataaccatataaataggtccttgattagtcagatttagtgaataaaattttatgccatgaaaatacaaaaatggctgattctattaatgcattgctattagaatctcctgggtccgggcgtggtggcttacacatgtaatcccagcactttggtgacngagcgagacttcgtcanaaaacataattaaattaacttagctaatgtctcaa

SEQ ID NO: 192690 - DNA, 330 bp, Homo sapiens
acaacagctacagtgtcactaggtgaatcttgaatttttcagctccattataatcttatgggagcactgtcatctatgtggtccttcattgacccaaacatcattttgtagtgcatgactgtgttgggtttttttaggccatctagtctgttgaaactactcaactctgctattgtagcgtgaagtatgagtaagtacaattatttatggacacagtcatgttaatttcatatcattttcacgtgtcatgaggtattcatttgattttggggagctccattccctaaatatcattaggtattcatttgattttagggggtctccgctccg

SEQ ID NO: 192691 - DNA, 329 bp, Homo sapiens
gttccctggccagtaaataggcagagcctcagatctcttgctgagcttttacaaggtaaaccagcataaaaacacccccctctcctcagtgaggatatgaaagaatttgtgtgtgcttggaggtgggaggttcctgtaatattacaaaactaatactacaaggagtgcatctggacggatacagtaacctctttattgatttccttcatccatccctgctctcctccaaactgttttccatggggcagccaggaacttcaaatgtaatttctgatcatatttaaattccttcctttgccttcctcactagttttttctccctgactctc

SEQ ID NO: 192692 - DNA, 457 bp, Homo sapiens
ctcagggaagcttcacgtaagtgtcttccttcactcatgtgttcgctcaggaaatacgtatttactggcacctgctgggtgccaaggggaactggaggatctgctggccactgcctttgctctcatggcacttgtgggggagacgggcaggcatggtgcaatcaggacacccgtgtggagtcgcaactgcagatgttttgggaagccgaccaggtgctgcgggttgtgtagcagggtctggacttagactgggggccatcaaagaagcatctccagggagggttgtttgggctgagactggaaagctgagtggcagctcatgagcaggaggctcacgagagcagaagattggagggacggccggcaagcagcgtttgttcagctcctccaacttttacccttccacgtgtttgctccacagatgcccagcatggctgtgctgattgctggttggttt

SEQ ID NO: 192693 - DNA, 179 bp, Homo sapiens
ccagggcggggggcagaaattcttagggggtgagaaactcttattctttttttgtataacgctcagatacatgtaaaagatatacaattgatctaggttttaaattttcatagaatggtgttcaaatacttgtacacaggtgttcatagcaaaactactcacaatcgctaaaaaggtgg

SEQ ID NO: 192694 - DNA, 765 bp, Homo sapiens
tgggattacaggcatgagccgccaagcccggcctctcactacatttaagtgacgccatggctcatgcctgtaatcctagcactttgggaggccaaggcaggtggatcacctgatgtcaggagttcgaaacgagcctggccaacatggggaaaccccgtctctagtaaaaatacaaaaattagtcaggtgtggtggtacaagcctgtaggcccagctacttggaagactgaggcaggagaatcactttaagcgggaggcagaggttgcagtgagccaatctcaaaaaagaaagaaaaaaaaaaagaaaaacatatgatgctggggcatctcggcctcaatacctgcatgagcacagtcatgtccaggccagggctgctggtcgaggtccggccccatctcttccagcagaaagggagtaagcttgcagggaggctgggggacaagatcccaggatctcagcctctgctcatggatcagctctgagaccccgagtgagctgggggtgctctgtgcgcattggtttccccagctgtcaagtaaagggattggatgaggaagtcttgtcaaggtggaatgatctcagatttggggcagcagtgaatgatcccgttccctgggcccatgccagtggcctggcctcggctcaacacagccccaacactctggaatggggatgagggggcagtcagctcttgctcctagtaagagagatgcaacagggctctgtggctgagctgggtgccttgcctcacacctgtaatccca

SEQ ID NO: 192695 - DNA, 480 bp, Homo sapiens
taagccaaataaatcaataacctggtgcctaacactcagaaggattaaatgctgtcactgagaccttggatttagaaataaaggacggaattctacctatgcacacagtccatgcatatgaatgtcaaccgcagagtttcctagacgattatcaagtggaagcagtaaaagtgtactccctaaaaagaaatatcatgggctgggcgcggtggctcattcctgtaattccagcactttgagaggccaagacaggcagatcacttgaggtcaggagttcgagacaagcctggtcaacatggcaaaaccctatctctacaaaaaatacaaaaattagccaggcatgctggtgtgtacctgtaatcccagctactcgggatgctgaggcttgagaatcacttgagctcaggaggtgggggttgcagtgagcagagatcacaccactgtactccaacgtggatgacagagtgagaccctgtctca

SEQ ID NO: 192696 - DNA, 171 bp, Homo sapiens
ataatccaacagtgtccaggtttgattctgcttctacaaacacagagacctaagctctcactcctgtagttatactcacaattccacagtgtggcttttgaatctcatgattgcaaagctggcatcatgccacaggtaccattctgcaatgcgaccttctcactcccctgt

SEQ ID NO: 192697 - DNA, 440 bp, Homo sapiens
acatttgcaaatcaatgaatgtcttttgttttcttaattgttagctgcttggaaatttagaaaagtcaggtaaacttgttatcttgtaagtattgttcagaccacagttgcatctctaacttccattctgcttcttaaatgcatgaagattcacattggctgactgctttgtgtgctcttcattgtaaaatattggacattttcttctaaattcattttttttttttttttaatgactgcatggcctggaaccttactttgttatgtgtttttcaagtttgttcagattattcactctcaaaagaatgcttttctgtgaattacattttaagttattcagaaatcctgaaaggcatcatttggcagctcatctgttttcactaaattgtaagtttgtcggcacaaatctgtctctaatggaaaggctagatttgctttat

SEQ ID NO: 192698 - DNA, 491 bp, Homo sapiens
gggttagggtaaaacccttggaatgcacataacatttcggggggttcctctcaaggagtgttatattcccctgtctagtgatttctgaccccggggcaaagccggccggcaatgtatgtatagttttcatctcacacaagagaaagaaatatatcaactatatgttgagctgtagttaatgatatgcatactgaaatgggtagggtcataatattggcaacttcttttggaaacgtatccagttaatagaaatgaggagcttctgttaccagcaagctgcagtagacatcagagggtgaaaggagagaaggatttgaagttcacaggacaatcctggaaggaaggaatgaggaggagagagacaggaaccaggagcaggggctccaggatgatgctgagaggctgtcgctgtgaggtgcagtcccaaatgccagcgtgagcagagttttccgttgtgaaggaaagaccaggtttcatataaaagcagattg

SEQ ID NO: 192699 - DNA, 296 bp, Homo sapiens
caggaaaaaaaatgtctttacttgggaaactacattaagaagatcttgggttaaaaggtgggaccctaatgccttgatttggctggtaagacatcagagggtgaaaggagagaaggatttgaagttcacaggacaatcctggaaggaaggaatgaggaggagagagacaggaaccaggagcaggggctccaggatgatgctgagaggctgtcgctgtgaggtgcagtcccaaatgccagcgtgagcagagttttccgttgtgaaggaaagaccaggtttcatataaaagcagattg

SEQ ID NO: 192700 - DNA, 369 bp, Homo sapiens
  misc_feature (135)..(137): n is a, c, g, or t
gcatggaaatgttattgagaagacactttgatgctgcatgagaagggagagaactgtaacaacgttcatgaactactgagggagaatgggatttactagtctagttcgagcatgtgtaagtacaataacaagagnnnatatagccaggtgtagtggcgggtgactgtaatcccagcactctgggaggctgaggtgggaggatcgcttgaggtcaggaatttgatatcagcctgggcaacgaggttgagaccttgtctctactaaaaataaacaaaacataagataagtacacacataagtcagatcatgtgtctatttccctaaaccctctaatggcttcccaacttggaccataaaaataaaaatcct

SEQ ID NO: 192701 - DNA, 515 bp, Homo sapiens
taactaatgtttactgagagtttaaccacagctttaatacttttggtatttaatcctcacaataaccgtgtgaaatagacacttttacacaccctccttcaaggaagttgagtcacagaagaggtaacttgcccaggggcacacagctggtaagtagattggaatccaagtaaatctacatttagagccgaccttatcactaggccttcatctctctcacacttaacacccattccagaaactcccgtcagctatcagttataccattgggttgatgactagcttagagtcttgaataagaaggcagcacagataaaaatacacctgccttagtaatcagtctgtgggcttacgtttgtctctctgaaaaggaggcagtggaactcatcagtgcaatcccgtcttgcctagaatcctttcactggtcgactcaatcctagtttggtggattctcagctgaaatggaatagaggataaaaggaagagtaaaaagaacaggaccttcattcccccag

SEQ ID NO: 192702 - DNA, 432 bp, Homo sapiens
agtatacattggtttggcctgaaaaggtgggacaactaaaagtgggggcttacaagtcataagtgggttttaggaattctttagctgacagttggttgagtgttaagctactgtctaaagacgaaatcagtagaaagaagtacctgaggctgggcctggtggttcatgcctgtaatcccagcactttgggaggccagtgtgagaggaccacttgaacccaggagtttcagaccagcctgggcaacatagggagaccctatctctacagaaaatttaaaaaattagtcatggtggtacatgcctgtggtacatgccactacttgggaggctgaagtgggaggattacttgagcctgagaggttgaagctgcagttagccacgattatgctactggactccaccctgggcaacagagcaagaccctgtctcaaa

SEQ ID NO: 192703 - DNA, 463 bp, Homo sapiens
ctgtgtcgtagtcccttttgtaccttttatgtcactattcaggaataacataggcaatgctgtatcttttcaataggtgatattttcagccagtcaggacctatttgggttttgagctaaactcagaatcatcaaggccacatctcatataaaggaaaagaaggaagtcagaatcacaggtatctctgcttccagcctcctgatatccccaaatgcctgtttgcctattgtgcttccggactctgactcagaactgcgtatgacttgttttcacaaatccgctcctctccctgatggaaagcaatacatatgtgtgtgcatcacggttccattatgaaatggctccatgtagttctaggcagaaaaaaggccagtggctgactaggtggtggggttaggggacatactcttttgtttagtttactttggcaatccatgtgtattgacttcttagaacagagca

SEQ ID NO: 192704 - DNA, 198 bp, Homo sapiens
  misc_feature (15)..(15): n is a, c, g, or t
cgtacttattacgtntcctaggtgaagtaagtaagacaatatggtataaattggggatggtgaagggacataaagaaaagttagtttctaaactggacttgaattaatgttgacagccgtagaatgtaataagtaatgtatatatataatgtgaagcaaccactaaaaatgccatgcatatatgcaaaaactctagag

SEQ ID NO: 192705 - DNA, 393 bp, Homo sapiens
tagtgaaatgcttgaaagagctgcgtatcttttacacttacagcagtatgattttctgttgtacccattatatggtacctgcagctagttcagataaagagggcatttaactgtcaagggaacctgagaggagactctagtaatctggaaagtctgttggatctttgagggattttgggatggtgagagtggggctaggatctctggctaggttggagccagcctgcatttgtatctgtatcttggaagcaaacttagaatgcagagacagatgtggcatggacgctgtcagctctagccaaccactaaatcctaaggtgggagagatgcaggctttggctaggtgctaagctgctgtagccggttgaatgtagaggtcactatcttttccga

SEQ ID NO: 192706 - DNA, 326 bp, Homo sapiens
tctcctctgctcaagcttttagaccagtgagtttgatttgaatcatcctctcaaggctggaagagccccattattgaagttttgttaatgttcttttgtggggatgggccggggcactcaccccttgtcttctgtgcccttctgcatggaccatatctttcccattcgtgcattcctattcgtgcatttttcatgcagttttttttctgatataataataatctaaaggtaaatggatcctcaacctctgactcatattaaactgcagaacttttagtgaggtaattaggagtgtaatatttaaatgcatttgataagtcacatga

SEQ ID NO: 192707 - DNA, 446 bp, Homo sapiens
cccccgtggcgcgagcacttctctagccctgtcctttgggtcagtcctgtccttccactaaaccttgctcaggactggtctcaggttccctttgttgctccacagtgccctggagataggggaggtcggagggtgctccctgactccccaacctgggctgtgtctccctgacaggcctggctctgagacaggggttggccccgggcaggcaattctccagctggcttgtgagatcctggggacgggattcagacactctggaagctgaggccaggaaggtctgtcacctcgttcttctggacctctcctcccgcacatgtcaccccacaccggctccctctcccagtctcagccacaacctcttggtcctcagtggcctgagccaggatccacactcctccccgtcactctcccgtctcacacacaaacacatggtgcgtctccag

SEQ ID NO: 192708 - DNA, 366 bp, Homo sapiens
cccactcctgatcacataatgaaagtctcctccttaatcccagcattttgggaggccgagatgggtcgattgcttgagaccaggagttcaagaccagcctgggcaatagagtgaaaccccatctgtacaaaaaatgcaaaaatcagctgagtgtggtggcacatgcctgtattcccagctactcaggaagtgaggcgggaggctggcttgagcccaggaggcagaggctgcagtgaactgagactgagccattgtactccagcctggacaacagagcaagacccccatccaaaaaaaaaaagtctccttccaacaaatcataataatgacaattttcctttattaatcactagctacaccctagga

SEQ ID NO: 192709 - DNA, 185 bp, Homo sapiens
ggataccacgaacaatgttaatatatgaatcaaagagtaaacacaacagatattttacaaacctgagtaaaagacagctgagacaaaggtataaaccatagaattcaatttacacaaagctcacaaagtggcaaaattaacctatcattaggctagcagttttctctgggtaggatagtgactgg

SEQ ID NO: 192710 - DNA, 255 bp, Homo sapiens
aagtgtgtcctctcaccccagcctctatgacacagaacctgggctctttaccactcagttccatcttgcctcagaaccagaactattaaatctgttcaagcaatcagtgctttcagagagggacatgagtagattataaagactgcgtaagtacacactcactttccagcattcctagttttttggattgctcaaggagagagagttgcccgaaaaatacacacacaactcctctctttgtcagcaaaaagcagg

SEQ ID NO: 192711 - DNA, 417 bp, Homo sapiens
cgggctgccagaggacccgacggctcaacggaactttgtaggctaaaggtattttctgtaaataatgtgttcagatcaattagcatccctaatgaaatatatacagcaaccctaaatgacataaactgaagtgtgcaaaagcagaggaatgtagattttctgggagaaatttaataaatttactttggaaccatatcaaaacttttaccttctatgagcaacatctaaaatcatgtcaaatagaatgacattagatatattgtctttaattgggttattctgtattgaaaggctctggaagaataaacttctataaatatacttttaaagtatctaatagagtggcttgtgccaacatttacattagggacaattaaaaaataagaaagttccgtcgaagccgtcgggtaccgagct

SEQ ID NO: 192712 - DNA, 671 bp, Homo sapiens
ttcttggtattgacttgtcatgtttatctcacccattttcctattcaagctaaagacctcccttttttcagcaaagagacttttctacattggaattagttgttcagggactgggatagttcttgtaaacaagtaggtcccaacaggagagctgtccaccattctaagacttcttagacacttttacattcagggaagaattttgagctcccttttcagattagaaagatttgggttgccaatgtttgactggcattttggtctcaaagtcagcaatgtttactgttgttggtcagatacaataggttcctagcataacataggaacctgttatcttgatggaacccaatatcttccttatttcattgctaactacctttcatatttttcatctgtttttatagcttctcctaacataacaccatgtagatcgtatgtcccatccatttcaagatacttacagtttcccttaaatgatataccctactggatgtggttttgtctctttctgacatttactaaaatttcattctcttctcactctaactacctggccaaaacctaaattccttcaagtctcagattaaaaatcttctcctctctgtaatcttaccacaactcccatccctagtattccctccagctcataccctggtatcctcctgggccca

SEQ ID NO: 192713 - DNA, 345 bp, Homo sapiens
aaactcctgggctcagatgatcctcctgccttggctacccaaagtgttggaatttcaggcatgagccactctgcctggctcttgtataggatttttgccattaatgcataacctcaatctactcatgagaaaacatcagacccaaattgagggacatttctcaaaataatcagccagagtgtttctcaaacatgtcaaggttatgaaaaacaagaatggtttaggaagtattacagattgggtgagactaacactgaatgcagtgtagaatcctcagttggattctggccataaaaagggtattactggtaaaattggcaaaatagggcctataattagttaatg

SEQ ID NO: 192714 - DNA, 291 bp, Homo sapiens
ttggacatattttgtcaagacttccctgaggctgtcattggtgcatcctcaaccttggcaaaataaactttctaaattaactgagacctgtctcaagtttagggggttcacagtggggggggcaattcagtctgggagagaaggctttaatccgagtgaagagccctttgcactactagcctgcgaggaggctgaactgtcttcctgccttgacttaacacagccgttaccatagaaattacagcgccactcttcagaggtctaccctgtgtgcacacatggacaagaggt

SEQ ID NO: 192715 - DNA, 441 bp, Homo sapiens
tgcccatttaacaggcacagaaaactgaggctcaggtgaaatgcattgcaccaagtcccacgtggtttcaagggaaatgactctagaatcttaaccaccatgctatatagggtaggcccatctgtggccgccagagtccccagaaagagcggtcacagctaaaaggcagcagccaacagctgttcatggctggcttggtgatgtgaggagagatgtgcagcaataattaaaggaggccctggttttctttctgttttctttttgtttttttgagatacagtcttgttctgttgcccaggctgcagtgcagagacacaatctcggctcactgcaacctccgcctccagggtttaagtgattctcctgcctcagcctccccaatagctgggattacaggcacgcaccaccatgcctggctaatttttgtatttttttaaagta

SEQ ID NO: 192716 - DNA, 752 bp, Homo sapiens
agtaggatgtcaaaacagcctcattaagaacaatgtgctatgaagaaagggagattaaatagtaattgtcagtaggtgatttagcttcacacactttcttggaatgttaccagcagtccccaaaattttagcaactcctatctctactttctgatcaaaagaaatacaaaaaagatatcagctatgtattaaaaattaacttatcgttacattcccaatagatcattatattaaaacctctaaaggctatttagatggagtgaggcatctttgcattactgagccataagataatatggtttccagtaacttgtgggatgaaggggaacagaatgttgcatggagagacagaagagttccttatttgccccactgaactcaacttgtaatcatttcctctcatcaccatctcccctgactccctttaaccttaaatttacagctgagctctcatttaatcttaagtgaaagagcatttaagaaaagaaaataggctgggagcagtagcttgcccctgtaatcccagcactttagggggtcaaagcgggaggactgcttgaagccaggagttcgagaccagcctgggcagcaaagcaaggccctgtgtcaacaaaagatgtttttaaaaaacagaattagcctagcatagtagagaattgcttgaggccaagaggttgaggctgcagtgagctatgatggcactagggcatttcagtcttggtgacagagcaagaccctgtctctgcaaaata

SEQ ID NO: 192717 - DNA, 340 bp, Homo sapiens
cacgcctgactaatttttggtattttttgtagaaatggggtttcatcatgttgcccagggtggtctcaaactcctgagctcaattgatctgcctgccttggcctcccaaattgctgggattacaggcataacccaccttccccccagccagaatcagtttattcttgctgtttgtttgtaacaacaaacataaacatcagagagactgataatctatacaactatagatatagcacagtgagccttgactacaactgcatgctgctaaagacagctcaatttatgctaatctgggctgtaggtagacttggcaattcactcgtaccccaaaggagcaacc

SEQ ID NO: 192718 - DNA, 463 bp, Homo sapiens
gagaatgggtgtcctgctagcagccaccacttcccactgattcttcctcctcctgcagtgtcatccttcctgcagcccaccctctccctcagcagaaacctggagtatgtcttcagaggaaaagagaatattccactgcctacatgtttccatcctgcctggtgcctctaagtcagatccagggctcacccagaggccacgcttccagcctccagcactcctaactctgttcctcttccctgccactgtgggccaagctcaccaaggatcctcgggccaacattctgattccccaccctctcctgacagcagccactctcctggtggcatgagtggaggctggctctgcctgttttggggctttgtatcatgatatctggcttcttttgctctgaggctcatccgctgctgtgtggctcgttgctgtgcagtggcactcggtgtgaatacaccacgctttatg

SEQ ID NO: 192719 - DNA, 448 bp, Homo sapiens
catatcgtttcctggaaccctctcaatgagccttgcaggaggagtatcataccccttgcttagagacagcgcatatgagattcatagaagtcaagtgagatatcaaagtcacgttgctagtaagtgatgggctgggatttaaatctaggtctttggactccaagagttatactgttaaccactacaatacactccctccacctcccatcccagaaaaagttggatcagggatagggttcacttcaggagccagggtcagagctgggcctgtagtcacatataaaagataggacacaaacacaattagcagcagtgttggtttaataaaccgccgtagggtgctccaagaggccccctcctggcagatcccactggtggtcaggaggcagaggcatgagctgggtgttgagggatgaggggaagagttaaggcccagggtgtgaagggc

SEQ ID NO: 192720 - DNA, 148 bp, Homo sapiens
gttggggcatttgtgatctgtggagaaggcagagatagttaatgagtaggcacatttgctaacctccttggacaggaataagttcatctcctgcttcttatttcctcatctctttttccttaccattttttcctcgtccaattctccc

SEQ ID NO: 192721 - DNA, 435 bp, Homo sapiens
tagttgttgtgagggcttcatgacatgtggctcttgcccgatgtgcagtggccaagtgtgaccaataaccaaaaccagaatggcccccagggaccatttaccactccaccttctcttttgcatagggggaagttactttcccaggatcacacagccagacaagggattcaaagtcaggactattaattcaagtccagagttctgttccctcccccactgctgtgttctccaaagcctgagcaggagatcatgctgttcctaactagtgaatgtcatacttccggtcgaacacaccacccctgtcatatggcagctggtcacccagcagggagggaccctgcctcccactcacccctactgctggacataggaaccccaggtccacccatcctttttcgaggcccacacttcccaaagctatgccagttctttgat

SEQ ID NO: 192722 - DNA, 288 bp, Homo sapiens
cgcagctctgggcgccacgcagactgctgtgcccactggggctgggctcaccaggaagtaggatcagcagaaacgcgggcgctcacaactggtgccaggttcggtttccttaggcctctacccgcagggccccgtccctaccgtgcctggtgggtgcttcctcacctgctgctctccccacaacggggctgctcttttgcccaggggctctggggcggtcccggccacccagagcgcgaggtcgcaggtcccagtactcatgccggaggccctgacgtgctgggggtg

SEQ ID NO: 192723 - DNA, 191 bp, Homo sapiens
atcttatcttgagtattatttgttagctctctttttagcagtgaactttttatacttggtggtacgaaactaccctagtgatgcattgcatttatcacatgtattaccgtgatggtggtaatcttaaccacactttattaagtgcttctgtgccaagtacttccgagtctcacttactcttcacacagcct

SEQ ID NO: 192724 - DNA, 592 bp, Homo sapiens
gtcacctcaattccctgagctttagttctcatctgtaaagcaggcagccatccttaacctgcctacagactcggtggaccacctgacatttgagatcattctaatttgagaactatgctctggtattggcaggatatagatttaagtagcagatggacatttgcatactcttgcatttgattcttaaattatccatctcggtgtttaaatgtatagaattgcctgtgctcttcccttcgctagctcccagtgtcctccatgtttctcccacgggcctcccagctggttggactactggatgcctgccctgcgtgacccagagagaagctgagggtcagcagtcggcatcctgattcccagcagagagtgacaagtgcacctttctggaaaggccgagccacttcttaaaaagtttattatggggaggaaaaaaaaaaaactaagcaggaatggacaagaaattacatttataatcctacaacccaaacacagctatttatgtttttctgtggttcctctcaatctttatctatttgtatacaatcattgtacttgtataatttcctgctctacttttttccccaattaacat

SEQ ID NO: 192725 - DNA, 312 bp, Homo sapiens
aggttctgaggaaacataaaggaaggattctcccaattccacaaaaactcgatttagtcaaaaaaatatacttattgactttcctaaaaaattaaaaagaaaaacaactaaatacacagccaactagcatcttcatttttagaactcaaaaattaattggaatatacctagggagaaattttctggaatttcattttctgggatattttttaaaattgctagtcctcattcctttgtcattttatatttcattttccatcttagttaatattgctgtttttatttcctcattctctgttattgtatcagtta

SEQ ID NO: 192726 - DNA, 397 bp, Homo sapiens
tagttccacttatgtaaagtttctggaaagctgtataaatttactaaaacactacactggtacacttaaaataggtaaattttgtggtatttaaattatacccaaacaaagctttttttttttaaaatgggagcatattctaaatattgtttgtactgtgcttttttctactcaaaactataactcaaagagagtttcatattagcacaggagatggccctcattttttagtggttataatggttcgctgtatgattgtgtccaaatttaagtaactcaaatagccatgaacgaaaagatctcatttctccattcagaccaaagaccttgtaggcatacagtttctgcgttcagttttaaaagctacaaattagttccttgcctcaaaatctcttaa

SEQ ID NO: 192727 - DNA, 352 bp, Homo sapiens
tgtgtgtgtgtgtgtgtgttgtgtgtgtgtgtgtgttgggaggaagggggaggaaggaggagggcattctctggtggaggagaaacagcctgagcttctccccttcccatgtctttcacagcagctcatacactgttttctcgccttgcaatgcccaactttctacctaatgacctaccctcccctaaggccctgctcaactcaccttcactgagaaatcttctctggccttcagcccttttcttaaagcccaaggtctctgaagctgcacttgattggttggatactgtattagaccattcccacgctgctaataaaaacatacctgagactgggtaatttataaaggaaa

SEQ ID NO: 192728 - DNA, 421 bp, Homo sapiens
ttttcatatattagattgacctgtatttattttttcttctactgtctctatcctgatttggtgtaaaggttataaaagaatttctaggtgaatttggaagtaatctatattttaaaaattctctaatactgcttacataatgataatcaagtccttaatgtttgctaaaattttattggacatccatctgggctttgctatatttcactgagggaagcttttgatactccaattcaattttgttatttattgttgattttattcagtcttgctttttctgctttggtcagttttgataatgtgcagtattctagaaaactgaaaaatgtgttatctatttttatttgactggcgtatggttatccttagtattctcccataattttttaaaatctaaactgttgtatagcccctgttcatc

SEQ ID NO: 192729 - DNA, 345 bp, Homo sapiens
agcagctggcaaggatgaagagcaactggaactctcatactctgctggtggaatggcaactggtgcgtcactgtggaaaatcaatcagcagtttctcctaaagcaaaatatttgaatgtctaatactcagccagtctgctcctgtgtctctatccaagagaaatgagggcctatggccatcagacgtgagccagaacattcataaagcacgactcataatatcttggaatagtctgaacataatcccagctgggcacagtggggtgcaaagttatggttaactgcgttttcttgtcaattaaatattaatgaaaataccttccttatctttttatgtaacttttc

SEQ ID NO: 192730 - DNA, 487 bp, Homo sapiens
ccttggtccttgcatgcgtgtgtatatgacaataactgctccggggaaatctaatggactctcttatggagagacttgggatgcagactcgcccagctttaccacttctcagttacagagtcttgggctagttcttaatttctagtccaggttctccttctaaaatatagatcatgaactaacaagagtttttgaaggaattgaatgaaaaaaatgtataggtaaagtgttaagtgttgttcatgctaacagttaacagttggtattattattcaggcagctgaaggttatccacctctacttcagcccacacagaaagacctgaatgaccttagacaaattatctgagcctcaacttcctcgtctgtacagatggatcactgatatgatacatgctacaacatagatgaaccctgaacacatgatgcccagtgattattactagaaatgcaagttgggaacccacattatattgaaaaacaaaaca

SEQ ID NO: 192731 - DNA, 711 bp, Homo sapiens
ttccaccaaagataaccatgtgctagaaggcatggactctccttattcatgttaatatcacagtaactagtgcagtgcctggggcatatggatattcaacaaatagtagtgaaaataaactttatgcttatattgcacagctttcactttcattgatatgtctgatcattgattttcttctcagttcagttaacactgagcaaagctttatagaagagattcctaaattagtcttgaagcagattgtaggtggtgatggtggttgtatatgtatgtggaagaaagtttaagggaagcatggccaagagaacagcaagtactaaaacatgggggtgggaggaaaagcatgttgggaaacgttgaatattgctggagtgtatggtagaatgaaaaaggcaagaaatgagattagaaaacagcatacgggttttatataccacaacaaagggtttgcagtttatcttttggataatgggattttgaagaattttcagtggaaaatacattaattgagaatagaatatgtttttgcaaatttataagagacagactgagagtaaaaaattcaattgaaagtgcagtgtgttttaaaatattcagcaataaagcctcgtgtttctgttgattagctatgtaggactttaaatggatcttcaccattatcaagcagtttttactttctaaactttattttgagggaaaagaacctag

SEQ ID NO: 192732 - DNA, 228 bp, Homo sapiens
ccatttcttattatccatttttattgccactgccccatttgaggtcctcataatctttacttagtctttggtcttttaggaaggaattctctatctggtctctctgctcctaatctctttcctttctaatttgttctttataatacgatagtttacttttgatttctttctctcattttcaattatcagtattgaacagtcccatagccaggtgtggtggtgtgtgct

SEQ ID NO: 192733 - DNA, 458 bp, Homo sapiens
cgggaggtggaggttgtagtgagctgagatcacaccagggcactccagcctgggcaacagagtgagactccgtctcagggggataaaaaaacaaaaaacaccgagaatagtgtctgggacagagaatgttccataaatgttagctagtgcttgtagtaagaaaaggggagcagccgggcacggtggctcacgcctgtaatcccagccctttgggaggttgaggcgagtgcatcacctgaggtcaggagttcgagaccagcctggccaacatggtgaaacccccgtctctactaaaaatacaaaaattagccgggcgtggtggcaggcacctgtaatcccagctactcaggaggctgaggcaggagaattgcttaaacccaggaggcagaggttgcagcgagccaagattgcaccactgtactccagcctgggcgacagagcgagactctgtctcaaaa

SEQ ID NO: 192734 - DNA, 554 bp, Homo sapiens
tgggcgacaagtaaaactccgtctcaaaaaaagaaaacgcttttcttctttgggatgtgaaaggccccatataagtatattttgaagagttactttaataagccaaatagtagacatttcaagccctgagttgttggggtaagaggagagcatccctagcacttcaggaggccgtggcaggagaattgcctgagcccaggaatttgagaccagcctgggcaacatagtgagaccccatctctacaaaacattaaaaaattagccaagcgaggccgggcacggtggctcacgcctgtaatctcagcactctgggaggccgaggcgggtgaatcatgaggtcaggggatcgagaccatcctggctaacacggtgaaaccccgtgtctactaaaaaaatacaaaaaattagccgggcgtggtgacgggcacctgtagtcccggctgcttgggaggctgaggcaagagaatggcgtgaacccgggaggtggagcttgcagtgagccgagatcgcgccactgcactccagcctgggcgacagagcgagactccttctca

SEQ ID NO: 192735 - DNA, 285 bp, Homo sapiens
gccacattttcttaatccagtctatcattgatggacatttgggttggttccaagtctttgctattgtgaatagtgctgcaatcattgagaaaaccagtttattttcgttgggaaaatgttttttgacttagcccgccttttaccattcccttgaaacattttttacttttacgtcttttacttaactccaattacagaggcacttcttgaaaaagtggatggaacagagtggggtggatggagcagagggggggagtatttagaaggcagaattgttagaacctc

SEQ ID NO: 192736 - DNA, 396 bp, Homo sapiens
ataacttgctcattactataaaggtggtaccaagccattcataagggatctgcctctatgacccaaacacctctcattagaccccacctgcaacattgcgaatcaaatttcaacatgaggtttgaagggtcagatattcaaactgtagcattccacgcttgactctccatgcctcacatccttctcacattgcaaaatacaatcattctatcccaatggtcccgaaagtcttaacttgttctagcatctactcaaaagtcccaaatccaaaatctcatctgagactcaaggcaagttccttccacctatgagcctgtgaaatcaaaagcaattcatctacttataatatgcaatgtttgtataggcattaggtaaacattctcgttcacaaagaca

SEQ ID NO: 192737 - DNA, 1180 bp, Homo sapiens
ataaattacatttagcaaatcacccattttaagtatccaatcatgagttttgataactatatagtcttctagcaactatcacattcataatacaaaacatttccatcacccccaaattcccacatacccctgtgcagtcaatcccttcctcctaccataggccattagcaaacactgatttactttctgtcacaatagtttgccttttctagaattacctatcaatggagtctggcatcagtgattattcacatggctgggtatatgacttttttctcttgcctaatgttttggagattcatgcatattgttgcatgtatcaggttagttcttcctaatttattattgaacggtcttccattttttagatataccacagtttatccattcacattactgttggaaatttgggtttccagttttcagctaatgtgaataaagttgctctgaacagtgaattacaagtcttcatgtgaacatgttttcatttccagtggggaaatactcaggaatagttttgctgagtaagatggtaattatatgtttaacattgtaagaaactgtcaaattgtttaccagagtggctctaccattttgtattctactagcaaggtatccagttgctgtcagaacatgtattcattctttatactttgttacagattgtcttaaataacaaaatgttttttaaagaaagtaagagaaatacatttgcctgtgtacatgtgtcttttacatttgcccacatatttgccatcttcatacccatgtattttgtttcttcctgaagatctgtagatcttagtttccacctggtgtcattctctttcagttcaaggactttcacatatgcttgtagtgcactcctgctggtggcgaattttcttttcttttttttttttttaatatggaacacttcacgaatttgcatgtcatccttgcgcaggggccatgctaatcttctctgtattgttccaattttagtatatgtatgtgctatttatctaaaataatctttttttgcctttgttttagaaatacaattttgcttgatgtcaaatttaaagttatagggttttttaagctttatattgatgttccattttctatcagcccccattgcttctaatgaatggtgaacagccatttgtattgttacttcatatacagttgacccctg

SEQ ID NO: 192738 - DNA, 182 bp, Homo sapiens
ttcaacttttacgaacaaaggtcttactttttgtaagtttgtaaattattatttatattttcctttctccctcttccctctttctttgctttccctttttccgtccttcagtatgtttatgtcttgcttccactagactataaattccttgagggtagaaactaggtctgttcgttccattt

SEQ ID NO: 192739 - DNA, 627 bp, Homo sapiens
tgattaaagtattacagataaataaacagaaagactgtggacagaacatggcaaaggactgcacagagctcctgagggattcctgagagcaaagtgaagtcagaggtagggccacaaaaggaagtgaggcaggcatagaagcctagactggatttgagaaggatggaaagctctggaataggtatgtacggaaatgcatacagataagagaaaaggctgaagaacaggtatgggaagccagatgatatgggacttgatgaaatgccctgcagaaattaccagcttgctctcaagactctgcactgctgtacttgcctactcctgctcatctacccacatcatgtcctggtcatccaaatgaaagcaacacagagcaccaggtaagtttcccatcttttacttaatggaaaggctgagctgaaggtacattcactgtgtgtgtcagtaggagataagatctggtgggtggtgagaattggaaaggctgcagatctgttgggtgttcctcacaagttaggtggccagaaaccaaaatggtaaagtcaggtaggaaagagtacatgtttttatacgtggagagaaataccactgcccatcaaagaatgatggaaagaaagggcctgtgaa

SEQ ID NO: 192740 - DNA, 277 bp, Homo sapiens
tgtatttttgtagaggtgggtttcaccatgttggctaggcttttctcaaattcctgtcctcaagtgatccgcccgcctcagcgtcccaaagttctgggattataggcatgagccactgtgcccagccagtaccaattttattataaagtagtacctatacatcttcaaagtctttaaagaatagaaaagaaccactttctaggacacttcaaataaggacatttttgtctggactccgttcttttgacgcctgtctccattagactcctccaacagg

SEQ ID NO: 192741 - DNA, 443 bp, Homo sapiens
gggaccaaggaagccagaggtctgggtcagcccaaagcctccaaatagctccaaccaaagctcttaacatatgatctgggcaagagttcatttgaagaatggggcccatagttaaaagaagtccgaagaccataaggtaaatggcacagaatttagtactagagaactgaagtttaagccctagcttaatttttactggctaagtgatatttaactacatatttatctgtaaaatagagctaatgatccttatttcacagagcaactataaggattatgagataacataagcaaagggatagctattattatttctgttattatttagatttcaacaagcagtcaacagaagtgatagctattattaagagtgatattatggaccttggagcaggaaagcaactggtaacttgacagctgttacctgccctagctgacacctg

SEQ ID NO: 192742 - DNA, 472 bp, Homo sapiens
taaacatttagtgacagagtggaatgagaaggtactgaagcaagggctgatgccttctgggtagatgggtagagatctcctgcagcctggatatcttcaaaataagtaggttataggtcaagttagagaaaaaataatactctttctttgaacaccacgaagagaaaagcgctggatctagatgtgtctgtgaagccaggcttgtcctgggaaagtgagaagagctgagcaggagccctggcaatggagggtgggtgagatgtggtccccacggagagaccgctagggtcagggcttggtacagtgaggctggcagggcccttcggaaggcaagggaagatggccaaggacacaaggctgaagcaacccatctgagccaaagatctgtttaggtccttctgaatctcagcagccttgccaaggaaggcatgattacccatgggtatcagagacactggaggctggcagctgg

SEQ ID NO: 192743 - DNA, 660 bp, Homo sapiens
tctaaggaaacataccacagagtcgaacagttgaaacagctatttcttgactttcctatcatactttccaatttttcctactctgtcactgactgcacctttttagtcttttttacttttttttccacttgaccttatcagttcccatagttttaagaagcatctaaattttgatgttccaaaacttgtagttttgatcacttttctgagctgcaaactgatttctctgactttctgtttgatatcatcatttagatattttattagaaagtcatattcagtattttcaaaacagaactctaagtttttcctcattttataaaacttcattctttactcagacttcctcatttcagtaaatgtacataatgcctatatacttgcttttgtcaaatatctgaaagccttctttgattcctgattccaaagacttctttgagcccccctctctgatacctttcctttctcaacccttactttgtgagggtgtttagtacttcagttggatttccttatacaatatatcccaaagatatatatctttctcttctacttctcccaccctgtccaaggcactgtcattttgactctggtcctttttagaagcttccttgtgtagttttcccattttcagttttaattttcttcagacattctcca

SEQ ID NO: 192744 - DNA, 591 bp, Homo sapiens
ctggtcctgcagtatccgcagtgccactgcagagcaggacctctataccttcagcagaagtcctggttctagaagggagcaatgtgcaagacccttagacaaggaggaataaaaaaagatggggtcaggagatggcagttcaaagaaatagtgaaagtaccttgtgaaaaagaactagaaattttgaaacataaatagactaaaacaagaacacatagttgtgaaaaaaactgattggaaatctagcaaataaagtatagtcattaggaaataatgaatagatgtgataaattctaaattggacacaggattactaaattagaagagaagtctgaggaatgtactcagatttctaaaaggtatgtcagacactgctgtaagttttatacacacccacacaatctcaatcaataaatctctctctctctctctctcatttactcctaaggcaaggcagtcctactcatttaataaatatatattgtgcctactatatactagtgactctgttatttatctattgctatatatcaattgcttcaaaattagtggcttaaaacaacctacatgtattatctcacacgttttctg

SEQ ID NO: 192745 - DNA, 490 bp, Homo sapiens
tggggccaggcatcaggctcttggcagaggagagggtccactcacacaaacagagggcagtggggcgagaggaagcagactgagtctagatgctttggaagatcagagaaatccccctaaaatccttctcaggagaaaacaggagactcagaattactgcaggaggcctcagacaagcaaagtaccttgaaatgttttgtttttatagccttcaaatgttaacacacaaacactgtttcaaaagtatctagaaatggtgatgagattggtggccaaagcgcagggatacagtaagatctcgtttcaaaaaaaggactaatctgtcaccctgggtgaagtcactgcatgtgcaaaaccttggtcatggggtgggcgcatggtggcaaggtccgggaggaagctgacaagaaagaatagaaaatgggccgggcgcggtggctcacgcctgtaatcccagcactttcggaggccgaggcgggtggatcatgag

SEQ ID NO: 192746 - DNA, 231 bp, Homo sapiens
taaaatagatccattaaattagagaaagacttttctccaattattaataaatacaaacttaccaatacagtggtgctgaaaaaagtgcccattatccatgctttccgataaagcaaatgataaccaaatagcatgttgtataagcagccatcatttataataaaacaagagtctgcctcatccatttccaaagagaaaaatttccgactgattgggataaccaaacttaca

SEQ ID NO: 192747 - DNA, 123 bp, Homo sapiens
cacaaacttattggtgatataaaaagagtaaatgaaaaaaatcttccacaattgctattctaactagttccttttcttttttccctgctgggatccaattcatatctatatggatgaacttca

SEQ ID NO: 192748 - DNA, 149 bp, Homo sapiens
catgagaattgaaataacggggatagtgaacacctggggtggaaagaaactggtgccccagtaaggggagtggagggaggagtgcccgttggtgctcttgactgtgaggtgggtctctaggaagttaacagctgagggagaactgtgtg

SEQ ID NO: 192749 - DNA, 620 bp, Homo sapiens
agcctctgccgcccatgccgggagcgctggctccactccaaagccactctgtgcagaaggcgctgcccagtcccgggagccgctaccagagacagggcaggtccaggtggttggcttgaagatgtggggagggaatgtgacaggggaagcaaaggtggtatcatattttcttgttttttcacgtttcctgcatcctgaagttgatatctgtgcatctgatgtgatatttgctgtttctaatttttcaaatttgcttttgtaggggaggacttttcctgaagatgtatttatggtgtcagttaggtggggcactttggctttgattctgggtgcatgcagtagtgtagtttctgtatgactttcagctgtaaatatcatcagtggtatctgtcatttcctcagtgctttaggatgcagttactagtggagatttgctagggaataggatgccatgtgggccaatgttcggacccaagtgttggcagtggtgggctgagtttgcctgtccttgggcccagggtgatgttgctggcaccagtgttagcaagcccaatcaggccagttattgggtctccaggtggctcacttgggtgccaccacacgcggctaattttctgtat

SEQ ID NO: 192750 - DNA, 1979 bp, Homo sapiens
  misc_feature (790)..(790): n is a, c, g, or t
  misc_feature (1110)..(1111): n is a, c, g, or t
  misc_feature (1609)..(1609): n is a, c, g, or t
gaggacaccggtcatgagagtggcctgattatggccaatcttacataatgtgtgagatcttgatattaccccatccttgagagtcctctataaagctacagggacttgggagcacctttaattacagacaacccatgttcctgtggattatgatttattagattgcacatgcctaaataaagacatcctctgcagtcttttgacaattctataagcatcttctgactccgcaattagacagctaagagatctgtgttacttccctcacatatataaataattttaaataaaaatcatggcgtgaataatttctttcctctaccgatttgaagctatccatttggaagaccactctgaagagatgaaataagtcttctgccaaagattacttattaatttacaaggaaaaggggaagttttgttcctctccgtgaatttgattgaaaatcgagggctttctcgaatagttttggcatccagggtcatttttcattaaaaagagaaaagtcatgtcaaatatgaatttccgcagattattcagcactagaccctgggagattctgtaaagaggggttttgttatactcaacttttccgggtaaaacaaacacaaatactcctcctccaaggggcgggggcggtgcctaggtgatgcaccaatcacagcgcgccctaccctatataagccccgaggccgcccgggtgtttcatgcttttcgctggttattacatcttgcgtttctctgttgttatgtctgaaaccgtgcctgcagcttctgccagtgctggtntagccgctatggagaaacttccaaccaagaagcgagggaggaagccggctggcttgataagtgcaagtcgcaaagtgccgaacctctctgtgtccaagttgatcaccgaggccctttcagtgtcacaggaacgagtaggtatgtctttggttgcgctcaagaaggcattggccgctgctggctacgacgtagagaagaataacagccgcatcaaactgtccctcaagagcttagtgaacaagggaatcctggtgcaaaccaggggtactggtgcttccggttcctttaagcttagtaagaaggtgattcctaaatctacnngaagcaaggctaaaaagtcagtttctgccaagaccaagaagctggttttatccagggactccaagtcaccaaagactgctaaaaccaataagagagccaagaagccgagagcgacaactcctaaaactgttaggagcgggagaaaggctaaaggagccaagggtaagcaacagcagaagagcccagtgaaggcaagggcttcgaagtcaaaattgacccaacatcatgaagttaatgttagaaaggccacatctaagaagtaaagagctttccgggaggccaatttggaaagaacccaaaggctcttttaagagccacccacattattttaagatggcgtaacactggaaacaagtttctgtgacagttatctataggtttaagttgtgatgcagctgagttgaaaaggcttgagattggagaattaattcaggccaggcttcaagaccatcctgggcaacatagccagactaccatctataccaggggtcctcattnccccggccaccgaccggtaaccggtccctgtccatggcacgttatgaattgagccgcacagctgaggggtgagcgaacattaaccaactgagctccaccgcctgtcaggttagctgcagcattagatagattctcataagctcaaactgtattgtgaatggcacatgcaagggatctaggtttcaggctccttgtgacaatctaatgcctgatgatctgaggttggagcagttttagtccggaaatcattgctcccagcccctgcaccccctggtccgtggtataattgtcttacacaaacggtctcttgtgtcaaaaaggttggagactactggttttacaaaaaagtaaattagtcaagcatggttgg

SEQ ID NO: 192751 - DNA, 554 bp, Homo sapiens
gaggacaccggtcatgagagtggcctgattatggccaatcttacataatgtgtgagatcttgatattaccccatccttgagagtcctctataaagctacagggacttgggagcacctttaattacagacaacccatgttcctgtggattatgatttattagattgcacatgcctaaataaagacatcctctgcagtcttttgacaattctataagcatcttctgactccgcaattagacagctaagagatctgtgttacttccctcacatatataaataattttaaataaaaagaaaacctagtaaatacttttcttgacatgggttttggcaaataatttatggccaagttcctaatagcaattgcaaaaaaaaaaaaaaaaaaattggacaattgagacctatttaaggtaaggggcttcggtgcaataaaataatttcccattagattcaacaaacagtaccagacggggagaaatttttggcaaactatacttccaacaagggcctattatccagaacctacaaaaaatttacccaatcaccatagggga

SEQ ID NO: 192752 - DNA, 576 bp, Homo sapiens
tctaacctgccactgctaggaatttaagcaaaaagcccatagagatagactgaactagtgtgtaaggacctatggtagcagatgtcaaaaaaaaaaaaaaaagaagaagaaaataaaaaccacctgcagtcatttgcaacagccagtgtgaaatttgctacatagttgtatctgtgtatctatctttctaccctacaggttgccaaacattttctgtaaaggactgggtagtaaatattttaggccttgcaggccatacatggtctctgtctcctcctcctcttgtttccgctgctgcttcaagattcttttaactatagaaaaattatttctcgctagtaagctgtataaatatcagttttcccacctggttctagcctcaaaagtggagcaattctgtacatactttgaaagcaatgtttaaaaatttatttaatttaattaattaaaaaattaattggttactttttagagacagggtcactctctgttgctcaggctggagcacagtggcatgagctgagattgtatcactgcactccagcctgggtgacaaagtgaaattccgtctcaaaa

SEQ ID NO: 192753 - DNA, 659 bp, Homo sapiens
ttggcttaatgagttttcagtatttcaggtacacaggaaacatgaccatgtaaacctctaggcagattaagaaacattgccaccatcttagtgtctttcataattaatatcggaagtgataaacggtcacttctgccctcttctgtaggtaacacagaccaaccgtggtacaatataggaaggcagtgcataaggatgtgaatgccaggagtgaatgccatcttggaggctggctaccgcagtcatgcattgatcgttttcaaatactactggttcacttatgcagcctgcacaaatattgatgtatttaagcaaacaatgtaaataaaagtcacaactgataatcacttatatcagaaaattctggagatactgggaagctgccaagatcattatggtgaataccatttttccaaaatcatattttttttttgcctaaaatcttgaattttatcattggcaacaaactcaatttttttttctttcctccctccctccctatttctcttttttcctttcctttccccttcccctttccctttccttgtttttcttgaagttacagattccctttgttcattttcaagaaaggtttgtcaaatacccaagtccgaataaccggtttgtcactcatcttagtaaaatttgtgttccaggaa

SEQ ID NO: 192754 - DNA, 1510 bp, Homo sapiens
aaatttattattatctaaatattcattttaaatgttaattttagtgtacttctttgattattttctttagagaaatttctgatttcagaaccaagtttattagcattcactgtatacattagcaccattaaaactagctagacccaagaagcagtattgaatgggtaccccttctttactttcctctgattcactctactctggtgctcacagctaagtaagtatgtacagcaatggcctgtcatttggtcgattatcttttgtgctctgaaatgtctttgttttttcatctgctctcaatacctctatgctctgatcctttgtatataagggtaaccatatttgttctttcctgtgaaataataattcttttccttccattcagagtagctgcctgactcatacaatgaataaagtcacatagactcaaagagtggagatggaggtcggatgtggtggctcgtgcctgtaatcccaacactttgggaggctgaggtgggaggatcgcttgagcttgagcacaggagtttgagatcagtctgggcaacgtagtgagatctcatctctgccaaaaaataaaaattagctgggtgtggtggtgcatggctgtagtctcatgtagtcccagctacttgggaggctgaggtggggggtcacacatactttttgttgttactgcttcatcattggttctgatcactcagtgttctttcccttacaccagatcataatacagtattctgactaggcaacttagctcagtttattatgaatagccttaattaatttggtaaattactatgaatgaacatttcattcattctgctaggtctaggttttgccagctgttccattcaagggacactatggcacgggttggcaaactttttctgtaaagggctaggtagtctctctattcaactctgctgttgtagcatgaaaacatccatagacaatatggatacaaatgagcatgattatgttctgataaaacctgatttacaaaaacaggtagtaggttggatttggcccaggggccatagcatgctgacccctgctctacagtatacatacacaaagactttcaaacaaagatgtatacaataaaacaaccattcagagttatttgattcacagtgtgtataatataataaaaataatacagctgtatttgagtcagcactgaaaagtctcttgtgatctgtgtcttacgtgcatgaattgcagaatattcatacgaataccatgaatatatttatatttcccaatgagctaaatgcagtgctgacagttataatattgatgggcgagatgggaagaatttagtactccctaaaagcaaagcactgtagaagtctgtttcacaagctattcgttaactgggtggactaattggagaaggtatttaaatactaataactcctcagatgtgaagccagaaaatttgaattactctaaatgctagcctaagtccaagtataataggatcagtaaatgtcgctaacgacta

SEQ ID NO: 192755 - DNA, 253 bp, Homo sapiens
gaattcccgagagctgcctcctgctttctgcctgcccctctcattggtgagggatgcactgtttataaggcagctgtttctcagctgaaggcttctcccttggcctcccctgaaatctcattctcattgatttctgtttatttgtcctatcttacccagccctcctcaatcttggctgcagttagaatcacccagagattttttttttttttttggagaatgtgcaggccactccctcagaagccgggacttt

SEQ ID NO: 192756 - DNA, 278 bp, Homo sapiens
gaggtccccctactaacaagacactgacactcttagaaagccctatttgtattcatccaaatctgtttctctggaatcccacaatcaccggttagagttccttcctctgcaaccacacgaagtcctaattctccagcctaatgacagcccttcacatagacaaggcagcatcatgtggctcctaagttacttttttttgttgttccttggaataaatgtccacagttcctttaactgttttccatataacatggtttctaaacctgtcatcattccta

SEQ ID NO: 192757 - DNA, 491 bp, Homo sapiens
atcacaggtgcacaccactgtgcttggctaatttttgtatttttagtagaggtgggaggagaggaattcctctcctcccatctcagcccccaaaagtcctgggattatagacataagccaccacacctggccggtgtcatttttatttcagtggacattaagttgattggaaagggaataggactgagcaatagtcatttaattttcagtgactaattttctggctcctctaatttcagtattgtttggacatcatttgtgttaggtattggtagcttctacatcagtagtgcttactttcttatttatttgtttgtttgattgtttttttgagacagagtctccctctcttgcccagggtggagtgcagtggtgcgatctctgctcactgtagcctccacctcccaggttcaagcaattctcctgcctcagcctcccaagtagctgcaactacaggtgcccaccatcacgcctggctaatttttgtgttt

SEQ ID NO: 192758 - DNA, 527 bp, Homo sapiens
tgtggacaacgtatactaacagaaccagtgtcatttttatttttattttatagagatgaggtcttgccatgttgcccaggctagtttggaactcctgaggtcaggtgatcctcccatctcagcccccaaaagtcctgggattatagacataagccaccacacctggccggtgtcatttttatttcagtggacattaagttgattggaaagggaataggactgagcaatagtcatttaattttcagtgactaattttctggctcctctaatttcagtattgtttggacatcatttgtgttaggtattggtagcttctacatcagtagtgcttactttcttatttatttgtttgtttgattgtttttttgagacagagtctccctctcttgcccagggtggagtgcagtggtgcgatctctgctcactgtagcctccacctcccaggttcaagcaattctcctgcctcagcctcccaagtagctgcaactacaggtgcccaccatcacgcctggctaatttttgtgttt

SEQ ID NO: 192759 - DNA, 413 bp, Homo sapiens
aagcctggcattccatggagcagtttgaaaactactagcatagctggagagaaaaacaagtgcattttaaaactgatcaaataacaccaattcctcacttatatctctgaattttgcttgaataataatttaaaaatactctcaaggcttttacagccttgagaaatagtacactaaccagtaatgccaaagcacaacaaaaatgaatgttcatagggtttattgttgttcttggtatctaagatgggcacaactactaaaggtcttttctgtcagaactgttaaaggtcttttacgttaggcctctggcagaatgaaaagaaaagatgaaaaaatcctgtcacataaccaaacaaatggagccaaaattctggagcttttgtaaggtcattataattttcagcagaaacttc

SEQ ID NO: 192760 - DNA, 263 bp, Homo sapiens
tctgggcacagcatgaaagcatcaagcttgagagactgcaggccttaacaaactagaagtgctagaacgatggttctaaaccaggtcttttctcacacagcaagcacagcaatagagatttattttatcttattttttagacagagtctcgctctgttgctcaggctcgagtgcaacggcacgatctcggcttactgcaacctccgccttccgggttcaagggattctcctgcctcagcctcccaagtagctgggattacagg

SEQ ID NO: 192761 - DNA, 570 bp, Homo sapiens
ctcctgcaagactcaagccaaacacacatttctctggcttgaagttaaatcattatatgaaataactaaaaaagataaaatcttaccaaaacattgcctttgctttaagtgatgcttttaacaaacaaaagaaaaagctcatgataaagggatcaactcagaacatagataatacaagatttagtggtcttctgcgcagaataagagaaatactgtgttagttctcaataatcaacaagcaattaaaacaattctgaaaatacttgaaatctggacagatacagatgtattttttattgaaattttaccctaaggcacaacattacattttcctgccctgcaactctagtggtttagatgctagatatcaatactggcacatgaagcttgatagctggacatgttagcagaggaaaaggaaaatgtgacaaaaagatcctacttgaagacgcataaaatctgttgttcacctagacaagtatgttaacaccaacaagtctcaactatgatttacactgtaatctctgctcaattaccatagaaaatcttaaattagctaagctctagccc

SEQ ID NO: 192762 - DNA, 285 bp, Homo sapiens
agttgccattcactgagaaggtagagattgtgtcaaacaaaattaggatgggaaatagatcaggaattcagtttggggaatgttatgttagagatgataagtgaggagttggatatttgagtctggggttcagaggagaagtctggtctagagatattaattggagttattggcatatgagatatacaaaccatgaaatcaccaatggtgtaagagtagttagaaaagaggagaaccccaaggattgagttttggagtattccactgtttggtagtgagagagag

SEQ ID NO: 192763 - DNA, 491 bp, Homo sapiens
ttagttaaaaaaagcccaggaaaatttcaccagaaagtccttctctaccaccacaatgctcctgctcattcctctcatggaacagggcaattttacaagagtttcaatgggaaatcattagcatccaccttacagtcctgatttagctccttttgacttttttgtttcctgatcttaaaaaaatctttaaagggcacccatttttctttaatgatataaaaaagactgcattgacatggttaaattcccagagccctcagagttctttagggatggattaaatggctggtatcgttgtttacaaaagtatcttgaatttgatagagcttatgttgagaaataatttttaatcttttaattccatttttccatgaactttttgaagtccccgtatacatactttttcatggtgagaacacttataatctactgtcagcaattttcaaatataaaatatattattaactgtagtcaccatgatatacagtaga

SEQ ID NO: 192764 - DNA, 202 bp, Homo sapiens
atgttggcctggctggtctcatacttctgacttcaggtgatccacccatctcagccacccaaagtgctgggattacaggcgtcagccactgcacctgacccatatctaagagtttttaagtgtgaaaaggaacaggtgagcttaatttgattgttacagaaagtattttgccagattgttaatcttcagtatacttagtagc

SEQ ID NO: 192765 - DNA, 403 bp, Homo sapiens
gccagcagtggaaagctcaaatatttttcttttagctgtttaatccagtgcttcctagtgtgtgtgtgtgtgcacgcgcacaagtggcatttaatccagtgcttcctagtgtgtgtgtgtgcacaagtggcatttaatccagtgcttcctagtgtgtgtgtgtgtgcgcgcgcacaagtggcatttaatccagtgcttcctagtgtgtgtgtgtgcacaagtggcatttaatccagtgcttcctagtgtgtgtgtgtgtgcacaagtggcatttaatccagtgcttcctagtgtgtgtgtgtgtgtgtgcacaagtggcatttaatccagtgcttcctagtgtgtgtgtgtgtgtgtgtgcacaagtggcatttaatccagtgcttcctagtgtgtgtgtgtg

SEQ ID NO: 192766 - DNA, 446 bp, Homo sapiens
agctttgtaataagaacctgttaaaagcggcgcgaggatctgcacaccatcagacctggtgcatcgacgccggtgctgggctggtgggggccagttgctcatgtactgaggcccccctccctcagttctgcatcggggtcgagatgtgtacagcagcccctgccgtggccaggaagcagctgtgtcggggcagaatgtggtgggctcaggcccagggcacaggggcggcctcccagccttccctgcacttgccctgcagttccagggcacctggtacatggtcggggtggtgtcagatgaccaggacttcctggactccaaggacaccatgaagatggctgtggtcttagtgacccccttggggaatggtgacctggccctcaagtttggataccccacgtaagtgaccacacgagcccatcagactcagcctcagaggatggcca

SEQ ID NO: 192767 - DNA, 167 bp, Homo sapiens
agaacacatttttttaacataggtcatggtatcagaataagaatgctttttgaatgtttgcagtctgtaattttgatgattgaggaaactggattttgaaatgctttattcagtctgtaaacttaatttttttttaagaataaaatgaaatgtcttttaatttgtta

SEQ ID NO: 192768 - DNA, 250 bp, Homo sapiens
tgacatttgagctgttttcagtttgtaccattatgaacaaagctgctgtgaacatttccttagcctttttttctgttcccatggaaccgattggcagtattttgatgattatgtgtaaaaggaaattagttaagacttcaggcctctgtacctcagccattagtgtctagtcccacatttgggtatctttgtagaatccaaaataagcctttaatgaatggcatgatgttttggctttgatagtttgtgc

SEQ ID NO: 192769 - DNA, 191 bp, Homo sapiens
tcctttattcttcaataaatcccctctacaagaaaaagtgcttgtatttcagtgattctgtaaggcacaacaacatggctagaaagcttacagcacagttatttgaatatggcatgcttctaggagagaaatgctacgatataaaacagagaattaggtctctgagtctttttttttttttttttgagatg

SEQ ID NO: 192770 - DNA, 622 bp, Homo sapiens
atggagtttcgctcttgtcacccaggctggagtgcaatggtgcaatctcggctcactgcaacctccgcctcctgggttcaagcgattctcctgcctcagcctcctgagtagctgaaactacaggatgctttcattggatttggaggaaatgtgatcaggcaacaagtcaaggataacgccaaatggtatatcactgattttgtagagctgctgggagaaccggaagaataacatccattgtcatacagctccaaacaacttcagatgaatttttacaagttacacagattgatactgtttgcttacaattgcctattacaacttgctatagaaagttggtacagatgatctgcactgtcaagtaaactacagttaggaatcctcaaagattggtttgtttgtttttaactgtagttccagtattatatgatcactatcgatttcctggagagttttgtaatctgaattctttatgtatattcctagctatatttcatacaaagtgttttaagagtggagagtcaattaaacacctttactcttaggaatatagattcggcagccttcagtgaatattggtttttttccctttggtatgtcaataaaagtttatccatgtgtc

SEQ ID NO: 192771 - DNA, 517 bp, Homo sapiens
ctcaaaaaactaaaggctaggtataagtaactgattcatcacagagatgactaattcatcagaacagctgtctgttctaaaatatgtcacatcaaatattcattgaataaaatattgaagtctcaactgctaacctagagagagccaagcagcttttaaaaaatcaggatagaagtgtacttttcatttccacattggacctgtgattctctgagtacctgtgtgggtctctggtaaataccagaattcacttaattttccatattgttaggaggctcaaagccaaaggcgtagagacattaggcataagcatatgtatcttattaagcatctgtatgttatgttgtggggtttggcaaccaagaagatgacagttacttacaactgttctagaaaaggcaaccactgaaacattcattgaaatcacaaaggacacttgcttgagattcattgtgttcttcacatttgctatttttaactccatgattcactgttcttttgagcagggaggggaaca

SEQ ID NO: 192772 - DNA, 314 bp, Homo sapiens
aagagatgaagagactgaggttcccagtgtctgaggagctcagagaaggcctgggcagataccttcctcatctcacagcttgctcttcctagatgctcaaaacaggttctgggtgagctaccttagtaagaccatgaatgggaccgcaagggaccctcaggtgctcccagggtcttgtaaggaaggtgacagggaagcacccactccccaccatcaccaggccacagaacaccagccattctgcagctgctgagccacagggcaggcctgcaccgcatgctcccagggcaaaggccaaggtccacagggagctg

SEQ ID NO: 192773 - DNA, 153 bp, Homo sapiens
aatagcatttgaggccttcatcagatttttagagtattttaaatgtatagtttattaagtacaacccaggtagtttatttttaaaaaattaaatgtggccaggcgcaatgacttatgcgggtaatctcagcactccaagaggccaaggtgggt

SEQ ID NO: 192774 - DNA, 414 bp, Homo sapiens
tattttgattagagtgggctttacacacccccacaaagtgaaaattacgagtcaatctattctgcccaatctgaacccaagcatgggtggcacacgacacaaatcggagaggaattcagaactgcctcttggattgaaagacctccttgacctggccctgacactaaagaaaaccccacatgtacccaaccatgagcctggctttcatctcaacaaaatgtcttagttccaacctgtttatcaaatcatctctccagttacctgcaaacatgtgggaaaaaagaaccaacaattttgaatggaaaggacttggaaatgatatagattagtgggtgttccaaggaggtctgtactagccaagtgggcagaattccatcagagatgtgaggaaggggactataggaaagtgtccag

SEQ ID NO: 192775 - DNA, 136 bp, Homo sapiens
cggaaaaggagggggagcggctggtcagctgcgccctgcgggtcgagaatgtcatcagcagggatggcggcgctttgagtgctgagcgcggccccgaccgggaccccctacccttgacccaccctcgcaggccgag

SEQ ID NO: 192776 - DNA, 302 bp, Homo sapiens
caaaataagagttgcccgcccaagtttggaaactatttcctgcttttttaaagcaggaaacaggagtccttcacctcacccccttcttctcctaaataaaacaggtacgtgttctccattttaacgtccattatcgtggtgactaaatgacctgcctgcatctgcttgggtggtatttgattgtttgcttgtatcatgagacggagttttgctcttgttgcccaggctggagtgcaatggtgcgagctcagctcactgcaacctctgcctccgggttcaagagattctccagcctcagcctc

SEQ ID NO: 192777 - DNA, 162 bp, Homo sapiens
gtttccatggatttattcattctttctaggttttcaggtttgtgagtgtctagttgtttataatcgtttctagtgatcttctgtattactgttgtatccattgtaatgtctgttcttttatatctgatttgtttatttagatttctattctatttgtggtta

SEQ ID NO: 192778 - DNA, 361 bp, Homo sapiens
gaatggagggaggaagaaggaaggaagaaaggaatgaaggaaggaaggaaggaaaagaaagagaaagaaagaaagaaaagaaagaaagagaaagaaaaaagaaaaggctcaacatcactaatcatcaaagaaatgcaaatcaaaaccacaatgatatctcaccccaatcagaattacttttatcaaaaagacagggaatagcagggtgctggcaaggatatggaggacggggtaccctcatacattgttggtggcaatgtaaattagtacagtcactacagagaactgtatggaagttcctcaaaaaactaagaacagaactaccatatgagccagcaattcgactactgggtatatatcc

SEQ ID NO: 192779 - DNA, 155 bp, Homo sapiens
atcattgagccggtcctatcatattctaactgtattagaaatagtggctcattccttcacgcaacagaaattttggatctagcctaatctaggttgtgtattcctttaaatgctgagtttacagaggcgaaagaagaaatgggtggtaagacaag

SEQ ID NO: 192780 - DNA, 225 bp, Homo sapiens
aagacgagaatttggtgccacaggcctcccggtaggagacagaataacatcgtgtgtgtcatgttttagccaccaaaatctatcaagggcaaggacatgatggcttttattcttcctgctgcttctttctgctcaaccacagtttcaatcagaaccaattcaagtgaacactgcaactgctgactatcccccaacattctttttgatttagtgtcttcggatcca

SEQ ID NO: 192781 - DNA, 415 bp, Homo sapiens
gggtaggaactgggctctgggactcaagacaaaatccaaggctccactggacacttggagatacagaatctgttcaaacaccctgtcctcacctccttccctctttccccttttagcttccagtcttccagtctccttctctcaagcatgcacttgcttcctccacatcctccacctgccacgtgcttcctgccacgtgcctgtgcgccggctgtccctccagcaacacgctctcttggacttgctgcctgtacatctgcatgcaagacatccaaagatgcagccacagatgcagtgaagaattggcgcactggctctaattcttcactggcttctcacaccttcctccctggcttggcctctttcctaacagtgttctctgctcctacctctgggcctttgtctctgctcagtc

SEQ ID NO: 192782 - DNA, 232 bp, Homo sapiens
ctgctccccggttgtgggagacagaggaaaatgaacagatgagcaagataatgttagcctgggctgagagctgtgaaagaaataaacaggacgagggagagatggcctggagaagacacattaggttaggcttttctgaagagataacatacgagctgagaccaggaggagaagcagccagcatgggttgaatgggggaccgtgtggaacaggcaaggggaggaacgcaagt

SEQ ID NO: 192783 - DNA, 488 bp, Homo sapiens
agccttaaggtcggaaggagtttgtgtgtgtgctgagagcatagagcagggtggctgcagggtggcgattgaggcggttaacagaaatttggagagggagggaggaccagatcatgtggcgccctgtaagccacagtaaggagttggaacattcaaagacactgggccacaagtggtggctcatgcctgtaatcccaccactttgggaggccgaggtgggaggaccacttgagcccaggagtttgagaacagcctggccaacatggcgaaaccccatctctacaaagaaaatacaaaagttagccgggttgtggtggcatgcacctgtagtcccatctacttgggaggctgaggtgggaggactgcttgagcccgggaggcagaggttgcaatgagccaggatcacatcactgcactccagcctgggtgatcgagtgagaccttgtctcaaaaagaacaaaaatgccttggccgaacccgggtaccga

SEQ ID NO: 192784 - DNA, 960 bp, Homo sapiens
catgcccacacacccctctccccctttttaaaatatggaatgaataacagctgtttgtatgctgatggaatgctctggtagagggaaagctgatgatgcagaagataggaggggaactgctgggtgatgttctttggctagggagcaggaagatgttatctcatgcacaaacggaagccgtgggcttaggagctcaatctttagccatagtattggtgaaaggcaggatgtgtggcacaaaggtggaggcagacagatgtgggtgggaaaaattgcagaagttttcttttgattttgtccagtttagtgcagtaggaagcaaaagcattggctgaaagtgaaggtggagtaagcagtgttggaggcttgagcagaggagaaagggtgcagttgtctttcagaacgggagagtgaatggagtaggaagcatcaggacctgcttgaggtttgtgggtaggtgtataatgtgagactgggtagcatgattctctgtttttctccacccatattcacattaaggtaataacttcgattatgtgaagagttgaatttaacaggggttaggattttgttgtgaaattagaagagaaactagagagttaaaggtctatgcaaagggtggaattacagggaaaaagaccttagaatctaagctgcgtagagagaaaggagggtgtggggagagtggaaagctgatggaagcactggattatgggtcctccggatggaaaaggtaagatggccgaggacagaattctagattttgtcaatatttaatggtaaaagaattagcaaaggagatggataaagagaagtcttagcgttgagcaaaaaagcttaggaaaaagggaaagataggtcacaatatgcagaatcctgtggataagtattctaccacgactctttttttttgcttcttggagcgattcttcacgcttacatccacctttgggtaggggc

SEQ ID NO: 192785 - DNA, 847 bp, Homo sapiens
catgcccacacacccctctccccctttttaaaatatggaatgaataacagctgtttgtatgctgatggaatgctctggtagagggaaagctgatgatgcagaagataggaggggaactgctgggtgatgttctttggctagggagcaggaagatgttatctcatgcacaaacggaagccgtgggcttaggagctcaatctttagccatagtattggtgaaaggcaggatgtgtggcacaaaggtggaggcagacagatgtgggtgggaaaaattgcagaagttttcttttgattttgtccagtttagtgcagtaggaagcaaaagcattggctgaaagtgaaggtggagtaagcagtgttggaggcttgagcagaggagaaagggtgcagttgtctttcagaacgggagagtgaatggagtaggaagcatcaggacctgcttgaggtttgtgggtaggtgtataatgtgagactgggtagcatgattctctgtttttctccacccatattcacattaaggtaataacttcgattatgtgaagagttgaatttaacaggggttaggattttgttgtgaaattagaagagaaactagagagttaaaggtctatgcaaagggtggaattacagggaaaaagaccttagaatctaagctgcgtagagagaaaggagggtgtggggagagtggaaagctgatggaagcactggattatgggtcctccggatggaaaaggtaagatggccgaggacagaattctagattttgtcaatatttaatggtaaaagaattagcaaaggagatggataaagagaatctgagtgtagaaaatgaccgggatcctctagg

SEQ ID NO: 192786 - DNA, 464 bp, Homo sapiens
tcacttgagcctatggggttgaggccacagtgagctgcgattgtgccactacactccggcctgggtgacagagcgagaccccttctcaaaacaaaacaaaaccaaaaaaagtaggtggattcaagttatattttggtgatagagttgataagactttctgatatatgaaatatggggtgtgaaggggaaagagaaataaaaaataggactcagtttctgactagaaaacgggcagttagtgataccccttatggagatgagaaatggggtatggtgaaattgaattaagtgttaaggtatatataccttaaggtgaaatatacaaatggaatgtcaagtaggtagttgaatagtctggactagtctggcaggagatagaagtttgggtattatcagtataaatatccatggaaacatgtgccacctagtggaaaaagagacagttaagaaggctcaggaatccc

SEQ ID NO: 192787 - DNA, 313 bp, Homo sapiens
acacactcttatacttgacacttagtgctaacagacggtgtgacttccccatgtgagatcccttaagagctaggcagtgtcagattttcctgatgggcgcaagatgcagtcttgctctctctcaggctaaatagcttggggtattcccacaaaagaccatgcatacccattctgacacttttgttttctattcctgctatcttggaagcccatctctgctcatctacgttatttgaactctttagagcccagctcaaatgccctctcctgtatgactctcctctcccaaggcaggcattattaatctgatggg

SEQ ID NO: 192788 - DNA, 170 bp, Homo sapiens
agtccccgtaccgccgggaacctcgctcgccttcccctcgagccccccgctgggtcgcgcggcgccagccgctcaacggtgcttcagagcagcctcctccacaacattcccctcggcccggccgttcgggcctactggagaccgcggcttgggcctagtctggcggccgc

SEQ ID NO: 192789 - DNA, 331 bp, Homo sapiens
aagcaatggggagcagccagaaatacagacgaagcttcaattgttacccaccattcacctcctgctctgtggcccagttcctaacaggccacagaccagtacatgtccatggcccaggggtcagggacccctgctgtggcacattgctaatagaggactgtagcagccatgtgccctgacctttccttttttttttttttttttgagatgccagaaacccagaatttttttttttttttttaaaaaaaggttttgtttttttcccccagttgggggtggggaggggaattttggtttaacaaataaggggccccgggcccaaaatccgaaa

SEQ ID NO: 192790 - DNA, 565 bp, Homo sapiens
gtccaaatacagaacaaaggaaataatatgtccaagaaacatttttctttgcttaatactaaaagcctcttgatctgtttcctatatcctagtcacaactgaattttaagaaagtcgaggtcatgttggtaactccatgtcaatactgctttgtgtactaactgcaagatcaggaatcgtccctcattacttccatcttggctttcaaaagagcctactgtaattttttcttctgaaatagtatgaaataacttttttcctgaaagaaaatctcctttctatggttctttcttctgaaacaaggctttccttctctgagcttccagctagaataatttcctctgacatactctgatctaggaggattgtagtgtggtcacaatgcctcagctgatttcagttaattttcttgagctgaatcaaatgaatgtcttaacaagttgtcctttaaaaggatagacgtgcttttatacaaaacttgcatttaaatgaaaccactagacttcttcatacaatgtaatgaagtcttggtattccagcgatttggcacctaaatgcataggca

SEQ ID NO: 192791 - DNA, 335 bp, Homo sapiens
aaagttggcactgctgaaaagaagaatgactattcacattaataactgccttcttaaatttgtaatgaagaatgagaagcgggctaaggtacaagaggtaatgtttatttcactttgaagcttataggtagttacatgggtatcacaaaaagaacagatataatgaatcatcttgccttttacctgactcttaagacacctgcaacatatcccttggatgttccgccttgtcacactcataaccgaggggaaaaagaagacaaaggtgaatgctcatctcaatttccattttttccccaacgtttgtaaatcttctctctaatatagaggtccac

SEQ ID NO: 192792 - DNA, 490 bp, Homo sapiens
atagccactcaaagccttcagcccatataacatgaagtgacaactgagctctgcacataatgctcaagctctataataaccaacactctcagcacaagggtagacaagaaaagaaaaatctcctgctggccaggaagaccacaaggaggctttctgacttggcctgtgcttttgatttttaaaacattttttaaaagaggcctctctgggctgggcgcggtggctcatgcctgtaatcccagcactttgggaggccgaggcaggcggatcacgaggtcagaagatcaagaccatcctggctaacacagtgaaaccccgtctctactaaaaattcaaaaaattagccgggaatggtggtgggcgcctgtagtcccagttactcgggaggctgaggcaggagaatggcgtaaacccgggagacggagcttgcagtgagctgagattgcgccactgcactccagcctgggtgacagagtgagactccgtctca

SEQ ID NO: 192793 - DNA, 360 bp, Homo sapiens
cactgtagtttccttgctgctgctgctgcttagtctccatgggctttcttctctcctttttccttgtggatggtccttggggttctggtggtactgcctctgtctttgtgtgttacacaccgtcactgggacgtctcactctcccacgtctttggttaacagccgtgagaagctcattctcaaacctacgtctagatcccagagactacctgctggttggagtgtttttcttggttgactggtaaaggctcagactcggcctgtctgtattcttcttcaccttcccccactttttccccaaaaatattccccttccttggtgcctgtctgtctcaggcaaaggtaccctcatgccagctc

SEQ ID NO: 192794 - DNA, 805 bp, Homo sapiens
ctgctttgatagctggttgtttaaatgtgtaatgtgctaacgtttcaaaaatgaaattgagaaggaattataaaccttttgtgagaaatactttggcagactggactttttgttttgatttcctcactctataatggagataacaggactacatcacttcaactgaaaactgccatgaaaaacctgattaaggatcctagatccctctaatatcctgcctaatgctttataactgttgattttatgaaggatgcttcgtttcaaaattatttatttaatccctatctttttctgtttttacagtactatacaaatctcagtataaacatttttcttttagttgtgttttacaatgaaattatgagcattattaataataatagaacattgatttgaatgtattgtttattgctgtcattggacatggagagaaggatgactcttcagctgtttgtattagattcatttgagagtggcgtccatgtatggttatagctcttagttatcttttgttaaaccaccagaatatgtgtgcaaaaggataaatattaaatgattatgaagtcctgaaagttataaaattatttattgcaaactacgatttattgttgactatatgcttccactcttctgccattgaccaaaagttattaaaattagcttgttgttatcctctcagcctttctaaccggtataagttgttccatgatatgagcagtgtctcacagtgaatcgttccaggagcttcatggccattcccaaaagatcacatttctcacatctctgaggttggggattctaatta

SEQ ID NO: 192795 - DNA, 575 bp, Homo sapiens
tccaccagccgccttatttaaatctagagatctattgggctttttgatcactttcattattataattttgcatatgagaagttggggtctccaagtgcaaactaggttaagtcacagtggtatctgaagaagtttattaaatccaaacactgtcctagcctgcgtggctaaaatcaagaaggggacaagtcctactttagctgggaaatgcatcggtttctagaatgtgtaaacattcttgctattttattaagcaggtcatcacatcctagaaaacagcattcgctgaccattctcctcctccacccaccaaggacaggagggctaacccaggcagagaacctacgctgagaactcaccaccagaaaaaaatatctgcttttaaaagcacagtgcacaatagtactttttaaaagctaaaagagctaagtttaaagttaaagacacatatgttctttgacacagatctcctaaaagtctgacaaaattaaaagtaccagcacataaaaatagatgcccaagaatgtttattgaaaaaagctgaaaacccatgactatctcaataggacaatgac

SEQ ID NO: 192796 - DNA, 384 bp, Homo sapiens
gatcacgaggtcaggagatcgagaccatcctggctaacacggtgaaaccccgtctctactaaaaatataaaaaattagccgggcatggtggcgggcacctgtaatctcagctactcaggaggctgaggcaggagaatcgcttgaacctgggaggcagaggttgcagtgagccgagatcgtgccactgcactccagtctgggtgacagagcaagactccgtctcacaaaaaagaaaaaaaaaatctccctgccatcttcaactgggaacttctcagtaactaggctcctggcaagtttcccagctccctgtccccttctctgaccaccttccagctcttctcctgttgctcagcctatctccacctgtcccattactcgcctcgc

SEQ ID NO: 192797 - DNA, 651 bp, Homo sapiens
  misc_feature (9)..(9): n is a, c, g, or t
  misc_feature (14)..(14): n is a, c, g, or t
  misc_feature (40)..(40): n is a, c, g, or t
  misc_feature (59)..(59): n is a, c, g, or t
  misc_feature (88)..(88): n is a, c, g, or t
ttaaatttngaggnttgctttcgctggccaaacgtacgtnttagtacgggttaccacanatttattcattcctccaaattaattacancataatagactatatatatcaaatatgaagatacatttatagcaattgtatatcacagagagacagtatgaagagagacatagatatccttcattttagaatgttatcttggtatgtttaaaaggaaaagcttaagatgtgttgcaattgtagtatgagtttcaggtatgtacatgttatgtgtgtgtgacagacacacacaaacacatttcaaacatgttttatgtttaagctcaatattcaaacacagaaatataacatcaattcttaatatgttttatgtaagtactgcagcagcattattaaatattgtatttctatggtgattgaaaattagtaggcagggaatttttgtaatggttcttaataatttttgtaatagtaaataattactttttgtttagtatagttttataatctatatatgaataaagttgatatttttattcatataaaaatgtgatttactctcatgtacttatctacattctaaaaccataagttatcaattttagttcttggccaaggcacttttactgaataaaaataatcagctaatttta

SEQ ID NO: 192798 - DNA, 363 bp, Homo sapiens
cttacttgttacagttattggtgtattctgactttccatttctttatggttcatttttggcagattgtatgcttctaggaatttgtccattttatgtaagttaccctttttttctggtgtgcagatgttcataatattctattacaattatttgtagaattgataggaatgtcgtcacttttatttctgaaattactaatttgagtcttctctctttttcccttagtcagcttaaccaaatatgtgccaattttatcttttcagaagacctactttgggtcacattggctttctctgttattttcctattctgtgttttatttatcttcactttaatctttattctttccttctgtcagcttt

SEQ ID NO: 192799 - DNA, 265 bp, Homo sapiens
cggaggtacacccctctcattttcggcagcagggtgagaggatttttattatcttacttagacacttgaatttatttttttattttgagacggaatttcggtcttgtcacccaggctggagtgcaatggtgtgatcgctggtccctgggttcaagtgattctccaacctcagcctcccaagtagctaggattacaggcgcccatcaccacacctggctaatttttgtatttttagtagagacggggtttcaccatgttggccatg

SEQ ID NO: 192800 - DNA, 458 bp, Homo sapiens
ccagggcctggcagccacgagtctcctttctgtctctgtggatgtgtctgttctggacattgtatatgagtggaatcatgcactctgtggctttcgtgtctggcttccttcactcagcgtgacgttttccaggctcatctgtggggtggcaagcggcagagctgcaattcctttccgtggctgagtgatcctggtcaaatgtggcactgccaaagtcagccactcggatgctggtgttcttcactgacttctcctcacagctcttgtgctcattgtagagggtttcaaactcagaattcacgaacaggatgttctctggtttcaagtctgtatgggtcagctgattctcatgcagaaatctaagggcgtggcagagctggtaggccatgtgccggacatgtggtagggggtaaggctggaagttattctccttcaggaactcaaaggtgttcttgccc

SEQ ID NO: 192801 - DNA, 316 bp, Homo sapiens
tcattcataattttcttacagtgtagcaatttttgaagaaccatatgctgcactatttaataaaaatctgcatttttgacaaacccctcattcccaggtatttaatttgcaaatgctacattgataacactgatatatggaatggattgcttctctaaaatgtctgtggaaagcaacagtgcaaagacattatattttcatttctttttgggggagtgttactgtaatattagacatccgacctgagaagtttggaggtactattgccatgaaccatttcttccgtaattcaaaagtatctttgaagtgactctga

SEQ ID NO: 192802 - DNA, 431 bp, Homo sapiens
  misc_feature (423)..(423): n is a, c, g, or t
cgtaccccaccactcctatagatcagtattaataagtaagtttaacatgtgaaagaagtgttcttgcttacaaaagaaagcagagggctaactggtaaatgcggtgggagtgctagagctggaaatgcatcatttgcaaccaaaacaaagcaggttaaaatggcatcatcaggcagtaagtttgttgttgttgttgttgttgctgttgttgttgttgttgtttttgagacagagtctatctctgtcacccaggctggagtgtagtagcatgagttcggctcactgcaacctctgcctcccgggttcaagcaattctcctgtctcggcatcctgagtagctgggattgcagttgtgagccaccatgtatggcttgcattgttttattttttacatttaaatcactgatctataggagtggtggnggatcctc

SEQ ID NO: 192803 - DNA, 532 bp, Homo sapiens
ccccaggcacctatgggaccagccccgggcattcctccctggggggcgagggtgcccacacctcaggctggtgccttccccccaggcacctatgggaccagccccgggcattcctccctggggggcgagggtgcccacagctcaggctggtgcattcccccaggcacctatgggaccagccccgggccctcttccctgtgggacgaggggcacccacacctcaagctggtgccttcccccaggcacctatgggaccagccccgggcattcctccctggggggcgaggggtgcccacagctcaggccggtgccttccccccaggcgcctgcaggacaagccctgggcactcctccctcgggaccaggctcccaccccaggaaggccacccagccccgagggagcccaacgcccactgcgctgccctagcccaggtcccttcctcaggcccaactttgaccccgtgtccttgaagatgcaggagacctcacaaggcccaagaggtggctcaaaatagattaagtgcttcacatg

SEQ ID NO: 192804 - DNA, 503 bp, Homo sapiens
tagagacaggatctcactctgttggccaggctggagtgcagtggtatgatcatagctcactgcacctctgagctcctggagtcaagcaatcctcctacctcagcctccaaagtagctaggactgcaggtacgtgccaccatgcccagctaatttaaaaaaaaaaaaaaaacttttttttttttaagagatggtgtcctgctgtattgcccaggctggtctcgaactcctggactgaagggatcctcccaccttagcttcctgaagcacttaagattacaggcacgagacaccacatccaaccttactataattttaatgctctaaactcagagtatgtgtataaagacttctcaacagttttcattctagaaattattcaagaaactatgtatttgacctggtttcttggatcaaaaatagccaaaatgagaagaaaagcttcctaatgaaatagtcctgaacataagttaataactaggtttaaagagtctcactagggact

SEQ ID NO: 192805 - DNA, 159 bp, Homo sapiens
tagaatccctcccatgtttctggtttgggtaactgggagaatggctagccattcacctaaaggatatgatgtgtaaggagacgcaaattcttctcagatcttactgagtttaagttgcctgaaggaacaccagttaacaatgtccaggaggctgttgga

SEQ ID NO: 192806 - DNA, 324 bp, Homo sapiens
ccagatggataattgacagtcctgatgagtcatatggaactatcaacaattatttttattaactattttaaaaataaaggtagcatttattgataaagatggtaatctagaacatatatgctatgatataatgtataatatgatgtaatatgatatttttatagttataaaatcttatagacttgatgttatttaactggcctcttcagaagggtgtttatgttttcataactgtcgatagattgtattgggccagctattctctcttacctgtcttaagacttctagtactaagattgttcctcaagactggggaaaccatga

SEQ ID NO: 192807 - DNA, 185 bp, Homo sapiens
tactcgggaggctgaggcaggggaatcacttgaacccgggaggcagaggttgcagtgagctgagaatgtgccactgcactccagcctgggcaaaaagagcaaaactccgtctaaaaacaaaacaaaaaacaaacaaaccaaaaaacccccaactatcatctggaggcaacagctggctgtccaga

SEQ ID NO: 192808 - DNA, 224 bp, Homo sapiens
gctttcagtgacacaaaaccggctctgtgaggaaaaagctaaagagacccagttattatctttaagtatatgaaaggttttagagaaaggaattgagtaaaagaaaacaagtttgaatgacagcaggcgagatttcagccaggcccaggaatttcttgacaatcaggttaatagaatactggaattggtcactcagggagttccaactgccctttcctggaaaa

SEQ ID NO: 192809 - DNA, 315 bp, Homo sapiens
cttaattcccagccctggtttggaacttctgatggtctcaaggggttgtaggaaattctaaaaacaactctccaaaaaatccattgtgatagcaaccttttcctccctctggctggttattggaggggcccatgtctataaattcaaacaatagggcatgccaagtccccaaagtcttcactcctggagctaaaataataatcaagacttgtttttggcaggattttctggataccacttagcttctcttgggcatgaaaggatgggcagtccctgccaaatgtaaccaccataccgaaaagttggccaaggttg

SEQ ID NO: 192810 - DNA, 741 bp, Homo sapiens
caagtgggttgtataccaggcatgtagggatggtttaacatatgcaagtcaataaatgtgaacatcacataaacagaatcaaaaacaaaaatcacatgattatcttaatacatgcagaaaaagcattagacaaaatccaacatctttttatgattaaaactctcagaaaaattggcatacaagggacatacctcaatgtaataaaagccatctctgacaaacccacaattaacataatactgaaagggaaaaagttgaaagcattccctctgagaactggaacaagacaaggatgctcactctcactcctcttcaacatagtactggaagttctagacagagcaattagacaagagaaagaaataaagggcatccaaatgggtaaagaggaaggaggaagtcaaactgttgctgtttgcttatgatatgattgtttacctagaaaactctaaagactcctccagaatgctcctagaactgacaaaagcattcagcaaagtttccagatacaaaattaatgtacagaaatcagtaggtcttctatacaccaacagtaaccaaggtgagaataaaatcaagaactcaaccccttttacaatagctgcaaaaaagtaaaatacttaggaatatacctacccaaggaggtaaaagacttctacaagggaaactacaaaatactgctgaaaaaaatcatagatgacataaacaaatggaaacacatctaatgctcatggatgagta

SEQ ID NO: 192811 - DNA, 369 bp, Homo sapiens
tagaagtgcgtcccaatcatactaccgtcatggatcaattgcctgctgcaggagcgtggcggtgtgctccaggagaaggtgcccgagatcgtgagcgtcctgcgctccaagcttcaggaggcccaggaagagcacgtcctgccgaacgaccagcacagcgtgtacctcctggccacccagcactgcgcagccgtggtgtccagcctcctgggcagccccttgcacttggacaggtacccagctcagactccaggcttaggggtccctctggaatgatgctccccctcctccccagtgccctgggctgatgtttccctttgagtggccactcttcctctgtccatgccaggaaacctctgaccccagaga

SEQ ID NO: 192812 - DNA, 418 bp, Homo sapiens
cctccacagtccactcttgtaatccagctcttgtaatctcacatgccctcttcttccttcatggtccctgagcctttaaggagggtgcttgatactgtatagctttagcagcagtgccttggtcatggaaaacagatcgggcccagtgggattccaaacaagggagattcacaggcttttaaatcgtcttcagtcttcagaatgcagtggctttggttctgtcagaataggcaaaacaatgtgagatatataacatcgatcactcggatagtagaattctgtgcacacagagattacaggcatgtgccaccacgcctggctaatttttttgtacttttagtagagacagggtttcaccatcttgggcagactggtctcaaactcctgccctcaagtgatccacctgcctcagcctccc

SEQ ID NO: 192813 - DNA, 579 bp, Homo sapiens
gtgagacctactttcctgaaattggcaccattctgggatagtgattaaattaccataattattgtaaggtctaacgaccttagaattagtggctgagggtcctgagggtggcatttatatggagaaacactggtagttgtcagcattttgacgagtcccagacccgatcatgcaaactgctggaattacaggtgtgagccatcacgcccacccgacaatattgaattattgaatatctgtttgaaaccattggctttcacattttcccaaggtttgctttaaaaatgaagttaatctttttcaagacagattgcacaagtgatctatctgataatgaagcaaatactgagcttatcttaggaggacattaataacctttgtgtttagcctcatcaaatttaacagtaatgcaagctattatacagctaagtaaaacctacttttctgaaattggcaccattctgggatagtgattaaattaccataattattgtaaggtctaacaaccttagaattagtggctgagggtcctgagggtggcatttatatggagaaacactggtagttgtcgcgcatttt

SEQ ID NO: 192814 - DNA, 557 bp, Homo sapiens
ttctggcttatagtaaccacataaatataatgatggccagacataattttgagaactttgattggttaaaagccattaaaaccagattgctagtatatgctttgagtccaaaccttagcatttccaaacaatcatttttttctaaaataagtaaacctagtctattgatgtatagtgaccatacagaagaatatttaaatacctactcatatttgcaaaagagcagcattcttttttcaactgtttttctttttggctcttggtgtggtaaagttaaattctgggaaatggtttactaaagggaagtttaaccacagatgtttgtaattccaacttaagtttcccatcaaagtcttaatgaaattcagctgccagcagttcggctctgaatctgagtctttttatcatgagaaacttgggggaaacaacattctgaagctgaatggtaatgggaaaatttccatattcagcccaaatcctctccataaagaaaaaaatacataaacaaattctgttaaaagcgggaggagagacgggtgaatataatttgagtaata

SEQ ID NO: 192815 - DNA, 483 bp, Homo sapiens
accaccttatttcttcctctcaataatctttttaggtggtagtccttatctctgtaggagtataatctgagactaaaagtagttaagtaatttgtataaggtcatagcctacttcataagaggaaaaacttggattcagattctagtttctgacttcaaagctttccccttctactacttagtggttcttctctcctgtggcagaaatgtagtgtatctttggatgtagataatggcattaaaaggggtagtaatcatgggaggttgctgttggccattggtatggtatagatttccaaacattgatactagcctttgaatcttggcaaaaatatatacctgcctatgtttatgaattttgaaatgcttgtcaggacaaatttttttttcccccaagatggagtctctgttgcccaggctggagtgcagtggcacaatctcggcttactgcagcctccacctcccgggttcaagtgattctca

SEQ ID NO: 192816 - DNA, 266 bp, Homo sapiens
gaacttgtggagtttctctaatgacatggcaaaaagctaagaaaacagcagaagatcaaattcttgccactttcaaaataaaagagctacctggctctcactggatgagagggactgaagacttgaatttctctcttttcccactaacccctctcctgtgttccttactaacatttccagttgcccagtggcattttctcttgagtgtgccactgctacattaagctcagtatgtcccagtcagaactcatcacctcttccacaca

SEQ ID NO: 192817 - DNA, 132 bp, Homo sapiens
aaatttattaatttttgtttatctgaaaatgtctattttgcatttatttttgaatgatagttttgtggatgtagaattgtgagttgaaaagtttttttgtttcttttagcattttaaagatgccattctgtt

SEQ ID NO: 192818 - DNA, 454 bp, Homo sapiens
cagcctcccgagtagccaggattacaggtgcgtgccaccacacccagctaatttttgtatttttagtagagatgaggtttcaccatattggccaggccggtctcgaactcctgacctcaggtgatccgcctacctcggcctcccaaagtgctgggattacagacatgagccaccgtgcccggccttttctagatttttataaaagtagaattacagaatattactctttgtgtctgtcttattttgctgaacatgtttttgagattcatccatgttgcaagtaattcattccttacattcattactgagtagtattccgtcagttggatatatcacaatttatctactcacctcttgatagatacttgggttgtctgtagatttttggctattacaaagacagaagttgaagttaacattgtttctcagcttggcttgttgaaaataatgtctt

SEQ ID NO: 192819 - DNA, 418 bp, Homo sapiens
gaatactaggagctcactgctgcacttcccaaagctgctggcccctggaagcccttgagctcgcaaactccctactccccttgtgctttcctcctgtgttggctagtggccatgatgtgaagtgctctttcgtgactgtcactaactcctgtggttggcaggcaggtgtctttcggcaccagggtgtgtaccatacccactgggctcccttctcaggctcagccttggccctgcccctgctgtccacgctggactcatccttcctgggaccatccccacatgcatggctgcagcccccatcgatgactcccacatccacatctcctggcccagtctctctcccgagctccagatctgtctctccaaatgcctcatagacagaaccacctggagtctcagaggcacctgaaattcagaa

SEQ ID NO: 192820 - DNA, 691 bp, Homo sapiens
gttaacttacaccagagtaaacatatttgaataaatttaataagtacatgaaaccatttaaggatatcatatccaaatctcagcttatcttcaagtttcaaggtgatataagtctgttccggaatccttacatcattcacaaaagtctacaaggaaacaaaaaaagatgttaggttacgtatgaggtattaattcttacatttcagataagcaaattctcaaatctgagagttaaaagcacatatcatacggtggctaatacagcctgagtattataagatgtgccatgcagcctgtaagctgataaatgattttatactaagccttttatctctcttactggtaacacacaaagaaccttacccctgctaaggaaattctgcatattataagtcatatataaatatttggattgagctttaccaataagcttgcaaataaagttgaggctaaaacttaaagaatttacatgcattcatccaatcatttattagaatcatttagctaccaactgttggtgagtactcaccacatgccaggctggatgctaggtgctggagatggtgtggtggacacagtgtggtccctgcctttggtcctgctcttgtatgtttctgtgcataaagtctcccactttcagaggaggcaatgggattcttcagcttctggctgctgtctgaggtttagactc

SEQ ID NO: 192821 - DNA, 316 bp, Homo sapiens
aagcacctgtcagcaggggtaccaatgctcagaaaatgtttatgtcatgaaaaagagcgggtgaattccaggagatctgtctgcagtggggaggattcctctgaccacatggaactgcatgtctggatggaggcctcaagattagagtgtgggtgctgtcaggttcacaccatggacaagtgcagcacaggccaggtgcaaagcagtaagacccagtggggtctgtgtcagccccaagaactcaaactttgtcaagaagaggcagcacttgtcagctctaggcaatgactgccacatgcgaatataggcccagtgt

SEQ ID NO: 192822 - DNA, 536 bp, Homo sapiens
ataactgttaacagcagaagagccatttttgtataaatgtgtacataccaggtattgacattcgtggacctctagtatgattatgagacttggagtatttcagacttctagacaaaggaaagaaaaggtatgtttccttatacttaaaaggtgttttagcttgtcttcatctgatagcatttttcgtatatatatgtgtgtgtgtgtgtatatatatatatatattaggctccacatcatgattccataatgttttctatttatagatgtaatcatagcatttcagttgtcaggaaacatattgagaaaaaattttgatagtcttacctgtaaaggtgaaaacatttcctccattgtcactgtattttttttgttttcgtttttttgagacagaatcttgccctgttccccaggctggaggacagtggtgcaatcacaactcactgcagcctcagcctcccaggctcaagcaatcctcacacctcagcctcctgagtagctgggactacgggcgtgtgccaccacgggtggctaat

SEQ ID NO: 192823 - DNA, 386 bp, Homo sapiens
cctatgagacgacttacagctttggcctagtgacaatctttctatagctcctcaacatagaaaccagtgatcctgccacttgtccatactcccagctgccaatggcctgagggtcaaaaagtgagcagtcactccttctgcaagtccctctccatcccatcccctgcatgggccattcactttgaaggccctctgcccacactccaccactaccatggagggacagcctcctcccttgcctgcactccagagggttatttactgattgcccaacaactctagaccagctctagtctaactaagctaacaaacttccgtgctatgtgctaggctgaaccacaccttctccaataagatctgaaccccttcccagcttatcctccctt

SEQ ID NO: 192824 - DNA, 678 bp, Homo sapiens
gcagtaaggacttcaactgaccttcctcagactgaggactgttcaagttactgagtagggcaaaaagttaaaacagtctttctgttttatagttattatgaatgtactggactctaaaagggacttgtgtgtataatgccacccagtacaaggaatgcatcccaggaagtgaccaacctgatgtgtgctataacccgttagaactacttgatctccgttggaaaacaggagagtatgtaactctaggaatcgatggaactggactggcaggaagacctgggttgtgaacatgacagtgagaactctcactagtgaatgaggttctcaaagggggaaatgaggagcgaggccatttctcttactgtctcctgtctctgaagagaaggaggaagtaaaaagttgaaaaacaacaggaatgaagtcagtggcaaggccagccagtgccactgatgaccaggcctgaggttaaaaggttaaccccccactctaaccacatctgctcttaatctatcacaaccgtttcatgtggaaccccttagagttgtaagcccttaaaagggccaggaactctggctttggcgagctcggttcttgagacatgagtctgccgaagctcccggctgttgagacgtgagtctgccgaggctcccggccaaataaagccaaatccttccttca

SEQ ID NO: 192825 - DNA, 183 bp, Homo sapiens
tttgttgacataattttcattgaaggtaacaaaagtactaagtgcatggaacatatcttttcatataatattggcttagcatgtagaatattaagtgacaatagtgctgctttgaaaacacttaaatgagctctgtatttgtgggatggaagtgaatttcctcgtgggataagttgtagtgat

SEQ ID NO: 192826 - DNA, 445 bp, Homo sapiens
actccctattacattggtcaatttcatttctctgtgccacctatgattttcctgatttatttattcacttttcattgtctgtcttccccactaaaataaaaacttcttgagaaggggcttcatcgatctgcctctgttctatcccaggccctcaaaacaaggaccagatattcaacaaatatttattgaatgcgtacatgaattaaaactctaattggttgtatgctggtggtttattattttcatggaggaaatgacttgtaggctgtgacactcagcttttgtctctgatgctttgttgccctgttctgtcaccgagggctgtcgtcattgctctggccattttgtgctctttgaatttctaatcatcacactcaacccagaaggcagccttacctttcagcactcttcagctgaatgagtgcaagttggaggcagggtcatt

SEQ ID NO: 192827 - DNA, 177 bp, Homo sapiens
caagactctgtctctaaaataaaataaaacaacaacaacaacaaaaacccctccaagctcctctggttagtgctgttaaatagtaaccaccgtctggggaactgcatgtcctgtcagataccccttagtggtctaagacagtagactacaaagaacatgtgttagtccagtgggctg

SEQ ID NO: 192828 - DNA, 232 bp, Homo sapiens
tgttgaagtaatgctgaagctcttacaagaaacgaccataccagccgggcacagtggttcatgcctgtgatcccagaacttcgggaggctgagacaggtggattatggattcttaatttactacagtttagtttatgttagttggttttattacttcccaggaaatgcaagaaccgtacatttagctctttacctccttcttgtcctttgccctattgatggtatattttct

SEQ ID NO: 192829 - DNA, 324 bp, Homo sapiens
atcctctgcttcagcctctggaaagacaggccattcacttcttagcatataccagctctgcacccaccttgtaacttaccctaagtcacttcaactctctggcttccatttcctcatcacgtggggatggaaagaatcccaaggtggtggtagacttagccaagtgcttgtctgatacctgatctgattatctcagaggtccttcaaactcaaactcaaacccaaacccggtggatggtccctccagtgtctcccatctcagcagacggcaacaccatcccctctatgcatacaggccagaaggctgggaggcatctttgccat

SEQ ID NO: 192830 - DNA, 210 bp, Homo sapiens
gtcagacgtaaagggggcggccattattcaccatccatttacacatctgtagctgtgtggtaatgcagaccaagtgttgtcacatcttccatgtcactccttttggagttaaatttccttcttcctggaagatgggttgttttaatttttttccatgagagtttgtgactggtaaattttctttatttgtttgaaatgtctttatttttg

SEQ ID NO: 192831 - DNA, 257 bp, Homo sapiens
atatgaactggtttcacaaatattaacacatctaatccccatgatactactactattattcactccatttaaaaatcaaatcagaaggccgggcgcagtggctcacgcctgtaatcccagcacttcgatagagggctgcgggacagaggaccattacaactagatcaaggagcccagaaaacctccagtagtggacaacaggttttcaccatagcctacgttaacccatttttgagccaagcttcaaccctcagcct

SEQ ID NO: 192832 - DNA, 522 bp, Homo sapiens
cccctttcttattgtacctgaagtttgtttctgttacttgcaaccaggagaaatccaactcatacagtcctgaaaagattagaaaagaagaatctaaacaggatacaaagctcaatgatgaaaatgactctgaaaggaaagtgagatgggttctgttaggttatggactcataaaatgaattggcagatgatcagagcatcaaattactcttaccaaatgctttagagaaggctatttagttgaatggtttataaaagtcagtaaatttatagtgctcctgaggtttaataatggctcagttgggtagagacctgagttagtgaaggcttggttatgggcagaccagtttcaagaccacaggtcacctaactccttacacccacaagtggccaacatatgctccaataatggggcagccagagagtatatacatgtgtttgcaaactgtctccactctggaatatgaactaagtcaatattcccctaataaagcactgaggtagcatcttatactgggcata

SEQ ID NO: 192833 - DNA, 494 bp, Homo sapiens
gacaagtgttttgtctaagagctggtttaaaggctaggataggctttcacctttattgcttcagcataaagttggttactgaatagactggcttgagattagaattatgcagttgtttgtaagatcaaagcactggtagtggtaaagataacgtgtatcttttagaaaattgcccaagctgattagaacaagtttaggagttgggtacattaggttcaagtgctgcaatctgtatgtactaaatagctttactttgtgtatgtgtacttataatgtgtaggaaattgaacgttcatatttctacacacaatctaaatgttttaagaaaagagattttagtaagatattttctcttatcttaatgtggaccaagcctcttatttttaatttatattttgttttacaacagacaggtccatcacatgtgcttgaactcttggacatctgaattttgcacactgtgtgcacacgtaagaatgcttatgggagaaaaa

SEQ ID NO: 192834 - DNA, 350 bp, Homo sapiens
tggaggctgtggggtagactcgatttccttgctttttccagcctcaatggctgctgcattcctggccttagctctgtatccctctggcctctgccgtggtagctgcgtggcctgctctgaccctgacctcctggaaggaccctgtgattacattggacccacctgtgtaatccagaatccttgcaaaacccccatctcaaaatctttcacctcttcacatgcacacagtggctttgccccgtggagccacatgctctcaggttccaggaatgagtctgtgggcatctctgggggccactgttcagcctgaatgtgttctgaggcttagtattttgtctctttgagttcta

SEQ ID NO: 192835 - DNA, 451 bp, Homo sapiens
catcacacctgccagtggtgttggtgttaaggcaatctaaaacaccgagatgtctagggatcctttccaattcttgaactttaagagtccctgggctccctcttcattcccctggatggaggaaattaaagtacagggtgctttgagtacaggagataagacacatgtacaaataattgcaacataaaaagggtagactcagtctccattgtcagaagaggaaattgggaaatataacttagggcagagattccctaaaaccaaacaaggataatactggtccttgatgaggttttcactgtttcagaatgagatgagaataaaaaggactatgaaatgtgtttttatactggcctttatacaatttttatttcctactatttgaagtgaaaatatccttttaaaaataaaaggtggtgaaagtagatggtagagtttttttgtttaatct

SEQ ID NO: 192836 - DNA, 492 bp, Homo sapiens
gccttcttggttgccctctcccagtgtggagcctccttcctacaaatgagctggggctccatgttcccagcctgccgggcctgagatatagcctctattctatgcttgggggcaggtggaagaaaggagcccctggcctgtctgccacactcagctggaatttagcctctgccatgtggagctgggagggttgagaagtgctgagaacctggccctcctgggcaaacaccctaacccttgacggggagctgggggagagggagcccttcttcttggccacacctgcccccagtgctaggcggggggagaggggtgctggaggtgggagggcaggagtgtcatggctcaggtgccaacaggcttgccattattcccaggccttggcaggttttcttgtgtaaacctttgtttgctgtgtgccctgggcaccatgcccagaggctttcagtgcttgcttttgaataatcgtcatcagttgtgctgtttcactgg

SEQ ID NO: 192837 - DNA, 579 bp, Homo sapiens
cagatgaaatttgttaagaaaaagtatccatagaattttaactttaatctgctttatgcagatttttggcttgaatctggggtaagaactgttagccctgttgtacagatgaggctgctggtgcctggcaagttcccgcagccagcaaacccttttatcttttttttttttttttctagacagagtctcgctctgtcgctcaggctggagtgcagtggcattgatcatagctcactgcagccgtcacactccggggcccagcggatttctccgtgtctcagcctccccgagttagctggaactacgggctcagtgccaccagtgctcagccaatttaaaaaattatttagagatgtggtctcacttggttccccaggcgtgttcttgatctccagggctcaagcgatccttctgcccgggccccccaaagtgcggggataagggcatgagtcaccacccaaagccttcacttccaattttaatgtcaaataatttatcttttggagagggagtctccctctgtagcccagtctagagtgcgggggcccaatctcagctcactgagggtcccgagctcga

SEQ ID NO: 192838 - DNA, 125 bp, Homo sapiens
tggagctctgagaagactgggacaacatgcaagtggcaagctgaaggaaatatattacccacattaagggaattgcagaggagggtctcaaagcagaaaagtaccttgccccctctagcattgca

SEQ ID NO: 192839 - DNA, 514 bp, Homo sapiens
aatctactttctgtccttatggatttgcctgttctggacatttcatataaatagaatcatacagtgtgtggccttttgtgactggcttctttcatttagccttatcttttcaaggtccgttcatattgtagcatgaatccattggtccttttatgacggagtaatagtgtattatttggatatgccacattatgtttatttattagcagttgatggatgttaggtttgtttccatttttggccattgcaaatgatgctgctatgagcatttgtatgttaatttttgtgtgaacttatgttttcatttttgttggatatatagccaaaagtggaacctgagttatatggtaactatgtttgactttttgagaaactaacaaattgttctccacagttgttgcaccatttgacgtttccatcggcagtgtataggttctaatttccccacattcttgcttaacacttcttgtccatttttttttaaatcttagttgttctggtgggtgtgaagtgg

SEQ ID NO: 192840 - DNA, 605 bp, Homo sapiens
tagttgagattacaggcgcccaccaccacgccaggctaatgtttgtatttttagtagagagagggtttcatcatgttggccaggctggtctcaaactcctgacctcaggtgatccgcccacctcggcctcccaaagtgctgagattacaggcgtgagccactgtgcctggcctggtctcaacatattctaaaccaaatttgctgtcttcccctaagccagcatctcctctggcttgcgtggaatcttttgaaagcaccatctctttctcaaggaaaacttaacgtgtctgggtgaatttctccttcctcctgctttgtcccactgcctgctggagtctggttgtctgtgtcctttttctgctaccgcccagacccaattcctcaccttcttgcaactggactattgagagaggctcccaacatgggccatgacccgcctctcccagcctctttccagctcatgcctgcaggggatggacctccctggagccactctcttcctctgccaccttctgtgacttcccactgcctccttgatgctgctccaactcctcactctcaagccttccaggccccatagtgtgatcttgggcttcctttccagc

SEQ ID NO: 192841 - DNA, 463 bp, Homo sapiens
taaagacgaccttgaggagtatagaagatcagccttctgcctttaaccctttccatgtgtataaggcgtttagtgaaaacatgctagatcagtcagccatcacaaaatggaactggaattgggcaaagttgctgccaaattatctgagactggataagatgaccttcagtgtgctgctcaaaaacaggtgggaaatgaagaaggatgaaacactagaagaggaagaaaaagcaatactggagcacttaaaacaaatttgcaccccacagaactcttctgcctcagataacatagaggaacagtaatctgcagaaaacagcaacagctttattttaggaaacaatcccatgtaatggagtaggattttttaccatagtcagaatgaacctcatatgtgctgtgaagcatgaaaccaatgactgagtaatctctgtactgaaaaggaatacagcacataaaggat

SEQ ID NO: 192842 - DNA, 354 bp, Homo sapiens
ttgtcttacctttgaagtttccttaagttactctgaatagcatctccctctgccacgtttcctgtctctcgcataatgagatactttctaattagcatatcacaaatattcctgattttctttacaagtcccgatacatttttaagtgtttcttttaaagcatatcaggatttttcacactctataaagaggtaggggaattcaagcaatgtgtcaactcaattctccaattttttcttctttttcttcttttttttttttttttgttttttgttttttgtttgttttgttttgttttaagccagctggcagcatggaatagtgggaaggtcacagcactgaaagccagaagtc

SEQ ID NO: 192843 - DNA, 407 bp, Homo sapiens
attagacgggtgtggtggcgcatgcctgtcgtcccagctactcaggaggtggaggcaggagaatcacttgaaccttggaggcggaggctgcagtgagccgggagtgcgccacggcacttcagcctgggcgacagagcgagactctgtctcaaaagagaaaagtgtaagtgagattgtggtgcatgttctgttttttagccctttattcattacgtgaacatctttgcatcacattaacctaccttacttttcatgactaaaaaatatttcattcactgaatgttccaccacgtattaaaccaaaaacctcatttttggacctttagctttaattctttgctgtgcaaacatttggcttcaatattggggtatatttgtaattatttatttaacagcttcttttaaaa

SEQ ID NO: 192844 - DNA, 320 bp, Homo sapiens
cttttatgaatgaggaaactgaggcataactttaccaaaatgacaaagctatgtctaagaaattgggtatcaaactcagctttaaccccaaactccttaaaaaaaaaaaaaactgctttgtaatcctatcatcaatttggtatcttcagtgtctctactggcacttttccctcagaatacagtatgaacattctcaagcccttttagtagtaaagaaatcctcccacaattttacatcagatctttattttttgcttacagtgaggttatttgaaagttagtgttctgtactcagtctccaatttctcagcttccatttt

SEQ ID NO: 192845 - DNA, 356 bp, Homo sapiens
acagtagcaaaattagtacaataaatgctgtgtatccacctaaaaaaaatctaaaatgttctctaaaaaaaggtgaaagttttagaattatggtattcctacccaagaacagttctagtgtcaatgaagagattcataaggcctatgtttattactgaaaatgtatccagaggaaaactggtttcctttaaggtttttatgagaacttaatttgatttaaaaatgtctatattcaaacaatacccttttaaggcccatctaaactccaaagagttagaaaaatcaccatggaatgtttaatttttagtgcagttttctgccactatcggaactggacatctagtatgtagatgatg

SEQ ID NO: 192846 - DNA, 248 bp, Homo sapiens
gagacttgaactttaatagtctgtccagcttgacaaccctgtatatgaataaaacaaaatataaaggttctaagaaaaaatgaggctataattccatttcaatgtaggccttgtgagaatacagaattaatttaaaagcagtgaagcactgctcctttccttcgtctaaatcaggggttggcaaattatggcctctggctacatccggcccatccctgtttttgtaaataaagttccgttgaagccgt

SEQ ID NO: 192847 - DNA, 536 bp, Homo sapiens
caatattgtatttgattcaatatttatgagacaggttctcgctctgccactcaggctgaagtgcagtagcatgaccacagctcactgcagcctcaaactcccaggcccaagcaatcctcctgcctcagagacagggtatcgatatgttgccagggctggtgaactcctgggctcaagcaatccccccagcttggcctcccgagtagctgggattacaggcatgcaccaccatgcccagctaatttttgtgtttttagtagagacggggtttcaccacattggccaggatggtcttgatctcctgacctcatgatccgcccacctcggcctcccaaagtgctgggattacaggcgtgagccaccacacctggccaataaaaattatttttaaggaatttgcacacagaccatcaaagacctactcattgcttatctgacagaataaaaaacagtatcttgtttaatttttgtgtattctgtgaagttaagaagttttcgatgttcaccagttatttgtgggtgtatgaattatctgt

SEQ ID NO: 192848 - DNA, 202 bp, Homo sapiens
tcgagctcggtcccaatgttaaagctgtgaaaaatgatgaaaacctgaactagacactaacagagggtgaggaactaagtagaaagttacaatccatttttagaatggagtattgacaggactttatgactaaataggtgtaggtggtgtgagaggaggaggaatcaagaataactcccaatttttaacttgaacaaataca

SEQ ID NO: 192849 - DNA, 388 bp, Homo sapiens
cgagtttgatgcctcttcctttaccctccttcatgtccttggtaaccaagataactagaagattggattgtgaaatcaaattcatatgaattaaatatcactctgtatcaaactttattattaacttcaaggatacaattaaaaacaaactcaggtaaacaagaagtgcaggaccactgcccacagatttcctcaggttctatcttgctgcattaggatttgctctaaaccagattaacatgtggtctctaagtcatgtaagtagctccatcacttaggtcaaaaaacttgtttcacttatgagacatctaatttatactcagatagttatgtaacttgcattactctttatagtgatctatgccccctaaattcacgtttccaggtt

SEQ ID NO: 192850 - DNA, 464 bp, Homo sapiens
tgcataacaaaccaccccaaaacttagtggcgaaaagcaacaatgttctttttatttctcacttttctgtggattggtagggtggttattctgagctgggtagtccaggatggcctcactagggcctaagctgggatagctaggcctctctctacttggtgtttcttccgtcaggaggagagcttagtcttcttcacttggtggactcaaggatctaagaaggtaagagctgaagctgcaatgcttcttgaggcctaggttcagaaatcacatgtcattttttgctatattctattggtcaaaacaaatgacaaaggccaacctgaatacaaagggtgaaaaatcagaccacctcttgatgggaggagctatgaagaatctgtggccatttttaaactaccaattacctatctactattgtctctcacagtggaatataagattcctaacagcaaggtctttgg

SEQ ID NO: 192851 - DNA, 231 bp, Homo sapiens
tttcaaactttctaaccaattacaatcacaaagaactcaggacaacaatcagtgagcaaaatgaaactgctggagtgaagcagccctcggcaggtttcactcttgtagctctgctacgcaatgtgcagctgggactctgcttcaataagtaaataaaaatacattataaaatacaaacatacacaatggatcccacttgctgtcttgttcccagtaaaggggtatgtagga

SEQ ID NO: 192852 - DNA, 346 bp, Homo sapiens
ataaattaagctacacatcgtagaaaaataaataatcactccaaaagatcccacctccacagggaggcttgaaaagatgctattacaccacagcccacagatgaaagtgtgaactcaaaagtatctgagacaggtctccatccatttagaaagtttattttgccgtgtgggttcactttcacactgctataaagaaatagccgagactgggtagtttacaaaggaaaatggttgaactgactcacagttccatatggcaggggaggcctcaggaaacttaaaatcatggcggaaggcaagagggaagcaggcaccttcttcacaaggcagcaggacagcgagtgtg

SEQ ID NO: 192853 - DNA, 288 bp, Homo sapiens
ctttcattattttgaagatgttgcttcactacctcctcacttgcattatttctaacaataaatttactggtatctttatctctgctcctctgtatataacatattcttcttttttctttttatcgctatgtattagtctgttttgtgttactatgaaggtatacctgagactgggcaatgtataaagaacagagtttgactcatggttctgcagacggtacaagcatggcaccaacatctgtttggcttctgatcaggacctcaggaggctttactcatggcggaagg

SEQ ID NO: 192854 - DNA, 620 bp, Homo sapiens
tcactctgggttagtttttcttaccctaaaatttcacatacatcgaatcatacaatatatactcatttttgtatgtcagttagcataatgtttttgagattcatccatggtgttgcatgtataatttctttttattgcaaagtggtattctgttgaatggatataccttaatttgtttatctgatcacccattggtggatatttgggttatcccagtatttaactattaagaataaagctattatgagcattttgagtaaatgtcttcgtggacacacagtcatttctctttggtaaatacctaggtgtgatattgctgagtcacatatatgttaagtgtatactttaggagaaactaccaaactgtttttccaaaacattttgaccattttatgcctccactagcagcacatgagagctttggttgctgcctgcccatcctccctgatacttggtattggcggcctttctaactttctagctattctcagatggtaggttgtggttttatttgaaatttcccactaagaatggtggacatcttttcatatacctactggaaatttggatatcttggtttgtgaagtgtctgttcaagtcttttgcctagattatcagat

SEQ ID NO: 192855 - DNA, 554 bp, Homo sapiens
ataggcaaattatatgaaacgtccagagacagaaaatagattcgtggttgcctagggaatgattactacaaggtttctttctgggatgatgaaaatgttccaaaattaaattacagtaatggttatacactctgtaaatatgaaaaaaaaatcactcactgaattgtatgctttaaatgagtgaacttcgcagtatgaaattatatctcaataaagttacttttaaaaagtaaagaggtctacttattttcaaaaagctaaaacattctaccaaaagagaaattcagcccaccaggcagccttcaaatcttacttttggtttgtttaaacaaaggaaagattcaaccacagcattaatgtcgttcccaagaaagcacaagcggccaggtgcagtggctcacgcctataatcccaacactttgggaggccgaagcgggtggatcctaaggtcaggatctggccttagactggcctggcctacatagtgaaacctcatctctactataaaaatacaaaaattagccgggtatggtggcccgtgcctgtagtcccag

SEQ ID NO: 192856 - DNA, 234 bp, Homo sapiens
gagactaagttaggtcaaggcagagaagggatgcattggttcagcagtgcaggggatgctggcaacctggaaaagaggaccttcagtggagtggcaagggcagagtcaggtgcagagtaaagggcagaattagcagaataaactctgagagaagtggaagtaaaacaatagcagaaataaggtcaaaccatatttgcaaatatttttactcttgagctgtaatttttttttttt

SEQ ID NO: 192857 - DNA, 466 bp, Homo sapiens
cacactcctatatgatcagtgacagataaagacagcattacgaggctctacaaatgaggttcactgtctcagtgacctcctaaggccagaaacaggacgagagacaagtacaagtcacaaaaatgtttgtttcacaggctgagctcccatgcgtgaaaaggatcctgcagttctttctaagcctttactgcaaaccacagcacaattcaaagtgttgcagaactttgagaaatacaagcatttctagaaagcaacactggaacaagcatgcctgtaagagcagggtgcctcctgccaaacatttgacaaacccagcttgctcactgttggcaaaaggcgccctgcccagcactacctgcccattcgtggccagatggtcaagaaacccgttttccccattctccaattgttacacaagaccatgtgaaaacattactgatctataggagtggtgggggatcctcta

SEQ ID NO: 192858 - DNA, 343 bp, Homo sapiens
attgtgctggagaggaggactgatgcttagacccagtggatctaaatctctgaagaaagggcctggaaatccttgttttcaagctcccaggtatttctgtacacagctgggaccagggaaagaactcaagccctcatctagataatgccttcatcacagggccgcaccaccccctgcctgactctatggtgtcaccagcccttctggtagaaggtcctccctggcacggagctgcatctgtctccattagcatttaaccctgggtcctggttctctttccagcagccaagagaatgaagctttacacttggcctggaattcctgtctgtgtgactttttgatg

SEQ ID NO: 192859 - DNA, 432 bp, Homo sapiens
aaagggatggtgcctgaccattcatgaaggatgcaccccctaatcacctccctccaggccccacctccaacactggggaccacagttgaacatgtgaggacagagatccaaaccatatcatgccctaaatttcattcagttatttactcattcaatatggatacatgccaactatgggccaagtgctatagcagtgtactacaggctagtgatttctaccaatggtgaagtgagcacatcaatttctgaacttttcaaaggacttctcattcttgattataaaaattttaaaactcactgattattaagttcacagtattcagaagcaaatggatttggggaaaagtattaatgcaccttgctactattcaccattcatcctccctatggctcccatacatttccacaaagccacagagaaatttgcagttg

SEQ ID NO: 192860 - DNA, 374 bp, Homo sapiens
gaagtagcactatccgtagaaaataatgttctaggcaagagtccattaatagtctcgggagataaacagttttaactgccaagagggagaactcacctggagaatttaatgaatttgtaaggactaccatacagttagctagtaataattttatgtgattcatacaattgtgcaccattctgagatcagtgtacttcgtgttcttaacactatctgtaccattagagagcatcagaaaagcttaaaacccatagtcaaggcattcttaaaatagggtctgtgatcataaaaattctttctctcgaagtacttgcaaatgaactggaaaggtgtgtgcccccaaaataaaactaactgtggattaatattaaact

SEQ ID NO: 192861 - DNA, 590 bp, Homo sapiens
ggctcctggatctttgagcatcacctggggacttttcagatatgtaaagtattaggccccacactggaccttctgaatcagaaactctgggaatgcgacccagcaatatgtacttttaaaacccttccagattattctaatgcacattaaagtttgagagccactgctataagggataagagaacttagagagatggtctttactctttaagagattaccatctattttcccttgcccacctgtcagtgtctgaattcaaactggaatttctgatagctaagagctgacagcagtataatgattttgttttaccatgtctgctagattcagaaatgcctcctgcagctctctgtgggattcttttctttttattattttaatgagagtcaatcactcatttataaaacctcttacagaaattaaagtatgtttcagatgacagttacacttttttatttctccaggggtctgatttgcaaagaattcttatggaactggattgtttgtttatgtaggcagtcatttgccatgtggtgatcttgaaaacagactaaataaatggtttgaatggtgatgtcatggatagtgg

SEQ ID NO: 192862 - DNA, 469 bp, Homo sapiens
ctgggatctgctctcaaaattctactttataactgaatataaaaagtttatggctggcatatgtatactatacatgagtcaacacgtgggttagatgtaggccactgataggtacctaagttacaaaataattctttaatgagtaaaactactggagaggtgaacacttttacagtgtctctggctttaaaaaataagattggcatgatagctaaagcaggggttctaattgcataacttaattaacaccgagacttactctgaaaaggatctgcaaaatgttactactatggagatcctatgcgaagcctcttacatgagaaagatcggccaagaaagtagcgtccactctattaaaattttttttagccactaaagattcctattaggtaaagtaaggagaacaaacattttagcaggatgtgcagaacaaagcccctcccatcccacaatgattgatgccccatca

SEQ ID NO: 192863 - DNA, 938 bp, Homo sapiens
tttgaggctatgcaaataaagactctaccaagggtcatctgcaggaggaccagtgattgttacagggcactggaataacagcaagttgagtactgcttctgtcctccagcttcttccagttaccaagtagcctgaagctaggaaacgcacatgacccaaagcaaagaacactaaggagggagcgaagactcagatagggctggtttccatcctgttgacattgctgttccttgagatattgtaagtcccagacatgaaaaatcagtcttgagggaaggtcagacataaatgtatatctcattcatatgacagaagctgggcatgattgggtggcaccgctggaatttcaaaaatgtcacttagatggattaaccttgaatgctgcagggattaagcaacaaggttgatagtccaggtatttggtcctggatgccaggtagtgggtgtaggggagagagtcaagaagtcaactgaagctagagtgagtagtggaaatgagaaggaagcctaagagactgttagctcagtgctcccctcctgcaggccctgcctgcatgggtcagacctccgtgagcattcttttctctgcataggcccgatgtggtgtaggaaggtagctgggtctccgttcccggttagcctcggggaagtcaggcttgccaagtccgttgtcagttgccctcaggtccggcgcaggctgcccacaagtgacgtgggtatactggccttgctcctcctgctccgtctcaccggtggtagaagtagttgaagttggagacgatgacgggcacaggcagggcaatggtgaggaccccagcgatggcacacagcgagcccacgatctttccccccacagtcatggggtacatgtccccgtaacactaccgtggtcatgtgtaaccacagcccacagaatccttgccgggatgctgggaaaa

SEQ ID NO: 192864 - DNA, 208 bp, Homo sapiens
agcacctcctctaactctagaatttattctgttctagaactccacactttccaatttcacaatcttctcaaagatttttcatttctgctcctatcattacctcccaaacaaatgaccatgcaaaaacctactgtaaaatacaacaatcttcttaccagcctctttcctccagagctgaatgctggagagtaacaaaatttaagaggta

SEQ ID NO: 192865 - DNA, 526 bp, Homo sapiens
agtcttccaggaaaaaaattgtaatttaatgtattctaattcatggagaaaattttgaatagagtaaaaaggacctggaaatggagaagagtgctaaggagaatggtataaattcagtaagctgtgtcctccaaatagcacttagcacatcgttgattgaataacagtgacagaactgctagtatactgaggagataatgtgctaggtgtttgggaatcacctatttcaaggttcaggccttgattttattgtaaaatatttcatgtggtcgtgggatagcaaatacattcctttttttatgacaactctagcacctagagatacatgggtaagagtttcgtagttgattagcaaatatcagctataggtagagagttggaatttactgtttctgccttttgttgaagtgttaatactaagttttttctgaagccagtgttttctcaaaggattgtctttccttttcagatacagtaatttctgagtttttctgaatttttgctctttaacttctactcgtgttta

SEQ ID NO: 192866 - DNA, 468 bp, Homo sapiens
attcctcctttatgctctaaactgcaccgtaactgctataaagtaagactgtgacatttttgggtttgaggtctcccagtccatgaactctcctcttgtatgtatgagaaacacttaaaattctaacttgatctaattttatgtttgacaaaacatggggggaaaaatttacaaagctatacccttaggagttcatcataattaattatgcctcaataaaaataaaggaagaaagaaaacagaacaagtggaaaatcccagtccattatcccaattaagccccaggtttgcattttatctagccctcacgaagtactccactatcatgaggtcagagctcatcatcagaaatccccctcggagtgctgtagtgtctgtcctattcaaggcagcgttaggtctgaccacagtattttcagaacatacaactaatccatcaatttcttaagccttttaaaattcactgaa

SEQ ID NO: 192867 - DNA, 236 bp, Homo sapiens
aacaaaggcatcacgggcaaactaatgtggtcagtttaaggatggagctcatttcaaaatgccaaatatagattcacctgccaaacttgagaatttggccttaactttgtaagattaatacaataaacaaacttgactgctgttagcaaaagccagcctccaaagcagactgtataaccactgacagtattttttcacaacagaagttttatattgcatttaatcagcactctgcc

SEQ ID NO: 192868 - DNA, 287 bp, Homo sapiens
gccatgttgttaaacaacaataataaaatatgcatatgtatatatgtgtgtgcatgcatacatatgtctgtgtacatatgtatatatatacacacacatacttacagttttaaatactagaatcacacagtgaggaaataaattcaggctatgcaaaatgcattgaactaaaatagcctgggggaacagttgatttgtgttttgtcatctccaactcactctggggaatgtcttcaccaggtggaatggcagatacaggctcttcctctctccggcttccctcatgc

SEQ ID NO: 192869 - DNA, 499 bp, Homo sapiens
ttcttgaagatgtacaagccagtctccctgaacgatagttttccatttaaaaaatgaaataaacgtagtggagagcagaggaaggcatacaataaagagagagcccacacctaatgccactaatccaaggggcagggacccacacctcaaggcctcacccctgaggttctgaagtagtgtgtgtgggtgcagcccagatatcaggaatttaaacatctctgcagaacattctaatgtgtatccagggttgagaaccacagctcaagagccttgttactcacagtgtgtaccaagggccagaagcattaacctcatctaggagcttgtcagaaacagattctcagtccacccatcttactgaatgagaatcccattccctgctcctcatcccatccctatctgcacccccaccccaacctcaagtgttattttcctttctggggaaaaattctcatcagaaacgaaagcagatcataggaaaggagcaggggaccacagg

SEQ ID NO: 192870 - DNA, 203 bp, Homo sapiens
atgttgcaataaaatccctatacataatcttttttattttttgaaacggagtctcactgtgtcactcagactggagtgcagagcgaaactccgttcctccacccccgagcaaaaaaaaggtataaaatggctcacatgtccatcgacaaatcaatgggaaaacaaactctggtacataaatataatggaatattattcagcca

SEQ ID NO: 192871 - DNA, 119 bp, Homo sapiens
tagcaagaaacttgttaccagactatataaaagacacagcgtaataagacatgaccttgcagagccttggagccaatctgtgatgtttttccttcctataacccttgccaattatctgc

SEQ ID NO: 192872 - DNA, 488 bp, Homo sapiens
tatattcttttcttctgtaagccaagactcattaaattttcaaattcctaaataagttaaacaactgtccttttttaacagtaaagagtgatacagaaataaactggaaaaacaacccatatttaatctttctcattcatatttttgtcctatagacagtttgtctctgatagacaagaatagtggcagaatcagtagaattttctgaggcatagcatataaatataagaaatgcagaactcaaagtcattcattagggatctgtttttacatatttattcattatttaaatggcatatgaaaatattttcccttgatcttttacagtttgattgattagagtgccataagcacatatcacgttttaaatgatgggcttgagaccacctgtacagctaagaatggcaaagatagaagcacagtcaaggtctttgaggaatatttgattgattctatcattttatactaattattctggatccttgaga

SEQ ID NO: 192873 - DNA, 573 bp, Homo sapiens
ccactcaacttgctggaattaccagcggaagccactgtgcccagcccagactcccttttacctagtatatcatgtctaatttctaacaaaaaattaaaaaaacattgtaagaggaaaaaaagaaaccctaaaacaaacaagcaaacaaaaaacccaaaacaacaaaaagtttcaagaaacagagctagctgacagaactatattcagatatggcaggtatattagaattatcagattggtaattttaaacaactatgactaatatggtaagagtgataatggaaaaaatagacaatttgcaagaacagatcagtaatataagcagagaaatggaaagtctaagaaagaatcaaataaaaattctagaggtcaagaaactaacaaaaatgaagcatggtgttgaagcctcattagcagactggatgtgggtgaggaaagaatctggagcttcagtatatttcaagagaaacttccaaaaatgaaagcaaagggaaaaagactgaataaaaaaggaacagaatatccaagaacagtgggacaactataaaagatgtaagtatgcatagtggaacc

SEQ ID NO: 192874 - DNA, 602 bp, Homo sapiens
aactttatcttgtctcagtgatgccaaaaaccagttatcatctgattctaaagctttaataaccttaatatagactaagttatgtgccccaaagtgaatgtttctctgagtccctatttttgagactctcttgctatctctatcaaccaagaagtctcaaatacaggcagctccaccaaagctgtgttcaatagaaaatgtttaacaaacgaattctttctacccacatttcctgaaagcaaaagattgagaggtaaaactacaatcacaggacctacattatttgcctataaaattagttgaagtttgttttttaaaggtacaattatttgttggcaaggcttcagtgaactagatattctcatacattgccaaatggagagaatacaaattgtaacagcctttctgacaagcaatttggcaataaatatcaagtctttatgttcataactctttaacccatcatttttatggctcatgactaagtacactgatgaggaataaagaaaagtttcatatagaaagatatcacaactgaaatatccagcaatagaaaaatgtttaaaatattatggtaaattcataaactggaatataatata

SEQ ID NO: 192875 - DNA, 179 bp, Homo sapiens
acatacaggttctctagggaacagaaagctttcaggaaaatggaaattcacatgtgcattaatgactttataattaaaatgaaggtcaggcctttcctctttaacactcatcttccctgcactgagatttgcagacctctggagaaccctaaccttgtttcctgcagcctccttagaac

SEQ ID NO: 192876 - DNA, 421 bp, Homo sapiens
ctcgctgaaatttatctccttcccagaggtccctgcactttgggatgccctccgtctgagccaacatacaaccccattctacttcccttctaagaacattgctgtctcaggataaaacattctctgatctagaatctgatgtattaaccgtccatttgccgttcccctcccatcttttttctaatcttgtatggtcacccctatgaaagaaagcccttgtcatcacctgatgtaaggacttcgagactcgggtgatccgcccatctcggcctcccaaagtgctgggattacaggcgtgagccacggctcccggcttgagttagatcttttaaaagtaggaattcagggactacagccacctcagtcgaattgcctaccacttaactattttcactccctacacaaaactgatcttcccctg

SEQ ID NO: 192877 - DNA, 252 bp, Homo sapiens
gtgtgttccctttgtttgagccccatggtacgggtcaaatggggcaggaagtgttagtaggaggacgggcagagtggccatctggccacagatggcggtttctgtgcaaaacacatcaaggcagccttggaaatgtgagtgaaagcaccttcaaagttctggtcacagccttgggactaagcaaagccaccaaaagtacataaaagacaatgaccatcacccagtgccggtgatgctagaaggaaagggaat

SEQ ID NO: 192878 - DNA, 729 bp, Homo sapiens
tacagtaagcatctgctacaacttaaaaacaagcaaaaataaatgttacagtgttagaagtcaagacaactagttactttttttttaaggtaatgcttggaagggggaacagggtgggcttggacagctggtaacattatttcttgacccaggtgtttacataggtctgttccatttgtgaaagtccatcgtgcattaaactgaagattagtgcactttgtatgttatacttcaataaaaaatttagagtatgttataaatttagtcgaatgaatgaaaataatgatgttctacagtattcatttagtgaattgaaagctattactcagcaccttttacttgccagaccccgtagcaaagtatataaagagaacagctcagccagagctcctcttgtggaaacaatctacttaaactcccttaagccttaaagttacgaggatgtaaaacagtctgggagaagaggctgctaaggtaatatcttgaatattacatgccaggcaaggttccccgttagaggcattatctacgcaaactgtcagtattttgcaatgagaaaagtgagccccagagattacatgatttgccacagcgaatacgtgcccaagtccacctgctgccagggctcatctgccctccactgtgccaccctgacagcagtgcttgcacagtgacccaacagctgtaatagcagacctgggaacctctgatctctaacagtcccctgca

SEQ ID NO: 192879 - DNA, 322 bp, Homo sapiens
tacagtaagcatctgctacaacttaaaaacaagcaaaaataaatgttacagtgttagaagtcaagacaactagttactttttttttaaggtaatgcttggaagggggaacagggtgggcttggacagctggtaacattatttcttgacccaggtgtttacataggtctgttccatttgtgaaagtccatcgtgcattaaactgaagattagtgcactttgtatgttatacttcaataaaaaatttagagtatgttataaatttagtcgaatgaatgaaaataatgatgttctacagggatctggcctctgccggataagccc

SEQ ID NO: 192880 - DNA, 557 bp, Homo sapiens
ttcatagacaggctttgtctgtgaaagccctgcagtagggtgtggtgctagagtgcatcagaagcccaggacagttgcagccagcatggcatcgccagagcctggggcccactgtggcaggtgaagcactggagtgggcaagaagcctgaggcagatgcaagtggaaagacactaaggtgctctaacagctggatgcagctgaagccagtgcagtgctgccagaagcctagggcccactacagcaggtatggcactggggcagaccaaagcctgggacagctgtggccagcatggcacttccagaatctcagggcaactgtggccataagagtggtgccagaagcctgaggtccacaacagcaagcacagtactgggacagctgaagccaagggccactaatgctgcctgctgctgagggtgacctgaagcccaagacaactgataccaacccagtggcgatacataccagagatcgagtttgccatacgagcctgaagcctggggctttatggtccctcctggcaccagggcaagtttagaggctcagtcaccagt

SEQ ID NO: 192881 - DNA, 194 bp, Homo sapiens
ccctatgaggcataattataacaagctccatctgcctacgacaaacagacctaaaatcgctcattgcatactcttcaatcagccacatagccctcgtagtaacagccctgtctaatcccaaagcccaggatcttcaccactctattaactggcatcatctcctctaatctttacgccaattcctagcagcaccc

SEQ ID NO: 192882 - DNA, 203 bp, Homo sapiens
gaaaaaaggaattagagaataaaacacagaggggacaaacagaaaagaaataataaaacagtagacctaaacccaatgtgtcaataattaaatgtataaagccagctgtgcgtggtggctcatgcctataatcccagctctgtgggaggccgaggccgacggatcacaaggtcaggagatcgagaccatcctggctaacacag

SEQ ID NO: 192883 - DNA, 392 bp, Homo sapiens
ggaaaagtctggcaatttctctaaagtaaacatgtacctactctatgactgagcaatgccacttctaggaatccacctgagagaaatgaaaggatgtgtgtccatatttagacttagatgcaaacttcataacagccttattcataaatcaaaatagaaacaacccaaatattcatcaacagaggatgggataaaccagttgtgggacatggagacagctgtgcaatggaatctattcagtactcaaaagaaacaaacccggctgggcgtggtggctcatgccagtaatcatagcactttgggaggccgaagtggggggaccatttgagcccaggagttcgagaccagccttgacaacatggtgaaatcccatctccacaaaaaatacaaaa

SEQ ID NO: 192884 - DNA, 298 bp, Homo sapiens
aatgccatcacatcactggaagactgtccttgtgcagtgaggccacctgtgggcagagccacaggaccagctgagtcatgagtccagatgggatcagtctgaaaaacatctaaaaaaaaaaaactccccagtcttaggttctacaacagtgatacctatagaagcaattggggaagttataaatcttgggacctctggccacatgactcctgagcagtaagaaattatagaaactatgcctacattttagcagaacttgggcctctcccataatcctaatcttgtggcctttcattag

SEQ ID NO: 192885 - DNA, 437 bp, Homo sapiens
ctgaggttttgggtcccaaccagtgagagggaggagcaggtcttggggagaacgggggctcagtcttgatgtgttaagcccccaggagacgtcatggtttcaggggatttgacagtttggagctcagggagaggctagggctggtggtgtccacgagtctccagctccctgatggtgtttaaagctgagaggctgcatggcgtcactgacggagtgggcttcatggagaagcggaccagggtctaggcttggaccaccaccatttccccctgcggaaatccagagacctccagcattcgctaaatctgacggtgggagacagaccccagggagagaggctcagagggtggatgctgcacaggccttcctgaggagagccaggtgccggagcaaggagacaaattggacccagcctgtggtctccaggatgccatcgt

SEQ ID NO: 192886 - DNA, 399 bp, Homo sapiens
caggctggcagtacataagttacagatatgctctgaataaggtttgctttctctatttgggttattctgctcagcttctctttctgaggtcttttagcatccagcatatctataaaggaaggtggggtcctaaagggctctaggaaggggcaataaattgaaaagcattgtggagtcagagggaaaaaaaggttgtagaaaaaaggaacatttcctctagagtatgaaaaatgattttgtggtgcagctgataatgtgctcgcagggacaatttttttgttttttttttttccagacagagtctcgctctgtggcccaggctggagtacgggggcatgatctcagctcactgcaacctccgtatcctaggctcaagcaattctcctgcctcagccttcc

SEQ ID NO: 192887 - DNA, 539 bp, Homo sapiens
caactttgagaaattgctcaaagccttataattttttcttcagaaaaatgctaatgagcacattttggagacatgattacatatataatgttatcagaggcactcaggagcctctccaaggatttcaggttaagattcctattctaacctaattcaaaaccagccttccacattggggtgtccagctccttctgttgcagggccctggtgatcctggaagtagttggttaactagggatggtaggtccctgatggaatagcatcaaggagaggaagggcatggagcatagagaaaatggaattgggccataatctttgcatttcccactgaagcttatatatctgcagtcttcactttaatcaaaatagcttaatttaggaaagaaagagcccactgtttttgctttataaaatcctgattttattgcttcctgaaaatttttttaaaggagaaatacaaaccatatgttacaagggccttcatttgacagtttaactggggtcatgctaggactgtatagatattgctgattatgata

SEQ ID NO: 192888 - DNA, 378 bp, Homo sapiens
gagttctaggtgaaaggtcgcaggagcagctccagagtttaaagagttttcacttgttcctgacgctcaattctagagtaataatggagtgtttaaaaaatgatttccaaattagaaactaaaccgatcttaaaacatgggtatctttgggggatttttttttcaccttaaaaaattgtgttaaaatacgtacaaaatctgccatcttaaccgttttttaagtgtacacttcagtagtgttaagtagattcatatcgttgtgcagtcaatctccagaacttttttcatctgcaagctgaaactctatccatgaaacaactcctcttccccacctccgctcgtacattggcaaccaccattctactttctggtttatgt

SEQ ID NO: 192889 - DNA, 471 bp, Homo sapiens
cccaggagctccaggctgccgtgtgtaacagtcgtgcctgtgaatagccactgcattccagcctgggcaatgccagcaagaccccatctctaaaaaacaaaaacaatgtttgctgaaagaatgtttgcttgtcggagagatacagtaactacttgttctaactttggagaaaggacacttcgggtttcatgtcaggaaggagtgagtcagactgtggtctggaagggaacccaaaagcaggagttgaagaaaatgtgttggccaggaagccgcggcctggagatactcctctgctacttgtgggtgttgtgaactcagctgggagcctcgggtctcacatctgtgaagtgggtatcaaagcgttgtgaggctaacatgagattttgtgtgagccttctgtaaactgtaaagtaaggtgcccacccaagaaattttcctggaaggcagaataaaatgaaaagtgtgatataa

SEQ ID NO: 192890 - DNA, 394 bp, Homo sapiens
tggccccctgagaggaaggactaggaaagattctggtgcacaggcattcacagcagcaccagtcacaatggccaaaaggtaggaacagcccaagtgcccatcaggagatgacaaataacacgaggggcgcctccatgcaggggatattgttgagccgtgaagaggaatgccactcctgtgaactcaacttgctctgaaaagtaaagtctattcaaaatgaaagtgcggcgggaaggaaggaaattctgactcaggctctaacgtaaatgaactttgaagacacgatgctaagtgaaagtagccagatgcatgattccggttaaataaagtgcctagagcaggcggattcacagagacagacagtacgttagcgcttaccaggggctgggggacg

SEQ ID NO: 192891 - DNA, 575 bp, Homo sapiens
cagaaagcaggatcctatccaagagagctccatgctcctggaggtgagattctgtatgctccttcagtagaaggccacagactgaataatcaattgagaatcgcatatcttttagtttcccaaaaaagaaaaatttttaaagtatttttatccatgttaagagtaacagctactcaggaggctgaggcaggagaatcgcttcaacccaggaggtggaggttacagtgagtggagattgcaccactgccctccagcctgggcaacagagcgagactccatctcaaaaagtaaacaaaaatggctgggtgcggtggctcacccctgtaatcccagcattttgggaggctgaggcgggcggatgatctgaggtcgggagtttgagaccagcatgaccaacacggagaaaccccgtctctactaaaaatagaaaattaggcgggcgtggtggcgcatgcctgtaatcccagctacttgtgaggctgaggcaggagaatcgcttgaacctgggaggtggaggttacggtgagccgagatcgcgccattgcattccagcctgggcaacaagagtgaaaaac

SEQ ID NO: 192892 - DNA, 302 bp, Homo sapiens
tatatgtgtggaaagggcctgaggtgttgctgtgcacaggtaggacattgctgatagatgagtactatatctttatatcatagtggtagtcctcaattttcactatgtcccaaaaggtatgtggtccccaatgtcctgtctttttatgtagccagtaagccacatcttttgtgggcacttccttgaggaggagaatgtaggctaggcttgtctacctgttgatttccaggtggtgtagatgcaatgtgggcatccacatggtagactgttacatgcatcctctggatgcatggagaacgtca

SEQ ID NO: 192893 - DNA, 784 bp, Homo sapiens
attgatctccggtgttggaagtggggctaactgggaagtgtttgggtcatgggggcagatcccttatgactggcttggtgctgtcctaggtaatgagtgaattcttgctctatcggttcccagggagatctggttgttcaaaaagaatctgggatatccctcctctctttcttgctccttctgttgccatgtgacacactggctccccttccccttgtgccgtgattgaaagcttcctgaggccctcatcggaagcagatgctggtgccatgtttcttatatggcctgcagaaccatgagccaaataaaattcttttctttataaattagccagtttgaggtattcctttatagcaacgcaaaatggactaatacactaatatctcacacattttctgtccttacaactttttggatggttaatcaagataatgtgcataaagaactacataatgctatgtagtaggcactaaaagacactggcttcttctatcttacctaagaacaaacttgagattataaaaaaatgaaaagttaaaatctctttcttgcaagtttcatttttcctttaaaaaattttaaaagtatatctaaatgccacctcctgtctgctttctcatctctggaagatgggaaatcttccagagatgagaaatgtccatgatactcctcctttgcactcatagtaccttggaacattcttctttcaagcagctcatcattcagtattttaattgtgcagtacaatgcctggcacataattgatcctcaataaatatttgtt

SEQ ID NO: 192894 - DNA, 354 bp, Homo sapiens
aaattgagcttcagagaagtttgttatcttaccagcagtcatacagcaaggaagtgctgaatgaagctgggacctagctggatttgagaatacatatgcatgccaggaaaatcttggaggaagtacgctggaactatgtcttaataaagggaaggatattccaagaaagggaacagattttaaaacgttcagaggcaaaacaacacacatagcaagtagcaagtagcttgcagtggtggagtaagaagaaatagggagaaaatgagaagagacaagcagataaataccttattaaagtacagatctgatcgtatcactgtcttgttccctctcacctaccaaataaactgtaac

SEQ ID NO: 192895 - DNA, 371 bp, Homo sapiens
taattttcccgttccacccagacccctctggggcgcgaggaaggtccccaggctgcgggtcccgcgccggcccggccgcgcttctaaggcaggactgccgcgtgtcggtcacggtgtcgcgtattctccgcgggacggacgtgtcttcaggtccaacccgcccggtgggaagcgcagacactgattttccagaaaaagtcctccttccgtttcccgcactggtaggaaagctggggagagagaaggagtctcaccgtcctggaccagtcggaaccacagaggccgctccgggtccgggggcgacttccgagtgggggaaggaggccggagggcgcgcggccgagcccagacccagcagagcgcgcggccgc

SEQ ID NO: 192896 - DNA, 595 bp, Homo sapiens
gtgtcaaagaaaataaaacagaaatacctgtaaataaagatgagtatctatcaattataccatgataaagctgggtgggagggagattattactgtaaaacttgtttgaaggggaaaaaattaaccaaagcattatcaataaacgactaaaaagctgaaacgtaaggatcactttgggaaatgaagcaaaatcaaacaccaggaaacaaggcatgaaaagaaaaggattaagggaacagatgagttgatgacaaaaaagttacaaagaccaggaggaaaaagaaatatgagaattaccgattgtaataaagaaaaagaaaaagactgacaagcataggaaaaaaaatgacgtttttatggctgcttgatgatagttcagtccattgtcaacctaactagaatcaatcagaaagccgatcctcagaagcaaatgagtgaagaggcctctgggtaaaggctgagagtactggttgatgggcatcactgttaccactgttctcacctaacttgagaagattgtgatactagctccccaaatgctcctgttaatggcatgtaccctactcttagcaggtctcacattctgtgcaaaaac

SEQ ID NO: 192897 - DNA, 295 bp, Homo sapiens
gtattttaaaatcatctgaaatgattcttctctgattggggaaaccaggaggtggctaatctttacttaaaggccagatcacctaggtaaaaaatgagatatcctcttgaaagcaacaaggacaaagttgttcagcatgcgtaaacctgagtgtcatgattggtttgtctggtctggtcaggatacacatgcactccgcatcccccttgccatctcaggtccaggccaacattgtctctcacctgacaactgtcacagcttccaaaatggtctccctgctcccactctaccctgt

SEQ ID NO: 192898 - DNA, 520 bp, Homo sapiens
taagggtctgtgactgtttttttccctcatagccatgacacatggtgactggcacatagcatatgctcagaaattaaatgccaactgaagtaaaatgatgaagatttaagatgaaatgaaaatttaattttatcattttcatatctgtgcgcacatgctctttagctcctcaattccttcaaattcttatacaattcactcaggaaaacattctttttatcttcattctttcttcaacacatccataaacttcatttttttttttttttttttttttttgagacagtctcgctctgtcacccaggtgcatctcaaaaaagaaaaaaaagaaaaatacatatatctatctatagatatagatatctgtctcgttcttacatctcttttgatgtagcaacagctttacaaatgaaacttcatgattccccaagtaatctacaaagttatttcaaaagctgcattcactgattctttggccatcgctactacaattttagaattgctgggactcaggtgtgtg

SEQ ID NO: 192899 - DNA, 441 bp, Homo sapiens
cttattccctccggtgtcatcccctctggagaatgtaacacgcaaggtgccattttggaagcaggagcagccgtcattagacacagaatttgctagtgccttgatcttggacttcccagcctccagaactatgagaataaattgctgttatttataaactatccagtcttacaattggtgtctctagaccattcacatttaatatgattctttctctgccttctgttaattattagaaaggtgaaggggagtatttactggcacagcgctcttcattctctccattttcattacaaaagcaggccttgcaatattgatttcattatatgcattatttgccaaattttaaatgtgtcctaattacataataacatgtactgctgttagtcttccccatagatgtcattcttcttgcgcttcatttcctcaaagtcaaactct

SEQ ID NO: 192900 - DNA, 448 bp, Homo sapiens
acgacacccaactaattttttaattttttgtagagatggggtcttgccatgttgcccaggctggtctcaaaactcctgggtcaagcagtccaccttccccagactcccaaagtgctgggattacaagtatgagccactgcacctggcccaagggtcttgctttttaaatccagtcttacaattggtgtctctagaccattcacatttaatatgattctttctctgccttctgttaattattagaaaggtgaaggggagtatttactggcacagcgctcttcattctctccattttcattacaaaagcaggccttgcaatattgatttcattatatgcattatttgccaaattttaaatgtgtcctaattacataataacatgtactgctgttagtcttccccatagatgtcattcttcttgcgcttcatttcctcaaagtcaaactct

SEQ ID NO: 192901 - DNA, 409 bp, Homo sapiens
gtaagatgtggcactacagaagaaaagattaaggatcttgaagacatagcaatagcaattgttcaaaatgaaacacctagagggaaaaaaagactggaaaaacaagcagtgtcactgtgagctgtgagacaactttagatgatcaaatatataaagactacggatggggcagggagacagaaaaaatatttgaagacataagggctgaaatttttccaaatttgataataactgtaaacccacaaatccaaaaagctcaacaaaccaaaagcagaagaaacactgaaaagctacaccaaggaacataatcaaattgcataagatcagtaataaagaaaaaaaacttaaagtagctaggtttctaaaaacaacaacaacaacaacaaaaatgcattacatacagtgaaat

SEQ ID NO: 192902 - DNA, 440 bp, Homo sapiens
tgagaaggagtctcgttcttttgcccaggctggagtgcaatggcgtgatctcggctcactgcaacctctgcctcccgggttcaagtgattctcctgcctcagcctccccagtagctgggactacaggtgcctgccaccatgtccggctaatttttttatttttagtagagatggggtttcaccatgttggccaagctggttttgagagcgaccactcctcatattgtcttacacttaatttcttgtttgctgaaaaagtggaggttgaaagaatgggcagaagtgaaaatcacgctcagacaactgggtgccacatttcgggcctggttgttaaaattcaaccgctgacctcaccgattgtgctgtctataaattccagacattgtataaaaaagcattatgaaattcccttttctgtcctgtttcattctgattaccag

SEQ ID NO: 192903 - DNA, 514 bp, Homo sapiens
tagtgtggtagcagcctggttcacatgaataggactttcacggagtagctccgtttccaggtgtgacttcggagcccagcatgcctagtttcatgccacagtgacccaagtgagtcaccccgtctgctccagtcccctgtccccaattccctgtcatctcagccacccattttcattttgaaaatcaatctcatggaagtttctatttgcttttattgctttctttgttttcttgtctatttcctagtactcatacgtgccattaaaaaggtgactggaaaaacagctcttaaaactgcaagagaaatagtatatagggttttgtgtaataaaaaatactgcaactttccaatactgataaatgtggacccttggtaggattgtatagttttttcatgtgaaatatgaaattcaggatttctcataaatttaggattgctttgtaaaaatccttcactgttggtaggaagtagtttatattaataagtaaaaaaaacaaaaagtcaataagaaa

SEQ ID NO: 192904 - DNA, 583 bp, Homo sapiens
tgctgggattacaggcgtgagccaccgcacctggcccttggtgaatttttctaaggtgggctctgtaacaatatcattgggttaggaggtggggcttagacactggaccaaattgaagactagctaaaacagggcctggagagaagcagctttctataaaacatgcccaccagtgtgccacatcagtttaccattgccttggcaacacccaggagttaccacccctttccacagcaatgatctcacagcccaaaaggtactacccattctctagaaatttctgtataaactgcctcttaatctgagtacagattatgagtacaaaatatgagtacaaaactgtcctcagctgctactggcagcacacggcctatggggcagtcctacctcacgagaccagtcacagagctgtaacgctgccacctccataaagctgccttcttcagccctaccaccagctcgcctttgaattccctcctggctgaagcccagagcccttgccagctaagccctcctttggggctcgcctgccctgcagcatcatgaaggcctctgaggaatgccattaagctgacttcattca

SEQ ID NO: 192905 - DNA, 359 bp, Homo sapiens
ggctgtgtgacgtgttaactaacctgtgatggtcagtttgacgtgttttggctgtgtgacgtgtaaactaacctgtgatcgtcagtttgacgtgttaacttggctgtgtgacacgttaactaacctgtgatggtcagtttgacgtgttttggctgtgtgacgtgttaactaacctgtgatggtcagtttgacgtgttaacttggctgtgtgacgtgttaactaacctgtgacggtcagtttgacgtgttaacttggctgtgtgacgtgttaacttggctgtgtgacgtgttaactaacctgtgacggtcagtttgacgtgttaacttacttggctgtgtgacgtgttaactaacctgtg

SEQ ID NO: 192906 - DNA, 194 bp, Homo sapiens
gccttgatccacatgttcttctttgatgggtatttagcatcccctgccttgatccacgtgttcttctttgaagggtatttgatggatatttagcatccagtaccttgatccacgtgttcttctttgaagggtatttgatgggtatttagcatccagtaccttgatccacatgttcttctttgatgggtatttga

SEQ ID NO: 192907 - DNA, 439 bp, Homo sapiens
gtgttggcttagattagcagggcctttgatggaggggcatgtatgtgtttgggtttgctgtgccaggcaggggagcagtggaatttgtctgaattgagctcacacattgaagttattgagcgacttacatgcaaggccatgacctggactcccagccgagaggcccacgtggcggggcttgagctgggggagccgaggacagcttacatctgctcatctgcttacgtaaccctgcctcccagcttccagagccaagaaaacacacaagccagcccagcggggccgagagcctgtggtagcacacgccatgcgccgcacagcaagggcgccttggctcggcttgaggcctgtcatgaagccctcagccctctgcctcctcccagagcttctccccaccaccccaggcagtggctctgaaacctggtcgcaggtctgcatg

SEQ ID NO: 192908 - DNA, 220 bp, Homo sapiens
agacatgaagaaaactatgtggggttctgtagtggacccacacagctcagaagtaggacgccagtccaaaccaagacattaaagacttgttgcaaattattgaattttgcataatcatcttatgtaatttgcctaatggtccttagcaagcccattagtcttttaaccataaatttcacgtctgttttaatttccagatttccattggtagtacttagaa

SEQ ID NO: 192909 - DNA, 251 bp, Homo sapiens
aggtaacgggaacagagtttgagttttgcaaaatgaacaaatttccctatgaatgtggatgatggttgtagaacaatgtgagtatgattaattcctctgtcctgcacttttaaaaattgttaaaatggttaattttatgtatattttaccacaatgtaaaaaaggacttttttaaatgaacaaactgtagatatctgtaacagcataaatatcacaaatataatattgcattaaaaattgatgtaaaagta

SEQ ID NO: 192910 - DNA, 365 bp, Homo sapiens
cacaacacccggacaagatactaacttttctgcagtggtttgggaccaaacccacaatatatccagtgtatgtctgtacttcaaataggccgagagttaactgtctacagtctgctaagtagtcacgtaagcatgtgtgccttggaagatacgggttagtgaatgctgaagcccttattcttacaaggaatgcagagcattttcaaactaaatagttctcaccctggcccactatttacttttttagtcatatccccaggttccttcccagttcgtaacctatgcttcagtcagactgaacaattggttgttttccaaacacatcacagtatttcctaccttgatactcattgtccggggttgtt

SEQ ID NO: 192911 - DNA, 597 bp, Homo sapiens
tccctcccaagtccgcgtgcctgcccagccccatctaaacgcggggtacggagctcgcaggtctctcttaatctgaaacctgttcctatgaagtgtaagatgaaggaaaatggaacctatcagatgggtctgaaatgatcccactaaaaatcccttaaatacagaatccgctcatttcttctattccgtgctccagtcacagtacacctacaacctgaaggaaactgtactattaacacaaggaaaaaacgacccagtctacacaccagctttgtccaaaaccctctacaacagctaataaaatacacacgcagccaggcgggcctacacctggggccagacagtcccgggagccatgggcagggagtccctgagcctggggcgcaggagtgccctggggtcagcgggcaggacactgcctccagtgcctgtggctagtgcagggatgtaactttacagcgatgtctcagacatggacagaggaaaaaagtgaggctggcactgggtggcaaagctcacaatttcagccgcagcagcagcaacaatacattgcctctaactaaggcagtgtcgatcctgaaaaaaaaaaaaaatcca

SEQ ID NO: 192912 - DNA, 443 bp, Homo sapiens
ggatttggaagattacctcattactcatcctttggctgtggattctgggcctttacgggatttgattgaatttcctccagatgatattgaagttgtttatagtcctcgggactgcagaactcttgtttcagctgtacctgaagaaagtgaaatggatccacatgttagagactgtataagaagttatacagaagactgggcaattgtcatcagaaaatatcataaattgggaacaggatttaatcccaatacattagataaacagaaagaaaggcaaaaaggtttgccaaaacaagtttttgaatctgatgaagctccagatggcaacagctaccaggatgatcaagatgaccttaaaagacgttcaatgtcaatagatgataccccaaggggtagctgggcctgtagtatctttgacttgaaaaattcacttcctgatgctt

SEQ ID NO: 192913 - DNA, 605 bp, Homo sapiens
tgattataacccggatcacggctttacgggcagaagaatgcaacaagagatgaagctttgtcgtaataagccactgtagttgggctatctattatcacaagaaaatggataacagcactttggcagatcacaaattcaggagatctagaccatcctggctaatatggtgaaacccagtctctactaaaaatacaaaaaaattagctgggcgtggtggcatgcgcacgtagtcccagctacttaggaggctgaggcaggagaattgcttgaacctgggaggcagaggttgcagtgagccaagatcctgccactgcactccagcctggccaatgtggtgaaaccctgtctctactaaaaatacaggcatctactaatcagagaagcagggtggggtctcctgaaaagagcatggcctttgggatttaaaaggcctggattcaatcactcttctacttactggttgtgtgactttgacaaaccacttcacctctctgtgccacagtttctatcttctctgtaaattgaggataaccaggccaacctcgggcatggtggcacatgcctgtaattccagctactccagaagctgaggcatgagaatctct

SEQ ID NO: 192914 - DNA, 145 bp, Homo sapiens
tgagaagggacaatacagtagattataaccttccccaaatggcttaacattgttcggacaaaagactatcttgtcttttttttgcacctaaataggcataggatttacacgtgtgtgtgtgtgtgtgtgtgtgtgtgtgtgtaaa

SEQ ID NO: 192915 - DNA, 350 bp, Homo sapiens
tcaacccacaatcctatattcagttaattaattgtgaatgaagaacatgctagtttagaatgtatggtatcacattttccatttactcaccctttcacagaaagctacagcagaatatgttcaagcaaaacgaaggtgtaaattaagaaagaggaagacaagaaatctaaaccaagacagaagcaactgtgcagaagggcaactgaacagcaagtccagaatggagtgggagcatggagggctccagagagatgacttcatgaaaaaaaatggaattgatataattttatttgtgttaccgagtggaaagtggtatcatgagatgtttttacagggctgttggaggggag

SEQ ID NO: 192916 - DNA, 208 bp, Homo sapiens
cccatttttgacagcaagatgagtaccaaaactgtagattcatttaaaataattttcttaatttgtctttagtatccctttgttttacaaagcacatacttttaaaaattagcaagataagtcttgttgccaagatgtagaattttgccagaaaaattattttgattaaaattaattattttgaaaatttcttgcttaataaggaaca

SEQ ID NO: 192917 - DNA, 649 bp, Homo sapiens
aggagactgatcctactgttatatcatagatggaaaaatccattagccactcaggatgtgtctgatactccttttttttgggtttcaagagtaaagtcaagaaaagctgcttttggaaagtcaaagaatcacagtagtggttatttcttagtgcttactatttgctacatgcttcacatacgtggtctcatttaatcttcccaaacaatttggccataatattattacaaccatgttgaatctgccaataataataataataataataatttgtttcttaaatatagtctgctgcataagcgtcccctggaacactttaagtaactctgacacccagatcatatctcagttcaattctctttggggtgggctgatgaatcagtattttaataaactctacatgaaatttttatgaaggctgaagtttcaaagccagttgtagcaataaatgcaagggaagcacagaaaaagagttgaggaacataaatacagctaagaaccacgtgggggcagaagataaggaattgaaccatttctaactggagttactgatgagagacagagaaggagcctaggcaatcactgcaaaatatagtggctgtagatttttcattttgaaggaaaatataaacagattgaagagagataa

SEQ ID NO: 192918 - DNA, 767 bp, Homo sapiens
aattgtggtagatacgtatggctattggagttgtcattgctcataggcttcctcagtgaacagagcagaaaaatacagctagatggataaatatacaaacatacatgcttatattcatccatatttctatattagaatatactgaaaaccatgagttcttcctggtgattctaattccagttgaatcacacatggctcattttagtttttttttccctttcagtactcttgacctttgaacaatgtggaagttagaggggctgaaccccacacagccgaaaatttgcctaaattttgacttccctgtaatgtaactgctgactgacctgattaactattgttgaccagaaaccttacccataacaaagttgattaatatatatgctgtatattctatgtattatacactatattcttataaaagtaagctagaattgccttagctattccagctgttttggggttcgatataaattttaaaatagtttatcctaattctgtgaagaatgtcattggtggtttggtagctgacttcaaactatactacaaacctgcagtaacagaaatagcatggtactgttacaacagcagacacatataccaatggaacagaatagagagctaagaaataatgcagcacacctacaaccatccaaccttcaacaactccacttaaaaaaagcaatggggaaagcaatgggactgctggatcaaatggcaattctaagttctttgagaaatcgccaaactgctttccacaatgacta

SEQ ID NO: 192919 - DNA, 557 bp, Homo sapiens
tgttcaagcaattctcctgcctcagcctcccaagtagctgggactacaggtgtgcgccaccacgtacctggctaatttttgtatttttagtagagatgggcatgagcctgtaatcctggaaggttctattatgatccccactttatggatgacaaaacaggcacaaagaggttgtttgtcctttccttttatctccgcctgtcgttcatctccatgcttcctttagtttatccaaactcttaaaactacaattaaaaaaaaagacagtatgcccttcagtttggtttaaggaaccccattaaaaaacacaaaccaagactaatttatgaaaagcttatattcccagaaatacaaaataaaattttcaaactagaatcaggtttattatgctacatgatacaatgttggcactggcaggggtcttaaaaatcatcaattccggtcatatttactaatctgaaaggggaagtgatctgccaaaaatcccattattaactaatgggaactccggaactccttactttttttcttctttttttttgagatggagtctcgct

SEQ ID NO: 192920 - DNA, 552 bp, Homo sapiens
attttctcaaaggagagaatatttgaaaagaacgtacagtactcccttggtatccataggggaatgattccaggacctccctcagatatcgaaatcctcaagtccttgatataaaatggtgcagtatttgcatataacccatgcacaccctcctgtgtactttaaatcatctctgggttacttataataccgattacaacatagaagctatgtaaatagttgttatactgtattgttcaggaaataatggcaggaaaaaattctgttcatgttcagtacacatgcaatttttccccccaatatttttgatttgcaattggttgaaacaacaaattcaaaacctatggacatggagggccgactgtataacatttcatctaagagaaaaatgtacccaggatgaagttatccatggattcatcaacaaacataagcaagacccagaggtgttgaaaatgcaagggcttgagtgataaaggcggctttcataaaggtggctgagtcacacagaagagcctgggggcgggaggcaaaggtgagcaggaagggcca

SEQ ID NO: 192921 - DNA, 403 bp, Homo sapiens
cagggttcccattgattccacattatgatgagttgtataattatatcattatatattacaatgtaataatagaaataaagtgcagaataaacataatgcgtttgaatcatcctgaaaccatccccccacccccaggctgtggaaacattgtcttccacaaaactggtccctggtgccaaaaaggttgaggaccgctgtcctactgcactacagtcatcatcttgggtagatacttatctcctgattcacagggcctgacactgagtaggtacttggtacctgtttgttattgccagctataaataaaatagctttcccttccattgacatatgaccagagttttaaaaggtaatgatttcaaataactatatgttagattccgtttttcattcataagggaaa

SEQ ID NO: 192922 - DNA, 470 bp, Homo sapiens
gtacttatgaaaacaaaacaagctaaatataacaaggcatcgtattaatggtattattactgcatcagaaaattgtggaacaaacttatttggtcaaattcatatcttaactatagaaatttaattccaagtaaggcctgaaaaagtgaaatggacatttcttaccttatcctactcttctgttcactatagaccagtaagatttacatttctaaaaaagcattgcatttcaagagataaagccatggagttacaggaccatccaaaagctttacaccctgagataagttacaaaaaagagaaatctcatggtttgatttttttaaatccaagaaagaaatatgcagttttaaaaatcaaagtttattaaactgcatccaatcagaaatactgaccgtgggctgggcgcagtggcttacatgtataagcccagcactttggggggccaaggtgggaggatcgcttgagct

SEQ ID NO: 192923 - DNA, 416 bp, Homo sapiens
ataaagcaataatgtccctttctccccaccactaccccaggctaagaagagacagtatgttctgtggtttagataaatatcacagagattaaagagaacagagtcttttcagaagtgatacaagtaacagaaatgtgatcagattggtgctactgaggcccttggcctagacaggagacagacatttccgccaaagaccattgccgagtatggctccacaagaaccccttttcagtagagaagtgcctgcattttcagcttttcaactaccatgttagtccggctcttgcgtgcttgttagtctaggtgtgtgtgtacgggatgtttgagtcagtaacttgtcacaaatttatttatgataaaataagaaagcaaaaatgcaaacaagtttggctatttttaaaatcagctggaaa

SEQ ID NO: 192924 - DNA, 236 bp, Homo sapiens
gagcactattgtgtgccagccctggctgtagtgatgacctctgctattcctcactccaatcctgagtttggcacttggatcagccctgttctgcagatgcaaaaactgaggcccagggtcacatggttaagaagaggtggagctggcattcaagagtaggctgcttgacccagaatccaggctcttaccattccccagccacccctctgtccatccacggtgctgtgcggccaaag

SEQ ID NO: 192925 - DNA, 346 bp, Homo sapiens
ttataggggagaaggtaggtatacactgtcatatcaacctaacttgtcctgaggcctccttatggtattaacacagagagagagaagagccttgaaatactgagacattcttttagagtgtgagtgattttgttattgttatttaaatcttgatatcacctcctatagtttttgaaagacatcactcttcaagttgtcttcaatggcacaaactatacctgtgcattttctgaaacaagtttgaccataccagcaaaggcaatgaaaatgctttgtctttcagcatgaaatgtgaagtctacattattagtgggtatatatggcccaagggaagaaaatgttgaag

SEQ ID NO: 192926 - DNA, 300 bp, Homo sapiens
gatccttcctttcccctcccagcttcttgtagccacgggtgttctgtgactgtggcagcatcattccagtctctgtctccattgtcccatggccgtcttccttctgtgtctgtgtctaaattttcttcttcttgtaaggacatattggattaaggtcatattggattaaggacacaccctactccagtgtgaccttatcttaactttaattacatctgcaacgaccccattcccaatgacctcatgttctgaggtaccaggggttaggacttcagcatgtattttgagggaacacagttc

SEQ ID NO: 192927 - DNA, 232 bp, Homo sapiens
tacagtcccagctattcaggaggctgaggcaagaggatcacgtgggcctaagagttcaaagctacagtgagccagtgagctatgattgtactactgtaccccaacttagaagacagaacaagaccccatctctaatcacagattaccataacatatggtaatcatggaaaagtttattagcacagggagacacaaagtgagcacatgctgttggaaaaatggctcctataga

SEQ ID NO: 192928 - DNA, 308 bp, Homo sapiens
ccatctcagcctctcaagaagctgggactataggtacacatcatcacaactggctaatttttgtatttttgtagagatggggtctccctttgttgcccaggctggtctacaactcctggcctcaagagatcctcctctgcctcagcctctcaaagtgcagggcttacaggtgtgagccaggtgtgtttcttatcgtctctctctccctcctggcagcacaggaactgtgtcctgctcactaacctattcctaattggagaatggcaactgtctggcaccttgtgagaattcgataaatatgtgttgaa

SEQ ID NO: 192929 - DNA, 630 bp, Homo sapiens
cagttccttcatttaggcaatcagaaaccaaaccaaatataattagtagaaacaaactgaaaaagaaacactcatgcaaaaactggcaaattggcagatgtccttaacatacagcacgtgcaagcaaatcagtaagaacccagagaaaccaaagaacaggcaggtcagagacgcccaaaacactcacacgcgatgacaaggaccatttcactggtcatcaacgtttttgtttttcgtccatcaaaatcagcatgccttaacaacactggagaaggtgtggggtgaagggtcattaagggcacgcagtagccataatgccacaccctttgtgccagccactgcgcttctggaaacctaccccacagcggtcaaccaaaagacagcaaaggcttctggcactaagctggtcacaaacgcattactaattattgtgcacatgtggaacctaccatctaagcctcctttctaaggcgaaaattcccactactacatcttgccacccttctttaacttacacactttaggaaaaggatgatttttcagaaactagcactgctcattcaaagtaacttcatacttcaatgaaaaataagcctccaatgccagtggcctccaacagggcttccctgc

SEQ ID NO: 192930 - DNA, 751 bp, Homo sapiens
gtggtgggctcggtgggtgggaagatcttcaggcccctgggcatcagaaattgcttgattaatggcagtagcagtggtaggacaaccctctgactcccagggagtccacactggtgctggtggtggctgtgacaggatgaacagatcagtactcaggcctgcaggtggcatgtacaggtggtgccagctgtagtagtaacagcaggttggatgggcttgttctcaggcccctgtgagggatgccaacaatggtggatggggcagggtgatccccaggcatgcttgtgcatggatgatgcagggccagcctgtgtgggtctatcctcaggctccatgtgatgtgtgcaggcactggctagggtagacagggatagggtaattcccaggaccccagatgaatgcttgggtgggggcagcagtggttgtgctgcagtcctactactgaggagggcaaagttgttttcagtggcagcaaccataaacaggcagctggggaatgaacacattggtctcagttggtggcttcgggcaggatagcatctcatggcacttgtagatgtgtggtgtccccactactggggattgtggggtcactgacagtggctcatgattcacgcctggtggcagcagccagaagtggcacctggctgtgggcaagggatgtcaattgggcttcagaaatgtggagatgaagaggctgttggaccccagggtaggatgcagtctggtaggggctgggctctcaaagtgg

SEQ ID NO: 192931 - DNA, 520 bp, Homo sapiens
tggagtgttgctctgtcacccaggctggagtgcagtggtgcaatctcacctcactgctacctccttctcccaggttccagcgattctccttgcctcagcctcccaagtagctgggattacaggcataagcgactgtgcctggcccattttctgaattttatttatcaaatgtactctcttccttccacctcagggcccccctactcacccccaactctcactcagcttaggttgtcactttagagagactgtccttgctcctccccaccccagctccaactagatcagccccatggcacacggtgagtattcagaacgattcgccaagtgtgtaagccaaaggccacacagatggtaacagaggtagccttcagacccaggagtgacccagagcccatatttggcaggtgcagggcagggaggctcacacagtgcccaacgtgaagcgggcacaatggccatcaatgcctctcccagctttatcactgctctgcgttctcacatgggtgcagagtagcat

SEQ ID NO: 192932 - DNA, 617 bp, Homo sapiens
gtttttaggtaccacaacaatactgtatgttatgtgagagaaaaaagtcataagttggactttgttaaaattgaaaactgctctgaaaaatacactattaagagaatgaagaaactagccacagattaggagaaaatatttgcataatgcatatctgatagacttgtatctaaaatatacaaagagctcataaaactcaaacataacaaacaacccaattaaaaatgggcaaagatctgaatagacaccttaccgaagaagacacacagacagaaaaaagcatataaagagatgctcaacctcatttgtcattagtaagttgcaaattaaaacagcagtgagatgccattacatacctattagaaatggctaaaatccaaaaagctgataatattaattgctactgagaatgttgagcaaaggaactctcattctttgttggttagaatgcaaaatggtactgcctctttagagcactgttcggcagtttcttacaaagtgaaacatagtttaaccataggactcagcagttgcaatcctacttggtatttacccaattaatttgaaaacttaggtccacataaaaacctacactgaaataaaaaggattacaaagg

SEQ ID NO: 192933 - DNA, 227 bp, Homo sapiens
ccaaaaaaaaacaggttttggaaaagacaggaattagctcctgtagctagttcccaagcattttaaacataatcaccaggttcatctcaacttttttgaggcatgattcacattcaatgaagtgcaggtgtaatcacccaatgggttcttcttgctcgctgcctagactgagccaatttatcaaggcaagggaattgcaatagagaaagagtttcattcacacagcg

SEQ ID NO: 192934 - DNA, 115 bp, Homo sapiens
taagagcatgggaagaagagggttttgccagaagaaagggccagagaggaggctatggtgacatggaaacgaggaaggacacatttgaaggggaaattggtccatggtgttggct

SEQ ID NO: 192935 - DNA, 622 bp, Homo sapiens
gcacacgtacagacatgcgcagacatgcacacacacagacgcacacacactcagacacactaatacacccgtacatcacacacagacgtgcacacacactgatgcacacgtacacacacacaaagacaggcatacacagacaccctgagtacatcgcacatacactcacagacacacacagatacacaggtacacacacagtacacacagacatgcacacacactcacagatatgtacatcacacagacatgtacagacatactgataacacacgtacatcacagacatgtacacacagacacactgatacatcatacacagagacatgtacacacactgataacgaacatcacacatacagacatgtacagacacactgatacaaatacatcacacatactcacagacgcacacacatactgatacacacgtaacgtatacacagacacgtacacatagacatgcacacacacactcagacacactgatacacatgtacatcacacgcagacatgtacagacatactgataacacgtacatcacagacatgtacacacagatacatcatacacagacatgtacacacactgatacgtacatcacgcatactcacagacgta

SEQ ID NO: 192936 - DNA, 646 bp, Homo sapiens
tgcaagctaagccgggggagtttcgatcaaggttaggagtttctgtactcattgttactacacttaaaacctaaacatgccagcttctgggatgagccaacacaatcatgattatcacgccctgtcctctatgcagctgcaggcctaaggtacgatggatggtaacagcagaaagccacaagggagattagcaacgacttgaaacacagacagggatttagaacacactccagtaaacgccaccattccaaagttcttcacttctagattccaaaatttctttcctaaaccttcagtcctgacacagacccaaactttaggcgctcctaactaaccatcaactttaattatttatccttaattcaagcctccacaacataggcacaactttcttttctggactcatgatacacaactcccagtgaattatgtcacaatatttgttcgtaacacttggaacttgcctgtaacacatactgatgtaataaattctatgagaacaggtgaaacctccctactttaaatcacctgggacactaatttttttcctctgtgaatggtaattgatacaaaggcacaggtgaggacatggactgaataactgacatttcccttctcctagaatgtaatattagaatgcattcta

SEQ ID NO: 192937 - DNA, 466 bp, Homo sapiens
agaggcagagcaggggcccccgtgcctctggacttaacattcctgtccggaatggtctccttctcttctgcctccctgtcccacctttcctcacaccccaagaccaaaaacaattcatgtgaggagtcacatgcaatttgaggtggctttatagtctcccagatagagtccatcggctcctcttccgccgtacccctactgcccactgtatgggtaccgttctcgacttttcatgacatagtccctgcttgtgggcctgtgcacccctctctaggttgtaaagtcactaagaaagggaccatgtcttaaaaccaggcacaggcctgatcaacaaaactcaaggtgaatggcatgcaagcccacccttcacatgtctgaaggaccaccgtctatcaacagtttacagagggcttaatggcaactccagtggcaacacagatctcttctggtggcgcagatgccaaga

SEQ ID NO: 192938 - DNA, 987 bp, Homo sapiens
gtgtctgcagacagccagaggcgcagacagacgcgcttatggtctgaacagtcagcaccacagagaccaagggcaggatgaaaagcccatcatcaggcccagagagcagcacggctgaggggccaacaggagcactcatgccgccacgcgagctccataaaaagactccaggtggccttgcaggctgcgtcaccacggttctgagaacagcaaaactgtcagagtcatcagatttacagagaatggcaacctctccagctttagaggaacagaaaaaaatatcataaaggaaaaagccaagtaaatgaaaacgtgaaacttccaagtaattgtaaaggctaaagatgaagaggcccctccccgcagggcacgcattctggtaccagatgctgtaaagccacggcccccaaccttttggcaccagggaccagttttgtagaagacaatttttccatggacagtgggggcagggggcttttcgggatgaacctgctccaactctgatgggcaggtgttaaagagtctcacaaggtgcacacagcctgggcctccgtgggtgcagccacaacagggttctgctcctatgagcgtctaagctactcccctcctgctgtccctgctgcagagccatggactcaccagagaaacggcatagcttttgcaaaaccaaggccctcaacagagcagaagtgggcagtgcaaccacggcacgtcctgctagcttatcggcttcctgggcctccccccgcctctgctcaccaccatcctcgggtccagtttcccagtagcagcagtgagcaggccccgggcagctgtgcccgtgatgtgggtttctcacttgggcctctggctgagggacctcccaccgaaggttccaaccacagccccacctgacaggccacatggacctgatgcaggttcctacagagcctccgatgaggttgtttgctgcagactgttcacacagaaacgcacactgcggccccc

SEQ ID NO: 192939 - DNA, 788 bp, Homo sapiens
acaggcatgtgccacgaagcccggctgaattttgtaattttagtagagacggggttttgccatgttcaccaggctggtctcgaactccttgacctcaggtgatcctcccgcctcggcctcccaaagtgctgggattacagggatgagccactgcccagcctgcccctgcttctcttaacacactgggaagctcctgctgtagcaaaatcctcaataaataggtgttgattagatgaactgatacgaataaaacctatgtgggggtgggagagtttttaaattactcagatttttaaggaggatttcaatagtcctttttatctttgtgaaaattttatttgaaagttcttattttaaaatatcaaacctgtcagaacagctacacttttaaatgctcctttaatatgaaaagatactcagtcatgcataaaaagagagatgcaaatgaaaactacatttagctatcatatcttgtctatcggagtggcaaaaaataaagtttgacaacatgtcttattgaaaaggttgtagggggaagatactgtgcttacatacatagctggtgggaacgcaaaatactatgactgtattaggagaatttgacaatatgtagcaaaataacatttgcatttaccctttggtcagccaggctcacttctagaaatctatctccctaggaatctaactcttttgagacagagtctcactctgttgcccaggctggagtgcagtgacgtggcctcagctcactgcaacctctgcctcctgggttcaagtgattctcctgc

SEQ ID NO: 192940 - DNA, 809 bp, Homo sapiens
cccaatccattccagcgtagtccagcccagcccagcacaggtcagcccagcttagcttagcccaggtcagtccagctcggctcagtccacttaagctcacccaggtcagctccgtccagctcagcccagcctagcccagcttagcccagcccagcccaacacaggtcagcccagctcagcctgcccctgcttctcttaacacactgggaagctcctgctgtagcaaaatcctcaataaataggtgttgattagatgaactgatacgaataaaacctatgtgggggtgggagagtttttaaattactcagatttttaaggaggatttcaatagtcctttttatctttgtgaaaattttatttgaaagttcttattttaaaatatcaaacctgtcagaacagctacacttttaaatgctcctttaatatgaaaagatactcagtcatgcataaaaagagagatgcaaatgaaaactacatttagctatcatatcttgtctatcggagtggcaaaaaataaagtttgacaacatgtcttattgaaaaggttgtagggggaagatactgtgcttacatacatagctggtgggaacgcaaaatactatgactgtattaggagaatttgacaatatgtagcaaaataacatttgcatttaccctttggtcagccaggctcacttctagaaatctatctccctaggaatctaactcttttgagacagagtctcactctgttgcccaggctggagtgcagtgacgtggcctcagctcactgcaacctctgcctcctgggttcaagtgattctcctgc

SEQ ID NO: 192941 - DNA, 508 bp, Homo sapiens
  misc_feature (8)..(8): n is a, c, g, or t
agccgctntagaggatccactcgccttttgataggaactctacaagatgaggtgccccttaggtttagccatgtggaggtcatgattcaccaaagggagagagggtcagagacagtgggaggtgaagaaatagaggttgggccaagagtgctgagttttctagtaaagtctgtctcgtggtgatggagaataaatgggatcagcagtttcccctgcaccatgatggaccaagagtcggggtgtgcagaggagacgagaagaggcttagagctgtggagaagcagacctcagccaggtggctgtctcccctctgagggagatagcggtgtgggaccccagggacaggcatgcccattgtaaattgggaacagcagtgtctgatgtgagcaacgtgggcaccaacaatggaaacaaaatgtccttggaatcagtacacacagggaatgtttcgtgttctttccgacattctacaccgattgttctgacctatcaaaagacgatgctctct

SEQ ID NO: 192942 - DNA, 437 bp, Homo sapiens
cagaactaaattccatattggtgatagtcggggcagaattgacaccacagaaaatcaaattaatgtcttaaagaactgattaaagaagctttcccagtatgcaggaaaataaaggtcaaattatcaaaagaatgagagaaaacatggcaagcatggtgggcagagagtggagattttttttttttttggtaaagctactatttgataacataatagggtatctgtagccaataataactttattatacattttaaaataaagaatataattagattgtttgtaacttgaagcgtaaatgcttgaggggatggataccccattctccatgatgtgcttatttcacactgcatgcctgtatcacagtatctcatgttctctgtaaatatataatcctactatgcacccacataaactttaaaaaaaaaagataaatcta

SEQ ID NO: 192943 - DNA, 480 bp, Homo sapiens
cttcagggatggagagagagattggctactggccttcaaaatgtcatcatgccatagctgcttaggtcatgaaggaggagatacacaatgtgggctcttactctggggcaacgaaactacttaaacttctggcaactctccaaaatagattctgggcctgtgaggactgggagactctcttgtagcaagaactgctggcatctgtgatggctatggaaaccgctggaagtcttttgcatgccattttcctgtaggaagaagccaccctgactcccagtcatttctggtaggagagacagtgtggcagaggcatcttgcatcttgttcaatgttctcctattcttgacaaatcttgagctacatctgtttttcttaggtctagttcttagttatgaagaactaagaaagtagaaatagaaccaagaaagtagaagaagtaagtagaaataatattagtctgtcaacttgttttgttttcac

SEQ ID NO: 192944 - DNA, 353 bp, Homo sapiens
tcaaaatactcactggcattctactcttatcttgtttctgattttaacagctatttatttgatgatagatttttttctaaccatgttaaagaaatttttttgcattcctaatatgctgagaatttttaaaattaaaaaaatgggttttggaatactataaaatgccttttggatgattttggtaaattatcatccatgaggagaatataatatggaagccagagtatgggatttatggccagacagagctggagtcaaattatacctcctcctcttagaattgtgtaacattaagcaatttatttattcccttccaatttcagtctcttactctgtaatatgaagataatcat

SEQ ID NO: 192945 - DNA, 393 bp, Homo sapiens
cgtagcaagctcggtaccccaccactcctatagatcagtcatcacaaacatcaagatgtgaagtagatgctattagaattgttaaagaacaagcatcaagcatacgctactcaccccctactcccctgaaaggcaccaccttacttcacagaggtcttttgagtggctgagagtaagtgtaccgatctaaaggtcagcagacactaagttctggctttaccatttaataactgattagccacatgatcataaaaaaatctctctctcaaactcactttcttgaaccagaaaatgggagtaacgctctacctgcttcaatcttgttacataaattaaaaacttttgtcaacggcggtctgttcactgatctataggagtggtgggggatcctct

SEQ ID NO: 192946 - DNA, 431 bp, Homo sapiens
cctagtctctgacaatcacctcttaccttctgggatcactccttcaagtgcttcaatccatcagttcccacaccctccaggagcctctgatctatcatcttccgtagtctcctctttagagaaaaccctcttgaaagagtttataatcttgtcctacacttcttgtcctctagttctaacttagactctctccaatcagggtttccaagcaggggaaggagggaggagcgtaaaggagaaaggaaaagtcgtgaagaagggaggggagaagaaaggaaagagaaagggaggggaaacataggtggaggagatgaagaggagaggagaggagaagaggaagagcagggtgaggggaaggggaagtcagagcaggaaaggagtaggggtaggggaaagaataaatagggaaaagaaagaggaagatggggaag

SEQ ID NO: 192947 - DNA, 466 bp, Homo sapiens
acctcctaccccacgacctcttaccccacgggctgtcacacgcatctctagctcatcacactcaccagaccatttctttccccattctttgtgtcgtgtcattcgttttacttctacatatggtattaatgccaacatatattatttttgctttcaacagttgtttttaaagaaaataatgattgtgtagctaatttgtgtgagtgtctacccaaatgcttgcaagtgcgggcgctccccaggccttcggcagaccctggcttctatctggctttgctttccagcagctgaagctccttcctcctgcacttctcctactagaggtctctgtctgaaaaggcatactttgcctccattcagaaatgtatgttcactgaatacagacttcccagctgacagtgtttgcttcagctcttcactaatgtttctgaagataagccacttagatttgtatggaactgggttt

SEQ ID NO: 192948 - DNA, 404 bp, Homo sapiens
ccatgcccggctaattttttgtatttgtagtagagacagggtttcaccatgttggccaggctggttttgaactcctggcctcaggtgatctacctgcctcagcctcccaaagtgctgggattacaggcatgagccaccgtgcccggccagagcattttgagaatacatggtctcataaacttttttggcttgcaggatcaaaaataaagatatgtgttgattttactcagataatatgacttgtaaagctggagtgcagtggcgcgatctcggctcactgcaagctccgcctcccaggctgaggaagagaattgcttgaacccgggaggcagaggttgcagtgagctgagatcacaccgctacactccagcctgggcaaaagagcgagactctgtctcaaaaaa

SEQ ID NO: 192949 - DNA, 271 bp, Homo sapiens
gagctgtcggggcagggagccaggaggttcaagaaagagcaagggcaactctctccctccgagagtttacagtcttatcgcatgtatgcaagtagctctactgtaagacacaaaataatcccagtgcaggaggaaggaaagactctagctacctggatgaacccaggaaggcctcctggaagagaaggcagaggatcaggtctagaaaaaaggtagaatttggagaaagggtattcaggtagaggaaacagagcaaagactcggaggcaag

SEQ ID NO: 192950 - DNA, 589 bp, Homo sapiens
ctttggcccatatttctctctcctgaacattctacctggatgtttccactatcattcaaacaaaaccaaaaccctagagttaaatacttcatctctaaattgccctccttgttatattttactatattccccccaaatctctgcaaaattgtatctaaagttggagttttagatgttatttcttcatcatagctactgactcaatgttgagatttaactgtatcaaaacattttattccctatttatttgcttaactccgttgttcactcaccaattctttcattaatcaaataaatatttattgagtgcctacaatacaccaagcacttatgttaggtattggggaagagctggtaagcaaaacagacacagtccctgctctagtaaggaagatcaataataatcaaataattgcaaatatatataattaaaaacagtgataaatgccagaaaatagtgactatggcatattcttaatcaccttttaacacttaaatgtttacagtttctaaaaattaccacaaaaagagaattaaaccaaactaaatcctcaagcttacagaacttataatgtgttatgagaactgg

SEQ ID NO: 192951 - DNA, 609 bp, Homo sapiens
catgcccagctaattgcaggtgatttctaatgggatttagtatttctgggtttaaggatgagatctgaggtaatgactttgtttccagatgtgaaataatttgctcttgggttgtgagccctttgggtgggctcccaaggatcctgctctcttccaggagcccaggctctggggtcagactgcctgggtccttgactccctgttttctgattgtacaactttggtgagtggcctaattcctctgtgccttggctaccttggttactatttctaaaacaactggtgttgtagtagtactgcttagagtactttcaagggttaaatgaattaatccatgtaaaacgcttaaaatagtgcctgccacaaccatcaatttagtgtgaaaatctgctcacctgcttggccagcccctttcactttattaaaccaagggtcgtgctgggttttccagaagtctaagttgcggtctaatctttgtgcagaagctgaaatagcagccataacgttctccctagatgatttcgtggagcttctttgaactgtatctatctccagtcatttttgtggaagaaattttcttctgtactttttagggatgagaattacctg

SEQ ID NO: 192952 - DNA, 299 bp, Homo sapiens
atagcacacacaggaaatgacagtatctgtacagctctctgggtacgcaggcctttggatttagaggcagctcctgccctgtgggtatcagtatcatgacaacccacctgaaatccatgtgagtcccttactgaggcccataagctggggagttctgtctagtccagctctaaagaagagcaaggaagagccattatcagaatattcttggcttggagtcacttttaagctccaagaagtaactcatctgtctgcccactatctctatttcattaggattccaaggtagcacccactct

SEQ ID NO: 192953 - DNA, 324 bp, Homo sapiens
aggtgtccctattaaatggcgagatacccagaaacattaccctgttgactccagtatgctggcaacgaggctttatagtctttgggaaggagactggaagattcttctctgggaaaaatgtacacatactgacctttgaaggacccccagtaatcagccaggtcttacctgatcatcctatagtgaagccccccgacacagtatttccattcatagtttagctcttaaatgtgaattagctatccagcaatcaccagacacttgaggaaagcctccagaaaacaaattggaaaaaggggcaagtcataggaaacagacaaaaca

SEQ ID NO: 192954 - DNA, 556 bp, Homo sapiens
ctcatgcttgtaatcccaatactctgggaggcagaggagggaggatcaattgaggccaggagttcaagaccagcctgggcaacatagcctatagcccaggagcccatcgctcctctctacaaaaaataaaaaaacaaaccaatgagcctggtgtggtggcctgtgcttgtaatcctagttccctgggaggctgaggcaggaggatcgcctgagcccgggaattcaaggctgtgatgagctatgatgatgccactgcattccagcctgggcaacagagtgagaccttgtctctaaataaataaataaatcggcacccaggatatcatcctcagggagttgttgtagaataaaaaatgcagcaggaaccactgctccagattgctgcttcccacacgggctgggctgaaaccttttcctcctgccctctgttgtccctgtcagtaggtcctgtggagtacttgctgcctgggggaggcccttcctcagggagtgtccagcagagggaagagcagaccacgctctggaaggtccaagccgatcatgcacgagtcaacag

SEQ ID NO: 192955 - DNA, 606 bp, Homo sapiens
atgaatgaatggatgaaagtgactgcaggtattacaggtgtaattgagaaatacctagataatatccgcattgcatggaagtgaggttattgttgtcttccctaaattagagaagtgaggcaggcaagatggccagcagtgccttatctctgtacctcgttcttggaccctaccacctgagtatctaggtgttggcatagatgggtttggggttgtcacttttcccgtgagagcgcacatatagctggctcacaggcttttgaatactgtgaagacaagctttgtgaggcagtggtcaccctcacgtgagaaattgtctgttttgacagtaggttagagccacaaagctattagtagttaatcatataaaacttagctgtttggaaaagaactttggaaaattttgctgctttagcaaaaacttgataaaagtgaggcatttgaaaaaaaggcatttgttgctgtggaactcacattgttaatcatcagtagttttatatgtaaaaacttggaatggtcttgaaattctcaaaatgttataggaattatttttataaatgttttattttcttacatgctgttttgggttttctaccttactctttg

SEQ ID NO: 192956 - DNA, 160 bp, Homo sapiens
tgtgtattttaccataaatatataaaagctattattaatcttataatttttaaaataaatgattgtcttagatttttctaaaatatctatttgtttaaaaaaaaatgcaggaatacaaaatggcaagaaaactgtaccaacactttgggaggctaggagg

SEQ ID NO: 192957 - DNA, 468 bp, Homo sapiens
tttgtttaggtaaaaacttccactttgtagccactaaaattctaaattgcttttggtaagatttgcccattcttttagaagagcttaggttctgagatgctattatgagaagcacttgagactataacatccttctccccacacccccaaactgggaaggagctgggagaccaaagaataacttggataaatctagcttgacggctagatgagcttgttaggacttaacttcaggacactcctggatggtggctggacagctctagagatccacaccacctcccatttctaagctgcttttaagttaattttctggccctttgtcaattttgtgtggttttccttgatatgtccccagctatgccccaggatgtttaggttctcagggacacgtggtccttggctgggcgcagtggccttggttcactgcctagcttttggggttcaagcaatacacatacactctta

SEQ ID NO: 192958 - DNA, 294 bp, Homo sapiens
ccagcaaaactgaatttcaaatataatgatacaaacaataagcacaataacgttttataaaatctgtaagttttagaagtacgtaaataagttgtaataaaaactccaggaataatgttcccatgaacgcttcccgaggaatcttaactagagaatgagcttcaattaaaaaaatgactagagacttataaggactggtgctgaacactgaatataccgtttcttgcaaaaactatacatggtttaaagagagggtataatatgtaacatctgcacatgcttacaacatatagt

SEQ ID NO: 192959 - DNA, 213 bp, Homo sapiens
gattcccttctgcccccccagccccctggggtgaaaagcactgcttttcctgtgtaaagaaaaaacgttcacacccagaccagtgaaatgtttttgtggccacgttgtgaacgcactgagtgtttgttgtggcccaactaagacaactttatagattaatgaagagtgatgtatcctttcttccgaacagaacatttagttctcactcggccc

SEQ ID NO: 192960 - DNA, 210 bp, Homo sapiens
gaattatttaatttgttggttttaaggcaactatgtaatgtgctagagaggaagatgaagatagccagtcatattttccttcaggcaattgaaactaaaagtatctgaagtcagcactctggacacattatgtctctggagcccattgacagttgatgtggtaacttgtagatctctgtcagagtcagagatgagttatttacgcttaag

SEQ ID NO: 192961 - DNA, 596 bp, Homo sapiens
tggctctttgtaaccatggtacggagtggagagcacgttctggtaaccttgagcatgaggtggggcctgggcagtcagggcaccgtccctgagagggtgagagcaaaagccagcctctgccctatgtgatgaaacccagcagccctaggtgacctgggccaggccaggcccctggggtggctttgcatgacatttaaaaaagaagtcaaaccctatccagctcccatggcccctcaagctctgggactcatctctcagctgctgccctgtccttccgtccgtgcaaggaactccaactttcatccagtccctgaaccatgccgagctgggtcctgcctcagggcctttgcacaggctgctcctcctgcttggaaccctcttccctcagaccttcctgccctgcctcctttgcaccgtttaggtcttgttcatgggctacccctcagggagctgtctacagccaccctggctatggcactgtcctcactcccagccaccttaccatgcacacagttggcattcagggagaggattaaacctcacacacacaggcacatgtgcgtgcacacacacacacacacccactcccgtaccag

SEQ ID NO: 192962 - DNA, 684 bp, Homo sapiens
tactacatggatacttaagcagtgcacttaccgtggcattttggtcaactaaaatttttaatgaaatttaggtgagttgattacacattatcgcacaaattattagcagcattaatagaaaaaatatatcagaaaataatcaggtcaggcatggtggctcacgcctgtaattctagcactttggaaggccaaggcaggaggcttgcttgagcccaggagttcaggaccagcctggccaacatagcaagaccgcgtctctacaaaaaaattgaaaaggtaactgagcatgtctgagaaaaaataaataaaaagaaaataatcaccctagtcttggccgactgaagaaagagttccttagaacacaaaagtaaaatcacttctagattaaaaaagagagagagagagaaatagagtgagtacatgtaagtttattgcacaagagcagattttaccagctcttacattaatccttgttaagtttcatctccttcctttgggcagatattccagtctttcatgatctgtgatgaattatgacataagatttaatcccttttaagcctatgtcatttgaaaagtcatatctttgttcaagttgtgatataaccaccttcttccagattgaacctatacattttttgggtactgttgtttagaagtcatctattttattaagtctatatt

SEQ ID NO: 192963 - DNA, 472 bp, Homo sapiens
tatcacttcttgactcagaacaaaggcaacacaaaacgcttctgcccagagttgacagcagagctttgcactgttttgttgcctggatccaccttgtataggctctctttgctcatctgctaatagctgctttgtttcctatatttcttgttcttcttaataaaagagctgctatactaactgaattaatggttaggatagaaacttttctttggaactctcatatgaaagttttagaattaatactgttcagaatgatagaatatttctaaactagaaccaccaataaccaaaatattggtataattgcaaaattcagctaggaagctaagttgcttgatattgcaataatattgctttctttgaatttagagaaaaatctcattacatgaccagttcagaactgtttcccataattctgaaatacacacatagattaggctggcttatttctaaaccagcataatagcag

SEQ ID NO: 192964 - DNA, 674 bp, Homo sapiens
tctgacagcatatacatctctattctttctaataagaatcaccaaatgttacacaaacataaaatagtttagagcacgtacaaaaaagttggtggtagaagtctacctggtgtccttgaaaccaatatacctaagaagggttcatagaggatgagacatgtatttttttttctttttgagacagagtttcactctgtcatccaggctggagtgcagtggcgcagtcttggctcactgcaacctctgcctccctggttcaagtgattctcctgctttagcctcccgagaagctgggattacaggtgtgcgccaccatgcccggataatttttgtattttttgtagaaatggggtttcgccatgttgctggccatgaactcccggcctcaagcgatccgccaacctcagtctcccaaagtgctgggattacaggcatgagccaccgcgccccctcagggcttattcttattcatatttccttgccccaacacagtgccttggaatgaataaatgaatgaatgaatgaatgaatgaatgacaacatgagataactgaatatatttctactctggactccagcactcatctatactctgttaatttcagtcaatttatttctcttaactaagtgtgagttcttacccttgtaaatcaagaagttatcaggttccttca

SEQ ID NO: 192965 - DNA, 213 bp, Homo sapiens
atctatctatccaaccatctccttccaacaaatcaaccatcgatttattccctttcaaccaaccatccatccattatcttctacccatccatccaattctcttacaactgataattcgtttttcagaaacagatctattttccatctgctatataccaccccttccaaccactctctcacttatctgcccaccccatcatacccttcccagca

SEQ ID NO: 192966 - DNA, 296 bp, Homo sapiens
gtcgatctgccggatcttactatacaccatggttgaccgttgcaggattgatcaaataaggaataagtgaaagacaatgaaagcaggtttcttagtgtcacagaaaggagttaggaatgtgggaagggagaaaactagaatgaaacttgtggtgttagattggaattagaggaattagtgtgaactcatggtgttcaatatatttagatatagaaataatatagaaatatagacgtgtgtgtttgtgtgtgtgtgcatgcatgtatgcatgtgtgttatgcaggagaaggaatcag

SEQ ID NO: 192967 - DNA, 448 bp, Homo sapiens
caatggaatagaacagagtcctcagaaataacgtctttaatccatgttgagttaatttttgtgtaaggtgtaaggaaggggtcgagtttcagttttctgcatatggccagctagctttcccaacaccatttattaaatagggaattatttccccattgctttttttttcagttttgtcaaagatcagatggtaattttcacatttcaatgaatttgtcaattttgtctaagttgtcatgtttattcacataaattttatattattaccatgtatttttaagtatctgtagaatcttaaagaatgtcacattaactcattttcaaacttggtaatttgtagtttttgttttcaagagctagtttggctagatagacttttgcttttattgatcctctcaaagtgtttggtgttgttcaagttttctatcatttttgcgttttattcgtt

SEQ ID NO: 192968 - DNA, 456 bp, Homo sapiens
gactcgagccccttggaggcggggcctcgggctgcaggggcggggccccgagccgcctgggggtggggcctcaggctctttgggggcggggcctcaagctgtctggggacggagcctccggccggctgggggcggggcctcatgcctaagggcggggcctcgagctttctgggggtggggtctcaagcttcagggtcggggcctggagccgcctggggacggggcgatctgttggggaggaggttctcgaactgctgaggaggatcgcagtgcttttgcttcctctaggagaccagctgcacaggctggaacatgccatctctatgcctgttttcccgtcgataaatccagagacattactctcatcatttcttcctctgtacacaatattcatatatgtaaccccttggtaaagcagttgtaagaattaaacaagaggaattgctctttcattca

SEQ ID NO: 192969 - DNA, 465 bp, Homo sapiens
aggaaatatcatatgtaacttctcataattatctcatcacttccaatagcaatttggaaaaggatgctattgaactatactgtcaaatatggtagccactatcaacctgtagctacttgtttatgtttaaattaattcaaatttaaaatagttctccagtcacactagccacatgtgaaatatgcagtagtcacaggtgattaatggctactgtactggacactgcagatacagaacatttccatcatcacagaaaaaaattctattggatagcactgctctagaatggcaggggtgggaggagctatgtgtttttataattaaaattttaatcagaacacagccatatccatgtgtctgtggccataaaagcactaaaaggtcagagatgagtagttgtgacaaaaactatttggcccacaaagactaaattatttacttctgtaaggacagcttcaatctcaa

SEQ ID NO: 192970 - DNA, 425 bp, Homo sapiens
tagtgtggagaaatgcagacatgctccttacactgttttcccattccttggtatttctaactgcatacccatcatccccagtgttgacttagcctcccaggagaaggcagcaaggaacagcaactattaatagaaggtgtagaggccgggcagtggctcatgcctgtaatctcagctctttgggaggctgatgcgggtggatcacctgcggtcaggagttcgagaccagcttgacaaatatggtgaaaccccatctctactaaaaatacaaaaacaagctgggcgtggtggcaggagcttgtagtcccagctactcgggaggctgtgacaggagaactgcttgaacccgggaggcaaatgttgcagtgagccaagatcgcaccactgcactccagcctgggcaacagagtgagactctgtctcaa

SEQ ID NO: 192971 - DNA, 475 bp, Homo sapiens
ttctccccctctccctcctcagcatcctctactcacaacaccttctgaaggagcctcagtcctgccatgactggcagaacctatcacgagcatcgccggcatccatgccaacagctcacctgcaaggctttcaactctgctgaccttcagagtgtcagagcagtgccgaagcccaggacatggctgtcatcccttattcctcctagctcaaatcaccctcaatatcctgataggaaccaaataccaggccatcccgccatttcagtctctgtcccaaggactcctcattaaattccatcatcatccttcagctaacaaccaaaagccttcctgaaacacagcctcatgcaaataggtactgagaaaacttcctagcccctagttctgcaaacactcacctacgcagtttagaatcagctaggttacgtgcctgtgcatttatatatgcagataaataatacagcagctatactac

SEQ ID NO: 192972 - DNA, 615 bp, Homo sapiens
cataaaacaaatattacagctaaagagagagataggccttaacacattaatagatggaggcttcaacactccactttcagcattggacagatcagatcatccagacaaaattaacgaagaaacatcaaacttaatctgcactgtagaccaaatggatttagtagatatttctagaacatttcatctgatggctgcagaatttacattgttctctttagcacatggatcgtcctcaaggttagaccgtatgttaggccacaaaataagtcattaaaaattcaaaccttgatactaaaagcagacaaagacacatcaaagaaagaatactacaggccaatgtctctgatgaatattgatgcaaatatcctcaacaaaatactagcaaaccaaattcagcaatacgttagaaagatcgttcattgtgaccaagtggggtttatccctggggtacaaggatggttcaacatatgcaaatcaattgatgtgatacatcatgtcaacagaaggataaaaaccatgtgattatttcaatcgatgctgaaaaggcatttgataaaattcaacatcctttcatgataaaatctcttaaaactggttatggaagaaacatacctc

SEQ ID NO: 192973 - DNA, 648 bp, Homo sapiens
gtagagtggatgatttgcaaaagacaggaagatcctcgttatatttagggtatcttttctttccacattctgaatttggcctttaagaatattcgggccaacacaaaaggcccaagttgctgctgttaccccagcaagctgtgcgttagggtcttgggggaaggaagatgataattagaagaaatttggatcaggcagctcatcaaaaaatagagaaatgaaagccttccttcttctctctcaagttagtagcaagtaactgactgtactttatcctttgtgtgacctggcaggggcagaactaacgttttattttcttgaagtctcagaggagccttttctggaagctgcatggttatttcaaagttggaaaaaataataggttcctgtggaaatttatgaaaacattttttcttgacttccttctcaaaaccttgggtgattgatagagggagcatggtttaggaaccatattttgaaagcaaagtggcaagagatgaggggtagagccttcaggccttctgtgaaattgagattgcgttctaagtgcagtatgcagccactgaggcttttggcaggcactgatgaacacttctgtaaaccacagtgtttgcaagtctgccaccaatttccttgctacaaagcctg

SEQ ID NO: 192974 - DNA, 497 bp, Homo sapiens
acccttcacacagctgttgtgctgagcagtagtgctttcaggaaagatttaagagagttctaaccagaagcgcctgtgacttaattaccctctccagctcagctcctcattgtataatggcagttagggttaatatctactcacaggggcattgagagcaatcagtgagcgcacacatccagactgagacggcacttagctgaagtgtgctcccagccagcagaagcaactcagcatgcaaggctgcctggattgcagtctacctatcttctagatataggagaatttattgccaattaattacagaacgtgtcagtcaagttctaaggagcattttgagacccattaaagaacagtataaaaatgtgtacaccttccttactcagacttcttcagtaaaccaagaaagtggtaattctttcagggctacggcaatgattagtcatgttaataagtgagttaacacttactaagagtttgttgtggggaagtcattc

SEQ ID NO: 192975 - DNA, 363 bp, Homo sapiens
aaaacttttttttttaagttttgtttttatttttatatcagggtagttgaaacaatttaaaaattaaaaaaaattttttgcagagacagggtctcactctgtcacccaggctggagtgcagtggtgccatcatagctcactgcagccttcaaatcctgggctcaagcaatacccccatctcagctcccaccaaagtcttgggattataggcatgagccactgtatctggccatataactattgataattacttttaatgactacataatactatctctagagaggcaccatgttttcctcatcatttctctaatattaataagttaggttatcttgaaattttttgccattataaataattcc

SEQ ID NO: 192976 - DNA, 355 bp, Homo sapiens
atgcccacatggagagggcctgcctcacagtgaagacagtaggaaggaaagcagaggtaagagttgaaaagtccaaatccatatatgaacactgcgattccgccattcccgaagctagttaccctccagacttttcagttccaggaggcaatgaaaccccttttctgcttatgcccgttaggtttggattttctgtcacttgctactaagacagccctcactgaccaagtgaagctcagagatgggacccaacacacccaaggtcacatagctacgaaagcagtggaacagaaactcccatgaaagtctgggcttttttttttttttttgagacagtcttgctctgtgtccaagg

SEQ ID NO: 192977 - DNA, 312 bp, Homo sapiens
agtttagatgatgtcttagtttattttatgttgctataatagaataccacaaattgggtaatgaaataaatttatttcttacagttctagaggctgagaagtccaaggtcaagggccccacatttggccagggcctttttgctacatcctcttattgcagaaggctgaaggaaaagagaccaagagaggaccaaatttgcttttataacaacccactctcaccataacaacattaatccagtcaggaaagtggagccttaatggcctaatccctctccatcgtcccatctcttaatattgccacagtgactg

SEQ ID NO: 192978 - DNA, 325 bp, Homo sapiens
tctcagctaacctacaggctgctcaaagtcagacagtgtggcttctgctgagctcttctgtccacagccacccagtgggaggctggtgtccccagtacctcatcacagcctaatgccagggaccccagggacagcaccgtgagcagccccgccgtgagaagggatggtcatggctggatgccagggatgctgccagtgtcccaggtgacagatgcccctccagggcctggactgagccgctaggatgcagaaagagccacattcaaagccttcactttgtcagtcaggggcagcacaccggggccccagatgtatttgggttggt

SEQ ID NO: 192979 - DNA, 486 bp, Homo sapiens
tttacagttaggcaacaggagtactagacataatgattgacttcccgaggtcacaaggcttagtaattggttaaaacaagaagtagagtcaggttcatatcactccaaaggctgggtttcctctgcttcttcgtgctgagtagtacataataagcaattcattgaatgcttgagtacacatgtgcacatttagatgggtgagtagtggcacaggtggaggaaatctggtggagaaattgatgttagagagaaataatggaaaatgagtaacttcaccttgagggaactaaaaattttgaattcagtgagagcaagtatttaattatatttgtcatggtatttaaagcatgttagtcattatatactttttttttttttttggcctatgaaagattttaaacttggttccaaaatgtggtcaaatgccctgtgaggatgagaaaataatgtcaatactatgagttcactttaataaaggctaagagg

SEQ ID NO: 192980 - DNA, 186 bp, Homo sapiens
aaccatctacttgcaaaattaccactttatcctaaaaggatacaactcaggaacagccagatggaagagatgcattgggcagttatagggaaagaggcatggagcttccatttcctctccaggcccactgcccttccaagcacctccgtgtgttcaccaacctggaaactcatcatatcttcttgt

SEQ ID NO: 192981 - DNA, 379 bp, Homo sapiens
aatgagctttatggtgctgaaaaatcgcttagggcacagtctctctatatgtataacatgagaggtagggtgggaggaactcttctaagcccagactctcttgttcttgactatgtctccagtgtctagaacaatgccagacacatagtaggtactcacaaaatatttgagtaaatgaaaatttccccctactcctactgtgtacaatgggtatacaattgcactatcttgcaactgaatccgaagttggaattccaatagcagccccaagcttatagagcccagctgatctcagcctgtccttgttttattaggaagcttgggccagaacagccagtggcttccttgaccttaatgagctttgttctttccaacacac

SEQ ID NO: 192982 - DNA, 678 bp, Homo sapiens
  misc_feature (5)..(5): n is a, c, g, or t
  misc_feature (7)..(7): n is a, c, g, or t
  misc_feature (15)..(15): n is a, c, g, or t
tgagngnacacccgnagaggtacctcaactcgtcttgccaagtgcagtggtgtcatctcggctcattgcagccttggcctcccgggttcaagcgattcttctgcctcagcctcccaagtagctgggactgtaggcatgtaccaccacacccagctaatttttgtatttttagtagagacggggtttctccatgttggccagactacctgaagtgatctgcctgcctcagcctcccaaagtgctgggattataggcatgagccaccgctcctggccagtttatagttttcttattttttattttatttttatttacttatttttgagatggagtcttgctctgttgctcaggctggagtgcagtggcacaatcttggctcactgcaacctccacctcctgggtttaagcagttctccctgcctcaacctcccgggtttaagcagttctccctgcctcaacctcccgggtttaagcatttctccctgcctcaacctcccgggtttaagcagttctccctgcctcaacctcccgagtagctgggactacaggcacatgccagcatgcccagctaactttttttttttttttttttgggacagtctcactctatcgccaggctagagtgcagtgatctaggctcactgcaacctctgcctcctgggttcaagcgattctcct

SEQ ID NO: 192983 - DNA, 364 bp, Homo sapiens
gaaaaaacttcttgctcattttgttacaccaggatataggtgacaacctaaattcgtctgacaacacaacaaaaacaagataaatgaatggtggaccaacttaggcttctgtaagacaggtatgggtgaaaaagggaaagcttttcagatttttgtggccatatgaggatgaaaacccatgactgtccttgagttttcttaggcacaggagaaaggagttaggtggcaccaaagttatttgacaccagaaatctgaaagacagtaaacatagtttcattccaaatgctgagtcattcttatggggaagaagagaaacacttaagactctcacttccctgaggtcttggtcttcactagattgcc

SEQ ID NO: 192984 - DNA, 386 bp, Homo sapiens
aatcaaacaccttctacactccactctgcagtacagaaagagccaaccaatgatatactgctggttaaatccaggctccactataaagtttgaactttgtttcagaggaactctgctctagaaacaaaggctgagagtgtgttttgtgggttgcagtatacacagaggcagaggtggtatcgtggcatcatctgatttgggatctctgggtgattggcgtgactctcaattcttgattttttttccctcttcccaggaatggggtaaattactatcttttagatcttattagactgtctttccaacctacaagaataaaatagctaaggagaacacaaggctgtttataatgaacttggaccaagataattgagcaagcatcacat

SEQ ID NO: 192985 - DNA, 466 bp, Homo sapiens
gtgccacttgcacgtgcatgtgcaagagcatttgaggtctcagagaagatcccaaagaatagacagcgcccttgttagcacctgggctgacaggcttctttgggagagatgacaacgaatagccatgccgggaacttgccgtgtggcccctctccctttccccacctgtgatgtgcagggccactgaccccaggtgtcctccctgctccagtgatcatggacagcatggggtcatgggcgtacacacaggtgctgataccaggggtcagtatttaacatacttgctttacagatgggaacagggaggctcagggggacactctcaaaattacacagcttttaacaggtggcagaattggggttcagacccagatctgggttcaagtcactcatggtgtgattgcggcagttccttcccgcatctgggccttgccatctctctctccgagtggacatggagaggacg

SEQ ID NO: 192986 - DNA, 299 bp, Homo sapiens
aaagaggtgatactggagctaaaatgaaaatgatgggaaggatccgactaatgccatgatcctggggaagagagacagagggggacaggggcaggaacgagcttagagaagtcaaagaagagagagaaggcagagtgcctggagcacacattcattccacggtctctgctgggcaggcaaatccttcacgggccaggcatgtggagagaaagatgactatgattcagcccattggctcatataactgacaggctggtgaaggagccagcatggcaggctgcacttgaccactcttcatt

SEQ ID NO: 192987 - DNA, 444 bp, Homo sapiens
attctttcttaaattataagactaaatgtgaacccaaaattcgaattgaattctgttcactgttaaagacaaaatacagcagacgactgaagagtttttatttgggttgtgatcatggcgaggacattcattacaaagaaaaatctcaaaaggaaggagtttgggggctcctaaaggcaggtaaatcagtgcatggtctgtgaccctatgggagtgtgaggaaggtgggggcagggcttaacttgaacatgtgaggccagggtgggtttcggcaaacacaaaagactgatgttggagaaattattattttttctattaaatgagtacaaaaaatggaataaataacaaagtagatgcaattagtttaaattacagagatcagaaaattgcaagtagaaataagcaggaaacattttaaaacctgtcaacacccattaagacaaa

SEQ ID NO: 192988 - DNA, 469 bp, Homo sapiens
cattgctttatctgagctacttgttccttgttctaagtctgggggagagaaagggaacatctgcaggcaggatgggggaaggtggtatgaaatgaagggccacacacctatttgttggttggtatcagtacccacaggggcaaagcaacaaaaagaagtaccgtctgctttgaaaattgcctttctggccaggtgccatggctcacatctataatctcagtactttgggaggccaaggcgggcagaccacttaagctcaggagtttgagacatgtctgggcaacatagggagactccatctctacaaaaaatacaacaattagccaggcgtagtggcacatgcctgtagtcccagctacttgggaggctgaggtgggaggatcatctgagcctaggaggttgaggctgcagtgagccgtgatcatgccactgcactccgtcttggacactagagtaagaccctgtctca

SEQ ID NO: 192989 - DNA, 652 bp, Homo sapiens
gatgctgttaaacatcctgcaacaaataggacatccctcacgacagagttatccagcccagaatgtcactagtgctgaggttgagaaaccctactctgaagtgacccagccaggtatggcagcacacacctatagtcccagctactcaggaggctgaggcaggaggatggcttgagccaggagtttgaggccgcagtgagccgtgatcacaccactgcattccaacctgggtgacagagcaagaccccatctgtaaagtaaaataaaataaaaataaggagacccaaataggctgtgagcttctgcttaaaatctcctccaccaaatactatgcagccgtaaaaaagaagaagtcatgtcatttgcagcaacatggttggagctggaggccattaatctaagcaaactaatgcagcaacagaaaaccaaataccgcacgttctcacttataagtgagagctaaacactgaatactcatggacaacaaagggaacaacagacactggggcctacttgagggtggaggttagaaggagggtgaggatgaaaagactatctcttgggtacagtgcgtattacctgggtgatgaaataatctgtgcactaaacccccatgacatgcgatttacctatataacaaacctgcacatgt

SEQ ID NO: 192990 - DNA, 189 bp, Homo sapiens
cccaccttcaataaagggaatcctgtgggaagagaaaggaatgtgttaaagtgtagatcaagaagggacaggagaataaaaagaaatggaagcaggtgcacacacaggaaagatgatgagtgttctattgttgttaaagagttcatgctctaacaacacaaaccaaattaatcccagcctccccactta

SEQ ID NO: 192991 - DNA, 263 bp, Homo sapiens
ctgatgtagaactgcctcttagggatatagaatggagagcagtttgacactgtgaggtgctgaaaataaccaggtaactaacacccgttgattttgagtgctttggtttaagtgggagtgctgagaggaactactttagaaaaatcactatgtagttgacccgtgaaaaatatgagtttgaactctgcagcacttccacatggatttttttagccaaatgcaaatcaaaattacaatattctttgaaccggcggacctgtgta

SEQ ID NO: 192992 - DNA, 911 bp, Homo sapiens
gtcggtctcggggaggcgttgtagcctcaggagtgttctctgggtgtgactcacacctggccacatgtgtggtcgtccttggttctccaaggaaacctgtcaaacttaaaacagttttaagacattaatttgctcaacgatgttcaaatacttttgaaaaaattggtatgtatgcaaggtatgcatgatgaaactgactccagaagagagggagacactaaattgaccagttattaggaaaaaaattaaaaagattgatcgacttgtcaaagttgctgtcccaaaaaagctccagatgtaggtgtttccagagtggattctaccaaactgttgaggaacatccggccccagttccctttcaaccagccagcttatcagacagaaggaaaatgcagggatacggaggcccgacagaaggtggcaccgtgaaaacagctgtgcagttgtcttgctgttgcttgtgagtgaaaccatctcggcttaggacccaatagcaaataaactcgatccaatgtgttcatactagaaacgtaaggataagttcatgttccaaaaggttgagggatgtaattccctgttttcataagttaatagttcatcagtagaagaaaccttgttaggttatctcgatagatgctgaaaatgtatttgttaatattaaatgcctacttttgattgaaaaatgattattcttaataaaattaaaacatgtatttccataatataattttaaaacacagaatcaggcatttccactagtgtcagggacaagacaccccatgtaaccacagttgtgtaatatactttcagaagctctagctagtgaaattaacaatttaacaagagaaagaataatgtaaatattgaatactagaatggagagacgttacttgcaaatatgattgtgcatc

SEQ ID NO: 192993 - DNA, 718 bp, Homo sapiens
cccctccagcctctactctcatcacttccccgccccctcatactctagactcaggaaccatttgtaatttcccgataaactccactccgacacacttccacccacatgcctttgctgatgctgatccctctgtctggaatgcctatctggactctgtttaccttgtgaaagcccagtggtctttagggctgaaacatcaaaggcagccgagtgtcacaggtcccagtttggactctggagtcaggcagactggtcaccaaacccaacccaccatttactaggtgtgtgagcctggaggagttgcctaacctctttgaacctcagtttcttcatccataaaatgggtataataacagtcctgaccccttgggtgacttcaggatgaaacacagtgacgcctggctgggctgcatccttagctgcactgttcttctttgaagcataatttgccctccctgggcccccttttctacactgtactctggggaagtttgtatgatggttttgcacatacccttgcattgatctacttgtggcccctcctacctcacctgactgtgtgttctgaagctgaaggctgcaagccccggggcctggtgcccatgcctctgacaatggtgggtgctcaataaccaccactggtagatacaatcaaatcaagagtatcgcacacaattcagggtgtgtagtggctagagtgtggctgccctttgtcaac

SEQ ID NO: 192994 - DNA, 709 bp, Homo sapiens
gaaagacttcttagaaaggaaggaagtagaccgggcatggtggctcatgcctgtaatcccaacactttgggaagccgaggcaggtggatcacaaggtcaagagatcaagaccatcctggccaacgtggtgaaaacctgtctctactaaaaatacaaaaattagctggacatggtggcacatgcctgtagtcccaactactcgagaggctgaggcaggagagaaaaaaaagaaggaaataagagggagattgggagaaaagtaaggtgttatagctctgatctgtggtatctcctgttttccttgcggtatgactagtgtgagccaaggatagagaccaacaaactggggtaccaaagtggacaatgaagtactatgtaattagtgctaatgctaaattcattcctttgtttaaggcttaatatccttgcagaagccatcctgtgttacttgagcctggactagtattggggtgaagtcaagcatcagagtaaaacatttgtccccttaatgttaccccctcttaatttctaagaaccacaggcccattttgcccttccttgttaccatcattgagataaggaataagatgtagtaaccccaagttatctgataggtacaactgacctattctgtttggcagctttatcttagacctattctgtttggcagctttatcttagccccaaccaaatctcttcctttcacatg

SEQ ID NO: 192995 - DNA, 754 bp, Homo sapiens
ctgttgccctcaaaggaaatccaatgttatacccccacaccttagttaattatttcattaaaattttttgttatggcgggcatggtggctcatgcctgtaatcccaacactttgggaagccgaggcaggtggatcacaaggtcaagagatcaagaccatcctggccaacgtggtgaaaacctgtctctactaaaaatacaaaaattagctggacatggtggcacatgcctgtagtcccaactactcgagaggctgaggcaggagagaaaaaaaagaaggaaataagagggagattgggagaaaagtaaggtgttatagctctgatctgtggtatctcctgttttccttgcggtatgactagtgtgagccaaggatagagaccaacaaactggggtaccaaagtggacaatgaagtactatgtaattagtgctaatgctaaattcattcctttgtttaaggcttaatatccttgcagaagccatcctgtgttacttgagcctggactagtattggggtgaagtcaagcatcagagtaaaacatttgtccccttaatgttaccccctcttaatttctaagaaccacaggcccattttgcccttccttgttaccatcattgagataaggaataagatgtagtaaccccaagttatctgataggtacaactgacctattctgtttggcagctttatcttagacctattctgtttggcagctttatcttagccccaaccaaatctcttcctttcacatg

SEQ ID NO: 192996 - DNA, 646 bp, Homo sapiens
atccactactggctgacccactactgtgttctcaactacagacttcttaagaccaggcagccctgtgctgccagggaaagacaggctcctcccacccttatgttctggctaatttgtggagagccacagtggtgtctcttagtgcatttgtcatcacagctcttcctcgttcaaaattgtatccgtgaatgataccacgaacaaccacaactgcaagcagcaaataaacaactgccgaatgcacaaaaacaatggcaaattgctcctaaaataaaatgaacaaacttgttttaattggacagaagtggaacagaagtagaattgtttttctgggggtaactctaggccatttaaagctgcaaagagtgcctttgcctagctgctttcttcatgtcctgaggacaggacaaaatgcccgggaaggggcctcacatgtctactactcaggcagctgcccacagagaacatgaatcccttgccacgtcacacatgccaagcacacacaatgcatcatcaacaggctgggctccgcctggtccaggccactgggggacagcacttcccttctctctgctctatacaaaaaggtgccctaaaatgcaggccgacatttaagttcctctgccacaaatgacagagatttaca

SEQ ID NO: 192997 - DNA, 312 bp, Homo sapiens
gcatagtggttgtagtgatagtggtagtaaaataatcaaaacctaaactgagagagggtgaagagaggcaggtttccaagtgtgcactgttaatgcctacataatcaagactcagctgttcagcactgagtgggagggtatttctgggagacgggtggagcttttctcctccttgttggtgtcttcacaaattccagcaatcaaaatagtcattttccttccttgccaatgtcatcttaaaagaacctctctctaaacccaggtgcttaaattgtccagtgagtttctctcctctttaagaagaagttgagg

SEQ ID NO: 192998 - DNA, 395 bp, Homo sapiens
acaaggaggctgagttccaagtccagaccgaacctgcatcagggaggagggacatctggtttacatcagtgatgactctttttcattcatttattgagcacctactgtatacaggcagtgatggaggaacagggagcatacctattctaaatagataagtccacattgttgtgtgtgataaaatacacataacttaaaagttaccatcttaactacttttaagtgtacagttcagtggcattaaatacattcatattgttgtgcagccatccccgttgttcatctccagaactttctcatcttgcaaaactgaaactctacccattaaacaaaaactcccccttgctctccaccctcgcaaccaccattctgtttcctgtctccttgaatttgac

SEQ ID NO: 192999 - DNA, 271 bp, Homo sapiens
tgggctcagattcagcccctgcttgcggtcctcgcaccctctagtggccacggggagaaagaagtagctcagcggagattctggagctgggtccgggtggacactgcaccccacccggcaagcaggagagagaacccagaagaacggatgactccctcacacgcctctttctaaagcatgctggcgctgaataaccacaggggtccgtgatctttatcaattacatgtgtccggccttattagctcttaaaggaatcttgttttctctctc

SEQ ID NO: 193000 - DNA, 464 bp, Homo sapiens
cctgcctcagcctcccagagtgccactgcgcctggtctgatacacgcatctaaatcaataaagtaacatgtccatcttagttgatgaatttgtcagggagaagggactatgttagtgtgtaggatgagccatgtggccagatactattatgggtggaaggtcatataacatcagagcgtgttggataaagggtagacagaagggaagagtcagtgagagcactttataacataaaaaagtgaaaatttgctctccctattttttttttttaataaaaaagcactgtggccacatatatacacacatatctgttcatacttacttattgtattcaaaatccagggtactgagttattttttttcttgaatgacagaatgggagagatggtaacatatgtgagaggagaacggactgctcttggcagtcatttgtttcatccaggtggggagactgttattttttt

SEQ ID NO: 193001 - DNA, 325 bp, Homo sapiens
ttgggaggccaaggtggatggatcacctgaggtcaggagttcgagaccagcctggccaaaatggcaaaaccccatctctactaaaaatacaaaaattatcccggcatggtggcacatgcctgtaatcccagctactcaggaggctgaggcaggagaattgcctgaacccaggaggcggaggttacagtgagctgagatcatgccactgcacactccaccctgggcaaccctccgtctcaaaaaacaaaaacaacaacaacaaaaaaacatgatgaaattggcattaagtgttaataatgaatcgtatgagcttggttaaagggag

SEQ ID NO: 193002 - DNA, 400 bp, Homo sapiens
tttcaatgcagttacttatttttcatgccttcaatttggtataaatatttcttttgcccagaatcaaatgcataaaaggtttcctttcatctcaaggatgcaagttattttgttatcttctatgggaaattaataatggtggggtcaaggtgcggaaggaagttagcggatccctctaacttaatgactgcatattgtaatagaaataactcataacgatgcaattcctctcttcccttctgataaacaagaccatggcttagtggtcattctttttcttttctatttctcacttactcctgtcctagttattcaaatacctagccaatgacttctaaaggtgccaccacctgaggtcagctacgctttccagaattagacataagggtagagatggatg

SEQ ID NO: 193003 - DNA, 588 bp, Homo sapiens
tgacctgatcaccaagcaagggccccaccgtccaataccatcaccttgggggttaggatttcaatacataaattttgaggagacataacatttagacaattgcattaatatttaacaaatatttactaaccaacgcattttaagaagagttatcactttcaaagtccatttttgaggaaaggaatttattttaaaaatgattgcgtttcttaggagttttcttcttgcctttggaggcaatttcaaaatatagtttcttggaaacaacttaactgtccatcttgaggggaatagtgaattaaataatggtacacccaggcattggtgtactcttagctacaaatacgagaatgaagaatactaatatggtaggatctctgggatgctatgagatgagaaaaaagtaaggtgcagaacaatgtatactatatttgaacaatgcgtatagtatgctacatttgccaaagaggaggaaataaaaatgtatatccatatgtgctttgttttaaggaaatgctgaatgatgtacaagaagctaatacaagctgcacctgtgggacagggaatatggtggatggagagagggtg

SEQ ID NO: 193004 - DNA, 438 bp, Homo sapiens
  misc_feature (3)..(3): n is a, c, g, or t
ggnccactctagagtatcccccgtcttttgataggtaaactgatcaaagtaaccaagtaagtaccaatactgagctttaaatgcaagcagtccagattcaagttgatgtttttaaccactacactctagcctctcactcttcaataagatcatagaccaatttaaataatcttaattctaaactctagaagcctagttacagaaagggtcccatatgcctgaaaacatacatctatgcccctgttaagaaataagcctagttaagaaatattcaatttagcagcataacagttgcttctattttaaatatctatggcagaactattgtgagtagacctgagtatgcaaattagaaagcattctaaggagctgattatactagctcccaaaattcttctgaaaagacgaaaactcctatcaaaagacgagggtaccgag

SEQ ID NO: 193005 - DNA, 1181 bp, Homo sapiens
agtagaaacggggtttcaccatgttagccaagctgctctcgaactcctgaccttaggtgattcacccgcctcggcctcctaaagtgctgttattacaggcgtgagccaccgcacctggcccacaaactattctttgaaaatgcttcttgcaactgtggggagagatcgggccagcagacccgttccgaggggaggatcggctggtgtatagagcagggttgcacgctggccccaaaactctcctcagatgctccagctctggggcggaactggcctgaaactgatagtgagttcctggactagtgttcccagcctggcacgtggtgcctggttagaactgactcatcatggtaatatttcctggaaagttctggaagaattgtgagattgtagagtcatgggtttcccaaacattggttttggtttcttttcttggctttccctgcgtagtctctcacctcagctccgattttgtgttctagcacccaaccctaatggtaaagacatcgaatttatccactccagtaagtctgtttctttgctaatgactttatgatcttcctgtctatccagtgttccagctaatccactctgggtcgtaaggctgttcccctaggcacagtgggcacattttggttttaattcatgagagaatggcatttttgacccactgggagtgttccattccaaagtctcatgccaaagttctgggcatcttaattttgagactaaagccacagcccttgtaaagaattggcagtcagcagggctttctccctgataagtggtgtagacgttctttacagcccattgtatttcttgtgacagtttaagtttctaatttcctgacactgtagggggggttgggttccagtgtagaaggctggaaattttccattttttcccaacataatctacattccaacattgtaagacacagcttaattctttccagttgtgttactattctttctctttcatatttttcagtctttctcattcatggggtattctctcctatactggaaagaggggcctttgaccttcagttatgaaagtcacatccagcccatggttggaatagagcacacagcagagcatgttgagtagaatcagttggattaggttaattaggaagaagcttcctgaaaatagcaagctgagcctcagcttctttcata

SEQ ID NO: 193006 - DNA, 540 bp, Homo sapiens
tttccagctatagaggcagcctctgctagtaaagggtacctatgctatattacaatgaaatgttttaaatttcaaactggtttatgtttttaaaagaagacaataggaaaagctaaatacacagcaacaacaacaactatattgaaacgtccgttgtgccgataagttcctttaaactaccatcttggaaatatcctgttgagtgggtgttggtgtgggtaacaataatgttgttttcataatatgtgctggcagattagcacacttctctacagtgttaacagttgtaattaaggaataaacagcacagggtgtcagtccgatgacaatttcatctatagtgtcacaatacaaaatgtcacaaaatattagaactgttatataactataaaaagtatcagcttaaaagctaaaagcctttgaaaaaagaagacagaggaaggaagaaaaaagaaaactggcatagcaaccagaacaattttataccttctcaagaatgttctgtcatgaaaataaattgataatttttttctgttaaaa

SEQ ID NO: 193007 - DNA, 353 bp, Homo sapiens
ttttctcaaggagtatgagtacttgaagggctccattcacataattttaaattgctttctataaatattatatcaatttataataccgctaatgaggcatgagagttttacatctgtattagtctgttctcatgctgctaataaagacctacctgagactgggtaacttattaaaaaaaaaaaaaaggtttaatggactcacagctccatgtggctggggaggcctcacaatcatagcacaagacaaagtaggagcaaagtcatgtctcacatggcagcagacgatacagagagcatgtgcaggggaattcccctttgtaaaaccaattagatttcttgagacttaatcatta

SEQ ID NO: 193008 - DNA, 629 bp, Homo sapiens
tgcactcataaccagtggtatgctggtaatgttgaaccaccagctttctgtgtttgcggggagagcaccctgatttgtaatgtttgccaattactgtggtgtcaatatttccatcacagctgatgtcaagctgccaatgtgacatcactgaaagcagcattgggaagagatgtacacagcctgggctcctgagctagtgcaagtcactgggaactggctccccaataccactaacttcatcatccaattgagtgcataagatacacagaaggaacatttccagcagaaaagaattgaacagctatagtatggcagagggaggaaaatcactgaaacaaatactgaccatgcccttttgagtactattcaggagagaggaaggcttgacaatctgaactttaaatatttcgaaatccaaagactacatccccagccctgtaaaataaattcataaggttattttagctcagtgccattaaacaataacttatctaatgccttattttccatccttttccagtcaaacaagcttctgctcatggcctggctttcttttttttttttttttttttattatactttaagttctagggtacatgtgcacaatgtgcaggtttgatacataggtg

SEQ ID NO: 193009 - DNA, 392 bp, Homo sapiens
ggccagctgcttccaatgtctgctgtcactgcctctgctcccatcattcaaggccgggggaactccagtggcaaaagccccacacccccaatctacatgtgggttacattattttgttcaccactggtcagtgcaaaatttgcataggtaattctcaagtgctggtattcctggcagatgtgacactgggccaccccatagtgatggtgggcctgccaatgactgtccaggatggcctggggctataagtaggaaaggagaagttttagagaaacaaggaactgaggcagagtagagagaagccccttcaacataggcagagttgtgaagttagtacccaccccgcccagtcacacggggccttgaacccaagagttgttttttttttgttt

SEQ ID NO: 193010 - DNA, 259 bp, Homo sapiens
aggcatattggcttattttgaatgagaggtttttatcctctccttctttcgcatctgtttcagcctgctaattttgcattgtcttagctgtccactggatccttagcccaggagcaggcattacagtgtgccttctctattgttatgacactgaagataggagattcagacattgaccccatgaatggcatagctcagttcttggtcatgaggccacatatttgatttttggttcccaaattccatagcttcttttaaa

SEQ ID NO: 193011 - DNA, 565 bp, Homo sapiens
attagctaagttcatatattttatttgatgataccaaatttttatcctgagctactcagtctaaatatattccctttttcttctcaagcatcagatcgaaccttaagatgattaaggaatattcttttcccttaatatttagaaaacagtagtgggcccacagtgacttactaagtgtacatgaaacaaaaatagtcaaggagggagcaccatatttagcaatacaaattatgcctttttatgactgaaaaaataatctccctcaacaatgggcctaatactggaagacatgagcagaaaaaccttactaccctgggtcccagcccttagcaaggctgctctaaacacagggaaaaaggatgcattcaagagttatgacaaccctagcacattcaatatgagtaaatcaaagatgttaggtcaactgacactctggaacacacaatgctttcatcaaccaaattacagagatgtaaagagctgatgcaatcaagttagctgaaagccttgttgccttttcaggttccagaactcatccttcaaggtcccctttgcttccttcttt

SEQ ID NO: 193012 - DNA, 135 bp, Homo sapiens
gtggtgatgacgctgagacgtgtggtgatgacgctgggatgtgtggtgatgacgctgagatgtgtggtgatggcatcactgagatgtgtggtgatgacgctgggatgtgtggtgatgacgctgggatgtgtggtg

SEQ ID NO: 193013 - DNA, 511 bp, Homo sapiens
attgtcttttatctgccagtgtactgggttgaatactgtcccctcaaaattcatgtccactggaacctcagaatgtgatcttatttggaaataaggtttctgtacagttaagataaggttacggaccttaagagaaggttaggactcaccctaatccacagtgaccttatcttaacttgattcgggtgggtcccaatccaatgaccagtgccttataagaaatttggacatggacacacagagaggggtcgggtgcagtgactcacacctgtaatcccagcactttgggaggccaaggcaagcagatcacttgaggtcaggagttcaagaccagcctgaccaacatggtgaaactctatctctactaaaaatacaaaaattaagcgggtgtggtcgcgggcgcctgtaatcccaccttctcgggaggccgaggcacgagaattgtttgaacctaggggcagaggttgcaataagctgagactgcaccactgcactccagcctagatgacag

SEQ ID NO: 193014 - DNA, 499 bp, Homo sapiens
tgcttttctgacaagattaactagaacatctagcaaatctaattaaggaaaagtgagtggaaatccataaacatcactgatgagtaagaaaatggatagaaccacaaaagttataaaatttttttcagactttaacagaatactgtatatagatcttaccaaaaaaaaattaaaaatgataaacacagagcagacagaaacacagactgaaagagggatatgaaaggagaaagattggaagacagagagaggggtaggtgcaggcacactcaggttgccatactgttaaaatggtctaatggtataaaagtagaaacagctgcggcttttttttttaagccagcaaaatcttgatactttgagaagggaagactataactagaaaactgcagaacagtcttcagtttaacacagtaattaacatacagaagtgcttgaataaaaactgcccgataaaattggtaaacatttttaaaataatagtatttggatgttggtg

SEQ ID NO: 193015 - DNA, 236 bp, Homo sapiens
tctggattttctattatttctgcatttttgccgttttgattgttatgttgttttctctccagtattgtttgttgtcacagagttctgtctcacctggaaagtgagaatgaacagtgggttgcagctgtagaacctcttgccttggcaatgtgggctatggcaagaaggttcccgacccctaagcatcgtggttagggcaggcgctccggagacagacgactgtgggtttgaattgc

SEQ ID NO: 193016 - DNA, 476 bp, Homo sapiens
attactaactttaaaaaattggttgacataggctttttcagaaactcaactaatccccagccagggccacgaggataagaaacagacccagccctgatggagtgtgtctcatcacaggcaacagacaagtgggcagatgcaacgtgacaaatggcacttcacagctcacaaaagggcttctggaggagactcgagtctcctagaaagatggaccgtgtagagggagggacaggaacagtgaacacagcaacctggcaaaggccaggagtcaggagggaagctgacatcggaatgaggcctccacgctgcaccaagaaacttggatttggaggtaaagacaacagcaggaagcctgcgaaggacgtcctaggcagaggcaccatcactgcacaagtgacgaacatgctggaggggacaacatgagaggaagaccgctgttatctggagggagatgcaagcagctgaatgcaatgcag

SEQ ID NO: 193017 - DNA, 296 bp, Homo sapiens
gaaagaacagttgcagtggttagatgataactgtgttcaagaggactttcatcctcttgaagtcctgtttggctcgtaggccgcacacccccgttcctgtgttcacatctgtgacgatgttaatgctgttcactgcaccatgcctgaagtctcaactctgagcatgcctgtgctgtcctttgtggctcttccttggttaggtctccctcacagttcttctgagatatgcaacccacagactctggtgttttttcactgtcagatgcactgcatcctcacttctcttcccagtcata

SEQ ID NO: 193018 - DNA, 447 bp, Homo sapiens
actttgggaggccaagggagacagattgcttgggtccaggagtttgagaccagcctgggcaacatagcaaaatcccgtctttactaaaaatacaaaaaattagcagttgtggtggccggcgcctgtaaccccagctactcgggaggctgaggtgggagaatcacctgagcctgggaggcgaaggctatagtgagtcaagattgcaccactgcactccagcctgggtgtcagagggagatcctgtttcaatttaaaaaaattatatgccaacacttgtatgcatctgtatatacctatgtatgtatttatgggaagaggtaatagctttataaacaaaactcgaagaagttgtgagccctaagttaagatccactgctctacttccaatgctctcttctttttttttttcctttaaattgtggtaaaatatatataacataaaatttg

SEQ ID NO: 193019 - DNA, 462 bp, Homo sapiens
agctcaatctctcactgaattatggttatctgtcaccactgtatctgcctatcagtgattagggagagctctctctggagaaaaatgtcacctagagcatcaacaattttcatacacagtatccagcattcacttgaacgttaccaagcatacaaggaaacagaaacgagaaaaaagagacaacatatccacatatccacagtgacccagttactagttactgaagatgatctttaaaatagctgtaattcggccgggcgcagtggctcacgcctgtaatcccagcactttgggaggccgaggctgaggtcaggagttcgagaccagcctagccaacatggtgaaatcccgtctctaaaaatacaaaaattagctgggcgtggtggggcgtgcctgtaatcccagctacttgggaggctgaggcaggagaatcacttgaacctaggaagcagaggttgcagt

SEQ ID NO: 193020 - DNA, 674 bp, Homo sapiens
tgaaaaaacacaggtctcagacttactaaattaagatttcaaaacagctgtcttaaatatgcttaaagggctaaaggaaaacacagacaaggaaataaaggaaatcaagaaaacaatatataaacaaataagaatatcaacaaagagattggaattgtaaagagaaccaaatagaaattctggagctgaaaaatagagtaacctaacagaaaaattgactagaaggatacaaaagcagacttgaaaaggcagaagaaggaattagcaaacttgaagataagtccattgaaactatcgagttaaggagcaaaagataagagtgagaaaaagtaaacagagcctaaaagacaccatgcaccaaacacatatacattattgaaatctccagacaaaagaaagagaaaagggcagaaaaattatttgaagacgtagtggccaaaaacttcccaagttggaggaaagatgtaaatatacaaatccaaaaagttctgtgaatccatgttggttaaacccaaagttacccatagtacattcatgcataattatgtagcatttgaagataaaaaattttgaatgccttttataatagcatccaaatacatagggatacatttaacaaaagtgtgtaagaagactataatgaaaactaaaactttgcagagaaaaataaaact

SEQ ID NO: 193021 - DNA, 450 bp, Homo sapiens
atcaggtctcatctggagtgagcaggcatgatcctcccagcccccaaaaacccctggccgggcgcagtgtttattttccaacctagacaccagatggcagcagtacccggttcaaaatccaacaacaacacagtggggtacacgcagctcaactgacgacttttaatccagttccagtagtctacgcccgtccccacggtccaaccaactccagcagatgggacctacaccttcgatcacactgtctcatcctgccgggaaaccccactcccagtaggtcccacagtcccccacaaaaacaccaaccaaagtagcacctccacccccaggtgccaatggagggagcgccccaaacgtggcagctatgaaatcaaagggggacattttaaatgcaacgaggggctggagacagaacagagaaagagacgagggtcggtggacccctcgggg

SEQ ID NO: 193022 - DNA, 205 bp, Homo sapiens
gtgatctaacgtccccttagattttgagcatcaccatgcccggctaattttcgtgttttttgtagagacgggattttgccttgttgcccaggctggtctcgaactccggcactcaggtgatctgcccacccctgctccccaaataacgtattttaaaacatacagattataactgctttacaataggtgatgctcaatttttttg

SEQ ID NO: 193023 - DNA, 358 bp, Homo sapiens
tgaggatcccctctccacactgttatataacatcatgtatatacttaatgcctcagaatagtccacttaaaatggtcaaaatgataatatgttttatgacaataaaaatggatataaaaagaagggagcaattaaaagttattattggctacttcttctctggtgtttgtttcagttcataaattagttttctaacccaaattcatacttgtgtagtaaatttacaatttataataaaatatttagtaaaacttagttctcatattaggaatgggtatattgaattaagggcaataattcctttattgtaatgtctgtgagctcacaagtttccaaaattccagttatgccccaactg

SEQ ID NO: 193024 - DNA, 239 bp, Homo sapiens
tttttcattttgccggcaaatatctgtaactaatttttttaaagatagggtgggtgcttggatgctacttctttcatgattgaaaatatctttattttgccctagcatttgaatgctgctttaggtaggtaataaatttcttcatttacagtctttttcccttacaactctgaggagactatgtctttttttttttttttttttagccatttggtgttatagatgagaaatctgattct

SEQ ID NO: 193025 - DNA, 592 bp, Homo sapiens
  misc_feature (9)..(9): n is a, c, g, or t
  misc_feature (18)..(19): n is a, c, g, or t
  misc_feature (27)..(27): n is a, c, g, or t
  misc_feature (36)..(36): n is a, c, g, or t
tatagctgnctctagagnntacaaccncgagacgancttaatgaaaatgatactataggtctgcctttataagagccatattaagggagaaaagcgtacatatatttataaagtgataattttaatgttatcttaaatattgacttaatatcaattttacatataaaaaacatgcatgtattcatgaaacaagtctttaggatagatactaatgtgttaacagaggtcatttctttatggtggggttgtggtatttagatctgtctttatggctttgttttatgttttggtttgttttgtaatgaataagacatctataattagagtaaatacaataaagtgttaaaagggtaagaaggtaccattggtcttgtacatatattttgtacttattgattgctgtgtcttaaaaattattgtgaaaattttcaaacttatagaaaatttcaatttcagtaatacaatgaacaacgaacaacacacttgttcacctagcttcacccattgttgcagacattgttacacttatccctaaatacttgagcatgtatctcctaaaaactaggacattttcttatgtaagtacaatata

SEQ ID NO: 193026 - DNA, 617 bp, Homo sapiens
catcaaataaactgaccaatatatctcatggcgtgctttatctgtataaacgtacctaacattttccaaatgtgcttttcacatctaatattcatttatttgcatggtggaaaaatgggttgtttgaatcaggtatctatttttatagaattagattagggtgaagtacacttaacatttaaagcacatttaaattttaaaatgcctgagaattgtcatgaggagtcttggaattattagacttttcttgatgggtttgttgttacttattggtaatgagagagacatattctgattgaggttctagtacagctgctacaatcagtttcttctctttgccttcagtagcataattgtggaggtgaaaaatcagaaggggtagttcaaaaagtagttttcatgttaaacagccattttaaattggagtcacgtaattttccagtgtcttatgattatagctatctagattggctgaccctcagaaactgtgatgaggttaatattagtggttttaggccactagattttgaggtaatctcttatgcagcaatagataactaatacaatgttgatacaattggggctgtatttttggttgatggtaaaatattttgagt

SEQ ID NO: 193027 - DNA, 409 bp, Homo sapiens
cacgtatataccacttcaatttgatgatgcagtgctgctggtgcatgacccacttgatggctagatgggtcagaaagtacccagttcatgatacgcagttcaggtcgcatcgtgacttgatgacccatggtcaaatgttcagtttccaccaaagcccagtaacaagccaagagctgtctctcaaaaggagagtagttacctgcagattatggcagggccttgctccaaaatcctagatgcctccactgtgattcacctatgggggcctgccaaaggctccaaacagcatccccgtctgccactgacacctcaaataccattgaatctgctaggtcatatggaccaagtggcagagcagcttgtacagcagcctggacctgtgtccgttctggaccccactcaaaactgg

SEQ ID NO: 193028 - DNA, 185 bp, Homo sapiens
ataaaattcctagcctaggccctatttatctttgcatcccaaagatctgtaatcttacatatcttaattaaaaagtggttaaaaaaaaaaaaaagacccagcatattaacaatgtatgagtatctacaacaatgtagaatctaattagaagtatgaccttatatatttcctgaaataattgtgct

SEQ ID NO: 193029 - DNA, 299 bp, Homo sapiens
tctagtggggacaccgaccactaaataccaaaatggtcttctacgtctcttatgtgcctattgtttcctatcttatgattatttacattcattctattgccttctcagagggtgtaatgtaagttctctgagagcagggaacaattcactgtaatattcactagtaccaggcacacactatgggcttaaatcgtagaagaatcagtccaagttaaaaggacctttttgtataagcttcagtcatcatagctataagctgaaatcctctagatagttatcacaaaatctcactttacatt

SEQ ID NO: 193030 - DNA, 275 bp, Homo sapiens
tgtatccgagcactttgggaggcagaggcgagaggatcacttgagcccagaagttggaggctgcagtgagctatgataacaccactgcactccagcctgggcaatagagcaagacccccttctccgaaaaaagacagagagagagagaaagagaaacctgaaggagataagagaacactcaccgtgtatacctgagggaagagaaatccctgaagaaggaagagccagtgcaaaggccctgaggctggattgtgctgggtggccgatttggctgc

SEQ ID NO: 193031 - DNA, 210 bp, Homo sapiens
aactgctggctacatggatggagagcccctctccagctctaatactctctgtgttccatgcctctgggttatcagcaagaagcccagctgctcggcccataactcagatcagttagcatataaactccagaaaataattgccctcttaattgctactgataccatgtcttgaaccaggctttgttcaaggtgggatacaggtgggacaca

SEQ ID NO: 193032 - DNA, 404 bp, Homo sapiens
ccctccttttaacagcaatgagattcagggttaccatggccttactcatcttcccattgtaaatatatcacaatgtcacaagagcctctgtgtccaaacacactaaactgggtttacaagcattagaatctttcactcatattgtgaatctcaattctgccagtcacctagtctgtgtatctgttcccaaactggaaaaaataattcttgagagaataattttcagaataatggaggtggaaagaaatgaacagttaagcaatttttcaacatagacaaaaccactggaccattgatagccctcaagctctgattcttcctcctgactaagtttcttttctttggggggctttcaacatctgaattttccagatgattgcggaaccatcgtcactaaaccaaag

SEQ ID NO: 193033 - DNA, 308 bp, Homo sapiens
gaggactggcttctctgccgcctccccgacagacggttctgttgccaagattctggagttttgccagctggatgggaaatcagtggagctcattaaggctcagtttacattttctcttattctgagtgaagctgagcctctttccttatgtttaagagctatttatattttcttcctgtgatacaatctctgttcatatcacttgcttactattgttgcactttctagaactactgaccttttctcttactgattttttttttttttttgaggctgagtctttctctgttgtacaggctgcagtgtag

SEQ ID NO: 193034 - DNA, 129 bp, Homo sapiens
gacagaaggaaaatggggaagcagcggaagaaagaaaaaaacgcacaaacaggcactagatagatacagcaaagcccagaatgtactaaaaaccacttgttaacagctgacatgcactcacaagctgtg

SEQ ID NO: 193035 - DNA, 349 bp, Homo sapiens
tggtggaggatataagtataaaataattacctaagtacaaaaataaaggtacatgaaattgttgtaggatcatggcacaaggaatcagagcctgtattctacatatattcattagatgtatatgtgccaggaactgttctgggctttaagagataaagaaaataaagtttctgctctacattccaactgagagagaaaaatgctgaggaagaaataagtaatatgagaaatggtgacaactgcaatggagaacaataagcagagtgagaaggaaaggaagagggaaaggcagggctgtttttctgaagtggtcagggaaggcctctctaacaggtgacatgtgcacagc

SEQ ID NO: 193036 - DNA, 554 bp, Homo sapiens
taatatttcttcctcaaatatttgaaagaattcctgggcctggcgttttctttgtgcaaagtattttaacatgaatttaatttctttaatacagattttctatttcttctttattggttttggcacactgctttttcagtaatttgtccattcatctaaatttttaaatttattgatataaagttgctcataagatagtcttactctttaaataaatgtctttaggttttttgatattcataatttgtacttccttttcttttttgctttatcagtcttaagtactttatcaacagtatttggcattttaaggaaattaagtttggctttatcattaataattttctgtattgtgtgtttgttttctgttccattaatttacgttctttatatttacttctactttcttttgggatttgctgttttttaaatctttcttatttcctgagctatatacttttctgatatatacatgtaaagttacacatttccttgtaagcatggccctagctgcattttacatttttctcttttatcacattttcaattacatt

SEQ ID NO: 193037 - DNA, 484 bp, Homo sapiens
gccacgctgacaacgttgattgctgcctgctgagaccctgagcagagaacccagagagcccacccagactcttgaactccatcactaggacagagtaaacgggcgttggtttaagctgctaagtgtgtggcagttcatcacacagcaacagaaaactaaattggcaagcagtttatcttgtgctgcgttctgactcctcagaataacttcctctaagagaaaatccccacaggctgggcttctggcccagcagcgtggctggtttgactcactgcagcgtcctctgtggacacatggcaggagtccttcggtccatgagagggagctaaacaagaggctgcccttccagaggtggaagctgcagggcgttcagccacaaagggttagaaagttcctctctctctcaggctggagatccatttgatggtgccacaaagcaagagtccaccaaaataaggaggcctaacatgtcctggccagaggc

SEQ ID NO: 193038 - DNA, 350 bp, Homo sapiens
aggaatggcaagtacaaaggctctggggcaggagagtgcctggtatattggaagcacagcaaggaggccagtgtgtttagagcaaaaggtacaggcagagatgagatgagattagataagtaacaggataccagaccattggtttagtacttttcaatactgtcagccctatcacctacattttcactacaaacatgctacagtattccttatactatctgaaatgaaatgcatacatagtataacctacctatgcttacataattaagtatataaagaagaaataacaaattttagatgaaattatatccagtacgtaaatggccctaacaatactagaagacctaaag

SEQ ID NO: 193039 - DNA, 447 bp, Homo sapiens
gtacatgcacacagctttctggatgacatgagtgtaatcttagtagggtctactttacctatcactttccctgaatctccctgataaatttctggctggtctgccattttgttgctttctgcaacactagctttgccagactgttagcaaatgagacctctatcattttaaacaatatgcctgggcatggattttttttttcccaagccctgcttttaataaagtcagctctctttgacaggacaacagatctaccagtgctcatggcttaccctgcccgcccagggaagaacctgagggaccacagagctggggaatgggagcagctcctgactaaaatgacacagactgtcactgatcttactgagattcaatagcttccatgaggccttaaatgggtgttgttcgttgttgttgttgtttttgagacagagttttgttctgttg

SEQ ID NO: 193040 - DNA, 442 bp, Homo sapiens
ttgtggaacatattttagagtataaaagctgttagacaggtcacatacacagacacagtccatgccagaatacagagaatatagcataatgaatgacacgtatatacttttaaagttatcttctcacatacaatgtaagcagtttatgaagcaaaggtgagctttaatgccaaatagtagcataatgctagctgaaggagtaggaggaatatacagtcatgcattgcttaacagtggggatgcattctgagagatacgttattaggccatttcatcattgtgcaaacatcagagtatcatcaaaactaggtagtatagcttactacacacctagcctacatggtacaacctgttacttataggctacaaacctgtacagtgtattatggtactgaatactgtaggcagttgtaacacaatggtgtaagtgtaactaagctgc

SEQ ID NO: 193041 - DNA, 571 bp, Homo sapiens
cctttgtctcttcgatactcactttacagtacaagtgaatcgacgtggaaagcttcataatgccagtgagggcataacctcgtgtcacagaggtggacatattagagattaggacactttctaaaatatccaacacttcatcctctgttacctgaataggctcttcctcttcacactggccagatactagaagatcaccatattcacctatacaccatgcagccacttgtaccagaggttgttgagaataatcaccaagaattgctatgttgcgactttggaatgcagtggctatgcacaggtgtgattgtggctcactgaagccccaaactcctgggctcaattatcttttttttttttagacggagtctcgcgctactggcaggctggagtgcagtggcacaatctcggctcactgcaacctccacctcccggattcaagcagttctcctgcctcagcctcccgagtagctgggactacaggtgcgtgccaccacagcagctaatttttgtatttttagtagaggcagggtttcaccatgttggccaggatggtcttgatctcttgact
